United States Patent Application Publication US 2015/0052636 A1 - sequence listing, part 3

SEQ ID NO: 7431 - DNA, 476 bp, Zea mays
  Intron number 1 from transcript GRMZM2G423486_T01 (locus G RMZM2G423486) derived from phytozome v7.0 (chr-ID 10; pos 109313142 to 109313617 reverse strand)
gaaggcggcaaggtcgccctcaaggtcaagtactcgttgctcatcgcagtgcaagaggaccctgaaggacactacgctttgaggcctccattgccatcgtccacgcctcaactctgtctgtctgttgtgttgccgcggtgtaaagttcagttgtgggcaactacgttgtacagaatacagtgtgcccagaggctgatgttttttggtttgttcacttagttcttgcaaatctaggaacagtttaggtttagatataatacagagaaattacctgattcgattgagcattcaatacatgagaaattagtgctggctgcatctgcaatttcatcaaaatttggcacggtcctgcaacagatgattttctttcgcaggtatgggctgcataagacatccacaaagcaaaatagaagaaacaacatctttgctttgtaagtttaggtacacattgtcctccccatcgtccaggtacatca

SEQ ID NO: 7432 - DNA, 656 bp, Zea mays
  Intron number 2 from transcript GRMZM2G179317_T01 (locus G RMZM2G179317) derived from phytozome v7.0 (chr-ID 1; pos 1 55637130 to 155637785)
tggttgtggtctcagtttggtttgtaggttaatttgtatactcatgtgattttagtttttccgtgtattttatgttcatttagtatgtcttaatttagttactttcaattcttgatgctaataatatggatagattgcgacactactttctggcttgagcagaaatgagtttgttgtatatagcagaatatagttgtcgtagctggcaacaatgaccgctctttggatgatctgaaaactattctgtagtcaggtagttaaatatagctgaatatacattattatgttttattaatcttatttgttttttctatcaaaagaacacacctctccatctttcggtgcttggtggatcaccgtctaaacgatccaccaccagaaccgcccaaccccaagataggtatgtgcaggttcaactactcatttagatattggtacaacctgtaatagactttggtacaataggatttggaaaatgaatatcattttaagtccaaaaatgtttttgttgaatgttcattaagctatagtgaagagtaaacttagcatttcttttctatatctctccctcgtgctcatgtcgctgcagtctcctccatccaacctttcctacgcaggcagctccatctcagtcgttgtacccgttcaattcacac

SEQ ID NO: 7433 - DNA, 922 bp, Zea mays
  Intron number 1 from transcript GRMZM2G159002_T01 (locus G RMZM2G159002) derived from phytozome v7.0 (chr-ID 10; pos 66542991 to 66543912)
ttctggcacgagatctccaccagcgtctcctccatgtaagtcccctcctcctcgcgcccttccccgctcctccagcggccccctccactcccgcccggccgacccctcaatttgcccgctctaccgccgccacagccgacggcaggtgctgcatcgccccatcgccgcgcgtttccattagtttcggtgaatttctgttagcctaggttcgattcgggctcgcctgcagaggtccggctagatggcggcggcgccgccgcgtcgagttccattcagagggaaccctgtgtccgatctgttgggatggaggttttgggagggttaatgtgctaccgttggtaactggaaacctagaatttttagaatttagagcttgtcatgacatgtcctccaatttatggacactgtttgctgaaaaatttgaactttgttgctaagtttctagattgtttaaggcaacaaatcccgaacttctatattcgggttgtcatgatagggtatgaatcaaatgtggtaactttgttctttaaaataaaaacttgtaacctgtgacaaagtaatactgattatgtgtttatactgtttaatgtctctcttaatgtcggaactgcccttagcttattggttgctcctcagttcaatagaagctatccagtcatagcggagaaatgagtaaatgctatatgagaattggtgtttatttcctgggagttgcattcattttagaaggatccgtatgaataccaagattcttcatgactgatgcaattgatgtgcatgtggcaatatattttgtctctttattatcctggtcactggttgtaaaaagttttgacaatcagtttgtgcttaggtgctttgctttgtcctgtattcctatttcctcacaatttgttccctgctgcttgcagtgagagtttgt

SEQ ID NO: 7434 - DNA, 692 bp, Zea mays
  Intron number 1 from transcript GRMZM2G300672_T01 (locus G RMZM2G300672) derived from phytozome v7.0 (chr-ID 5; pos 9 9699219 to 99699910 reverse strand)
tgcaacacattaatttggttctagttgacgaacaggtactacactaaatgtttccaaaattagtggcattattcaggccatttgcacatatactaatactagctgacgagtgcgtatactaaactaaataatctgctttaaacaaaactacatgaaaacaatgtaattcttatatatgttttccatatcatggccattattcagagcatttgcacgtaaactacaacttatacacttaaacaacacgctattctcgtggagaacatttgcatgttgtttattcagaacatttttaatacattagatgattgaataaatttctctgtgcatttaagctatctcttcaatgattgattaaatagttagatcaaatatttttaaatttaaaacaacattatcactttcccatgcagcaacatgccatgatgctaaatatgcgattgtactccacaatgatacgatgatgaatataaacctcataatatttatacatacaatatcacttacatctctcataatcttcttcgtaaatttaggccacttcctcattgattttatatataattaagctcgacgcgtttcaaaataagcagccacaatacttacttgacatgcaatttcatgtcatctattcgtattatcttactatgatgacagggtacgcccattcacgctgagattgcagcggctct

SEQ ID NO: 7435 - DNA, 570 bp, Zea mays
  Intron number 1 from transcript GRMZM5G878573_T01 (locus G RMZM5G878573) derived from phytozome v7.0 (chr-ID 10; pos 131886933 to 131887502 reverse strand)
gcctcgcctttagtggtaaaacccccgaacccagagtgctttcgtcattactaattaggttgtttctctgcgttctcttcctcgtcgatttagtttctgttcatcaccactgccctgtactgagattgaatctacagattagatctatgcagaatagtatccacaactcgcttttataggattacactgacttgttacgaaatagatttcaaatatccaaatatgaaataattggaaatttgccacgttgccttctataattgcctatgagtctatgaattatgggttcgtcaaaagtctacgaattgttgtctgatcgcaattctgcaaaggggagcgataaacatggcgatctgaaatgtacatggtggatctttcagaggttaattccgacggtgggcaagattgcgaatactttttttagcaattacattgcatgataaatgctgcaaatttttcttgttactttttgaattgtgaaatatcaaacagaccaatataaaattttattagcatcaattcatcacaaattccaattgaacaggtgggtttggcagttacctgtttggt

SEQ ID NO: 7436 - DNA, 887 bp, Zea mays
  Intron number 3 from transcript GRMZM2G095043_T01 (locus G RMZM2G095043) derived from phytozome v7.0 (chr-ID 1; pos 4 7131135 to 47132021)
cattggaagtggaaggtcagcgattgccaccctgggtaagttggtgtttaagctcttcttttatttcaattcaagtgataggggaaatacatattcagttatagcttatagaaatcaacaaaaccacaattgagtacagaaattagccctgtttactggttgggtcaaaaccagttcacccacaaaccaatccacagatcaaatcagggtaacggtttgcaatgggtttactgagtacaaaaattaaccctgttcactgggtgggtcaaaccggttcaccccacaaaccaatccacagatcaaatcagggtaacggtttgcaatgggtttactcgttccagagtcaaaaaccgcatccttggaagagggttggctctctctttagaataaatcaaactggctaacccatccttggtcatcttcaacctttggactgctacacaggaacactatgccaaactgctgctgccgctgccgctaagaagactgctgttgctacacaaataactaagttcttgcagcggatggcggttcatcattgtctaaacctctggcccaacccaaatcaacccataatggtaaccagtatctaatttgtgtaaaccaaagccaattcagtcaaaaccgctagctgcaggctggtttcccaaacctgcctaaaccatggttgaacagccctaatgactatacaccataccaacgagtaacattaaaaatggctatacatgttgtgaaagcatactcttattgtatctttggccctggccctgtccctgtttgatttttttctgcttaggttaatctctaaaagcttcatgaaattatgctcacttacattggagtacatgttgtgtttaggggtgtgacagctgtagaatactcgaaac

SEQ ID NO: 7437 - DNA, 701 bp, Zea mays
  Intron number 2 from transcript GRMZM5G804247_T01 (locus G RMZM5G804247) derived from phytozome v7.0 (chr-ID 10; pos 33275747 to 33276447 reverse strand)
attggttttgcggttgctcatcatttgaattctgagtatgccactttctagtcgatgtcgattagaaccaatcatatatgatttagcataatatgtcttggaacactactgaatttttatatgctacatatgctatggtgaaagtacggtagcaaactttatcccaaacattgttgagtgtgcactgtaagcaattgaagtagtacacggtataaagtgcgagctgaatacaatcttcttggctcatgggttcctttatcatgtcaattatttgattgctctttgtcatcattgcaaaacatactttgtataatatatggctttttcattttttggcatattggtgttcttttcttttaagtgtgtagatagcctaaaggtccattagtccagggtttgcacaaatgtctctgactctctgcctcacttgtatatacctcatttcttataattgagttgtacagactgaagatattttttctgtgatccaaacctgaccacttatatttttgtttgtattcttttatatcagatgtagaaacttgttcatttatttgtgatctatgtgctaaagattatgattaagataaagcatttactgcatgaaagaattaatcacttaacgtggttgtttgacttggaactgatactgattgtcacttgcagttcttccaaggcagtagaagtattggaggcatacg

SEQ ID NO: 7438 - DNA, 550 bp, Zea mays
  Intron number 2 from transcript GRMZM2G310453_T01 (locus G RMZM2G310453) derived from phytozome v7.0 (chr-ID 10; pos 84159290 to 84159839)
aaacgagttgctgtgctgagatttcgcgttctaaggtgaccccaaccgaaattcttctgacgaaccttctttttgccattgctctttttcctccttccttcctttctttctttctttctttctttctttctttctttctttgttttgcagtagtctgataagctaacttagcttgattattgcagatgttttatagtctttattttatatttattttattgcttggcaaacgaaaacagcactagctagtgactagttaacttaattgcagcatatgttttatatagtctttattttatagtctgtgataagtatgttcttaagttcttttgcatgcagtgtgtccaccatatgagtttaattgttacagaatataatataatagagcctcatcatttgtttctttaacgagattcatcattagctttgatatagttaatttgatattttataggcaaatcaaagagcagttttttttaaaaaaaaaatccccactttgatgtacaaacattctcctgaattttacagcggaagaacagtacaggcggtg

SEQ ID NO: 7439 - DNA, 803 bp, Zea mays
  Intron number 2 from transcript GRMZM2G388576_T01 (locus G RMZM2G388576) derived from phytozome v7.0 (chr-ID 5; pos 1 8821729 to 18822531)
agtcatcggatctgctcgtcggatctccaagcacggtcagcatcccttacgatcccttatctacttttcatctcctccaagcactatcaaacaaagaaattagtggattggaagccgccatcacgtagaagccattagatctggggcctgcgctgttcagcacatgctagttgcgcggggtccggaagccatcagatctaggggtgttgcgctggtcgacaccatcccctgctcccaccacgaagtcatcgtcgccatcagtgacttccaattttttttcaacggaagaagctgtatggatgtagttggaagctacgagatggatgctgcccctgtttgtctcgttgcttcatatcccacttgtgacagaaacttgctctaggatagtgcagccaagattggagttctagttagaatatttcctgctgctacctgttatctgctagtcacgtcctcctcctgctaccctgttgatggtgcctgtctgcagctgctaaaataactagcttagtgatgagcagtacctaaaacaactaaagtatgtatagttaaaggcaagtagtacttgaattaatgctactaccgaatgggatttataacttcctaagttatatgttatgcattagtagtgttctcaaatttctacggttgtgcatatctccccatggacatctcaaatattttatctaaatcctcacaaaatcaagtgcattaaaataagacagataagtgtgtaaggctccaaatattttatcttttggttctcaggtccatttgcaagtaagagactttcatttggtact

SEQ ID NO: 7440 - DNA, 956 bp, Zea mays
  Intron number 1 from transcript GRMZM2G029936_T01 (locus G RMZM2G029936) derived from phytozome v7.0 (chr-ID 1; pos 1 54138549 to 154139504 reverse strand)
gggaccgagcctcggtgcgcacgactcacggtgagaaaccctccgctaaatcctcttctacaaactcgcttcaaccttcgctaggcgtagcaccgataggatcaaggaatcgtagctcaggtcgggtgctgggcgctgcggcaatggcgccgccgtggtcagcgcaggtaccgggcgccgctgcccagttttcccacgagagatagaagaaggtgtactgatcgtggatgacgaaatcgaaggtgtggattacatcctgggcgtagagttttatcgcccaatctgatccgttgatccagccgcggatggctgtgattaaaatggctgaaaccctttcgattatgtggtttttgggccctcggattaagatctggcggctggggtttacccgtaccccttcaccatgcgctatttgcaaataaacccttgctgttctgtagaataaagccgccgtccacttaagagttagtctgagtcttgggcgaaattgcgagttagcccctgatctcttaagaaatattgtgcacagtccagaaccgctaggaaattcagaatttaataaagaaaataggtttttagtataaaaataaatccataaacttgtttaattcatatttaattcattctaactccgttttgatctattctagttgcattagtctcacaataatatttattatcatctggtgactttgttttgtcatgaaatataggttaaaatgttgcacttaatctattctatatttaaccacgtggattttcgaaaaaccataacttcatgaccctaaccccgaatttagcgattcttgaacccacgatcttgtagcgacgcgtagattactatcattcagtttattcttatgtatggtgggatgttaattttgtctataccatgtttgtttgtattgctacgattagcagtgaggtcacgagaatctgaagatcatcctggtacc

SEQ ID NO: 7441 - DNA, 425 bp, Zea mays
  Intron number 1 from transcript GRMZM2G317705_T01 (locus G RMZM2G317705) derived from phytozome v7.0 (chr-ID 5; pos 5 5135334 to 55135758 reverse strand)
ctcgcgccgacccatctgggctggggcacgcgacggcaattcactcgtcggtccaggtaccccccggtctcgaaacgccgacaacgctgttttgcgtacaaacgaattctgcaagagcatttgtattccgggaaataattagcaatccgataatccgtgtttaatcaaaacgccataaaaaaatggaaataaattatcgcggcccggtttagtgtttgggtcagcccaacccagcccatttgacccatttgaaaccctaaccctaggttttcttctaaaaataggagctctctcccttgcaaattggaaaaatttgcatctacccccctagccgccacaaccttcttcctcctctcccccacacgtacagccttcttccttctctgttcctagcgcagcgcagggagctcggctcccttcctccc

SEQ ID NO: 7442 - DNA, 720 bp, Zea mays
  Intron number 1 from transcript GRMZM2G024211_T01 (locus G RMZM2G024211) derived from phytozome v7.0 (chr-ID 5; pos 2 03173585 to 203174304)
gccgcgcggcatcctcctcgtcggatcctcagctggtagactccattttttcgcctctccccaatgaggcgaaaccctgtcgcgacccgtacctttttttttcagttcatgaagcgtgaaaccgtcgcacagtcagactgctgcggtaatcaagtcaaaatgatcgaacagtttcgcttttctgaagctctctttggtcaaatttaattgtacaaattacaattctctccgcagtcattcgggcctgtaagcaaatagtagctgttgatgtatgtgttgaatacaaataggaagctcagacgtttgtcctcatggaatttctgcgtttcagtctgtacactccaaatttgtatctgtaatcagcagatgggcattgatatttcatctagttttatttagggacctaaatttctgtcagatatccttaagaaaatatagtggcaaaaggtttattgttaagtaatctacacagctttcagcaaaccctcccagaaatgcaaagtagttttggatgtctgcttcctgtatggctgcaattgtcagtgagctagttgaggaagatgaagtttgtttagtttgcatcgaagaattaagatgtggtattctgcatacaagtcttctcctgtctttatgaagctgatgtgttgtgtttaggcatgtatctaacaataattccttgatgcaggggcaccaattgccggatctgcagttgataaagtg

SEQ ID NO: 7443 - DNA, 807 bp, Zea mays
  Intron number 2 from transcript GRMZM2G133577_T01 (locus G RMZM2G133577) derived from phytozome v7.0 (chr-ID 10; pos 33981271 to 33982077)
attagaggcgaggaaaccagatcatctttaattaggtaattttaactttttatcaagttttgtggtattttaaggtgctgaattgaggtaaatattactttagtctatgtttgtagtatattatgttttagcggtatatttagccacacgatatcttaaagagctttttaaaagtggctcgaggcgacaatttatagagctccgccactgcggtcggacacgccgccacccctccttcgctggtcgccaccaccactccgccggcgattctgtcaggtaaatccaacctcttccacaccttcttggtcttgctaggatttattttctctgttttcgctccttcttcttggatggcgacgaacgtgggctggacggatggtaggagcgagcgcggcagcttgtatttcggggtttggggacgacggtgacgaacaagtgttgttggggcctcgggatcatggtagaactgactctggatcttctcgaacgcgtgttgttgttctagccacgctataaagcatcccgcacaacacttccctcatggtcgtctgctcgcttgccctagcatttcctagtggtgatttcctcttcttggtttctttcttttctttcttaccctcatgatctaggtagaaatccgttcgttgatttatccctacctcaacaacaaccacctctcaactattttggtttgatatccgtgtttgctgcagaaaaggacgagcactgtgaagcaaatgacataaaacgagtgatgggtagttgtgctgaatttttagtgggatattggttgaacgattggtagag

SEQ ID NO: 7444 - DNA, 968 bp, Zea mays
  Intron number 1 from transcript AC206958.3_FGT002 (locus A C206958.3_FG002) derived from phytozome v7.0 (chr-ID 1; po s 92773729 to 92774696 reverse strand)
ggtcccacaagtcagttgcaccacggacgacacaggtaatctccacgcggtgttcgctgtgtctgctcccagggtcccaccagttggcggcgttttcagtgtgggtgggtttgcgcggaagctacgcttaactgggccggcctcccggattcagcccacgcgccggttcttttctttttctttattctttttcttatttgatgttttgttttttccttttatttttgaattcccaattttgaattcaaatttttgtggcaaatttgtactcagatcaaatatgcaatttgaacataccattatggtatgaatccattatttataaattcattttttcttttctttttgcattatagtatttttccctttccttttctatactatttccaaattcgtaatttacaaattagattaatttcccatttttaggccttaatttataatcctctaatattgttagtattaaatgcacaaacacataaactccagcataatgcacaaattattttgaatgtcactagttaatcaatcaatttaaatgtggttgttcacatgcttagttaaataagaacaaggtacatgagagaattatctctaatactatgttttacaagtttaggtattacagttgccaattaactaatccagagagtagcaatctgaccgttattccttaccacacagcaagcagtatgcacaatttcaagattggtagtaattaaggtagcataaggagagacagacagcaaaatgtctttatttttcataactaatgaacacaaagcataaacggaaagtcatcgaaaaagcaagcaaggaggccaaaatgagattggttgtacttaagggcaatgttctaactggtgcattgaacaatggattgaattgtaactctgaagcaataataaaactacactaaaaaactaaaagcaggtttaccttcatttcccactggactgtttggtgaa

SEQ ID NO: 7445 - DNA, 1017 bp, Zea mays
  Intron number 1 from transcript AC203985.4_FGT001 (locus A C203985.4_FG001) derived from phytozome v7.0 (chr-ID 10; p os 79280689 to 79281705 reverse strand)
cggccgctgctccgggagcacccccaccccaccaggtccgtgctctgtcctgttcttgatctccgcggcggttctgagccgaatccgcagcttgtgctattgcttctccgatgctatttttcttttcacggtggtgtgtgtgcagtgggtttgtgccgctgcaatgggttcgttcaggggaggggtttcgggtggggaaatttttggtgacggcctgacgggtcgatagggagtttctggggcaaaaggttgtgttttcccagccctggacttggggtcgtgcgttgcgtcaggtgtgagatcatacgtgttgactgttgagagctggaaatagggtggggtcacagcacggctcccgtgattggacttgtgaaatatttgcagggacgttgggcgtccgagtgtcaagatcacctttttacctgcgtccacttggaaaacttcctccctgtccctgtgcaggtttcagagaatatgctgcttgagggagtcagagttgagacttcgggggaataatccttagtttatcggctggtatagatgcggctgggctaatattaggagttatgagcatgaattcgatgaaattttgatccgtggggcgtttagggacatgcaaatttgatcgctgtattgtctctgatccagggtcagggttgctaatgaacaagatcaacaaatgtcttgcacagttgcacctgtcaccattgaatttggctaataataaataagcagatcaatttgtctcccgaaatatgctgagatgctttggatcatttcggtgcatctttgtggtgtaatgtaaatgaaacggctgcacgaggcggcattgagattgagatcactgttttccaaccttctagagcatgattgttggttgcatactgttattacgaattaagagtagcaaccatatcatcttgtgtctccttgcgccgggcttgttatcctgatcacatctcccttggttgctttctttcaggtggtaggtaatcgttgctggttccagaagcgtcc

SEQ ID NO: 7446 - DNA, 942 bp, Zea mays
  Intron number 1 from transcript AC218152.3_FGT005 (locus A C218152.3_FG005) derived from phytozome v7.0 (chr-ID 10; p os 112877818 to 112878759)
tccaaacaccctcacacgggctttcccgtacacaggtacgttcaggttgctctatagcgacccaccgctagtccccgacgatatctatagcgaccaacaataagttgttaaatttctagacttttagcgacccaccgaccgttgctacaaaaggatttagcgactgaccgtcggcccctaacctttagcaaccaacaattggtacctaataagggtcgctaaagatcaaccgtcgtgtagtgattattttgatggctttaaggctctagaggcatgacacgtgcatttaaattttacctaatggatgtgacaatatgattaatacaaacgaggccaaagagctggaataatcattatttttcataacgctgttgtttgagatgtcttaaattacgtttgaaccaccttttaatttgaatttatttttttattcgacttgggaatattgcaatccatagagatttagtgttgatttggtgacccgggatcacgagaggattggaggggatcgagagggaatttagttcattttcctctcgatcccctccaatcccccgtgatccccttgtcgccaaatcaacccttagtatatgctataaattttggtaattcttcctgattgtataacaagttactcctgctgtttactaatgtttataaggaccactaattatttatcttggcaaatgcatagatactattgcatgttttgccgaattctaaatttggcatattctaagccatgagaacattgaatccaatatattatctaaacgacaagcataaggctatgatgtcagtgtggatgcaattttgaaaacgtgatgcaaaagggtgttatttattttgaattgccaaaaccggccaattgtggtttcttctaaaactggccaagctggtttctaaaatcggccaaggtcggttcttctatgtatgcaggtg

SEQ ID NO: 7447 - DNA, 964 bp, Zea mays
  Intron number 1 from transcript GRMZM2G113052_T01 (locus G RMZM2G113052) derived from phytozome v7.0 (chr-ID 7; pos 1 74505203 to 174506166)
ggacaggaggtgcaggtacctgctctgctctgctctacttactcccctgccaagccatggtgcccctctgaattcatcacgcactgcacttgcttgctgaaatggatcgatcgagatagtcgtttgttctttgttgcgatcagtcgtacccttttatttacggctgatccgttcttctgatccaccacgcgtctccagttttctatatgcttcatgactttctcggcctgcctgaattttttctcgctgctgctgctgctgctgctttgcgtgctggagcaggatgcaatgtggatcatctaaggctggtatctgaacatctcaggcagtgataaccgtgctatctgattaagtaattcaaagtaaaaaagaaaaaaaaacagtctggctgttctgttccaacttccaccaggagagtgtgccctgctgaataatcgctgaaccttttgttgttgctgctgctgggaaagtaatcgctggaatgaaccaaaagacgaaaatgacgtgaacaaactctagacacaagcttggaatctcacgtctcttggggtccatctgcatggaccttgcagaagcagtgaacagcatttcccagccctcaatcattcgtcttcatccctgtccctgtcagcgacagcttcgttaagggatggccgccgccggttcatcagcagcacgtttcacatgccctaggagctagtttctgtttcttcttggcgaaatagagtagagtagagtagccacgaaacatgcacccaccctgcctgtttgtgttagttgcgttgttgggtcatgcactgtgtcttgttgcctccatgataaggcagcctcgcgtcaagaaagtagaaacaaggtgtaatacattaaggattccatatgaatgtactttactgcactgcacataacgcttgatagtgatgataatgtactttgagctgcatgcaggctttcgttgagaacaagt

SEQ ID NO: 7448 - DNA, 490 bp, Zea mays
  Intron number 1 from transcript GRMZM2G300709_T01 (locus G RMZM2G300709) derived from phytozome v7.0 (chr-ID 7; pos 1 68700070 to 168700559 reverse strand)
tgcaggttggatatttggagctcgaacctgtgaattcggtgaaaatggttcagtagaagcagtaaataaactacataacaatcatcctgtatcaattagcttggcaaccgtgctccttgaaaatattgatggccttgacgacgatcaagtaatcctcatattatgctagcttgaccgtgcgcatcatcaattctactaataatggtgtcaccgtctttgaagaaaataaaatgaagaataatcaataatcatgtctaaccatcatgtaaggttgatgcattttattggcttgtcaagcgcgttgaattctatcattccattttttagtgattctgcatcatgccaattgtgccttttttttctttgaatgtggcagaattcgatatgtgctcgcagatccgcaggcttctaaagctaatatggtttatgtcggacttttgatgtggtttctacaggttctgatacgaataagaccaattagtgacgctga

SEQ ID NO: 7449 - DNA, 745 bp, Zea mays
  Intron number 2 from transcript GRMZM2G043636_T01 (locus G RMZM2G043636) derived from phytozome v7.0 (chr-ID 7; pos 1 40699823 to 140700567)
gcagcatcaaccaggtattcctggagttagacaaggccttcgctggcttacattttgtcttggaagaatttattttaagaagctaaatgttcatcctaatctgatatcaatggtggcatgtgccaaactgtgatagaaacttgtggaaggaaatgtatctttcattaccaaccatctcatgtggatgagactatcgacagattcaaattcaccaccttcaggctctgcactatcaggtcaatccttggaggtgacaagatcctggtgccgaactggtcgtcccccaactgataccggtatgttctgttgtttttttcaaaaaccattaagttcaattacctttggaaaatttgtttgcatataatgacaattagaatttggccgaagagaaaatgatgcttgttactttccaactatagccataatgacatatggatgtccaattctactttggtcaaatgccttgtcactttccaattctactttggtcaaatgccttgtcactttcggacttgacagcttcagccatcagccaccttcaccacatgggttgatgatgtccaaattttgaacaagataacatatgacttctgaattttgctttatgtctaacttgaggaagacagaaattaaattggaccatatgttttatagaatatattccaaaagcttcacttctcagagctaatcaaatttgagttatcacgttttcagtagaacaattcaacagattcagatcagggtc

SEQ ID NO: 7450 - DNA, 483 bp, Zea mays
  Intron number 2 from transcript GRMZM5G866069_T01 (locus G RMZM5G866069) derived from phytozome v7.0 (chr-ID 6; pos 7 8825319 to 78825801 reverse strand)
aggtctcacggtgggttgttgaaagggtcagtcttcatgaccaatatgaagaagactggatcatcagatgtttttttatcttggcttgtaattctttgatgttcccaacaaccagtttgttcatttctggcaaggactatattgtaattgaaagtttagaggaagtaaaggattatgactggtgtcagagactctgtgatgatattgttgcaaagtttgagaagttcatgttggagagagcaaggcatgttgcaactccccacatccaaggatgtattcttttttgatggtaataacccttcagttatttttccccagaggtttagtaattctgcttttatgttgtagttttttagatgcacatgattcagtaattacattgtgtgtagatgtatatcactataaatatccagtaataacaaccagttacaaacttttaagattcagtaattttttatttgttttagatttattattaggaca

SEQ ID NO: 7451 - DNA, 647 bp, Zea mays
  Intron number 1 from transcript GRMZM2G000874_T01 (locus G RMZM2G000874) derived from phytozome v7.0 (chr-ID 7; pos 1 18521 to 119167 reverse strand)
cgctcgccggtggactttcaggtgttgctgcacaggtaaaattttgttaggcataagtaacctttttattttctcgttagatcagagccgaattaaacccattgatctacatgcaaatatagtggccacaaatgtgacttatgaatacacaatttgtaagtcaacgtcagattttgcagctaggctgtgactcgcattatcacagtgtgattagtgcgaaatttagaagttattttgggttgcgttggcaaaattttgatccaaaccatgcttgatgtatatttcgacttacgaatttattcttttgttggtctgcctattaatttgcccatgaaagcatcttagccaaaaatgagaaacactttttactgatctgtcattaaatcatcatcattctaatatttaagtagtttggtatatgataaagcaacatgcattcttttttctattccttttccttatttgggttcagttgattcatggcattgtgagctaatggcttcattgagcagcagtaacagtgatacacaaactatttcactgtctatctgtgcttctattcttcaccatatgcttccagcacatctgatattttgatcttccttaacgttgccagtcactgatagggcagccgttctgggtttcct

SEQ ID NO: 7452 - DNA, 668 bp, Zea mays
  Intron number 3 from transcript GRMZM2G022120_T03 (locus G RMZM2G022120) derived from phytozome v7.0 (chr-ID 7; pos 1 364523 to 1365190 reverse strand)
aagatagggttggtctttcaaggctatgtaagcctttgttcttctcccaaattacccatggaaattaaattattctacacccctagggtctaacatttctttttatagagaaatcactgctaagttgatacttgagtttacttgcttttcttattaaatttacttcgttttattgagggagttcagtttagactgctgcttcaatgtgaatgcaagggcttggaaggtgcattggttcctatatattgcctaaagggattaagttgttatttatcgtgttaccatatactgtggtgggattggggttcatgttcttttactggcaattttcttgatatgattatgtatatgccagagcgcaaaatgaatagaataatgtgctcttgctaccatgtgacgagtattacattttcaattagcctggcatggattactgtgacgtgagcacccaagtgtctcatcgtaatgggtgtaaccattttttaaaaaaaacataaaaatgattccatggtgtgtttttatgacttgaaagacttgtttgacttatatctttgttgcatccctttcaaatgaatatctctatttagagaactgctcaatatgcattgacatacctaggcacactgtactcatctgactcttttggtgtatcataattctatttcaga

SEQ ID NO: 7453 - DNA, 729 bp, Zea mays
  Intron number 2 from transcript AC194376.3_FGT001 (locus A C194376.3_FG001) derived from phytozome v7.0 (chr-ID 3; po s 31480926 to 31481654 reverse strand)
cgcgcgtgctgggctccccctgctgcagccagcaggtaagttagtggtgactccaggcagggctacccaatgcaatgcatgcagcttagcttcagtcagtgcagcgcagtgcaggggtgcagtgcaggctacatgtgtgtgacccggccggccagccgggaggagcgtataattgagcccggaaagcgtgggtgttggtcggcgcattttgggtcccgcctgtccaactcatatcgtatcacatgcaaactaataatcagccgttaattcaaattatacaatcagccattaaaactaactctctttacatgtattgtatctcaaaacaataattttaccttccttatgcattttttcggaagaaaaaaaactttttatccttatctttatgttagagctagcaactccaacagcttggctaaacaggttaaaaatagagattttgtacatatttttatgagaacgtatcttgtgcgcaaggagcgttggtgctcccatgagcaaaatcaatgcagaccacaccctccacatccaacggtgctgtgtcagggggttttgtaaaatgttctttgcaactctgtacattttacaaaaaaccccctgacgcagcaccgttggatgtggagggtgtggcctggattgattttgctcatgggagcagcagggctccttgctcataagatacggtgtctatttttatggtgtctgcagtgcaagatattaactcct

SEQ ID NO: 7454 - DNA, 762 bp, Zea mays
  Intron number 2 from transcript GRMZM2G091900_T01 (locus G RMZM2G091900) derived from phytozome v7.0 (chr-ID 6; pos 1 44542845 to 144543606)
ccgcccgagttctacgacgaggtatgcgcatatctttgctcttctatgaatttcgtggttagttggttgaggcatttcactgctcgggtgatagtatatggtatgtgggtatctttgctcgttcatgagttttgtggttagttcgttgatgcatttcaacgagtgggtgatatgcaagcttaatcccatctcgttaatgtgaatcagtgctaggaccaacaagcatgctgtggaacaggtaatatgaatagagtatatgctagtgttagaaacatttgcctcttgttctatagatacattgacaaatgacaattcacaagggctgcaatttgcatgatgcctcctgtcattagatatattttgaatattttttataacaaacttatttggagatacaagtgttgctaatatattctataaatctagttaaacttgagaaactttgaccggtagtccggtacgaatactataacgacaactattttgggactgagggtgtatcctcaaagtttcacgtcacctgtaatgtgatgtctgaaaactgcttacttccctaagattttatggtcgtatccatacaatgtatacactcattaaatagcaccatcgatcaaatttcatttatttgttatgtttatatgagttggcagatggcatcaatgatttccttaatttcagaagcaactgtattctcagcaaccatacaaacatacacttccacatgcaggagtggcaggcccgtcagcgggagaggactaagga

SEQ ID NO: 7455 - DNA, 268 bp, Zea mays
  Intron number 6 from transcript GRMZM2G446865_T01 (locus G RMZM2G446865) derived from phytozome v7.0 (chr-ID 3; pos 9 5872807 to 95873074 reverse strand)
aggtgtgcttttcttccttttatttattataagaaaacaagcactattcaacttctgttcacagatgattgaagtcaaaacaacttttcttcttctgaagatgaggtcactgtattgattaaggagaggaattgaaattcgtagacctaattcctaaaatgcactctaaccttagttcaccctgaatctgtttctgtcatgttttgatcttttttgcacttatgctctttgttgattcaggacaatctgaatcgaataaccaacagaa

SEQ ID NO: 7456 - DNA, 807 bp, Zea mays
  Intron number 1 from transcript GRMZM2G146708_T01 (locus G RMZM2G146708) derived from phytozome v7.0 (chr-ID 3; pos 1 5714086 to 15714892 reverse strand)
acactcctggtcccgatcgtctccctcgctgcatagtaagcgcgtgtccgtcaacatcctcccatgcttcctcttctccgttatttctgttcgctagggttttgtggtgatttcgaatagacgttgtacctttgtgggttggagtggggaacggacattgtcgcccccgttcttctgccaccatttgcagagccgatacgcaaagtcccctctcccggtcctgcaaaatagtatgcttattactggctggtttctttgttgtgcaagtcaaaatggttctttaattactcaaaattgcaacactaattattctggccaaatcctagcaccggcattgcacaagtcaatttcaaaaggtttcttcaattactcaaaaaatgcagtgttaattattctggtcagatcctagcatcggcatggcaacagctcttcaccttccggttcgattcggtcccagctgctggcctattgtcgctgctcgctcgaggggaaaaagaacatgtaggtgaaaaatgagagatcgaaaaggagcctagtcgtctgacatgaaaagcagaagtagccactctcaccgttctccttacgttaatctgtataggataagcaaatgctagaatcttatgttcaccagagaagatttgatttcactttggcgactccctcttagttcttagctaaacttgatttgtttagtaagcaccatcatagtcctatttttcattgccattaatgtacacaacaagatttgatctgttaattccacatgttgcaggccctctcgccaggtcgtttcgttgctttgaacca

SEQ ID NO: 7457 - DNA, 823 bp, Zea mays
  Intron number 4 from transcript GRMZM2G173989_T01 (locus G RMZM2G173989) derived from phytozome v7.0 (chr-ID 3; pos 2 11864406 to 211865228 reverse strand)
ccaacaagtattggattgaaaactcacagaaaagagtaagttcggtttggctctgccgctttgtcaagatacttgttaagtattttattatcactgctgtaggatgtcggttgaatagataattcatattatgtgtccctttttgtggaaaactgcaaaatcctgaactaatatgttagcctaatgtgaactgagtatgttgaatcagtggaatgaaagttccatcactaatgcttaatgctccgtttgcatgttgatattggagggcatggaattgaactgggttgaataccgaatcagccatggtattgaaatgagatgcaatttcaattctattgtttcgatgtcaccgtattgtagtttggaattgtgtggcctatatccacgaataaagaggggtgactctatattaggagagggagtttccagtcataatccaattccagggaattaggtctctgattccaaatctcatttccatgtgcaatcaaaaaacaaaatttaggaaagctgattttaattccctattccgttcaccaatatctacatccgaacgtggtcattgccacatttatcttttaccgattgactatgttattgccattttaatgattttttggttttcatatgtgaaattaatcagcatggtaggttctgatctggttccctaatattgtcttaaccgtaacgtgggagactgcggatagtgtagtctgttcctccctatttatcgtgattcagcagtgatcagtcacttattcatgttcatggtcttcttttttttacagtatataccttctgtagaagataccgttcttggtat

SEQ ID NO: 7458 - DNA, 793 bp, Zea mays
  Intron number 4 from transcript GRMZM2G114930_T01 (locus G RMZM2G114930) derived from phytozome v7.0 (chr-ID 3; pos 1 22059284 to 122060076)
ttgtgattccacgggagcagaaggctccgcaatcggtaggttttcctgaataaattgtattatcaactaatctcggtacagatagaacacggagaatattgtgtttcagcagcatttgagtttgtgcactttatatccaagttctctgtaggcgctccactcgcagtcacgttgcttggtttcagtgcacagacgttcggctgcttggttttgcagcatcagctgttaggggtgcaagtgggtatctgaattgttaggaaaaatttaatagtttaaaatagatgtatatgaaatttaatgctaatattttttatgttatcaagcacagtattacaaataataataattttttggataaatagttttatacattatttgctccctacaacaaaaaggtgaaaaaatatctgtatccgaatcttatatctatcatttgagaagacatatgataaatttgaggtttatcttttataaacctttacaaattcaatgctaaaaataagaatacaaacttatatagcagattttatattgtatatattcgcaatcaaagaaaaaagatcaaaaaattgatatccgaataaatatctattttcatccctatcagctgcggctgatggtgtaaggtgctaaacagtaaacactgtagctgcaacgctgctagaacaggcagtggagcttggatcaccttgctgtcattttggttacgacttaagcgattgtctattttgtcaacatgctttaatcttatatgctcttttccttggaaatttgcagcttgtatctgacattc

SEQ ID NO: 7459 - DNA, 459 bp, Zea mays
  Intron number 1 from transcript GRMZM2G104471_T01 (locus G RMZM2G104471) derived from phytozome v7.0 (chr-ID 6; pos 1 19116130 to 119116588)
agcatctaattatacattgtaagtattcctctttctttcccctagggtttttcggtgactttcaaaatgtgtcttctctacttgggaattacagtagcagttagtttttgaatctttgtaagtctgtgtgatagacctgcaaatatgttaggaaccaataaaaagatgtctcggcgtaaactaagcatcaactatatgcctacaactggcatgttcatataatatcttgataaaagactattgcattaccacttttatgagaacaatgagattatctggaaagtttgctttaaattatacagtttagcaacatagttgcatttcaacaggtgttacttcaaaaattgttcagtaggaaataattgactcataattcatccagaatatattggagctcattagtcatattttttaaaacaactgagtcaccgatttttctcgctaatgttgcggattagc

SEQ ID NO: 7460 - DNA, 453 bp, Zea mays
  Intron number 4 from transcript GRMZM2G062342_T03 (locus G RMZM2G062342) derived from phytozome v7.0 (chr-ID 3; pos 1 90751270 to 190751722 reverse strand)
ccaaacagacaaatctggctttcttcacctgtaaggtaatactaccatcttagtatctcagttgttgtttgtttcattttatgtattggacctctgagttagataggcatatagtttcaggaacctatcactgtgtaatggctaatgattacatgtcttccttttttgggaaggaaaaaaggcattttctggatagaagagagcggccatttgtgatatgtcgtttggtttatccagtaggctatgcgtcttatgatgtggttctgaaatttatctatacttcatttccaatcaaatagacccactgttggatatcttgtacagcaaccaaaagctcttcattgaatcgtctatacttcatttccaaccaaaagctctttattcttatatatcttatatataaaaaaatgctatctggatatgcatgcagtgggccttctaggtttgactggg

SEQ ID NO: 7461 - DNA, 596 bp, Zea mays
  Intron number 1 from transcript GRMZM2G092258_T03 (locus G RMZM2G092258) derived from phytozome v7.0 (chr-ID 6; pos 1 28203212 to 128203807 reverse strand)
ggccgcccgctcgccccagactcaacaagctggaggtaggggaatgatgaccatcacgggggaatgggaaaagaaggattgggagaagagacgtccgtggaaatctctgcaccgggcgagattttacacgtgcaaatagatgtggtgcgctgataggggggtctgttggatgactattttttattattttttcctaaattaagagttgggaatagaaggattgggatctgttggagatactcttaggaatctatcctaattaagggtattactttttttggtcagttaagtcatggttccataacatagctaatatttttctcctccaaattttcccttcactggtatcttgcatggagtaaaatctattatttttttgttggttttcacttgatttaccatcgtcatgacttgaattattttatatcattgtttaatgttgactaatgattcgttttaagctgctccaatctctagtataaacctatactgcttagtgtccttatttgttttttatgatgcagtactactttgatagtcttctaccaagaattcctctcccagtaactcgtcagattacagccaatcttgaaaag

SEQ ID NO: 7462 - DNA, 806 bp, Zea mays
  Intron number 2 from transcript GRMZM2G354604_T02 (locus G RMZM2G354604) derived from phytozome v7.0 (chr-ID 6; pos 1 65706032 to 165706837 reverse strand)
gtggaactggtgagtttccgaatggctccgtgtctccattggttgttagaaatggtagaagctgctgatgtttctacgagatctggcagattggacttgggcgctgtgtgcaatctgttgatattatgcctcttagaattatagtggctgcctcccatagtgtcctcacgacctccgtgacgtgactggaatattacacagttccactagtactgattcctaatcacgtttatgccgtagttgtttccactcaatagaattcatattcgcatatagtaatctatagaaatatattgtaccttaggatcatagagtctccttaccctctacctaatgtcgtattaacacttcaaaaaaattgtaagaacttgtatttgtatttcgcttttattatcatattctgtgttgtatcaaatccgtttgctattcaatgtaaggcctcaaatgtgatgcaatgaaactaaacttgaggcggaggttcttcatttcgtgtttcaaatattttgaatccttatagcatagaaattctgtcgtcgcacgactcttgaatggaaataacatggttgtttgttgaatactcttttgtctgttaggatgtcagttacatttatctgcaaccttcataagctagatggtttgaatttcagttgttatggcgcccttgtaggctttagattcaataatatttatattctctacatcacacctgtcctattatattctcatctgttgacctgtatgacttttatcactgatgttttcttgttgcaggtaaaactacatttgtgaagaggcatctcactgga

SEQ ID NO: 7463 - DNA, 912 bp, Zea mays
  Intron number 1 from transcript GRMZM2G016240_T01 (locus G RMZM2G016240) derived from phytozome v7.0 (chr-ID 3; pos 1 74892931 to 174893842 reverse strand)
ttggtgttgtcgagctcccgcatcgtgagtgcctcctgtgacgcgaggatagcgacgtgttagtaacaacagtgattatgaaaacagtgattatgaagggcatcgtgagtaacaacacgctagtagatatatagggtgaaccaagaactgtcaagtatgagcatgtttccagggatagccaaatgttatcaaatccttgtacaataaaaacatgttaagccgcaccacggtggaagtacaataaaaaaacaagactaatgcaagtacaataaaaaaacggcatatcatatggtatgcatattcaatcataaaaacaagacttaaggttcacaaagagtctccagcttgaacgattgaaccactctattaatatgtattgaaaaggctaagcatttcaaattgatagtaaaaaacagcaaagcgggtatatagggaaagaaaatatgcttatatattaagcacgacatcagatcgtgataacatgctctcaccagtgccgataaatttcactaaatcatccgaaagttgaaggggcacaagaaaaccagatccagctcctgaagagccacccttttgcttctttcctgcaaagggtatttcatcaacaggttagtgggaatagaaattcacgattgtgtaaatatgcttatatatttctaaccttcactcatgtctctattatgtacgaaagatattttttggtatgaatgacttattgaagatggaaggctgtatggtatttccatgcaataaatcaaattaccagtttggtcagtttggtcttcttcccggaagacaccgccacaacctcctcctcctcctggttctggtggatctcctcagccatggcggagcgcttccggtcggagacgcgctcctcctcgacgagcggggtgtcgaagagcaccggga

SEQ ID NO: 7464 - DNA, 1012 bp, Zea mays
  Intron number 2 from transcript GRMZM2G472146_T01 (locus G RMZM2G472146) derived from phytozome v7.0 (chr-ID 7; pos 3 2479222 to 32480233 reverse strand)
tggtaggccgtttttttttgtttctgcgatcaaattaaaaagttgaacgttattcctaatgtgcaatatccactggaatttgcattttttttgttcgtttcacttttcttgtcttgtggaatctgttcgcaaggatttgtgaaactttattgttttcttcccagaaacaaaagaaatctaaaaccatgagaaaagggtgtctttcttgattctctaagggtttgttcggttagaaataaattgagagagattggagaagcttaaatctcctcctattcaaggatttaatcttcacctctaaggacttcctccgttgcgtctgaattgaatttgattgaagcatattaaatctccttctatacaattttagctagaaagtgatttaatcatctctactgtcttttaattcggacacaaccgaacaagccttaaatgaataaaccctaagggggtgtctaggatgcatcatcgccttatttctcaaaagtcaataattgacactggtaaagagaaaatgagtcattccaccaaatttgatgagttaactctcataacgcaccatcttgtctagatggttttataagactttttcaagtggataaaagtatgtctcataagatcggactactgattctttgaatatttccacgacagtttttcaagaagttgttggttctcaacaggaaacaaaaagacatgacatgcttggtacattttcaataactcagatgtttttttgtgtgtgtgttttgttgtgaaacttcagtggcttcttttaatacaatactctgagcttgcatgttcaactgcataggagtaaacaacagaacaggcggaaaagagacgctgcagtcacatatacagttagaagctcacagtatgttaagatttagaaccaatgatgatcacattagcaggagatttgagtctatgtctgtttcattttttttagagactatgtctgtttcattccccaggaacagtcagcaaagatagatcacaaaaaggttct

SEQ ID NO: 7465 - DNA, 877 bp, Zea mays
  Intron number 1 from transcript GRMZM2G165788_T01 (locus G RMZM2G165788) derived from phytozome v7.0 (chr-ID 3; pos 6 0307726 to 60308602 reverse strand)
tctctgtatgtgcgtatatcaaaattaggcttgcttttacatgttgctcctcatatagttcttttgtatgtctaatttctagctaaagatgatgtgtccatttgtaaacagttgggattccactgtggctatataaactgctttatgtagttgtctctttaattccaagaatacgttttgcaggcattcctttttccatttgtgattcttcatttcttttcatttttattatagggctggcaacataagttggatccaaattataatgttgtgaagactctacaaactttactttttaaggaatagtgggtgaagtctcttcaatacacgattcaagggctcatggcgccttagggtgctgcaatcctcttgaaaattttgatctagtttgtgttcggctggaggatcatctgctctcaccatcacgtttggcttattttctactttatttcatgtttcatttctttgtacttgtcctagcgttgtgctgctaaagcagccttgatgataaaataatagtagtagtaaaattttcataatctactagagtactatgcttgctctgggttgtcttatatgttcttgatgggccaaaggattaggtccttttttccttctaccaacacttttgacaatagctcttagatgatgtagcaaaaggcgttttgttcttgtgatctttttgtaattggagagattgtatccgtgaacaaaagagttgcttatgtacaaatagagatactgttaatcgctcgaagaaatccacttctcaacatcacagttcccaagaaaagactcccaagacagcttttatccatccatgccatcttttgatccttagttcctgttttttatccatctagattggtccccttag

SEQ ID NO: 7466 - DNA, 680 bp, Zea mays
  Intron number 1 from transcript GRMZM2G030897_T01 (locus G RMZM2G030897) derived from phytozome v7.0 (chr-ID 7; pos 7 0689199 to 70689878 reverse strand)
tgacaacgatcaaagttcaaaggcactgcttggatgtaaaaggttgtacattgtgcagaaccaaaaaaagtgcaagtgggcagcaatacagaaactggacatccattaaacacaaaatatgtattgtgctgcgtgcaacaaacaaggtaaggggagcagacatttatacggaaccttttacatatcccaacagtacattgggggtacacagtacaacataatactcaaattgacctaatttcaatagaggtaggaaatgcctatcttggtcttggacagttagtcataagtgaagaatagactgcttcagtctcacaagtggtaggtccaaaaaaacgatcatatgaattcttaatttcactataataattgtgaaattaacaatgtacatttgtataggtacacgtcctttggaccaccatcatcatcatcaccatctttctctctagattagagcaatctttctctctctagattagagcaaccttttttctctcaaaaaaaactgcaatgatcaactttaccacaccctccgcttcctttgatgatccttgccaccttcgcttttttttctcctttgcccccctcttcgccctttattcccttcctagttgctttgcttgccgctaacgaactgctttccattgctaggtcctagccccctcttccagcaacacgca

SEQ ID NO: 7467 - DNA, 814 bp, Zea mays
  Intron number 2 from transcript AC210940.3_FGT005 (locus A C210940.3_FG005) derived from phytozome v7.0 (chr-ID 3; po s 39200908 to 39201721 reverse strand)
tcgaggtcagtgaataaaaatttcggtatgtgttagatttgttcgtacttcttatatactagctatgtgcccgtgcgttgcgacgacgtataaattattcgataaatattagtacacaatgattacatgaaaacgaacaacatatatatcatcaaccccatatctcacaaatgaacactaatgacatgaaatttgtgcgcaattcaaatagtgataaaatacattgatatgcaaaaatattatatgttattctatactttttttagcatcgtagacgtatacatatcttaaaaggtatataagattgaacatgtgctttgtcattgataaaaaataaacaatgataaatatgtagcgaatattaatcaacacattgattccatagaaggatagtatattatataagtctcgtgagcgtcccaggtaatggtatcgtcgaaatcagaaaacaaaacgataaaagggggacaacaacaacaactgggcacatacttgaacaacataccctaattattcttgtccattagcaattaccatgtacttagcattgccggacttttatgactttacgagaactggatagataatttcaaaagcaatgtctcatctctcacctaaaaagagaaaaggttggatatactctaacacaatcagaaaaaactgagatgtactttaatggtaatggactcaagaaacgactgctaaccttagctcttgtcagaacaatcttgcctgaaacaaaaatcagtagcacgatttttggctgcttcattcgatagatcaagccaggcaagagctttgcttcatactggga

SEQ ID NO: 7468 - DNA, 632 bp, Zea mays
  Intron number 1 from transcript GRMZM2G072853_T01 (locus G RMZM2G072853) derived from phytozome v7.0 (chr-ID 3; pos 1 87451342 to 187451973)
agggtctatctagcgcttccaagctttctgaagaggtagttttctcagtatgcctctacttacttttgtcaatggtatctcataggaaatcttacgcaaggttgaaaactgttgttatcagcaattacattgttattggggattctggagtagtacctctcatgctaatgatgttggttacggttagagaattgttttttagttgaatggcaacgataaagattcagattgtgttcaagttatctgccagtaactatatcaagttggcgtttattctcatatattatctgtggcttgccccagagctcagttattacttttttttttctcaatctttatttcttgtttagaccaccttttgaagtacttgccgctttgactttctttcctgaaattgctctgcaacatcatattgttaagaagaaaatgtatagaaacatgggaagtgaaatgcaaagttctatgagctgcagtgatgttctgcatcttactttgatagctgagaactcataagcttgttaatgaatttcagtttctacttttatgctactcccattaaaatggattccattctgaagttgttgcctaatgtttcaggctaagcgtcgagaagctgcttcattagacaggca

SEQ ID NO: 7469 - DNA, 466 bp, Zea mays
  Intron number 2 from transcript GRMZM2G045714_T01 (locus G RMZM2G045714) derived from phytozome v7.0 (chr-ID 3; pos 1 01960085 to 101960550)
gaaaggtagtctaattttcttcacaacacttccattaaggtagaaatttatggatatgatgtgtttgtagcattgagaaacatccaatacttaaaaccaagcagataaatagcgagtatttattccttaagcacaatttctttacatgcatttgaatccacatgacctgttgttgcatattctctacgagttacttcctcccattgagaactattgttggttgatgcagagctttggatagactctatatcaatattgagacatggtaaatgatgtggtccagtttgtttccaatgcatactaaattatttacgtgaaatattttagcctggtgaaatatcccatcgccctgtatatttatgtttccttttattattagtattattatttagtgctggataatctaactagtatatgctttgttttcttaggtaacatagttttactctgttctgacaacttcatt

SEQ ID NO: 7470 - DNA, 548 bp, Zea mays
  Intron number 1 from transcript GRMZM2G019721_T02 (locus G RMZM2G019721) derived from phytozome v7.0 (chr-ID 3; pos 4 1458942 to 41459489 reverse strand)
ttggaataattcagaggataacaaaccatctgtaggtcagtaacctgtttaatttctaccttttgtttccctgttaaagtttcaagctactatttctaaatggtatcttgaacatgcttctcaaatttcttgatttgcctaaggctccagctccagctacttttattacattttgaatttgtgtaaagcagaaactggtcctcaagctgagagctatcaatattaaaataaaataattgacattcttgcagtccattttatgctacagagcatttatttgtattactcttgtaggtgaacaaggtgatccttgggcaagcaaggtgtcttctactgaaggtgattaagaagcaaccggcaacattttttttctgtgtttagtgtttctaggtgtagttttcctctgagcttcctaattcacttgctttcttgtgggctctttgcaggtaaaggacaacagaatgattcttggtcaagtaagatgacttctcgtggtgctgaggataccagaggtggctgggacagcaaggtgaaaggctcttcctgca

SEQ ID NO: 7471 - DNA, 473 bp, Zea mays
  Intron number 3 from transcript GRMZM2G152868_T01 (locus G RMZM2G152868) derived from phytozome v7.0 (chr-ID 3; pos 1 84594948 to 184595420)
tgcagttttatctcaccacatacacagtgcatcaggtatgattggtcacagcttatattttcatgtttgactgctatatgcaacttctcaatataatattcacatatacttttgttctcccttagtttttttcccacgcactgtgaatatgcctgtagaaaatagggccttatccaaagtaaatgcttccatgtatttttcgagataattctggtttgcatgtgggggatgagttcaagcatcatccagcaacctgatcaacgaattatatttatggcaattcatttttttgatatgaaacatgattataaatcaatttccttgttcaactactcatgtgttttctgatgttgtagtttctgttaattatcattgatgagattatggtaaaatcattttcttttcattgagattgagctcatccttctcaaaaactgtatcatgaacccttcaccagttgatattgtctgcag

SEQ ID NO: 7472 - DNA, 698 bp, Zea mays
  Intron number 1 from transcript GRMZM2G151407_T02 (locus G RMZM2G151407) derived from phytozome v7.0 (chr-ID 7; pos 1 31289559 to 131290256 reverse strand)
acttggtagcggagacgtcgccctttctagttcaggtgccagttgcaagtcctctcctgctctactttgatgactgtaccttttcttgcatctgtgtgtttatgacgattgacgaaggcggttaggttggcatagaattttgctatttttccagatgttgaggtttgatgagatcgtctcggggatcgcaaagttcgcgtctttagattctatttttctcattttagttgcggcgattcagtgcttttttgaggggaaagatttccgcttggtttgatatttacttgcttgggctgtaacttgggttcttcattctgcatgcgaatgtgttttgggtcacacattaacgaattttccggaaaaaaaactgtgaaggttgcatttttttagttgatttgcaactgttcaactcctgcatttgactgttgtcatctcaattattttagtcgacgtttgttttcagttgctatgtgtgctattgaccatatataattgatttgtttttctttgttctgacttttggctaatttcttctgccatatgatcctgattggttttaagctttgttttcctcgctatgtaaagagaaaaagaaaatgatttttgctcaattttactaccggaaaacctaatgtttcaacatcactaatgtgatacgtattacatggcgctcgtttcagtcgagagatatttctggc

SEQ ID NO: 7473 - DNA, 789 bp, Zea mays
  Intron number 2 from transcript GRMZM5G863344_T03 (locus G RMZM5G863344) derived from phytozome v7.0 (chr-ID 9; pos 1 47621569 to 147622357 reverse strand)
acgcaggttcgttgctagttctggtcttgtggatatatttttgcgggaaacattagttcacagttttcttaggtcatgttttaatgtactaactactaaaattagctaaaaacatccaaacaatctagctaatagttagctaactatttgttaactagctaattgtactagcaatttttagccaactaattattgggcacgactaatatgcaagcaggtaatatgtgcaagcacgcaagcagacattttgatccgttagatctagatccaacgctatgtcatatttagcacttaaactcttccaccaccacctgatatagctttataaaaaaaactcctaacaaaccacaattgtatttaccgttggatacagatctaacaggctaaaaagtctgcttacacgcttgcacctagtacctgcttgcatattagttgttgccctaactattagcttttatgcattcaaacaccctcttaatcaacatacctagtacctgctttactctttatcctttgaactccacttgaaatattcgattcatcatccatgtaatttggtatttggggtgttggctatgtgtagttgtaacttaaaatcatggccgaactgatgcacatgtttgcccttttgttatgtacaactctacaccaacccaacttcatttcaggaatcctgccattggctaccattttcatcctcattgtttgtgatgggccatcaaatgaatttatttctctgttttgctgtctgcaggatcagatcttatcctacatagacaataacaactt

SEQ ID NO: 7474 - DNA, 885 bp, Zea mays
  Intron number 1 from transcript GRMZM2G041175_T01 (locus G RMZM2G041175) derived from phytozome v7.0 (chr-ID 7; pos 1 18311371 to 118312255)
agttccagcctctcccccatcgaggtaattattaactatctatcgttcacgtcaaaaccgtatgtattgatccgtatgtctgccatccatagatacatacacagattaaagatctttttcacgtgtcgtttttgttacttttgtagtggttgagaattgtgatgtgacattggaagccaatccgccagtgccaaacgcaaaaaacttatctagggcgacagtgatggttacttgcacgattgtgcatacacatatagggtttatttggaatacataatagactcgattaattaaaattttattttttctaataaattttacttatcgattagtctctattttatttgctagaccatagttagctaatacttaggctttttatttggcttccaagacttgacctaaataaatccaagcgtcgtcgttgatactgtcaaaggattactcctgtggtagtttatatataggatagtggtttgatggtttcttgagtccaaatcaactattagtaccggctctcaagtctgaactgctcccaatgctctgaccgttgcattattggggcatgaattttcgttcctagcacacatgcctacatttcaacgctctggtgcgctttcaccgggcttttttatggttgcaaaactcaaacatctcacgatgctgctccatttggaataatcatcagcaaattaaattaaattgaattacctgcttattatctacgcactaataagcaacatgatgtgaatgtgaccgtggctaatatgtattagggttagcgaagcgcccatatgctctatatgtgcccgtgtttcaaagactcatctgtcatgtcttctccctgcagtctggctgctgcaagccccccaccagctgcggcta

SEQ ID NO: 7475 - DNA, 586 bp, Zea mays
  Intron number 1 from transcript GRMZM2G095806_T02 (locus G RMZM2G095806) derived from phytozome v7.0 (chr-ID 7; pos 1 44323298 to 144323883)
cttttgaataaggtacttttctatattcatcgcttagtttgtagctatgaattattttagactgtgttgtgattttttttttctttcgtcactacgttagcaacaccttgattttggcgcgtcctccgccgctaggaagagcttcctgatttgcgagagagctatttgatcacttgtattgcctcgttggactgatagttagtcacaatggcagtggaccaatttcatgtttccccagcagtttcaagcagcaaaaggatcccacagcaaaacacttgagctgacaagctctcttgctgtcttgcataagcttgtagcacctttttgtttggggaggtttgctagagaacttctgtattttcgttcattaatttcttctggtatatctcatcagctatcattagggaaaaaaaacctcttgcttgttccaacatcaaacttcaaagctatatgtctccattgctgcagatttttttcatctgtcagactctcttttgggtgcatgattggaactttggtaaccaagttttagcttttggttatgcttgttcagcctcacatttgtctgtgttttgcctgttaccag

SEQ ID NO: 7476 - DNA, 884 bp, Zea mays
  Intron number 2 from transcript AC203831.3_FGT002 (locus A C203831.3_FG002) derived from phytozome v7.0 (chr-ID 3; po s 5329564 to 5330447)
ataaagaccaggaaggtggtgttggttcaaatataaagttgacttcaactgtttggaaagaaatcaaaagggttgaagtaggggataaaattaaagcaaaatgcaactggtgcgcaaagaaacttggaggagagacaaaaaatggaaccaagcatctacacgatcatctcaagacatgtccataccgtgaaagcaaaatgaccggacaaagcaagacatttagccaaagctcattgaggtttggttgtcgtgatacagggaaagtgtaagtggagaactatacttttgatcaagaaattgctagaaaggagcttgcatctatgatggttttgcatgaatacccgttatgcatggttgatcatacatgatttagaagatttgttagcgcacttcaacctttgtttaaaatggtgacaaggaacactattaggtaagtacttagtgtgttttggctaactgtactaaagtacttagtgtgttttggctaacttatatttccttaggaatcacgtcatgaagcaatatgagatagaaaagaagaaatccattgctttcatggcaggaaacaactctagggttgctattactactgatattttaatgtactggattggtggaaggtagctgggacacgatatcctaccttgcggatgattgcatgtgatatttatgcgattccagtgagtactgttggttcagagtcagcattcagcacaagtggaagagttcttagtgagcatcgtagctgtcttactcctaggatgttagaggccttaatgtgctcacaggattggcttagaaaccaatacaaaggtatataaagcatttaatttggttggttgtattattaacttgcactaaaattttatgttcgtgaaatacag

SEQ ID NO: 7477 - DNA, 1033 bp, Zea mays
  Intron number 2 from transcript GRMZM2G001572_T03 (locus G RMZM2G001572) derived from phytozome v7.0 (chr-ID 6; pos 1 40945555 to 140946587)
gaaagcataccaactcaattcttcatacttctattgtaaatacttctttttgaagatctcgggtgagctgtgtactgataatttgttttttattttgattgttttcaatattaagcgaagtacttatcaatttgttattatcttgtttaatcacaccgcaaattgtgtctgaagggaaccagaccatcaaagcatccattggtatttggacttgttcacatttaacttcagtctgctagattttttatataccgtgtgttctctgcaacaattactctatacatatgtaccataacgtgaggttgaaaagatttatgttcacaactctatagatttgtaaagagtttcatgagaaatgtggttacctttctgcccagctcctcttagtggccttctttctatttcccacatctttgcactgctgctgactgaatttcatccacagatatttcaccaattcactgcttcctcactatgaatcacctgctgctgctgctgcaatcaacattcagtcgacacaaaccagacaattcacctggacacaaaactgcagcagcagctgtgaaccattcatttaaatttagacaaagcagcaacaatttcagtcaatcattctaactcaaaccaagcagcggcagtgtcgaccattcttacaaattcagagcaagcagcctcactgccgaccattgtttccactttagaccaagaagcagcagtgtcaaccattctttcaaattcagagcaatcaacctcagtgtcgaccattatttccaatttagactaacatgcaacagtgtcaaccatttagtcaaccattctttccccaaggttctcttcttttcttttattaatcgtttgattactttttgtttcagctatttatgtggcaacaaactcactagacatatacccccaagactagggaacatgagtaattttagctacttgtaaattattgttaactaaataattgtgtgctgctgttgtccgtaattttaatgaaggttaatatttgttccatccatgcagctga

SEQ ID NO: 7478 - DNA, 489 bp, Zea mays
  Intron number 2 from transcript GRMZM2G364404_T01 (locus G RMZM2G364404) derived from phytozome v7.0 (chr-ID 3; pos 9 290305 to 9290793)
ttattcaggatagttcttggaagctcctcgacgcggtgcgtgagacagggctcatcttcttccgcgcacccatggaggacaagctccagttcacctgcgatccggccagggatgccatctcagaatggtacttttaaccttgtgttgttacaaaggttggaggttctgtaggttctaatggaagattacaaggtcatattgaagtatcaagagcttttggtgattgccagtttaagaaggacaggttggctgatgcgtaccattgtttgcttaatcatagatgctatctattgcccatcactgtttgatttgaaatattcttgtttccttatatttacatgcagttttcttcataaagcggacattcagatcgaaagcattaagtaatattgaaacttggttattttcttgtgactattctgaatttgattggcagagttcatatggatcctttctctcttttgtttattgatgcagctttctgaagtt

SEQ ID NO: 7479 - DNA, 906 bp, Zea mays; identical to SEQ ID NO: 5763
  Intron number 2 from transcript GRMZM2G111696_T02 (locus G RMZM2G111696) derived from phytozome v7.0 (chr-ID 6; pos 1 58917631 to 158918536)

SEQ ID NO: 7480 - DNA, 694 bp, Zea mays
  Intron number 2 from transcript GRMZM2G125037_T01 (locus G RMZM2G125037) derived from phytozome v7.0 (chr-ID 6; pos 1 53758481 to 153759174 reverse strand)
aggtgcgttcgtcgtctcgattcgttcattcattcattcattaacgaacacgacacgggtacgatctggttcgctgtgcaacgaagttggtacagctatgaagaagaaattaaacaccgtatcaaacacaaagaaattaacacagagactgaatcatgcgggatgtccgcgctccatgtttggcgttgggttgttagcttgtagacttgtagtagaggcttagagttatgcaagcatgcatgcatgcatgtgtgtagtaggtgacatgtctaaatcgcacgtacggtgcggcaccattccaagcagctgcgaatctgcgagccgggcgcgtccatctccatgcagggggtggtgaatcgtgaccccgcctctcgtacgtagaagggccgcggcgagtccgccggtctcgatcagtattagcacgcagcgctgtcgtccgatgaccccgccagcttcacggcggcctacgtccgatgacgacgtccccgtcccgtcccgacggcggcagagcccggtggcccaccgtaccctgagcgaccataccataccataccatgctttctgttgcggcaatcaaaacaccatcatatgtcggctaggaaagggctctagctcggttgaacctgttactaatagggtagggagtactgatgactaattgtttctctttttcgttcgcgtgtgattgcaggag

SEQ ID NO: 7481 - DNA, 772 bp, Zea mays
  Intron number 2 from transcript AC183928.4_FGT006 (locus A C183928.4_FG006) derived from phytozome v7.0 (chr-ID 7; po s 45554 to 46325 reverse strand)
tggagatccctactgagaactacctcattgtaacagtaaatattgcataacccgacgaattattatttgcagcaacaagctattggtggctaaaatctctttctctatgtgtgcaagaaacatgggaatgcctgttcgggctcaacggatccaaagtcaatcaagtacaacaaccaaaatagtggcgtctgtatagatgctctaaacaacattagcaacaaaggcaaaaattattgattcatagaggagatctaggaactcgactatgagttagtatatttaaaggttcatctgtttcattggcaatgggtgaaattggcaggtggaggcattatagtggaccctgaatacagtatgacaaattgacaaccaataaccatggacctcaaaaatattggatatagagacgaaccttttgtcctcacggaggatgtgactcaggaattctacagacatataaattctaaacccaaaaagtgacaagaaacaagatgatgagccacattattttgcccaggaaaaaatattatcagagtcgaggatattaatgatgaataagattatgatcaatttgatgatgtaccctccttttgaagtggatgctgacacaagcatcctatttaataatgtagaaactccatatttgtggtaagaccattactaatgaagaactataaataagaagtttttttactgtattcttgccatgaattattattagtggcaataagttttggtggctaaaatctctttctctgtttgtgccagaaac

SEQ ID NO: 7482 - DNA, 495 bp, Zea mays
  Intron number 6 from transcript GRMZM2G053514_T02 (locus G RMZM2G053514) derived from phytozome v7.0 (chr-ID 7; pos 1 00972358 to 100972852 reverse strand)
atcgtgagacctttgaacgcgaggctggttagttgttttctttcttcctagcatatggaaattccatttcatgaccacctaatttcgctttgatggtactggtttatcagagcgaactgattgcacacaaaaggatcaccgtctttgattttttttatcatcgcttgagtaaaaaaatgcaaaatacataggttttgcattatcaaggttatctctacctttcccccaatggaaacagtcatgctgttgcttttgtgaatgcatgaggtgcagtactatcgcttgattgcatgtttaatgttgtcatgtatccctgaagttagcaccactatggcactatgcataacttgatctatgtttatcttgagacatcaacctgacctacctagggacgcacattacagtactttactgcttacttagtcatttccttaaaattgtcatttcaagaaatttgtttgatttttactccctcttttgcctttgcagctgggt

SEQ ID NO: 7483 - DNA, 530 bp, Zea mays
  Intron number 1 from transcript GRMZM2G388398_T02 (locus G RMZM2G388398) derived from phytozome v7.0 (chr-ID 3; pos 2 07458058 to 207458587)
aacaactaccctcgcaaagatactctttacgtgtggtaagttattgaaatcttgaatatcatcaaataacacgaaactatataaaacacaaactgtagcttaagttcttcattcatatataaatgtgacaagtgaactatatacttacggaggaaagggacgaatgtctggaactgtcctattttggtttattctacctgatcccgccattgatcttgtaggaccaatcatggcattattgcaaagaaaacatcattaaaaggattaaatgacaaagtccctctgtcaaacaaatagatttcttttacatcataatgaaattacaagaaactattttgtaaaaagtatagactctatctacgtctttgttctttaagaaacctagcatcaaattgaagatttttcatataacaatatttaaagttaaatcataaaatgtaacataatatgtctcatgtttatctacatcttgtgacagttgctggtgaataataggacagcaagcgccagtgaaatagtaagtacacatt

SEQ ID NO: 7484 - DNA, 907 bp, Zea mays
  Intron number 1 from transcript GRMZM2G141600_T02 (locus G RMZM2G141600) derived from phytozome v7.0 (chr-ID 3; pos 1 66811486 to 166812392)
cctctcgtttcaggtggccagccttggttttgcaggtgagcgccgctgacctcgcccttcccgtatccaatctggttgcgctgcgagggttggcgtccccgagatgtctactgcttcctttttaactgtccatactggtttatttccttttaaatgtccatactagtttatactttataatgatgcttggcttgaagaacaggctacagaggatacctgttccgtgaccagtgcagttcgcatgcggttgctcactgaactatatagtcttgattgattggagaattcggttgaatcgctttggtattagtttgttacaaatttgcagtgtgacggtaattgcaacggcttcagttggtaaagtgctctgatctggtcccaccgtcagtacaaggtactgaggaattaggccggatggactaaacataacataacttgggttcggtttcgatgtgatctttgtgaacatgagtggtttgcacattcacaagtgtctcgtttccctcagcggattatcccggttcatctgactagaactctgccattatccagggcaggaaatagtgatatgcctaacttctttgaaggaaggtgttcacgaagacctaatttttcttccatctggatgcactttaccatgttacgtgttctaatccgagtaggcctcattggtcagccagctgcatttgattgataatcaacacaataaccgaataacatattgtgctcaatgttggagagggtacagatattagttatgctcccttcctttgaaacagatgaatttttagccattttttctttttcagaaaaggaaattaaccctttcttttgtcatcggtaccctcttgtgtatcattttctttgagaatactagtaacatctgtttgatctggtacatagcagc

SEQ ID NO: 7485 - DNA, 345 bp, Zea mays
  Intron number 2 from transcript GRMZM2G133268_T01 (locus G RMZM2G133268) derived from phytozome v7.0 (chr-ID 3; pos 1 76373634 to 176373978)
attgattggcaactattaggtaaccatgttaaatcttgacactgaatcatgatattactgaaaaactgaaccatgtatgtgattgagcagaccaattttatatcaacaaaaacctagaggatagacaaaatagataacaataggactgagctggtggtggccattcttcatccatacagtcaaattcttctttgcaaacttgcagtaaactttttttaataaaaaacagaaaaccaaaaggatctagtgcctagacacattcaggaatttcacaaaagtagtaagcataatggtctaacttacagattgttaacttcacaggtatcgcagcggacgaagccgacg

SEQ ID NO: 7486 - DNA, 994 bp, Zea mays
  Intron number 1 from transcript GRMZM2G140996_T01 (locus G RMZM2G140996) derived from phytozome v7.0 (chr-ID 6; pos 1 58659068 to 158660061 reverse strand)
agagcattccaccggcagacgccgtcttccttaaggtacatcatccgttgttagtatggttgtttaatgggtttttttatggtggtgccctcgattttggtggtgtgctcagttttacctttagtcgtgtttttttactcagttttacccctccagtgctatagaacagaagagcaaaactgttggttcggtctttatatacggatttgcaaccttttaattaagagaacatatctagtgcacatgaaagttttgtgcatatgatgcacatattaaatcataatcactcagtttagatctaatgtctctagttgctggtatattttgctaaaaacaccctctgacatggtgggtgtagcgggagaatatgttatttataaattacaatgatcaactaaagacgttggatctaaaatagatagtgatgatttaatatgtacactatatacactaagcttctatgtgcataagatatatcctctttaattatagtgttgaccggataaagtgctaccatgttaaaaattttaaatctgtgtctctagttcagcataaaatgctcagttttattcctttctaacagtaataaatgatgagtcaagatttttaaatcttgggcccaatttagtttctttagttttttggctaaactttagtcaccccaaactgtgttttcactttattttctaattaaacactatcattaacatgattaaaggcgattgattgtcaaattgttaacaatatagtacctaacaaatttatgctattatttaatgctaactgttttttcttaattaaattcttataattgactataaatttttgaattcatgcataccctttattatattacagtacagagggagtaatatgttagtcatatttttatcactaaccaagattcatgtatttatgttggccagctggttcgttataactaacatagtacttggttcattcactttatttatttgctttcagtgggttttgc

SEQ ID NO: 7487 - DNA, 830 bp, Zea mays
  Intron number 7 from transcript GRMZM2G057475_T02 (locus G RMZM2G057475) derived from phytozome v7.0 (chr-ID 7; pos 1 57596028 to 157596857)
ggaagtgctcgccttgaattttatgtatactttctatccttaaagcttgtaccaacctttttttaaaaaaacttatatcaactacttgattttatttttcatatctatatgcttctctgtcctttttttatataatggatctgcctggctgatcttgcacctgcttgacagcattgagaccgatgcatctctagctttagtacttagttccaaaccctaactgcaggaaatggctttttgattattgtaaatggtccatgcatgcattgtagcgataaaagaaaatctcatggttaccgtttaacgtacctggaaaaaaaatgaatcttctgcaatatgctggttgagcctctaagggtctatttggttgggctgtatctgtggaaaaagatgtgggttgtgagctgtgaaaaaaattgttgtgggttgtgagctgttaaaaagcaaaaaaccgtttagtggaaaccactaaaagccgttaaaagtttttttatatatgttttcacagttcaacccaaaaactactaaaagcaggtataggtctgctttcaattttacacggagagaaaatcagcttttagaaaaaggtggttcctggattcagccattttgtttggcttttggcttttagggagcaaaagccaaagccaaaccaaacacaccctaatgctcataataatagatgcagggtatagcgatatcatgttgcataagccgttctagcgcctttatagctttattttactgtttataaggtatttttggatctgtagaagctcacactgtgctctgccatgtgcaatacaacttctttccagctcctactccgc

SEQ ID NO: 7488 - DNA, 579 bp, Zea mays; identical to SEQ ID NO: 5400
  Intron number 1 from transcript GRMZM2G099547_T04 (locus G RMZM2G099547) derived from phytozome v7.0 (chr-ID 7; pos 3 1909700 to 31910278)

SEQ ID NO: 7489 - DNA, 1011 bp, Zea mays
  Intron number 2 from transcript GRMZM2G046286_T01 (locus G RMZM2G046286) derived from phytozome v7.0 (chr-ID 6; pos 1 35640215 to 135641225 reverse strand)
aaactggtgggatatttgagaaaggtaatagttatctccaattttttggtactttaattttttggcaataactaagaatagagtagagatgttgaactaaacacaaataggatattcccatatgaaacaaattatgcagcatgcagcgtgcaatacatacatgccaccatcatgtcatatccgaagaatattgccaactctatataaatcaaggatgatggttaaaattaaaagctaacaacagagtcagcatgtccaccttgggaaggacatcgtagagctatggttaaagtgtgtaggacaaggttagaatatcttgtttatcacccaaaagaatcagaaagtatcaagggcaatgaaagctgaaacgtcatggattgaaacacagaaagtttcgattagcatgattcagtagagagagttgtggagaaataaaattaatttgtttattgtaccctagcaaaatagaaggtcatgtgtatgctgcatccgctaattgaattgaatgatggaatcatgtaaataacaagtaaaaatattgtatactgctccagtcaaggatgtgccagtgatagtttaagattttataaggtcatttttggtttgtagttagcttcaaagtactgtgatctaacttcatcagccgagcatagagggtcacaattcccagccgtatccaataactgaaatttttgtgaaagggaaaaagaataagcaactacatagataggaatcatcagcatagaaattagtacttgctggtttaagtaactaactggaatcttcggtctagatgacgagggaatgcccatccgaggtactggaggagtttggaatatctaaccaaatgggggcttgctagcaatagcccctcggtttatgtcacagtgttgcaaaaaattgggcggctgcgtgactctagggtattcttccatgttgttttagcttgtatttgttttcttatctggccttgaagtaatcccaaactcttcttggtacaggtggaattta

SEQ ID NO: 7490 - DNA, 581 bp, Zea mays
  Intron number 1 from transcript GRMZM2G049510_T01 (locus G RMZM2G049510) derived from phytozome v7.0 (chr-ID 3; pos 1 81832132 to 181832712)
gctcgacaacaatcttcaaggtaatattttgcctaccacgatgtttaagaataaatcatcaacataacacgaagacatgagaaatcatgacttccaaccttttaaggctatatattaattggagtgttatatttgattttttgataatataataccacatttattatgaaattgaaatgaatggaaatagtttttatcaccatgaaactatactatgtcaactcattttcaatacattgaaaaatgcatgaaaccattatggagagcaatttgttttatcttcatttattttatatattggtcatttagatgcaacatttaattgacatggtagccgataaaaccgtaaagcgaaattttgtattgagactacgtttcattctttatttaatctcacttttgcttattaagaatagcctaacattgaagtaggagcacatcgctagaagtactgcctcgttttctcgcgcgacaaattttctcaataagcataaaacgacgtagcattttctaataccatgatacgattacacaatatttttatcacaattttttgatgtatttttgttgtctttgtagag

SEQ ID NO: 7491 - DNA, 336 bp, Zea mays
  Intron number 2 from transcript AC204533.3_FGT003 (locus A C204533.3_FG003) derived from phytozome v7.0 (chr-ID 7; po s 10969021 to 10969356 reverse strand)
gccagcgtaacagaagtgattccagactccagagggtaagcagaatgcatgcaatgcttgtggcagcaacagctcaagctcagtgagaaatgaaaaggctaataaaagcagtatgtgtgtgcagtgttaatctgaaaccaagaaatgtgcataaaccaagaaaaatagagaacagcagacttggactcttggagaatatggagagtcgtcattgtcaatttgattacttgatccggccggtttcttcaattcaaaccccaaaaagaaaacataccaacaattcatttttttttcttctaagaaaagacgtcttgataaaagctgaacagagtggag

SEQ ID NO: 7492 - DNA, 916 bp, Zea mays
  Intron number 2 from transcript AC209455.3_FGT009 (locus A C209455.3_FG009) derived from phytozome v7.0 (chr-ID 3; po s 198541898 to 198542813 reverse strand)
ctactcagagtgatttgaagtacgttaaaaatatagattattaacagtttcatatagtgcatgttttttggccaggcagtagtatgtgatatggaatgtgattattaacatttcaatttgcttgtcttcacaacctttatactctgcagggtgtggtcatttttttgtttaattcgtttcttcattttcaaacctgaaaatgtgaatgcaaactacaaatagcttacagatcaaaattaccatgttctttttacaaaattttaggttggccctaccctgctctttttaaggctgaaatgccctggtcagcctgaagaggaaatctctcagagaaacaaagagtcttcaaaatggtgaaagggtaatataatgattttaccttcctgctcggttattttagtgcgttgtttgccttatagagtaaaacttcccagttccttgtttctccattatgttttgtttaatttgtcttaattatgcagtatactgaaataacttacacaggagaaatttgaggtaaagtattttagaaccggacaaccttcagtttcagtattcagagttagacaatcacacttttccaaaggtatccaatatacaaatgcattagcctatgtgcgagtaaatgatccagtatatatagtcagacacatgaaaaaagccactttaaaaatcataagatttagccttattataagatagtatggcttatctgcatcttccagtataaaaatcatgtcactttaaatcattgcattgcagttcattataggatacatttcatctagagccttattatggagacatgccactgctgaatgtttagcttcaagttgttctctagagccttatatggagactgactgtttggcctgcaaaacatttctctgcagttttaacaatatatttagcattc

SEQ ID NO: 7493 - DNA, 938 bp, Zea mays
  Intron number 3 from transcript GRMZM2G114461_T02 (locus G RMZM2G114461) derived from phytozome v7.0 (chr-ID 7; pos 1 65467411 to 165468348)
cgtgtggcattgcttacaggaaggtagagccatgctcttttgttctgaagcagtcatgacccagttgttttttaggttgcttgctccgccacacttatttttgcaattgaatgttgtggggctctctttatcaactcttggagaggttatagcttggcatggagttaactttatgattcacaagcactatcttttcaataccactgttgatgccttaatttgcactaggagccatgcactttaaggattattttatcccttgtcacttggaggttatgaattgtcgtttttcttgcaatcacaggttgcaacttacaagcaaccataacacttctaccgtctccggcagttcacccatatggttacctaaaacattgttttgcattgtagactgcactgttcgcaaagtggagtatgaatatacaagcaaccataacacttctaccgtctccggcagtttacccgtatagttacctaaaacactgttttgcattgtagactgcactgttcacaaagtggagtataaatatggggatagggatgagtaagctgctggagatagcctaatgcagaatcccggggcatacatttttgtctgcagctgtacaactttccaaaatgaaataattgaattacatatcaaatgttctgactctaaccccccccccccctccccctgaaaacagagaaatctttttttactatctttgagtaagtttgatctagcatcgtaggatcgaagaccatattgcacatgctacttatagcaaccataagaaacatcacactcatatgttccttccattatggctaagattgctgttctactggtcgttttcctcccattttgtcatgttgaagaaaatctgcaacgaagtatgcctcattgtgtccttatctactgctcaaacattttatgatttgttttccaggggaaa

SEQ ID NO: 7494 - DNA, 877 bp, Zea mays
  Intron number 1 from transcript AC212068.4_FGT005 (locus A C212068.4_FG005) derived from phytozome v7.0 (chr-ID 6; po s 145188149 to 145189025)
cttctgcgacggccgcctcgtcatcgacttcctcagtacgcccgctctctcgctccctctctacctcctcgactccatctccttgaatttcactcgttactacaccgaccgctaccacccgcgctgcgccctgtgataatcggtgcaccgtgcgccggcggatgattgtattcttgaatctgccttgttgatagctcttggcgcccaccgagtgcatcaacaagacaacaagaaaccggtccctatacgaatggtattggctaccgtgttcagttcgtccgcgcggttgttgggaaaaaaaaatggacggtttagttaggctggtgcgcagccggacaggacaaatacacccgtgcggtggttaggcagcggagattgacgcatcattgcgacctcgcaaatggtccttgtctccctggtggttgtatgctctgttccaacatccgttgaggaactgcgcttggtgtgtgtggtccagttcctgcaattagcgtggttgttgttcgtcgcggcatcttcgtgggatttggtagatctgcaagaaagtgagtgctgcttttcaatggagttctttagcaatcagtgagatttggtttgccataggccgccttcttttcctgggtctactgattgagccctcccagtcccatgtgcttgccattaagcaacttgacaatcaatgaaaaggtgagggggtccgaaggagtaattacgaagcaaataacttgactgtgcagatttattgcactgaataacagaaatgacacacaaagtgtttttttttaaaaaaactttagacagaaaatcaaaaggatatacctctcctcttcgtaacatagaattcttatctcataaattcgttcgtgcagtggaggca

SEQ ID NO: 7495 - DNA, 739 bp, Zea mays
  Intron number 1 from transcript GRMZM2G018262_T01 (locus G RMZM2G018262) derived from phytozome v7.0 (chr-ID 6; pos 7 110231 to 7110969 reverse strand)
cctccattcccgtcaaccccctcgacgtcgccaaggtacgtcggtgaccctatcgttgcctctttcgcttcctcgcaactgccgccctcaaccatcgaggctcgcccgcaacggccgccactgcccgctcggcatggcgctcgcctcgcaacagccaccgctggcccagcaccaccaacagcaaccccgcttgttctccttctccaccacccactcgcgaaggccccctcagtctcccttagcatgaattgtggtagcttactaactttgtgtatgtttttgcttcattgtgtgttttgaatctctttctttatgttcctggattactgcttttgtaggaacaggacggtgcagtggagcaacatctctaatcatttaaggaacgtattgttattcgaactcagaactcaatttgtagacatgaattgtgtcaaaatactcaaatgcactcatcaaattaatggagccaataacccaggcagcagttacatttcacctacaaaacatagttaagtataaacttatacattttctgttttttgtgtgtttgccagcttcaaattaaccagtccattatattatgcaactctgtgaatagaattgagctactggctaagaaaataactgaactcagttattcatgctaagagcctaagatgttgcaagacaacagaaactgagtgtttcatgagtttcataatggtgcttgcagaaaccttttgtgcacaggtctgtactg

SEQ ID NO: 7496 - DNA, 999 bp, Zea mays
  Intron number 1 from transcript GRMZM2G097691_T01 (locus G RMZM2G097691) derived from phytozome v7.0 (chr-ID 3; pos 2 21749380 to 221750378 reverse strand)
aagaaggtaagaggtagtcaacccccctcccagtactttggcagaattgttcatgttaccattctgaaaactaaaatttattgaggttagcactgttaattttgctgcagatatctattatgtgaagccttatactcctgtgatgtgtatgccactatgaacttttattgaacaacaaagagtagtgtaatgttctattgtagtttcttttcgttctcttatgtttatattgcaggctctaggctgcatagacaaaagtgctgcaatcagatctattcttaatggtgacagtgaactgaatatattttcacaattagtctagatttatggatgtgtgccttcattaatggtgacagtagtactcatgtggctccattgctcattgagatatggtggcatgttgaattattgaccaccctacgttgtatcacatattcacatctactagcactggtagttatgaacttggatatcaactctttttatttttcgtattagccttctttgaaatgatcatgtaaatattgatattttcacattgttttttttgcgattttagccttaattttcatataactagctcatatcgtcactgaatataagtctttaggttgttatgtttaggctgtctctagcatcctttgtatcccacaccttatctcattccctatatcaaacttcactatagtctacaatgcaaaacagtatttttgcacggtcatatgcatgctctgctgagcatggccttagagcatcatgcttcccaagttaacagtactctcatggctatatcttaaatctgaacatgaagctcattccaatgtagatgttatcaatgagtagagttcggttacttaaatcatacagattagtagtactctgctttataaactttgcttcaaagcttggtaatcctttgtgcatggagcttttacgtctgagaaactgagcctacaaagacttcacttcatttggcatgttatgcttgttgctagctga

SEQ ID NO: 7497 - DNA, 800 bp, Zea mays
  Intron number 1 from transcript GRMZM2G517181_T01 (locus G RMZM2G517181) derived from phytozome v7.0 (chr-ID 7; pos 1 62047734 to 162048533)
ttttttatttttctttttaaaaacacttagcaaacagtagtaaaatgatattcaatttttataaagatcttattttacctaaactaacatatataaatatttgcagaattttctgataattttaaatctagacctataaaaaattctaagaaatatttatgtaaatttatgggtccatatttaaagtttaatgaaaattctataaatatttttatatgttattttagctaagagaagtttatgtataaactgaaaatcattttaatattgtttggtaagtgtttctaaaaaaataataaaattgatttagttattaatcatatcatgcccaacaactctattaactttatcatgcccaataactctattaactttctcgtttactataaagaaaggattaagaaagtcttgatgttttgacgaggtaccggatattcgaccttttggtcatggtttacacctttttgagtgtcataccaagtggtacatcatatacatccagtgaatatattatatcaattatataagctatctaggtaccttgtacgttgcagtgtacgcagtgcacatggatagtggcgggcgcatgatcaaaatttatgggagccaagaaaataacatgaaaaaaataagtaatactataaaaatatattttgactaggtgattgtctgtgcgttgcaacggggacatataatactacgataacttatatacaaaatgtgtgttatattaaaagcgagtacacaataatgacaaacaagaaaaacacaaacactgaatcacacaacaggcatatttc

SEQ ID NO: 7498 - DNA, 1013 bp, Zea mays
  Intron number 2 from transcript GRMZM2G453668_T01 (locus G RMZM2G453668) derived from phytozome v7.0 (chr-ID 6; pos 1 26983154 to 126984166 reverse strand)
ctatagaatttaactggaggacattcttgccagtggtattttagggtgattttgatgttgcaatagcaacctatggaacatgatgcatttgagtacttgctatcgtgtaggtcattttggagtatagtagcatttaactctggtaatctggtgcatgttgcaaagggatttcctctttgacctattgagtctttttataattggacttgcaagttgtttgctgaaatagaaaatgggaaccatatagctttataagttgaattaaatgtttatcggagaaaaacacacatactttggctaactaggcatacacaaactgcaacttgcttttctggtttcatgggccttgaataaccttagtgtccgtggtgttgaccctgaccaactgttaaagaaactttttgtgaatgcaactgactatttgtttcttcctttttgtgtatgaattcattgcctaactgaactatcatttccactcagttgtgctaatccagcattttcagtacaagaaggatctcctcctgtattattgtatttgtatgaagtcctaatataatcttatggttactttcagtaacatgatggcatccttgtatattattgtggttgttttaaaatcccaaatttaatcttatgtttgttttctttggtcaaatataagtatttagaagtttgataagattgaccattgagagcccgtctttattttcatgaaatttattttatctctaccttcaaaattttcacgggaaatgttatattgctctcatcatataattgttggtgtgctgtctgtgaatgttactgcatgtgttgttaggcgcttcgagtgtacctcacaactgacttttgcattgtgggataatgaccacaatgttatcaatgctgatttgaaataagtcttttcttatattaaatcttctgctcggatttgtaattcttttatgattgacttctaatgttatattataactcaacatatttgtcttgtgacttgaatccaattttttagg

SEQ ID NO: 7499 - DNA, 804 bp, Zea mays
  Intron number 1 from transcript GRMZM2G065341_T01 (locus G RMZM2G065341) derived from phytozome v7.0 (chr-ID 3; pos 1 48976567 to 148977370)
acctgtttatcacagcgtttcaagtcagaaaagctcatagaaacatggaacgcattgaaagaaaaaactaatatcccgtttggatgtagatattggagcatagaattggaaattgggaattggaatcagctttcttaaattatgttgtttggttgcacatggaattgaaatttggaaccagaggtccactagaaaccccctctcaatacaaagcctcgcccccctcggtattgcgtggaattacaccacacaattcctaactctaattcaatgatatccaaacaatagaattggaattacatgcttgatttggtattcaaccaattcaattccaacgaaaattagtttgtatctaaattatggttattagaatggaattcaataccaacgaaacaaacgaggcctaagaagacttccggcctctacacaactagggtgtacacagccacgaaaaaataaaagaaaagacataacaacatctatcatgtcacagtaaacgacaccacacaacttagtcttcaaaaccaaccactaaacacaacttagtcttgaaaacttgatattataatgcttatagccaacaattatctaaatgtactttcatgctatcaaactaataccaagttttcgagaactggcaccagtgtataaggtataagtaacctaacctaccaacttccaagatacatagcaactttgaaggattaaaaataaacaccacagcagtgagcagtcacgcgagaatcaaatggcaaaagcacactcacagaaaagggagtgttatattgttgcccaagggcatct

SEQ ID NO: 7500 - DNA, 415 bp, Zea mays
  Intron number 3 from transcript GRMZM2G043240_T01 (locus G RMZM2G043240) derived from phytozome v7.0 (chr-ID 7; pos 1 08009791 to 108010205 reverse strand)
aaaagtaatttcttttgtgcagtgtgactaaatacttattggttttgttgtgtgcccctcttctggttcgtgcttgctgacttacctgaagccttggaaagcatacttctcgtagtgcttattttcaaatcaaacgatctgtgattctgtggttgagtcatgtttacacattaaagccccatttatctgcttttgcataattgaaggttgttgttacatcctagaatgtaactatgcagagcgatgccattttattattgtttattcatctcaaccattggaaatcacaattttatgctgatgataaggtgttttcgcaaacatgtaatttgctgatatcaaatttctttgcctcatataatgattctattacttcgtagattgcaactacgcaaaggggaagtggatagaagat

SEQ ID NO: 7501 - DNA, 1018 bp, Zea mays
  Intron number 1 from transcript GRMZM2G172787_T01 (locus G RMZM2G172787) derived from phytozome v7.0 (chr-ID 6; pos 1 18867367 to 118868384 reverse strand)
acacaccttaagagcattaaagttgcactgcaaaggtatgttttttgtagcgtgtagtgtggatgcattcttgaacttcactaaaacatacatacgctttgattacacatgttctccacctgtataaaacatcttctcattttttgtcaaaggtttatacacattagctgctcttctaattacagagacaaagaaacacaaaatcgagtagacctatcattatagaagtaattgctgtaacattcgatatgttcgcatgtatgtttgtctccatgatcttctattgtattcaacaatgactccagtccacataatttctgcaaattagtcattgatggcatgctggaaaatatggaatacgtcagtagttggttcatttggtgatatgttttctaagctaggctttccttgcagatagtttgagtattcaggtttcttatttttgttgcaggtaatttgagtgtttatgtttcttatttttatattcttctatgtaaaagtatcactattgtcatctgtgtatgctgacacattattgttttgatcgtggtattactttcaccagttatcgctgtaatatacttgagtattatttgttggtgagattgttttgtaactttgatacatcatacatgttatactttaataatggtctgcggttgaccacatatagaaaaactactgtatagttttgtttatttttatacttgaatgcttatcaaaatgctcaaaatggcctcaaccgtagtttgaagtttgaactgtatctgaacatatcttttggcaacgtcaattgtgtaatctaacccttttccctaagactggagttctgcttatactagtggtagtttattattttgaaatcaactaagctaatagtatgaaaggtaatagttctagacacatgttgctgattgcttttacaccttgtgttgagttaataacacattgctatttttttacaaatgttcctttttctccagagcagaaaatttaattcttgcatctgatcctgacc

SEQ ID NO: 7502 - DNA, 857 bp, Zea mays
  Intron number 1 from transcript GRMZM2G149617_T01 (locus G RMZM2G149617) derived from phytozome v7.0 (chr-ID 3; pos 1 75588026 to 175588882 reverse strand)
tctcgtctcggcagccaggtacgtccccggactgtttgtgcttggttcctccgtttcggtgggcttgtgatttttgaggatttcagtagtagcatagcatgcgccgaaagactgacatgttttatgtgtcgtaaatttcgtgaagggaaaccgtgagatcgccaggttaagtgccatgaaatgactgatatagaattggaatgatttaaggtttagtcatgtttgaattacctctacttcttgggactaaaaaatcacgactattagactgtagatgtaacatgtaagaatgaaccatagcaaacttatttgtgatgagggttgctgtattatggctgctgtcacaatggcagtcgcaaatcacaatattgtcttgtctttgttttgttcatgctagtcatgtcgtgtgttgtaattgccaagcatctgtctcaaagttactatggtttcaacagagctagaagtgtgctccttcatttgaaaaagcaagttaatgaacactatgccatctggtacggttaatctttcaatcagctatgcgattgcatcatgttgtaagttgtatataaaatggtaaaggtagggtgcacaaaaggccctctagctgaatcgatcagatggttaagtagcattgtaaaggtagggtgccatatttctagatggaattgctgttgtgtagaggaattttatctaatagaatactagaatataataaataaattgtaacgggaacaacagtgcatcagaacagtaacatcagaattttatctaaacatgcttattttttctgctctaaaacattatccgtttgttcttctacagtatttggccatagtaaatcgacagctactacttct

SEQ ID NO: 7503 - DNA, 952 bp, Zea mays
  Intron number 1 from transcript GRMZM2G061681_T02 (locus G RMZM2G061681) derived from phytozome v7.0 (chr-ID 3; pos 2 25446853 to 225447804)
acgtcggcaaggtgcccaaggagctcaagggcgtacgactgacgtctcttgtttttgtttgactctgtgtgtctgtctatgttctatctagcatcgaccttaagcaattactaatttactgctggatagccacaagaaaaaaagagcaaacccagttccgtaggctcccaccacatgagcggggtctggtgaagggataaaccgagacaaactttccttcgcaaatgcgaagagctgcttcaaactctcgttgctactttgcattcaatactggttaccatgttaaggcggttagtgttggtatgtgagttgaaaactggcaattgtttcatgttttggttgttcatgcaattattgattagcaaatgccatagaataacagaggcacgatctaacatgataccgtttatgtttctaatgcagcatttgtcagtgtcacatccaaaaaagccgctaaatgagtgtaatatttgtactcctaaaattttgcaataaaccttcctaaaaatggagtccttgttcgtcagacgtataaaaaatcgtaatatttcctcggtccctcggagttcgcatagttattttacttcataagttatactccactgatttgtaaaaatcttccaagattatctgacctcacttgttacactgcccctgccacagatccattggtgtttggtaggactttagataaccagaattgtatttaaacatgaggtttgactgagattcttgtggatttcgactcttaaaacttttagctctacaatctggtatcttgagctggaacttctcctgtcatataagtggcgattgatgcctgtagattctacattccctgcatttctgtgtattgagtggtgccctagtcatgacacttgattgtatagccaaaccatgatcatatttttcagttcaacaatttgctaatttctttcttgtgtttaaggaa

SEQ ID NO: 7504 - DNA, 733 bp, Zea mays
  Intron number 2 from transcript GRMZM2G042453_T01 (locus G RMZM2G042453) derived from phytozome v7.0 (chr-ID 7; pos 1 55590383 to 155591115)
ggaggagccaaccgcgacgccggcagcagggcgctgtaagtgctaactggggatatgcttcattgcttcttctttattcttgtgccgcttgcccctcgccttgctctgcgaacctgcagctttatcgtggagtgcatttcgtagaagcttggttttcctcagatatgtgtagttcgatttggtggtccggttcaaggcacacggatggttcagggggattagtttggcatatacgaggtagtcgaatatggttgatgtgattttctgtgatttttcttgtatccgtattgtcggaagaagcttcattgtcgaattcaaaagtgttattgagagttagggggtacatgatgtgaacatctcacaatagatccttgagatattgctgcagtgccggtatttggctgtttgtttggcatatgcagagagtaactacgttcggttaatgtgcatatgaattaagtgtacacactttgtgctgtgctatgttgtgttacctctacttctgttctgctagtaattagtcctccttacggttttggatgtgtagcttgtcagataagctactatactttcctgctggttccatctatcagaggtttaaaaaaacaaaacaagcagcaactgtttctgagataacgatgtgcactttgacctgctatttatcatttaatactttattttcatttattatggcgtagggtgtcaaagaaaccaaacaagcagcagcatttgt

SEQ ID NO: 7505 - DNA, 543 bp, Zea mays
  Intron number 1 from transcript GRMZM2G581185_T01 (locus G RMZM2G581185) derived from phytozome v7.0 (chr-ID 6; pos 8 8005468 to 88006010)
cggagtttggtagttttaataaaatttccttttgatttcatgatatgttttgaagatcaaaacttatacaaattcgtaaactgctgatagtgatcccttttctgatttctgcatatgctgactgaactacgcataaaacagggcattaagatgatcctttcagtaataggcctttttaggtagtaaaggaaacgtttgtgctctggtttctgcaagaggtttgcatataaatattttttctattgcagtctaggctccaacctttggttgataaacactctcaccataagtaacgaaggaataagaataaatgatgggagatacaagaatctgaaaatgaataaatgatgtgacaggttgtaggagagcagcatgagctaagtgaatgcataactctactattatattatatcattcctctcaatccatgtcttttaactggtgaatcatttaggtttctgtttgatttacttatgcttgttctaacgtgtctttaggccttatacaggcttacatagatttgttttaacaagagctgggcag

SEQ ID NO: 7506 - DNA, 672 bp, Zea mays
  Intron number 1 from transcript GRMZM2G107228_T01 (locus G RMZM2G107228) derived from phytozome v7.0 (chr-ID 3; pos 5 9325656 to 59326327)
tcatccgcctccttttccacgactgcttcgtcagggtacgtatacatggatctgtttgggttccttctctgctacttatactaagagcatctccaacaacgtgacctataaatgctttataattttaaaataagtaaattttatagaatttagggcaccaacaaaacactccgctccaacaataaagccccaaatttagattatatggcagcccactacggtgtagtatatttgagccacttaagagagtgccctatagttttttgacaaaatttgttgaattgacgcactgttggagtggtttttcctgtgtagagccctatatttcgatttgaggcattaatttgagtcattgttggagatgatctaagggaaattcccatcgtatcgaataaagggttcacagtaatcgacatacatatgccttgttttggtttctttggtcggtttcccttctttttgggcttgtgcttttgcatgtaaaaaagaacattcaactctcgttgttctctttacatgcatggctagtttgtggttgtcgtggtcttgtttgtggtcatccctgcccactgtacatagtcacacagtagtatcttcatctgtctactcgatctctacttgtgattttgcaaacgggatgatgctctcatggtggtggtgaacagggctgcg

SEQ ID NO: 7507 - DNA, 457 bp, Zea mays
  Intron number 2 from transcript GRMZM2G141350_T01 (locus G RMZM2G141350) derived from phytozome v7.0 (chr-ID 3; pos 1 83554523 to 183554979 reverse strand)
cgtcccctctgacgctgcacacccaggacccggaggcaactcttcctacacaatctttcagtttcaccaactggaaaaaaaaaccaaatctaattctataatttatatggatgcacggtggagcagcagatgtttggtatagctccatacttttctgttttttgatgtacggtggagctggttaacttagatgtgtttggatacaataaattggatttaaatctatacctgtttttgatgaatctggtggacctatcccaaacatgccatgagtttagtgaatctatggagtgaagcagatccgctagtgaaactgattaaaaaattagacttaaatctaattttaatggagttgttctagacgtacccatactataaccacgcctttttcaccgtgattacttactgctcggtgctcgcagaaggagctgctggagcccgcgctgaagggcacgct

SEQ ID NO: 7508 - DNA, 802 bp, Zea mays
  Intron number 1 from transcript GRMZM2G377589_T02 (locus G RMZM2G377589) derived from phytozome v7.0 (chr-ID 3; pos 1 94476782 to 194477583 reverse strand)
cctctgaggtaagcacctccaacaactgctgcccgcggcacactgtgctcgctgcgataagtgctatgtttagaggatttgattttcttcctatgttaacttgtgtactcactgtggtaatccaacataagctcatatgtgccatctcaagatgcagatgcaggttgaaatatgaatgtgtgtgcaaaaacgttttttggccaattggcctccttaaattatttcagtccaaattttttttggcccgcttaaattgcagtggtaccaattcatatgtaaacttagtcaagatagtattcaatgattggatcgaggtgttttatttgtattctgcatattaaagcgacagaaatggtgtgaattgtcgggtggtagatgtggtgctatcctattatgatcttcttttggatattgtgtatgcacctctgaattggtggggaaaggatatgcaacaacatcctatggaatgcatttggtctactcaaccactttatttgcatcaattgtttaaaactgcatgaataataaaaatgaaaagtataaattatcatattggttgggtaaatggaagactccaatattctgtggaatttgatttctttacatatatatttgattcaaggaccacaagtgtactcatccctatgtgtagtagattagaaatagagatgcaggtactcagaaaacactgctagacatttaacagtacaagataaacatggctactgatccatctgtgtatttgttttttctcatgtataacatagatttggtaaactgtgcgagtctgttacacccgacc

SEQ ID NO: 7509 - DNA, 608 bp, Zea mays
  Intron number 1 from transcript GRMZM2G043310_T01 (locus G RMZM2G043310) derived from phytozome v7.0 (chr-ID 6; pos 1 02599803 to 102600410 reverse strand)
ctccgcctccgactatccactcgtcacccaggacggtaagcgcagatgcgatctgcctccttcggccccccagttccgcgattggatctatccgtcgcgggaagacgcgacctttcatcctattttttcggtgcttctaaaggcgcgatctttgcgttccgggcaaaatcaattccaagtttgggtcactggacgatggggatttgaaatttggcgtacagtgtttggttgcgagtgttcgccaaacatgcgatcttatacgtgggcttggagttgccacttgggaatggggtgagattaatttatgacatgttcttccacaattggtctgggaatttggtaagatttgattatctttgccgcttctagttctaggtggtatcagggaggggaaagtcaatcttggggcgtgtatttctttcttttaaaagagccccgcactgagtcgcctctctccctctcttggttgcaatcttattttggttcttccctttcgatttactaccgttttatggattcttctacttgttcatggtgcaagcttttctgttgtgatcaacttgtctctttgtttgtctggtttgtctatctatcggcagacctgttgc

SEQ ID NO: 7510 - DNA, 981 bp, Zea mays
  Intron number 1 from transcript GRMZM5G869993_T03 (locus G RMZM5G869993) derived from phytozome v7.0 (chr-ID 6; pos 1 07639610 to 107640590)
gatctcactgactgttctttcaaggggtgagtaacaattatgtctttcgacatgttaatttgatgtactgagttgactataggttggatcaggatagtggatagctggctgcattcaccagtaccatatttcagaaggctcattatcacttgattacatggatgtgaaccatgattaattgtcagggtttttgtaataggctttcttgtaatcaactgtagtgttcattatcccaaattcaatgacatggatttagttggggcatgatggaatatagtaggattaggaagaataagctcatcctctgaggctttgattgttttttggggttcctacttggttacaactaatgatatgtccatgtttatagccttcaagtctaactgataaccctaacaaactaacaaatttgatctaatctgcccaaggtccactaatccaaaaatgctaacaatgatatttattgtatgtcaacatatcacatattcacatgcatacaataaaaaaaccagacccacttgtatgtggttcatcttatgttcacccccccaccaaaaacaaaaacagatgttactattgctgctgaattatcattttgaactgcaaacttgctggctgttccattagggtttgtgctttgaaaactgttgaaaagaactactttactctttatatttctaaatggcttttgatttcttacacaatgagtaacgaattccaaataatttaagcaaactttgtgaatcaccagttcttggatggtttctaaggaattgttacacattgggatatatcttggttctggccatgtaaacattagctactttttgattcttagatttcttcacatttttaagattctactatgacatgctgtcacgatattttatttcttgtgggcttaaggttttgtaattgctgattatgtattgttcttttgactgccattttacctggaacttcaagctttgtgtgggaatt

SEQ ID NO: 7511 - DNA, 794 bp, Zea mays
  Intron number 4 from transcript GRMZM2G006452_T02 (locus G RMZM2G006452) derived from phytozome v7.0 (chr-ID 3; pos 1 66013126 to 166013919)
agaaaaagctctttgtcattgaacagcaggtattctggcattctgcaatgcacaatgtccgcacatgaattttattattcttattactgtttgaattcatatggatttatttgcaggatatattcatgtccttttgcttataaactgctgttctattatgttaacttgaagcttgtaaatttcattaatatttatgtttggtcataagatttaaagaataccatgagacatgatgcagatttacaccatcgaatgcttaatggcaaaacattttgcttgcaaagtaattcttgtaatgggacacattctttgatatagccctgtttggcacaacttattttcagcttcttcacagatttaagcagaagatgtgccaaacaggaagcttgcttatcagttcagctgcttctcagaatgaactaaaagcagacaataagcagaagctgttttttcactagcttctcagataatctgttttttcaataagtagcagctatgccaaacagggccataagcttagtcaaacttatgattgtttgactttgactaaacctgcaaggcctttctttttgggacatgtggtaatacgcactatgatagaaatagaaaattcatctcttatcaattgagtggcgccttgtgctggtcactatcagttatatctctcttcgttgcaactgcaacatgttatatgccggttattgaacacatgctaaattttgtttctagttttttctaatttattaccccatctcccagattggagcccttttaccattgcagaaaaggcacac

SEQ ID NO: 7512 - DNA, 583 bp, Zea mays
  Intron number 1 from transcript GRMZM2G060868_T01 (locus G RMZM2G060868) derived from phytozome v7.0 (chr-ID 6; pos 8 6030760 to 86031342 reverse strand)
tgtattttgacattgtttagttcaacatattcaaggtatgttccaaggctatcttagaaaaattcctgcaaatattgcattttgattcatcttgttgccctttttgtttctggtatggaccatactatgatttctttgaacaattagttactctctcagtctcccaaccacatctctctcggtcttgcttcttgcccgttcctaattttggccattatatatttataaggacgggtttgagaaaacatctctcgacaactgaaattgttgagaagattgtgtttgctcgtatattattctcggatcacagctctattaacaacaaaggttgtggtggtcatatcacccttgtaagtctaattcatgatcagtgcttgaaacatgcaaatcacaggttatctgcatgcttccttggatcagggcaacctgatagtcgcgttgaagctaaagcgatagctggcatgtataagattgtttatgtttgccacgagacaatattaaggttatcattcttgtggtattctaaagtttattaacatgttgtcgtgcctatcttggtggtgatgtctcttcttgcagatta

SEQ ID NO: 7513 - DNA, 594 bp, Zea mays; identical to SEQ ID NO: 4250
  Intron number 1 from transcript GRMZM2G343543_T03 (locus G RMZM2G343543) derived from phytozome v7.0 (chr-ID 6; pos 1 02762179 to 102762772 reverse strand)

SEQ ID NO: 7514 - DNA, 975 bp, Zea mays
  Intron number 2 from transcript GRMZM2G104226_T01 (locus G RMZM2G104226) derived from phytozome v7.0 (chr-ID 3; pos 2 14063192 to 214064166)
tctgcttgagctcctctgccgcagcggccgctccggtatggttgctcccttttacctcctggactccatcctctgccttcgacctgatctttggaattccactgctatcgggggagagagaggaaattctagtggcgggtggggaaagtagcatatagcaaatgaacaaaaaaaaagttcgatgtatatggtgtggtgtgcaggtgtttggcgatggaacgagaaaggtgcgcgtgcgatgcaaaggtgttgatagggaatgtttgaattccaaagttatccttccaaatctaaagagaagaaataatcgagtgaatggtgatataggcaaaatgattcatcattgatggtaacagcaataaattgacgcttgtggatggtatcggtccaatgctaaccggacagtctatacagtcattgtcaaaaccagaactgaaagttcagtctatatcatcagaagccgtggcccaacattcttctgcatcagttttttcttttggtgcctcaaatcaccataacattgttctgcatcagtttttttcttttggtgacaacttacggttagaaatgggagattctgtgaaataaactatttagtctctggaggcattctgctgcaacacaaccagaaagaaactgcttcttatttaattgtttggaatacagtcacaatcatcagatacaaaattactgacaatcagggaaatgtcatacaaccaaatgcgtctactttcacttggcacaattgctgtgcacaagcaatccactgctctgctaaggaagctattagtctattactatggtaaatctgacttctaacgggataaaaaatcaatgtaacagtaactttctaggattatcattgcttcaatactaaaaatgcttgcgattctgtcacttctttaaacctttgttatattgtaattttacatgctaattcaaagctctgtttattgcacaggttgctcagacatc

SEQ ID NO: 7515 - DNA, 879 bp, Zea mays
  Intron number 1 from transcript GRMZM2G127780_T02 (locus G RMZM2G127780) derived from phytozome v7.0 (chr-ID 3; pos 2 08787385 to 208788263 reverse strand)
gcgtatccttccttctcgtttcgctcacccgtacggtttctttctcttttcgctctccgttcggtggatggattatggcgctcatgcgtctgctattgttgccttttgatttgaactactggagcatgtaactttgtcgctccttttgctatccaactccattttatcctcctatataaagctttttttcctgttaatctgtcctttggaaaacgaaaacagtttttgaatctggattgcccttggatcacagtttgccagttcttatctcagaattatctgcgtttttttttcttttccatgagtggggtgtgtagaattctcatcaaaattttgatccactctatttttttgacagttgagattatcgagcctttcattctatcatgttagcgttgctattagcaatttagtaatatatcctactattaggtgcccttcattattggggtttgagagatggtgagagctgagccaactcccatttatttgacgggtacaccaataacatggtgcctgcactgaaggattcatgtagattggttaggttagcgtcgcatgtctcagtccctggaatctagttcagttggagttccttgaccgcccttgcatttgtgaaacagaaaataacttttttgtactttaatcaaatagtctatgtgtttttttagatctatccctatgatccattgatgaaggacaattattagctgcataatattagcctgatgttatgtctgttgatcactgtggctgtggttggtttattctattcgccattcgtggacaatgaccctttaaagtatatattctatttgcaaaccttgacctttctatcatccagctattgaagaagcaatcaacagcttggaaattgat

SEQ ID NO: 7516 - DNA, 560 bp, Zea mays
  Intron number 1 from transcript GRMZM2G396516_T01 (locus G RMZM2G396516) derived from phytozome v7.0 (chr-ID 9; pos 1 213104 to 1213663)
ctgtccctatgtaagttcctgcctaagcacgtcaatctggaagaagaaaacaagtttccttctatagcattacgaacctgaaggtcgcgtcatgcttgttattctgcaaccaataattcagcggcctccccgaggtagagctaatcaatctgaactagcaatcgggcacacacaaagacaccctaaaacagcggatggtttctttagtgattgtgagacaggtttttgggtagcatgtagggctggtaatggatcacgatccaaatattttttacaatctgttagggccctaaactaattttagttcaaaaatgaatagaaatagagtctgttcttgtaactttatagaaacaactttatagtgaaagtttttttacgtagtttggctgattgcaagactaataagtatcaattgtttgatactgaatatttgtgttttgtctcctgcaaataagtaacttatactttgactatgttacggtagttaactaggttttattcacatatatctactattctatatagtcaaagcaaggtggcaccccagtgttgatattggt

SEQ ID NO: 7517 - DNA, 886 bp, Zea mays
  Intron number 4 from transcript GRMZM2G029722_T01 (locus G RMZM2G029722) derived from phytozome v7.0 (chr-ID 7; pos 5 6095058 to 56095943)
aaaatcctttgcagccgaagtccaaagtacttcaggtaagcttcagcagccatcagcagcaccatgtttcaacgacacaccttagatggtgacatttatttccatgtattctaggaactatcccaagttttgttcactctgatgaagagaaccgagccttttcctagacgagtactacatgctggatttggaggagaagatgagaaaagtgggctttgttaacgtttgctccgtcctgatagaccccaggcacagaaccgtcactgcaacgtgccttactaattgggtcagacaatcaaatcccaagcctggccggtgtacaacaattgactatttgaaattttgtatccttactgggatggttgcacttgtataaagtagagcaatctgagtgaaacaacaaatcgaagtacaccaatttaccttccacgcatggacattatgaagtccaacactaggactgttatgatcagatgattcagggaaccaatctaaaaaaactcatgtgatattgtagccatgaatcactttcatgaaccttaattaactctgaaatatttattagctggtacccaaccaatcagcattgatgtataaatcgaaaataaaacatacaagacttatctcaaattgcacaagagctggtgctgccaagcgtatatgtgattttgggttaataattcttagaaggctggaacagaggtcttaagtaaatattgtgcaatggaatttagttgatcgaatcaatcgtgtcatcatggttacccatgaggccatgacataacaattctgacagtaatatgtttttcttcaactcaactatgagttagctacttcgatgtcaccttcagttcgttgttggagcatctccaacaaccttcaaaac

SEQ ID NO: 7518 - DNA, 608 bp, Zea mays
  Intron number 2 from transcript GRMZM2G171579_T01 (locus G RMZM2G171579) derived from phytozome v7.0 (chr-ID 7; pos 1 12124381 to 112124988)
tttaggtatgtacttcagcatcagtttggtgtatcaagtagagaagttcttcctagcttcatttctagcggttaaatatgattaatttcttcaggagatattttgtcttttccattttagactcataatgtgcttaagtttactctcttcgggataatgaacatgaatgcaaatctagtattttctcaccttctagtctacaaatacagattacataagtactaatgatggttttgagaatcagtgttgaagtttgatatattctgggttaaaatggttaggctatttctctttttaaaaaatacagatgaatttaatttggctgacagctgtttgattttaaattttgaaaattgtgttgcttgtttcatgaatatgctctatttagggtcatttagtgccttgtacaaagatgaacctgaacttttttggtcgttttgttgaacattttctattaatattttccatattagttgtgaacgattctcagtttctcactcaaccttgtatttgtagcaaggatgttcggactgaaattggaagccttttataaacttatttactttattcctaaatattttctttacttttcagtttgaagtacatta

SEQ ID NO: 7519 - DNA, 1039 bp, Zea mays
  Intron number 1 from transcript GRMZM2G075951_T02 (locus G RMZM2G075951) derived from phytozome v7.0 (chr-ID 7; pos 8 7794710 to 87795748)
aacggcccccgaccggatcgcaggtcctcctcacggtgaggcacaggtgagcccatgatttgctcctctggcccttccctcccctccctactctcatgaatctatgctaatttggttctatctagcccacagagccgagtcggacatcacagccatgaccatgaggcatcgtcgcagcagtcagagtcatttttgctgccccctccccggtaagaggtcccaagcttttccttgtccagtgatgagaactaagttacctactattctctctaatatgatgaggataaatgtctctggtctgtacaaactaccaatctggacaagaaatctaatccactgtgctccaatcaactgacctctgataatggagtttagagtgtttgagtttgaggacttaggtataaggatgcattttcagctacatttacgaacatcttgttctttttttaatgcatctaccttatttctctgtatgaattcccactcgatttattatgcagttaacactagcactttacgattgattcctagcctaatccttaaatgtcattctaatcaccacaccttttagatctagacattagacttgtattgttggatctgtttaattgtttctcacacaacaaaatgagatgaagatacacacgagtctgagtttaccgtgtttgagtttgaggacttcgataaggatgcattttcaactatactagcttctgcgttaatttacttttgatgctgtgaaacaattataagcattttttcagcgtatgtgtatttgtgcaacaagcacaattgctttatgttccaaactcgcttctgccttaatttacttttgatgctgtgaaacaattataagcattttttcagcgtatgtctattggtgcaacaagcacaattgctttatgttccaaacacgcttctgcgttaatttacttttgatgctgtgaaacaattataatcatttttcatcgtatttaatgcatgcacctagataacttatgcatatgtttttttacttgcaggcacctataaattttgt

SEQ ID NO: 7520 - DNA, 811 bp, Zea mays
  Intron number 1 from transcript GRMZM2G136680_T01 (locus G RMZM2G136680) derived from phytozome v7.0 (chr-ID 6; pos 8 139982 to 8140792 reverse strand)
gcgcggccgcctcgccgcagctccaccactgccacgtaaggcacaaatacattcctcccctctcttttctctttttttgtaaactcgtgaattcagctctataggtttttataaggtaggtggttgaatagttcaaaacggattataagttctttattgtaggagtgtataaaaaaggactataagctgagctgtttggatttgctagacctttttagctgctagcaacttttttgtttggtcaatccaaacagggccatggagcttggaagcaggtcgagttttttttatattcctttaacgaaaataaaaaaaaaaagactgcctacttagattgatcataaaagatgcaatcgaacctttcaaattttgaatgttttttagataatggaaagtgcaattttgatatatagtcgacatctggtaacaataagggacccaaatctccaataagattaactgagtggatatgtcaatgaacttctttccccatatcaggaaagtatggattggggttatgtgattggaatcggcaccgcggaataattagtgtgtatgctctattggaaattcctgctagggactgatcttactgcaatgcaattcaattgttttttccttatgactaatctatgcttgttaaggggacatttatcgagttgtatttttttttcttctcttgtttcacaaatgtacccatttctgtgtgtatgctccagatgctcatgcctacaacataacttcgaaaaatatgccctacatcatgaactatggttaattacaggttgtgtagctagtccaaccattgcta

SEQ ID NO: 7521 - DNA, 501 bp, Zea mays
  Intron number 1 from transcript GRMZM2G356032_T01 (locus G RMZM2G356032) derived from phytozome v7.0 (chr-ID 7; pos 1 05069137 to 105069637 reverse strand)
ggaaaaaagaattctgcgccgaagctcttatgtaagctaaccgcttttccgaagagaaatttctcctcgcttgtaaattcctatagataacagatagttcttttccatgtgctttagttagtttacttctggtttatgtcttgagagagactgctaatgctctttgtccgatttcttctttatattaataaatatctaccacagcaagggcttctcctgctgtacattttttaaaaaaaaacattgatcaatctgttgctgaatgtcaacattctgaacacaatttcttgaaaccgagcataagcttcatctgaagtggctagtgaaaaagggaatgcaaaatcagtgtgctttgtaacctttcaagtttcaagtgaaataatgtgggcgtcccttgcaaagttgctctgttcagcacgcgcgtgaaagattgttcaattgcactaggacaatgtttgattagcagtatacctggccagttgcgtttgcgcccctgcgact

SEQ ID NO: 7522 - DNA, 837 bp, Zea mays
  Intron number 3 from transcript GRMZM2G347402_T01 (locus G RMZM2G347402) derived from phytozome v7.0 (chr-ID 7; pos 7 2030914 to 72031750 reverse strand)
gagttcactgttatcttggaggaaacatcttcaaggtacatgcacttttagttgagacaacttttcagactgatctgctagaaagtgaaaatttatgactgtccactgttgactgattatcatgcctagtttatttagatctctaaccatttcctaatctgtttttttcaagtggttttggctggccagtctacttcttacgccttcctaatgttccttttttcttgtttctatgtggctctatgctgctgattgcattttttcttagatagatatgttgcctctaaaacagtcaggcggtagttagtcaccaatgctctccttgataaccatgatgttgtgatctatcattaatttgcaaaagagagaaagggcctctagcctagtggcagttgttaaggcttccgagtagtacctccaagttccgggttcgatttccctcgagggcgaattttcgggcttggttaaaaaaatcctcttgctgtgcctcatccgctctcgggttacgatgtcctgtgcgtcaccctccggttgggccgttgcagagtggacggttgacgccggcctgttagtgacgggaggccagggttcgggaattttctcggccagcatcattgtttcggtctcttcttaatattataccgggatgacggtcattccctcctcggtcgagttttttttaatttgcaaaagaaattgaacctcaacagagatagtactgtttgatatttttttgacagtctgtttgcactgtgatgaggaactcagtaggcagctaatatgaataactactcaaagttcatgtgctattcagggctgctggtggaagtccagtgc

SEQ ID NO: 7523 - DNA, 549 bp, Zea mays
  Intron number 2 from transcript GRMZM2G047867_T02 (locus G RMZM2G047867) derived from phytozome v7.0 (chr-ID 9; pos 6 5960892 to 65961440 reverse strand)
ttcagggtggttcacggaacccagatcgcgttttggtacgttcaggatccagactggtagctaatgggctatgtgaccatcatttgtttgtgtccggcaacaatcaatacatacgggaaatatatgttctttcagcagttctgatatatatatatatatatagtatcaaattgatgtatgtgcaggtaaaacaagcaaagtgcagtacttcaataacccgatgtggcctggtatttctcttgtttctgaaaaacaataatagaaatttgccatgttttttttcttccaacatcttcaggttcacattgtatgatgatataaaacttggtcacacttacctagctaattttgtcaatttgataacttcaaaagatttgatatgcaaaactgactagtgaagactttcaatattggtgtacttgtgtatgtcaaaactattttccccctaaaaggctttaatggtcctacatattcaggaatcaggagtttgatcaacatcttttattatttacaggagaggcccattcattgaaagtggagaagatcttg

SEQ ID NO: 7524 - DNA, 989 bp, Zea mays
  Intron number 1 from transcript GRMZM2G047867_T02 (locus G RMZM2G047867) derived from phytozome v7.0 (chr-ID 9; pos 6 5961593 to 65962581 reverse strand)
gcgccatcgctctcgtcctcgccgatcgatccaaggtaagcgagacaaggatctggaagctcccgaagtctcggctgcgtggcaaagcgaccacgcccacgttcttttgcttgtttctcatcctcgtgccttggaattgtccgttgttttgtcgcccaacttttcgggtggggggacgccgttctggtttccgttttgcgtcgctgggtttgctaatcgcggtcgcagctgcggctcgccacttcgctctctcaaaacgccaaaatattatctaaaactgtttgattaccgtcgggtgtcggtggagctgcggcaataaaaaaaaagaggacctattcgcgtcctatatctgcaaaggaattgctggaaaagtttcgctgctgccttctcttctttttctgctgcgtacaagaaacagtctttgctcgcgtcgtgggttcttcccctgttcgattcaccgcgaggtctgcgacggaggtttgcgtgcctccgattgctgcatccgttgctgatcgagggtacttgttgttgttgtagccctgcctttcttatctgattcttgttgggtgctttccaaattccgacgtatagttgctgattgcacggtttccttttccccttcttttttttcttgcaattacttaattatataaaatattctgttctcgtccacgtgccttttttttcagtttggtggtgctcctcctactttattctattctattcgtctggtgtaggtgtagcaacctgtcacgcgtagacatgctgctttctgtgcctatccagatggctttgaatccttcatttcgattccgtgcgaagcagcactgataatgacgctcagtatgcatacgattcgcttgcttttgcttcgacacgaagcatccctgataactgacgcccctgcttgttttctgtgtctgaaattcttctgttgcctgacttgttgttgagccagagactgggaccttcaaagagcaataggactc

SEQ ID NO: 7525 - DNA, 521 bp, Zea mays
  Intron number 3 from transcript GRMZM2G008356_T01 (locus G RMZM2G008356) derived from phytozome v7.0 (chr-ID 7; pos 1 57671397 to 157671917)
gcgccaagtgtgctcggagcacccgtgctgccgtatgtcgtgaaattttttcagttgtcagaggatttactattattggggacgatggggatgggggtgcaagtgcatgcaacatgatccacttgtagccatgactgtttgctggttttttatgttttttaagggagtgcatttcagtgttcagtatgtcacttgcgttttagacttcagttatgctatttgtttggcagcattagttaggtggatactatgttgccaatatctcctctacatgatagtgccattaattaacttagttatgtcaaggatgtcacatatttatcaagaccatgttattgctatttactgaagctgacaattatttacttcgaagatgctgatagttcatattgaagagatttccatttatattaactgaataatgggaatttaataatctgttcttttcaaattgagttcatgttttgatccctgattgacaccattggctcttgtgcttcgtaggccccaccaagtcccgt

SEQ ID NO: 7526 - DNA, 931 bp, Zea mays
  Intron number 1 from transcript GRMZM2G081857_T01 (locus G RMZM2G081857) derived from phytozome v7.0 (chr-ID 7; pos 1 67105762 to 167106692 reverse strand)
tatcgaggttgatctcagcaggaacggcttctcaggtaatcttgatgaattttgtgatctatcagagttggaatcccactataagttgaatggtggtgatctatttaatgtttctcgtgtttttttatttcccgtaacattgcgaatggccagtgcttccactgccatagtgcttaaactgcaagctgcgaatcatattttgggcgttggtttggtaaacatgcatgtctctgatggagacggattcattatgatgtcatttcaaagtgattactgcatcttgaatctggaatactccatttgtttgggagatttgatgtgcaaacacagtgacagactcttgcataaatatagcatgcatttcgtggtttaggcagtgtgccgttttctttagacggatatcataagcactcttgcaactacatgcatgctggctctcagttcattttggacgatttctccccttgtttaagcggtgtgtattgcttttacagcatttgtgatattagcaataatttgttatgtaactaagcaatctattaagcatcaaccaacagttttctgatagctggaggttgatatttttcccctattaaacaacgatcatgttgattcttggtctgtacaaatttaggtttttttctggatctgtgccctctaacatcatttttcacatgggatttcttcaatcaagaaattgacatactatttcaatgctatggcatgagatcgactattgtgaatgtatatcttgatgtttgaacatgtaaggttttagtaatataacaacttaccatgtatcctattcctattttacctactgcccttcacatatgcacttgtgattgacatttctcttaaattgtaaatgacacaggcatcctctaatttttcagggtcagtgccaactgtgaattctacgactttgaag

SEQ ID NO: 7527 - DNA, 728 bp, Zea mays
  Intron number 1 from transcript GRMZM2G302891_T01 (locus G RMZM2G302891) derived from phytozome v7.0 (chr-ID 3; pos 1 24301718 to 124302445 reverse strand)
gtttcgccgcggagctagattgtgcggggttccaggtgcttcttcttgtccgcagagttccgggggttctttggcttgattctgctgttccgttccggggttttcggaggcgttgctggggaatttctctggttcgtgcggaattcgatcgagttgtctctatgggttgggaatctaggtagcggggcgaacggccgtggattccgtgagtcgtgattcaactgctagttccgtttatgacgatcttgtttcagcgatcaagccatcagccttggctgcgcaacatgcccccaattcgcagaactgcgatcgctagacgaatttggtggttagtttccggttcttcatctggtaattagcatctcactatgctgttactctccgatgaatccttggcaatcttcgtgaaccggtgaacacttcacaagttgctgtaaatttagtttcacacgcaccgcaccgtctttctcaagtgcgtactacattgtaatgtttcgtcatatgcctctccgtaaattggctatatgtttttgtggttctcggtaggtgttcacatcgataagacatcagagatttcgtgcagaatttgattgagttgtatctctgtggtggtgatgagtcttcttggcattatttgttctgcttatttaggcattaatcttttggcctaatctttttcttgttatgtttcagtgtcaagccctgcctgcactgcgcatcctgatcgt

SEQ ID NO: 7528 - DNA, 592 bp, Zea mays
  Intron number 2 from transcript GRMZM2G471139_T01 (locus G RMZM2G471139) derived from phytozome v7.0 (chr-ID 3; pos 2 28667764 to 228668355 reverse strand)
aattcaaaacatacctcttgcataggcttgaaaaggtatgcttatgctcgatgcccatcagttcatggctcattgccaaactgaaccatctaactatctgccgtgataaacagaatgttgtgttagctttggtaccatggtaatccgatgacaaaagtccaaaaatgtggttccatttctccgttttttctgctcctctggaccctattaaacaccaaagatgccatcatctgtctgtatcttcttgttctttttttttgaattcctgctttcaagctttacatttcttcttgagccataagtgccttggtcataagcttagattaatttttgaaggaatcaattagtcctctgaattaagtgtttcctgcatgaaaactggtggcacactatacatcatttgccacccttttcttctgtgtgttactcacagtggtaccttgtctcagcacttcctgacacattatttgtctgtattgccaatcaatctgcattgttaaaatgcatcgttacatcaactactctttgtgccatccagccaaaactaaattacagttagttcgttaatgtttgccctcttttgtctggcagg

SEQ ID NO: 7529 - DNA, 854 bp, Zea mays
  Intron number 1 from transcript GRMZM2G135054_T02 (locus G RMZM2G135054) derived from phytozome v7.0 (chr-ID 3; pos 1 90945677 to 190946530 reverse strand)
tgcccgccgctggtctgtaaccgggcgtggacctggttcgttctttacttctattacagtactatagatatctgtaatttcggtactgctattttattgttaataagaaagttctgttttctttatatactgtaaatatgtttatcgcatgatatacattcacatgacaacgcttgcaaatggcctgtagcctgtttacttgggtacatttattccactattctctatggaacatatgaagcaataataactgtataatgtattgttctctcccatttaggggtgttaatagatcacggtccaaatgtttcttcacaataagttagggtccttaaataattctagttcaaaaatgaatagaaatagagcccaattctaatccgatccttaagttttatagtataaaatctagaaaccattaccacccctactcccattacatttgattatctttctacttgcatggagctataaatgatctattttcttctttgggttatagacaatctaaatgaagaatgacttagttgacaacttggggtgtcctttgagtagtcgaggttcgttaacttggggtgttctttgagtagttgaggtccaggtccatttgatttgggaatcagtagttcataaacagcgggtacgttatgttcagtaccttgtacttcacttgctgtgccaccttatttgggaatcatgtgtagcataccaccttatctgttaccccattatattgatcttgttgggaataaacaaattttgattccatttactattatttcagtttctgacacataacttcataacagcaaaatgttgtgatgcttttgttactgcagatcagtactctagac

SEQ ID NO: 7530 - DNA, 495 bp, Zea mays
  Intron number 1 from transcript GRMZM2G420098_T01 (locus G RMZM2G420098) derived from phytozome v7.0 (chr-ID 3; pos 1 6150345 to 16150839)
agctgagcccctcaacctctcagtggctcctcaaggtcagcagtagccgcagctggaccctctagtttctgtgctttgaagtaccatatactatgaaagaaacaagtaacatttgagtactattgctatactgcagaaatatattctacagaattttctctcacgatcttttttgtcattgcaactttagggctgtgatagtgtgatagctattgtctagatatgcaggttatttgtactctgctatattgaaggcttacaaaaataactgtagtgtgatctactagtaattcttacccttttagtgaaaaatgttagtagagtaagaacgtgaatggtttaagggagtaaccgaacaaaattgtccggcattgaagtcaggaactgcatgcattctggtatgaagactgaatgtttcagtagtgactccatcagtaatttgttttcttttaaatggcagtcaaatcagaagttacaaggtttaagggaagaatt

SEQ ID NO: 7531 - DNA, 1015 bp, Zea mays
  Intron number 1 from transcript GRMZM2G470740_T01 (locus G RMZM2G470740) derived from phytozome v7.0 (chr-ID 7; pos 7 6575788 to 76576802)
cagaccctgagtgtgcccaagccctagtgagtggtgagagctatagtgcatgtatttgttgatgcactgttttgtgtgtcttctgcttatgaatgtttgtaatcaaaatgacctaattcatatagagatcaactgtgttagattgtttcttatgcttatcggtttcttttcgcacatgatataaaacagattttggtaacactattttcagcggttccctctaaattgcaccctctatatcccactaacgtgccacgtcagctcctcctatatttgtactctgtacagtggttccccctatatcatcctcctaaaatccactatactattaaaatatagatttcccattaatgaactaaactaccattcatataatttcctttatcattttttcacctacctatatacaagtttacgtttgtaattacacgaatccttattaattgtttattactatttcaaatttgtatgggtcattacgtatatgaaatgaacagtactgtgcacagcttgctgttttcggcctattacatcttgctgatagaaaactcgacgaagaatacggcggtagacttcttttttgagcgcgcacgcgaatgggagggagaatatggcggtcaccggcgaccgggacgggacatatagtggcacgctcaatccagggtgagagaatgttactgcagcatagcgtgctcggtagagagaagcgttgtggtgcatagcatgaaactgtgtccgctaaatgaaggagaggggctgctcgcgggaggcgttgaaaccagtctaagagaaccagggtcggaactgaaggttcttaatgaagttattggctaagactaagacttttattgtgttcaatattttgtagcatggcatctttgtttgtaaatattgaagttgccctttcctttatctatacaagtaaaattggttataatgttgttttgttacataaatttatgaacatgctaaactccattggtcttgcagatagtagatttctgctgtggggcaa

SEQ ID NO: 7532 - DNA, 1007 bp, Zea mays
  Intron number 1 from transcript GRMZM2G040102_T01 (locus G RMZM2G040102) derived from phytozome v7.0 (chr-ID 6; pos 1 64387509 to 164388515 reverse strand)
cttcttctctcctacgtgttcgtcagcccgctaaggtaacatcctaagaagaatcgcctcggcctatcattcgattcatcaatccatgccgttttttccccgtccgacgtagagtcgggcagctgtgtgcggcgtggctaacgtggcatggagccgcagttgcctttgcttgtttgaaagactaggattgcctttcctgcgtgggcgcacactagctgttcgccgaaattcctgtggagtgagtagtgatagtgatagagcaccatggcaggggtgagtcctttctaggatttttttagaaaagtaggttgctcttgctttatttgtttgcaaataaagcattcaaattattacagcaaacgagacttttagcgtatttctaagcgagtgtgcaccagtcaacaccaacatctcacaaaaggagtacatatgtgttttgattggattgggtcagacgtacaaataacctgtgcctattatattgggttatacacattaatatcttgtattcttgtgtgaggctgtgagccgtaagggcaaatgcctggaacaggatgggcatgtggtagcattagcttacactccttaaagcctgatgactttgtttcattactttgagatttcagaatcgcgcacgcgctgctgctactgtttctagtttgatttggacattctgtgctcacctgggcacattatggtgctgctgttcgttcataacatatggatcgacagattgcagttccgttaacgagttttgttctgtatcttgatgttaaattactagtgtgttggaatttcatagctctggtctcttgtttccgtgttttaagtttaactcgatgttttaccatctttgagtgggctgaaagcttccttatagagttgcagtttatcctgacactctcccaaacttacttctgatgagatgtgcgcaatggttgctaagcatgggtttccacggctccctttcaccagacttcttacatgaattgttgtccagtgttaag

SEQ ID NO: 7533 - DNA, 802 bp, Zea mays
  Intron number 1 from transcript GRMZM2G063924_T01 (locus G RMZM2G063924) derived from phytozome v7.0 (chr-ID 6; pos 1 15472212 to 115473013)
tggcttcgggaccgtgtaagtcttaattatgtggctccgagagctaatttcatttaactaatattacagaatttgctaatgctttgtggcatgattgacagtttgggaaggaaatgaatttgaatgatgacttacgtcagttatctattggaagcgtaactgccaaaagctatggacgttacgacgtcaatggatatcgctttcgttcaagcattttcgaatcaagtcatcctatggccgccactcaaaatagtggagtcgttactaggacaaccgacatggaaggacccgaagtattataggaccgaatttgggatgacacagatccaacctgaaaaattgcttcaaggacacgacacgtatatccttgcccatcaagcagaccaagtttatttctcgacatatccatgcaaaaggttgtctaaatggagggttgtgtacaatgtaaatccctgcgaacgcctatacactcctggtgaggacgaatatcaaattggtcaccttgagcaggttgatgaggtgtttcaagaagaagagttgccaactagttttcatattgatcctgcaccggcattagattcactagttgcagacgttaacgacttaacttttcccgagagacggagaagacaacctgttaggagaaaagttacatggcgacctctgcatagaagagaacaaatagatcctgattttgatgatatttaacaagtaaagttgttttgttatttcatttgtttatattttaagtattatgtcatttttgatgcactaatgaataatttcttattttttatgcagg

SEQ ID NO: 7534 - DNA, 1068 bp, Zea mays
  Intron number 1 from transcript GRMZM2G060762_T01 (locus G RMZM2G060762) derived from phytozome v7.0 (chr-ID 7; pos 1 60372436 to 160373503)
ggcgggcagaaaaccggagaccctcgccggcgcaggtgagttcctctctgcatccgtttagttagttcaaaggttcttgggggtcatgtgtagttttctttacagcctgctggtagttcgtgtgaaccagggctgctaaaaaaccgaccattttcgcaagttttcaatgcttactccctattgtttgactcgatttagtttcgaatggagccagtccttccgtccttctggacctgggaggtgggagtgccaaaaaaaccgatcttgtggcgaagcttttctttagtgcgtgtcgagtcctattgaaattgcttgggcaggctgtacgtgtgggcgtgaatatttggggatccttcttcggactgggaaaggttacaccagaggaggctccataaagttctggaatgagtgggagggcgggggtcagtgcctttgtggaaatgcgaatatatctttccgcgtgtaaatttttttccactctttcttcctaaaactatggcgcactgaagtagtcgctgttgcctgtagcccgtaggtgctgggtaaatggtcatgtattcgatttgggcgatcgacttaaagcctggttgaccagctgaccttatgcagtggctttgtactttcccagtcgccaattcgccatcggtaagatggtccgtgtctcgtgtttattgcaggacaatgtaagcacatgtcaggaccagtcatgcgagttgaacttgaatcttgttgtgtcagctgtgagctgtcactgtaggaattgtgtacaagttcacaaaatatgatcatgtattagcttgttgccagtcgatcaatcaaaatatattaaagatgaactcaaatttggttttttacctggaattttgccttgtttccagaaactcatgagtaccatgcaaacaatttcagttttaatggatgttctgcacagcagcttcgcagtgttgttttttccccccggaagttgggagtgatattttgtactatttacatattaataactgaatgtaacaatagtgccattttggcgcaggtgttaattctgtaatcttgtcaacttcagttaat

SEQ ID NO: 7535 - DNA, 653 bp, Zea mays
  Intron number 1 from transcript GRMZM2G426953_T01 (locus G RMZM2G426953) derived from phytozome v7.0 (chr-ID 3; pos 1 82045541 to 182046193 reverse strand)
acgactccagaaggagagcttcggcaagtgcatcggtaagcaaagtgctagtgtgctgcttgctcttgctccatcgagattgcctcttctgtcggttggccacatgctgcctaagtgcttggtgtgatccagactggaaataaaccccaaataatcgatagttgagacgctgataagaaccgctaggcgtaggcactcatatgacagcaattgttaatatgtgcatcgaatctctttccttgcttttaggaattcttgtttgctttacttttttttttgagtgtttcaaagagctctcatggagtcatggtactgcaatgaactgtgcctgtttccaccaagcctacctaactgagatgagatccaccgtcattcgctccccaagggtcttcccaaatcatgctgaaagaaaagactcttcccaaattttaatgaagtttctccccaaagtggtcctttagcactaatcggtcagctcggacaaacaagattctagctagtaacgccatgggccaccaccatgtaattctatcccatgctttcatctgccagcaagcgtaaaatcatttgctggcgagctgttcgtgttgctggtgcccgtggcgtgatcaatggatgatccgtggctgactgactgatctcattcccaaggc

SEQ ID NO: 7536 - DNA, 641 bp, Zea mays
  Intron number 4 from transcript GRMZM2G102605_T02 (locus G RMZM2G102605) derived from phytozome v7.0 (chr-ID 6; pos 1 64897042 to 164897682 reverse strand)
gatctgaggtatggaagattttaacaatggccctgatgcatatcatgatgaagttttgtttacacaacttcttattaactaacgtaaagtcggttgtttagactactgctgctatagagacaaacattgtagaagcagtagaagccggtacggattaaagtcaaacgaacaaactaaaatacaagaacattttggttaaccaagtagtaaccattttttcattgtagtactgaactatgttatgtgtgaatagcaggaagcacttatgtctatatatcaataattgatatagaaccaatccagtttttttaagttgacaccctgatcagaagccatacaacataccttgaagccacattttctttgataaggacttttaacctacatgccactgagacattttttggggggtggggtggggacaccccgagacttgtagtggtagcatactttgaagtattatcatgctggctttcatattctcaagttcccttatgaaaactgcttaatttttccaggtaaaaatgcttattttcatgaactgaaaaatcattgtttttttgctcatgtatactgaatcctctgatttccaatttctggttacaggggaactcaaggtggtgccgtactgtcactggcca

SEQ ID NO: 7537 - DNA, 742 bp, Zea mays
  Intron number 4 from transcript GRMZM2G146778_T01 (locus G RMZM2G146778) derived from phytozome v7.0 (chr-ID 6; pos 1 23672799 to 123673540)
attggcatcgccaacatatttggtaagtcgatttgatgcttaccgccttatccacctccgttctctctgtacccataatatttgttctctagctgctctgatgagattggtgtatatttacaattgtttcctttctaattttcaaaataggttttcctatcctcctcaatattttgaaagaagaccgtgagaatgtagagcttgtgataggtgccctggagacctttgagtgcattgactcctattgagatgtcacaagggccatatcatgtagtgattcaattgttctatgttgtattactttagtgagtatagtttagttgtgcatcagccaacaactagagtatgagtttatcttgattcttgatgtcggtaatggcatatttttgattttgtatcaattctcggttttggatactgaagttatttatttggtaaaatagattatatgaactgatagctattgtttgtaactcaaaatttctttagcatatatgctctcaaataatttgaactatttgatatttgtccagctgataattgcagtccaatatttatttcatattataaagatgatgctctcaaataatttgaattgtttgttgtttttgcacgttttgtgactgcagagagcaatttttgaattgtagaccataaggttattatgtcatagtagcaatttttttctgtttcaatgtgtgtcaaagattaccttgaactttcatatagtccaaggttgtat

SEQ ID NO: 7538 - DNA, 761 bp, Zea mays
  Intron number 2 from transcript GRMZM2G392700_T01 (locus G RMZM2G392700) derived from phytozome v7.0 (chr-ID 6; pos 1 07883580 to 107884340 reverse strand)
tcaaccatactattgaaatcctcacccagctagaggtaattccttctttactgcaacactaatttaagtcttccagatatccactcagaattagctttaccccccaaaagggaagtgattaaattcatgctcttttgctcagatatcagatcagtgttctttagaattattgtcaaaagtggtttggaagttttttttgggacatctgtggttggaaatattctttttgttccaattataagatgtgctggcttctttctagatacatgtcttttgctatgcacctagatatacattatatctagatacatagtaaaagctatatctctagaaaagctagaaggtcttataatttggaaaggagtaattattagatatacattatatctagatacatagtaaaagctatatctctagaaaagctagaaggtcttataatttggaaaggagtaattattatacgcaatggaatatgtctcccaccatttcaatcaaaatgttcggttgccacctgttagacaagaaccatatactagcatgagatttttttgtggagctcatcaagcatgccatggactggttgcacagcatcgttatcatgctgtttataagagtactatttactaaagcagtaatgctacatgaaaagacaatttgaatcatcacatctttgattgcaatgctgcattgattttataatgcttggttacatccagaacattttggcactatccataattatgttttctctgatttttcag

SEQ ID NO: 7539 - DNA, 519 bp, Zea mays
  Intron number 1 from transcript AC210027.3_FGT002 (locus A C210027.3_FG002) derived from phytozome v7.0 (chr-ID 7; po s 130133886 to 130134404)
tgtgcttgtgccggctggagttctgcagggccacggtaggacggaaaacgagcgggatggattggattggattggtgactgcacaggatccagttcctctggacctcccaactcctaaaaaagttcagtttgtttggagttgcgtatccgtatttgtactaatcgtttttttgtattcacaaattgtatatccaaactgggtaccgaagctacagttgtaattattaacagaggggaatgaccgaatgaggtgtatagattagcgaggattgactgggcccgcgtagagaagagcaacataccaataaacaagatagacggcgtgctggccggctgggattatcccaaaagccagtagatcatagaactgcatcctagtatcacctcgactcgcccttctctccatacttttgcagaaagccagtagatcaaagaactgcatgcatgtgatcactaagaagtactgtaagaactacggattgacaacttttttttttgcagcgcacgagtgttcaaaaa

SEQ ID NO: 7540 - DNA, 621 bp, Zea mays
  Intron number 1 from transcript GRMZM2G069201_T01 (locus G RMZM2G069201) derived from phytozome v7.0 (chr-ID 3; pos 1 85425151 to 185425771)
tgtcgcgaggggacagacaactgaccctactgaaggtaaatctcccgttttctttgccttcttcagtccgagctttgggccagacaattggaaattgctcctgccaggaacaaatgagaaaagctttaccatctatagctggaaatttccctgaagctttgattcaagcagaccttgctttgtttggattcagtcattgtttctgattgcataatttgagtgtacataaagttttgcagaacccattttgcttctcatccttttgtttaactgtcaacagaccaaattccgattgcatgatgcgtatgtaatggtgttgtataccattattgttgaaccagtaacaaaacaataatcgtgaccaatcaaaagcaattcacagacatgatgagaaatgtggcctctttataatacataccatgttcaagtaggcattaggtatctcgcaaaacaagtaggcagtataactagagactggttcttgttggcacctattgaaatgtgtatgcatttccattctgcactactcagatactccgttgatattttaaattgctgctgaatattgtctctctgatatttgtagtgaacgctctcaaggcaatcaaagccagcctggtt

SEQ ID NO: 7541 - DNA, 662 bp, Zea mays
  Intron number 2 from transcript GRMZM2G312997_T01 (locus G RMZM2G312997) derived from phytozome v7.0 (chr-ID 6; pos 5 3723212 to 53723873 reverse strand)
aggtacttttaattttcattcaaaattctaagttctaaaaatacaagttaataaattatcgtaatttaattaagcaattatttccctttgattttggtaattcttgttgttgtgtgtgtgtaatatatataaatatatatatatatatataaaaatataaatataatatttgcatgctctatatgtgctcttcttatctgctgatttcaatttgcatccctattattttgttcaatataaaattagatactacacatattgaatttagttaatgaaaaataaacttgaaattaaagtgaaagaaaccaattaaaggagtaaagatcaccaaaaaagtgtgtgatttttattttttatataacatttagtttgacactttgatttcaagattaattaaactcttttgatgaaactttttgtttcgtagttcgttctccaatcttcagaaatgtaaatgaatgaattaacattgaaacaaaaaaaaagatgcgagttttgtcaatatataaaaataagagttaataatgtgtgtttgttcatttaaaaacatgaccacttcctttttaattagatcgtactgttaacagatggaaaattgaggtatactttgaaatcatcagattatgcataaaataattaactgttatttatcgatgtagttg

SEQ ID NO: 7542 - DNA, 524 bp, Zea mays
  Intron number 1 from transcript GRMZM2G030669_T01 (locus G RMZM2G030669) derived from phytozome v7.0 (chr-ID 9; pos 1 33006642 to 133007165)
acccctaaagcacaggtacattactatagtcatgataatcatttcgttatttatctgatgaaccatctaatttacttttgttcctatatactctttgtttcgtaggatttaagtgatgccaataggataaattgtacaagaagaaagtcaatgcatacatctggaacaaaaagctttgctcggaatagagaagaattggtattatttttgcaattataattcacagcatgttctttacaaatgtcaaaaatccatgttaattacattaccttagttatatttttattaacaagtttacagagggaacaagatcctgaaaagaaataccctcatagggctgttttgtatatccatacacacaagtctaacctcggcaataacagaaatgcacatgtggtacagtaattgcaaaaaaatgtttcatttactttttttcaaatccaatttttcttccatggtgtttattgagtattgttattctcttgcaagggtgagttgaaggaacttttagcacaacaacctga

SEQ ID NO: 7543 - DNA, 931 bp, Zea mays
  Intron number 2 from transcript GRMZM2G434301_T02 (locus G RMZM2G434301) derived from phytozome v7.0 (chr-ID 7; pos 1 58039746 to 158040676 reverse strand)
caagtaagcgtatacttgatcatgttactttgtaccttcttgcccattacatgaccttgcaatttggatgggtggcgtagaatactactgcatatcattagatatttagagatgtcgaaataatatgattttcgagccttttttaggagttggataaggacattgtgaatatttaaacataacagctggtagagtatttgctattttgctaaaagataccatgtaggagcatactagattttgattatatcaaacaacacttcctccgtctcaaataatagtttactttagctttgtgcctctgtcctaagtcaaacttgtttaactttgaccgagtttatagaaaaatgcatcaacatctagaataccaaattcttttcattaatttcttcatgaaacatgtcttgatagtgaatttgatttaacttctagatactaatgtatttttctaaaagcttgatcaaaactagagaagtttgacataggacaaaactaaagtaaactataatttggaatgatagtagtaattgataatcagcatgtctgcttctgcactcgacaatcagagatgcctgcagttttttctatttgcaaattggtgattcaagttttttaaatttgcatcttactacacaagtatagaccaccatcctcagtttgaagaagggataatatacaaggaagagaataaagaggaaaatactaaaacatagaccacttagtgatcaataacctcagctttaagaatggattctcaatcccataagcaataagttatgcatacaacaatgcaagcactgcactgcctttcagatggctgaagttgaatagataactctgatgcaaggcgtcctatatttatctgagttccgatcatcctatttgcttcaatacagtgcttggtttgaagagcttcgtaagcagagagttg

SEQ ID NO: 7544 - DNA, 864 bp, Zea mays
  Intron number 1 from transcript GRMZM2G434301_T02 (locus G RMZM2G434301) derived from phytozome v7.0 (chr-ID 7; pos 1 58040722 to 158041585 reverse strand)
tccggacccgttccccgtgcaccttctcggccgaggtacgcaacctgtcaaaccctagctcgtttttacatctcgagaccgactaggatacggattagggcacggccctagggcgccaccggcgccgaataactctcgagctaatattgaggctagggtttcatggccctactaccttgcgtatgttcgtttttgcaatgtacgtagagctatgaatttctataaattctgtatatctgtgatcgtagatggttgtttgataagtaggctgtgattggatatgatttacaatgcaaatgcaatgattttgactttttgagtagaacaaaggggagcccagaaacaatcatgtatgcattaatgaagtgtgacacagtaagtcagtaactagcaatggcatgatggtgcacattgcatggattgtgcacaaatttctgcttacatattattatagtcattgaaatgatatgcactatttgaggactttcaagttcacgcatgaggagcatgctattaggtatttaggtgacagctattttcttagaaacaagatagttactcaggcagccttccccaacttgcttgggacaaaaaggatatgttgttgctgctgtataattttctaggcattgttagggtgctactaccatgttgctttttttcccaacaatgaaatgtaatagaaccttgagcctaacaatgtgggctttttgtgtagttattagttttgcacatcaagttgtttctgattgcattgcaactcaactgttttattatcatctagaatttatgacagcctgatcaagtggttgttgttagagttgcatacctgttctttgctcacagttgttaatatgtgcagga

SEQ ID NO: 7545 - DNA, 1021 bp, Zea mays
  Intron number 2 from transcript GRMZM2G136311_T01 (locus G RMZM2G136311) derived from phytozome v7.0 (chr-ID 6; pos 9 0731524 to 90732544)
cagaatttgctgccttatttccaccccacataacggtatctttatgcattttttcttttctctggttgtcaatttatgcatcattgcatcactgccagaataaattgtgcatatgttatataaggttttcgattgttagaaaagtgcccagttagttgccgtgatagtgttcactaactgaaaagaaaggtgcatgttcttggagttacttctaataccatctgatggctcccaagtcccaacactgattaatttgtttacaaaatgctcttctttcttccagttgactttgtgggttgtaactcttgcttcaaagtgcgaatatacagtccgaaagaagtgtccatctacatttcttgtttgattgctgttgaatttgtattttaaagtttggatatagcatatactagaacgtacaacactcatattaatgtgaatctctgagcttagctagacctttgctgtttgctagcaaagagttgcagttttttgtttggggggggggggggctggccagggtattaactatgttttttttcctgtgttccacttgagagtcatggtcatgttgctcttcttgaaataggcacacatgttctaattgaacctctacggtctaggtgacgtggtgtgtggttgtatggattcttaccctttttacctttttaaatataatgatatgtagctctcctgcatttgagaaaaaacattaacctcagaaaaacataggaatggttaatatggtcagtagaaaggaagaaactgttaaacaaaagtttgatgtgtgacatgtactaaggctctacattatgtatggccttcttgtagcaactgttgttagcaagttgacctcaagcttggcttcagttttttaaaagttttgaagtgaccaggtacagtaattgcgaaataatggatgttgatttagttcattactgacatctgatgtctccgtgtacttatggatgttattatgagttagtgacagttgtttatttattatatgatacagttggcaatt

SEQ ID NO: 7546 - DNA, 813 bp, Zea mays
  Intron number 2 from transcript AC196961.2_FGT004 (locus A C196961.2_FG004) derived from phytozome v7.0 (chr-ID 7; po s 148132053 to 148132865 reverse strand)
ctctgccagcgggagatatacaggtatgttgctatgtcatagttactatataattttatagttattacctggttgagaacctcatgtgctgtcctaaaagctctatcattagagtaattattattgtataacctaataattttagaaaggaatgtcaattctaaatttgtacgcctagatgcatccccttttagttatttgaacgttgacaatggtagtatagtgtacagaaaagagagctcaagcagggaactcttattttgtagtgaaatctcttaaagagaagaaaaaggtaattaagtgatcgtagagggttggaagccatgtccacaacttttcttacaactgaagtatgaagcttaatggctgtaagaatattggactagcatatccttcactcttaatggatgtaagtcaattgctgcttgagtatttagtataacttttagttctggtaagcctgcttatgactgtaatcacttgcaagactcagtcactaacaataatgtgattagcttgctgcaggttggtgctgtttttgtatgatctattgtgtataatattgttcgtgtcgtatcaaacgttgacgagggacacgagaacctcaaacaaattaaaccaaagtgttacaggagctgttacagaagagaactgctccacatcaaatgattgcacccatgaatgtgcactcccttttctgtcgaagagattacttgcagctaaaaataagttttgttagtgctgaaagatctttcacccataatttacgttgctctatatgtttgttctacagttttgcttgcttgtgtcact

SEQ ID NO: 7547 - DNA, 973 bp, Zea mays
  Intron number 2 from transcript GRMZM2G027851_T01 (locus G RMZM2G027851) derived from phytozome v7.0 (chr-ID 7; pos 1 71743601 to 171744573)
ccgggtaagccaaacggcgtccgttgcttcctcgcacatgcttttgctttgctgatttcggtttcatctgagtggcgcaggctggttggtaggtttcgatcttgttttttttttctcttccgggcctagctgtccatcttctttggattgtctggttcatacttgcatgtcgatcgtaagcatttttttattccaccgctttcccctttctgtactggtaggtaaaacatggccttttttttttctctgccgtcgctctggaatccgtagtagattcacttgccagctgcagctgctgattggaattcttggcctttgcttgatgctagtgggagacattgaaacagacgatgtcttcttcttttttactactggaacagtagaatatactatgactgcaataggactcctcttggttgatactaccattttatggttcagtcagtgctcggtgctaatcatctgacaccatgtgggaccacgagggagtggtcctattgattaacttaggagggataagactgtttggtttgaggaatgagctagtctatcatcttctcactcctcacttttttgtttggtttgtgtaatggaatgagttgatccatcatcacctcattccttatatctagttagttagtactaatatgaggaatggggtcatcccaccaaatttgaggaatggacccatgatgcaccaccacatttttgatggagtgattcctcaaaccaaacaccccctatctgatccgtctccgtctctgaaacaatacaaaagccatggaccatatggtagtctgaacttgcttgagcctgcggcatttaagccttgctctgaaactgaatgatctgttgaatccatgacgccaatcccttctagtttgatacttctttgacgtataatcaagattctcacagacgtttcctcacctcaccaggttccaggtgaagaagaaacagttcttccggaatt

SEQ ID NO: 7548 - DNA, 512 bp, Zea mays
  Intron number 3 from transcript GRMZM2G333579_T01 (locus G RMZM2G333579) derived from phytozome v7.0 (chr-ID 6; pos 5 5028197 to 55028708)
tgggaaccaagtcgtcctggtggaacacgcaaaaaagtatgatttttgagactgttttggatgtttacagttttctcacccaatatgtttttgttgggagctgcccattttgctgtggttctgaataccacatttcttcatggagggcttaataaaagttactgccttttgataaagctttgcaaagttagatgtataggtgcagtgctgctgggcttcattttgaaataattcatttgcagtttaaaatgtccgctttactcctcttcgtgagtcatttttaatgtgtgtttcatgagtgcatgaatgattcaatgtgtgtgaatctacatgtttgaaattcagttttgggagcatgctgtttcacttacttttcctacatgtgaagtattcatcacttaaatatttgaatttttctaatgtagtttactgaccagatgtatttttcttgttttcttctgatttagcttgatgcagcagctcggtcacgatttggaccaagaggagcccag

SEQ ID NO: 7549 - DNA, 480 bp, Zea mays
  Intron number 2 from transcript GRMZM2G092465_T01 (locus G RMZM2G092465) derived from phytozome v7.0 (chr-ID 6; pos 4 307218 to 4307697)
ccgtggccaacgacgacgcagccgccacggtaagcaaagcaacgaccctgatcgccgttaatctcttctctgcaccaccagttcacgtacgccaccattaataattgcctgccgtaagataagaaacaattatatggcggtggtggtgcaatcatgcgagtacggcgacccgccttgatttgatccagctccaggctcaaggctccggccgtatttttttccgctctcttgttttgattgattgatgaggaggagagagagagcagtaggcgctagctactagctagctaggggaaggagggagggacggacgtagtaataattattaaactttgccatgtgcctcatgtgccccaaaaggtagcaataattaacactgctgcactgtttttttttaatctgcttcttgtcgacttgtcgtcggcggcgatgtcgcggtggacaggctgctgctgctgccgccgcgtcgtcggacggcgg

SEQ ID NO: 7550 - DNA, 1000 bp, Zea mays
  Intron number 1 from transcript GRMZM2G159221_T01 (locus G RMZM2G159221) derived from phytozome v7.0 (chr-ID 7; pos 1 11659605 to 111660604 reverse strand)
tcgcgcctccctccgacgccaccagctatctcgaggttcgttctccagtgtccatccatttggacggtgtgtgtattgggcgattgctcccagattgctgtgctattgggatctgggtttgtacggctttcgttgtatggagcggatgattgaattatctaaaatgcctcagcttcatgttattgggagtcttaggaattttctataatgggtacaaaattcaagtgcttcaatgaattttcccgtcatgactgagatttatatcctgatgcagtattgtaagcgccattgggtgtcatgtagtgtctagggcataacgagatgctgatcattgttctgctgctgggtgtgaattttggtcaaaactatctggtttctttaaggcttgatgtgaaggtagattgttatttccactgccatttttgcattgccttctcatactgatgcaaaatcatgtgatgtttgtcacttgtctaattgattccactgccatttttgcattgtcttctcattctgatgcaaaatcttgtgctgtttgtcgcttgtctgattgatgtgtatgtactattctctcaaaatcaaggaacacatttctcagtgtaatatgttatatgtctctttatgttcatctcgaacttgaaaaggatgaactaaacacgctttgcccaaatacccatgaggccatgttagttgaactagtgtgcccttagcatttttccctttctttctcatttattattttctcaaaactacactctcagttggccagtttgcattacttcattagtaccgttgtagctcaatctctccttccattagttcttttgttttgttgtatgtgttttgtaccacttgttttcaagccacatcatcagtacatcatgacttttcaagcacaaatgttgagactgctgtagcttagttgacataaacatttctcatggtttgcacctttaatggtgcagaattttattgggaaagaagctgctcaggacatcat

SEQ ID NO: 7551 - DNA, 883 bp, Zea mays
  Intron number 1 from transcript GRMZM2G110878_T01 (locus G RMZM2G110878) derived from phytozome v7.0 (chr-ID 3; pos 2 28900960 to 228901842)
ccaccccaaactaactaggtgagataccaaaacgtttcgattggatacttcgattcgttcatgtcatatcattcgatttgttcgtatcatattatcgatgcaaatttcatgtcgatcttgtattgcgtattcagttattcaaatttcatgtcgatcttatagatcctaatatgctgatgatgtctccaattgagtgacgaaaagttcgtagtattactaatagatttcaagcatttcggcgaagctactctatctagttttaccattgcagtggcatcattttaatgatccatgaaaaccatgacaccttgaatgtgtggaatctgctacctgttttggtggacaattcaacactggaatagttggattaggagatacttgtgttaaatgcactctgctgcacataggaacaatcttgtttcctatggaataaatgtgtatctaataaatggtaggtgttggtcatgaaaaagttttgtttaatttgaaaagatatatgttaatgcattagcaaaagtcacttttcttagatgtcaatgtctgtttcataattttaccttactgttcttgtttcaaaagtttaatggcacaccatacgtgaatttcagatatgcaataacagagtgccagttaccttgaaactagtgtttggccattcatgctgttcctgtatttgttttacatgccaggttctgtagatgtataatgaatatgcatataagcatgcaaacctttaccttaaagttctcttgtgatcagttttaatttcagtcaaatgtttttgtttttcttctgtataaactctgttttttaagatgtttagtcatgacaaacagaacattttgcaggtgaattgtcttcagaactccattcaggttcaggt

SEQ ID NO: 7552 - DNA, 922 bp, Zea mays
  Intron number 1 from transcript GRMZM5G829680_T01 (locus G RMZM5G829680) derived from phytozome v7.0 (chr-ID 7; pos 9 1163759 to 91164680)
atctcttcaaccatcagcttccgtggaacacactggtaggggttctaatccctgaaattgatgtggggtgtgtgtttaagcgtgtatgggggtgctctctgtgcatcggattagaggttagatggttgccgatagctgttgtcgtctggatttggccggcggggaaaagggatcaccctgtgcatcacgttgaagaagaaagggctctttgtgtgaaaaagagaagtctaggggtttgttgaaaacagttttagagttttcttttatttcaggatttgtactagaattagaagtgctgtagaaaattgtagaaaaatgctaaaaatacgaaaccagttttgttgagttcacaagaatgagtacttaccaataaaaatattggttaggtaaaaactatgatttttatgtgtcgtttctgttttaacataggttactaatgctcatttaatttcctgtaataaatatctctctcctaaaaccctgaaaatttttatgggtaatatttaggcttagattagcttacagaaaaaagtttgattcaaattggagtatgttaagttagataactaatttaagcctattaaaaaatgccttttaaagaaaatatttaagtaattaagaaaaatcgaataatagttaaactgtttgtagtgttgagtgaagtccatggaccactaacacccaagttggcccatgacgtgtgtaattattttcaaggatcttacgtccttcgcttagcaactagaatttatggcggtaacatagtgcaattgtaccgggtaaggatagtatgcttgtggttttatcgtttaaattctttttattgcatttgtgtccatttcatcgtcacatcatgatcatagcatgcatctttactgcacgtgtagatcacgttgtctgttgatcaatcacttggtggagt

SEQ ID NO: 7553 - DNA, 379 bp, Zea mays
  Intron number 2 from transcript GRMZM5G838145_T01 (locus G RMZM5G838145) derived from phytozome v7.0 (chr-ID 6; pos 4 5627040 to 45627418 reverse strand)
gcatctcgtgatctggattttttttaataaaaaaataacagttagcatttctgtgttctgccatttttatggcctaggccatcactcatagaagaactgccacaaaagcaagggtgacaataataacagatgtcatgcagtcaatcaagcacagaagcaaatgactaatataggcgcacactgcagctggattcaagttgtggaaaaactagaaatcaggggaagccacacgaatggattctgacatgctctcagtagtaacttgacgcatcaaaacttcaaaaggacatttgcaatatactactaccacaacaaatagtcacggtgattagcatgaaactcacggggcattctctgcaggctttaaattgtactcagc

SEQ ID NO: 7554 - DNA, 610 bp, Zea mays
  Intron number 1 from transcript GRMZM2G008808_T01 (locus G RMZM2G008808) derived from phytozome v7.0 (chr-ID 6; pos 1 29580903 to 129581512)
tgatagaggggcatcgggttagttcattttaactattgaacttattattatttatttacacacatagttgtattcgatcccgaatccgattgaaatacattagggtaggatacaggatgacatactatccatctatatccgtccgttttcaccctagaatttatttatatatcaacatgcatactgaaacatggttcatccttgatctttgttctaactgaattgatggtctctggccacaatataactatgggggctgaccaacatgaggcattgaggcagaccaacaaatcaacataaataaggtgctagcttctcaaacttttttcagaatgagatatatgaatcgtatgtcatgttagtgtgattaattttgccatgttacagatcatagtgttgacaccaatactcgagaaatactagaaatccatgtactgtggtttttcttcaacctgctttggtggcagggtgccattttaggagcatatgaggtggctgaagttttttgagatttggttaacaggaaacaatgcgtatgctaaatgtcgaccccatgtttttttgttttgtgtgcatgtgcagattgttacttgatcttcttcagtgaggt

SEQ ID NO: 7555 - DNA, 798 bp, Zea mays
  Intron number 1 from transcript GRMZM2G433365_T01 (locus G RMZM2G433365) derived from phytozome v7.0 (chr-ID 3; pos 1 51725397 to 151726194)
aattgttgttggagttcttgcctcccttctgtcaggtatgttggattgcttagtttttttttaaagagaatttaccagcgaagcagtcatatatatagagagacttccatctgttcactttttttggtggtttcaaaaggcagagattttatgattcttgccttcttggcgagtgtgtgggggagggtgatagttgtgcgtacacaactggagagcagtactatgtacggcgcacgtgtttgtagtttgtttgaatttggaatcatgcattttgagtttcttttcatgacggaattacaagtagttgtgaactaaaccagatacacaactagatgcatgaatgataccatatccttttttattaggtgctgtaactacggtgtgacgacatgcatcgtagattttttttttgagaagagagggatcactaccggcctgcgcacgtgtttgtagtctgtttgaatttggaactcatgcatctttagtttttttttccatgacggaattacaagtagttgtgaaccaaaccagatatacacacaactagacgaatgatataccgtatcctttttttaattaggtgctgtaagtatggtgtgacatcacatcgtggacttttattacaccgatacattttgtgtatatacagtataggaacataaatgcagggaaatctccaatctacacatctgtttgaacgattatatgtacatttattatggtaacaattaatgaatgaggcgtcgttacacggttgcaatgcatgcaggtgcgcagtcccacggcgtgtgctacggc

SEQ ID NO: 7556 - DNA, 896 bp, Zea mays
  Intron number 2 from transcript GRMZM2G422210_T03 (locus G RMZM2G422210) derived from phytozome v7.0 (chr-ID 3; pos 1 37681148 to 137682043 reverse strand)
ataccgacatactttactgcagccattgaataaaagtaagtttccgatacatttaggaattctgtggttactacagtttgtttctgtttctacattttctcactggaaattttaaaaccgagtttcattcttgtgttaaggtttctaactcctagttttatgcaaataacatcataatagactatgatgaatttgagttatctattctggtaaaaggttatcatattttatcttcatcctgagagcacccatttttatcactgtttgtgtatggtttacacttaatatactaagttcagcactattagctattccgatccaagcataattcattaatatttcttctgcgaaacttcgacaacattatttgttttgatatccctgagccttgaaaaccaccaaagcttattggtttatatgagcgaatggtcacactgaaagctaagatagcttgaaggagaatttgacacttcctttgacgagatcctatctgtcaattcatctagatggtcagattttgcaagcagaatcatgcgctacctgttattagataactgcattgttaagttgaccatatactgccatgtgcagccaagggtagcagtagctgagcgaatcccacttgctcttctctatgcatgattgagaagaatatcaggaaaaatgttctctctgtgaggtccaaatgcggatgacttctttttgctatacataaagttctgaagttttgtgatgctttgttataagcaccgattttctgattcatatagaggttgattttgaaatacagttgacagagaattgcttttacaggtttcttttaggttagtttagtactttatggggctcacggcaatctctcttacggatcaaggtatcgtataatatggcagttc

SEQ ID NO: 7557 - DNA, 897 bp, Zea mays
  Intron number 1 from transcript AC194022.3_FGT001 (locus A C194022.3_FG001) derived from phytozome v7.0 (chr-ID 3; po s 2790212 to 2791108)
ggtgaaggataattctgaacaaggacagggtagtaagaaaacttttttatataacttataaccaactatttttagcccccctcttgtgggaattgttactgaaacaaaattttgttttttatttaccgcaaaacattagatacaatagttatgttcttctttctcactagatccagaggcacgactagcggtgagtgtcatgctaagcaacactgatcccgtcatcgattcctcatagtctgcctcccctactcatcagcactgcgagatgccggtgagtcgtcctcagctgtcgctcctgctcatcttttgagatccttaaccatctccctggaaaaagtaggcagtacatgcttcatagagattatttggttaattcgtgtttttttgtgactgtatatatagtcttgtaaaatctattctgtacactcggttttgccatttgaccatatttgagtgttttaaaggccatcggccatccaacactaagtgtcagatactagagtttagagtagacagattcattttttacaaaatcaaccaatcttttacttgcaaaattgaagtattgttagacatgtcacaaattcaaaattttgttaaacaacactatgtgttggataatccatccatcagaaaacataccaggatcacgtatatttgagtgctagatcatttcctatccagttccctcagtcatttgagcgagaaagtctacgaggtgtccgtgcacagtttactgtgagtgctatttctaaaacagcacagctaaagatttgtgttcatgcttttcactaactacttcactttgtgcttgcatcacacaaaataataatattatattgatgttataaatatgtaggtctcgtgcgtgaggagcactggctcagctcactt

SEQ ID NO: 7558 - DNA, 618 bp, Zea mays
  Intron number 1 from transcript AC203834.4_FGT004 (locus A C203834.4_FG004) derived from phytozome v7.0 (chr-ID 3; po s 123623379 to 123623996 reverse strand)
gcaagggaaccaaccacaatgtatgtattgatatataatcttcattaaaaaatagtataatgaaacaacatctattttgtcaaacaaaataaaattacatctcagttattttgaatttagctctacgtgtattagaagatcatagtccttgataatatcatcagaacaaatcattgccgctaattcccttttaatataaacgatcagataatcccgtaaatatgcatctcccatttttcttcgaagacatgtcttcataaatttcatagctgaaaaggctctctctgtggtcgcagttgacaccgggagagttaagagtaatctcaataatttatctaccatcggataagaagaatctttacccagcttaactaatccacttggttgggccaaaaattaagggtttcagactaccaaataataaactgacaacaagataatgagctataggatacattattaatctgacttggttgggccattgggggtgccaggcccactccagccctcttggtggcttcgccactgcaacgatggcggcagcagtctgctggtgatgatgcggcttctgtgtcggcaacagacatcaagcacgggaggagggagagaacatcggga

SEQ ID NO: 7559 - DNA, 644 bp, Zea mays
  Intron number 2 from transcript GRMZM2G106047_T01 (locus G RMZM2G106047) derived from phytozome v7.0 (chr-ID 3; pos 2 07560208 to 207560851)
aaacgtccaggtattcatcaataaagtttgtctgagttaatcttgtttaaaggtttttacatcttgggtggagttaaacatcttcttttcctcacttcgcttaaacttcaggaaagtggcagcaagaatataatgatgtagcatatcttggtgaatccccgagtgaagcaagtgaattcattgagctagcgcagctaccaggtggtgaaaacacatgtccttagatttttttagatgagcaggcaaaaaggcctaggaagcatttcaggtgcgaaggctgaagatgctagagagggaagacgtggagactgctactaaaaagagtgaagaatcagatactgaatctgaagaggaagaacaaacatggacgcaatcaagcacaatcgaaaagcaaggtcctgtcatcattaatcttgttcctcagtttgatttcgtatttgaattgtagttatatgacactttgtctaatttgttaatccggatggttgatgcattttatgtctttaccttgcaaacaggttaacagaatcagagaacttccatagaacagtaagatcatagccactcacactgacagtccagatgtatgttcagatcttatgatgatgtttaattcttgtgagggataatgtgttacagttgga

SEQ ID NO: 7560 - DNA, 1004 bp, Zea mays
  Intron number 1 from transcript GRMZM2G050602_T01 (locus G RMZM2G050602) derived from phytozome v7.0 (chr-ID 6; pos 2 1863985 to 21864988)
aagtcagctcaaggacacaagattctggatctcaggtgatttatctacatatgtctaatacaacatattcactctcctgaagtttattagcatcttacatagtatttatactccatgcagcgaaaggaaaagatccaaggtactgtgtgggagcttgaacaagggatgcttgctagcaactcctcatcagccagttctgatgctaaaacatggcaggctttccctgacacaaagacttaggccggaccaaaggtcgatcatgcaactaatgggagccaaaacataaccaagaacacaacatcaggtgcttcccccgatgcgtggggttttggtactgataattttagaacaccagcaacagcattaagcgctaccacacagatcaacagggcagctgcccaacggagctcatcctaaagatttaacgctggtgtggccaaggtagagcagccatctggatgggctggtttttaacttcaatcgacatgcgttaaccatcattcttgtcaacatttgcaatctgtgctacacagctgctgttgccgatgtagttgtgatctttgacatccacagggcatcaaaatcggttatttttagtgtgttcatcaattttggttgagccaactttgatattgattcatgagatcacttgaaattacccgttgttaatctctactactccttatgtttgtatcgtaggcatccacattcgaggatggtgcacggttctgccgtcgtgctccctccgtgctccatccgtcctccgcgctcgatcctcgaatcccgcggctccatcctcgaatccatcgctccctccacgctccatccgtctccctccgtgctccatctgtcctccgcactcgatcctcgaatccctctgtgctccatccgtcttccgccgcctctgtggtgaacacgggaagagtacgatgacctggtgctggcgatcttggcgtcggtggtgggcagtcaggccatcataagcaggaccttcttcatcatca

SEQ ID NO: 7561 - DNA, 801 bp, Zea mays
  Intron number 2 from transcript AC199386.3_FGT001 (locus A C199386.3_FG001) derived from phytozome v7.0 (chr-ID 7; po s 90416769 to 90417569)
ataaaactaaagaactgaaagaaataggacaaaaggtatgtcgatgacagaacagttttatgagaatttttcaacctcaaaatacatgtttcaggcaaaaatgatttaactggaaatttgtttgcagctactgtttcatagttctgattttggtaagctatgtaactaaaatgtgttgatgaatgttaaatcatgatagtaattgcttcaaactatatggtaggtatgcaagttacttgctttcatcacaatgcggccattgaacaattttgaatattggttctaaagtattgctggttggatcatgtatatctccatgttcctaacttatgtatttctgaattatcatgttgattgttctgttgatctaaaccttatatcgcaaccattttatatttttagccgcatttggaacgagacttggctagcaggtttgttttataagccgtgtaattacgaactatttggcaagcaatcactagacatgatggcaaatgtatgttatgttccttccatgtgtttatagcatagatttaaatagtcatcttgactttcatatccctttttactagagtgttgtaattgttgtccaagtctatattcctagataccattactcttcatattatttgtttttagtcactttttcctcactattggtaatatgttagaccctgtttgagagaaatcaattagaacctgttttttatgttcatagtagatttattattttcatttgaatgccattatggaagaagtttgtatggttgcaagtactatccttttcttgtcacttgctag

SEQ ID NO: 7562 - DNA, 960 bp, Zea mays
  Intron number 1 from transcript GRMZM5G885282_T01 (locus G RMZM5G885282) derived from phytozome v7.0 (chr-ID 9; pos 1 1268435 to 11269394 reverse strand)
gttgttcggtcgggcaatacgcacaagagaacaaggttagcagctcgctcgcgaggcaatattattaggccacctaatccaattatttctcccgataccgatatcacatgataaggtatcatcgtgagcaaacaaattcagaggggctccatgtactggccggccggccggccgcgaaattgtatgaaccggccagcaggcacggcaaatcgaatttgatttgtgcctgggcccccctaatggtggttgtgattctatgcttgtggaagttttcagttttcagcttaataatgatgtctataggcatatataatctgagtatctggatcagttgttttcaattataagagacatccatcaattgtaagaaacatccgggagccttcgtgatacaatatggtgtctttaaaatcggtcgcattataaatgtagttaccatataatatgtacgaagggtcagatagagatgttttttacaaagagatccttcaaaaaaacattatattaaatgaggttataagttcctgagagcaagtgacggtttgaacgaagaagtggagaatcccgaggcaattaaactcccgcattactgctcgtcgtcattagcagcgacaattaaggtggatgcgcggggcggcgctacacacgcagcgagcagggctcccgggccggcccccgagacccatggaaggggcacgggggtggccgtgaacccgaggccaagaacagaagactttggaaggtgaatggagcggatcgatggcctcggttccaggccgtcggccccatctttgccgggtgtggcttctccgatgtcaaacacccacccgccccataatccgagcgagcacggagcatgcatagaagagagctgacctccgtactctgcatggccatggctcttgctcttgcacttgcattccaggtggcggcacgattttagagctaaacttggctgcg

SEQ ID NO: 7563 - DNA, 688 bp, Zea mays
  Intron number 2 from transcript GRMZM2G309600_T01 (locus G RMZM2G309600) derived from phytozome v7.0 (chr-ID 7; pos 6 5117577 to 65118264 reverse strand)
gtgcccgcagtgcaagaccaacaagcgccaccaaggtatgccagtcgccgccatttccatctatttccatgtacttcatgttaattaaagtgcatcatgctaggcttcaacagcaactgaaagtcagccaggtggttgtgttttagtcgcttggagcatgtagtaatttagtgtttgacaaatttattcagattctcaccataatcttgctctcttagtgaattgtactccaattgtagtgttgagttacattgcccgcaagagccgcaagagtgaaaatttgttggcttcaacgattcacaaaggacaataatcaaagatgttgttcgcaatgcttatgttactgttgttagttattagctttttaaaacatgcatctgtcaatgtgtcctgtttcaatagggtcttattataggacgtgatgccactgaattaggatgtttgttcttttgttacctttgttaaaaacattagatcattcgtattgtatccttcctcggataagaaatttgttctactacaaatattctcaacatgacagggagaggtatgctcctaaatttctttttttgtgcattgtgaaatgattgttctaacaacatcagttttgtgttcttcatataatctatctcagattgctctgtgttttgcaggtctcgaggtcaagcctggacccactgtcaagtgt

SEQ ID NO: 7564 - DNA, 900 bp, Zea mays
  Intron number 1 from transcript GRMZM2G092895_T01 (locus G RMZM2G092895) derived from phytozome v7.0 (chr-ID 6; pos 9 9884890 to 99885789)
gagcagttcgtcaacttcgtcatccggccgcctcggtaaccactttattcccacccgtgttgccggaatttagcctgtgttcagctgcaactgcaagttggtaggatttggcagcccttcacgccattgccagtgatgatatgtcgctgcaaactcagcctgcaagttggtgggatttggcagccttcacgccattgccagtgatgatatgtcgccgcaattcctcacattttagtaggggggttattgtatgaatttcctacggatataagatagctagaccaacctaatgcaggtaaactgaggtaagcctttttccgcaccgtgtcctagcgactcagtgagatagatctcaccactgcaccaggtctgtccttctaccggccttggttctaaataaaaaagaagaagtataagcctctgttagaaggaaaaaaaaaacgtaccagcttctcactgtaatctcaacgattctcaaggcacaagaatgcaaaatttctgtacttgaatccttgctgtatccatttagaccatgtgttacattagtacatgagcaaaaagattgttgttcagcctttctattgagaatcatgtaccaggtttgcagtcaagcaagtagcttgtcataatcacatgtcctgtagttgcagaactaaacctgtttgtgttcgtaacccataacaaaactttacatttaattagcatgtgcatttataccaactgtacttttctaaattaactttgtgccttttctgtaagacgcgacaatgaatggataacgtaggttcatagccttcgggttttgatatctgcatcagattattttctctctattttctgctgagtggcgatgaactggcaatgcatttacagtgcagagtacaatccagatcagtattt

SEQ ID NO: 7565 - DNA, 982 bp, Zea mays
  Intron number 6 from transcript GRMZM2G092895_T01 (locus G RMZM2G092895) derived from phytozome v7.0 (chr-ID 6; pos 9 9886978 to 99887959)
tagaagtttacaaaatacgagttcctaagttcacggtatgattatcttgtggtgaatgtttagcttcactactttcattaaagtaaccattttactgttgaactgtatgtgcgttttatgatctaattattaggcacatatgtttattgttatataagagatgtatgtagaacacttgttggtaacttggtataacaagaaagttattctttttaatatcttagaaattcctgcaactagttctttgtatcttaggcagttaggccactatggggtgtgtgaacttagagttgatgccctaagactctctccagcaacaaactgtaaaacaacctgtactctaaatttagaggatattgtgctcctttatccacccaacaaggaaccctaaaagacactctaaaatttagagtctctgcttcagccgctatatgtagagaaatactgttcgtcctctatccgcaatcaaagcgctacgacctgacacttgtgcacgtgacgaccactgttgattgacttaccacgttgcatgcatgcatattgtgttaaaaaaatggtgtccgatgctggattgtagatatagaggaccaaatttaggggacgttgctggagactgataagatatagaggacggaatcttttagagtgtgctgtaaaggacagagaatattcttttagaggatggaatttaggggacgttgctggagacagcctaagcagcaacttttctaaatcctgaaccagtagggagattcatcatattccttctgttttctgttgctgatgttccatgaaatagtgcttgctgattttagattgcaaatgaatcacaaagaagaagtgttgttaatgttgtaaaggtccacactccacagtttaggctttcttgcttcatgttctattcaagtgctcactgtatgttgctatactcatatgatttgatggttgttgtgatacatatatgatatattttcaggttaag

SEQ ID NO: 7566 - DNA, 466 bp, Zea mays
  Intron number 2 from transcript GRMZM2G115453_T01 (locus G RMZM2G115453) derived from phytozome v7.0 (chr-ID 6; pos 7 4713868 to 74714333)
ttaaggtataacattttcttacttgtaaggaacttaattggtcagtgttttgctctttttcttcatggaaataaattgtggcctaatattaatagaaaatagtattctacaggctccttacacatgaatgcatgctgctaacatagatgtaaaaactaggaagatttggttcaccgttaccttttctctcatatgtcatttataattcaaataaatttctagaaactgcaataatactgtgcattgtggatccatggtgctttcttttgttataagctatgctccgattgatgatcagtttgtcagcatgcaaatatggatcatttgtgcaggagtatactaattcaataaatgtgcatgatgtgtaacattgctgaatatgttttctatttactgtgacatccagaataattcttgtaccattttttcaggttgtccatttcaaaggttcaagaaagcgattgat

SEQ ID NO: 7567 - DNA, 637 bp, Zea mays
  Intron number 4 from transcript GRMZM2G443240_T01 (locus G RMZM2G443240) derived from phytozome v7.0 (chr-ID 3; pos 9 6855356 to 96855992 reverse strand)
catctcttctggtctgttcaaaattttgtcatctggcaagtaagctgcatgcccttcaatattcacaattgaaatattatggattgaaaaacaaatgaaccatacttttagtttattttttctacttctacagaagcatcccattagtattaatcacggggtattgatcatttatgtgtttctgaatagttttacttatatgcatttgtcatatcgatactttttttttgggaaaacgcaggagaactgcgcctcaatatattaagaagaagagataaatccagatcaaagagatctggacaaattacaaggcctcctcatgggggccagaaacacagcaaactgaaaaaatccatcaaactaaacaactccctagtctccaggaattagggcagcaaggtatgaaagacccttagccccagccatctcccaagactgcctctcctccctggctaaattaatggacagatctaaactaggagtacaaccatcaaaaacacaactattaccatcaaagacacaactgttaagtcatatcgatactttatagtccatttcaatgtgaaacatttaaacaccgttcaatccttacaattgttcaggtcgttgcacctgctgtcacttcgtgatattaaga

SEQ ID NO: 7568 - DNA, 806 bp, Zea mays
  Intron number 1 from transcript GRMZM2G161181_T01 (locus G RMZM2G161181) derived from phytozome v7.0 (chr-ID 6; pos 1 22551245 to 122552050 reverse strand)
gccaactagggtagaggttacctgcaaaacacatcaaatccgcatttcacttcccaccagttcagttagtaatagaacacatccgtaaagctccaaactagctcttgctgttagtggtaaaactatatatatgagcaaaaaccttttaggcctcgttcgtttgtgtcggattgcacccggaaccgttccagctaaggccttgttcgttttcatcggattgcacccggaatcgttccacctaatcgagtttatatctattagagaagcattcctatgagggaggaatgaatcctggctcattccggtacaaccgaacaggccctaattaaagtttatataaattagagaagcaatctggttaggaattgttccgacccaccaatcgggcacaaacgaacaaagccttaatgaaaaagattagaaactctactcaggatcttcctctaatatgaagctttgcaggcctacggtttctaaaatggtagttattgatactatgatccacaaaacaggccctaaacaaatgccgtattgtactgattttttttatactgaaatattttgaataacacgggtggtcaaagttttcaaaaaaaagtcaatggtgtcatatttgtgaacggaggtagtacaatatatttttttatgaacaccctcaaaatactgatgtaacaaaagaatagcagtaatagtaataagttgtggattaagccacaaaaggccaaattaataaaccaaaaggcctgatagaataagcaaaaaaaaaaaaagcatacctttccattccgtgaatccacaagaagagc

SEQ ID NO: 7569 - DNA, 848 bp, Zea mays
  Intron number 1 from transcript GRMZM5G877165_T01 (locus G RMZM5G877165) derived from phytozome v7.0 (chr-ID 3; pos 7 0251778 to 70252625)
gtgggtggatagcatcaagtagttggtggaaccagtcttgaacttcattggggtaggaaggttgaatacctagatatctctttgaagttgttttaaaagacaagggtctgatcgtttaggttgtggtgatcgattttgttttcaagaatattcagcctctaaaggacatggttcagcctgcatatgtgtatatttggtcagagatcattcccgagtgatagataaacaaatttaagaggaaaacatcttgagtcgggtcgagatgatgctgacgggtgccattgtgaatgttggtgctcctcaatcttattctacttggaatcttcctccactggtgagttctaacttctaaccactagatttatcattcgatgcttgttaaattattatgtgtttcatgctaatcgtgctatttcattgttgcggagtccttatttctgagtttgtgtctaacccacctatccatgaagagggttgcagttctagccatagagtgtggccttctttggacaagatagagaccattatcgccgcacatgaagatctgtctgaagaggataagcaaactcacatcatgatacagccacctgccagtgactccgagatcaaagttgttctcggcatgatggctggggagtcctctgagtctacgcgacttgatttggggtgtggagcccccgagcactcaagcactggagggaagaaggtaggtagtctcgcgagtccatggtgtaagcggtcgtgctagtcggatgcccaggccgagtccacagagtacaagaagaagaagaagctctagcgttcgtctgacctacagtcagtaactgcctaggccgagccgaaccccg

SEQ ID NO: 7570 - DNA, 1003 bp, Zea mays
  Intron number 2 from transcript GRMZM2G163476_T02 (locus G RMZM2G163476) derived from phytozome v7.0 (chr-ID 3; pos 1 40843691 to 140844693)
tggtaagactgtcagctgagcccagtttgttacactcccaatttctgttagagaggggaaattttcccccttctcttttatttctatggacaaattaagaatatctatgcaattctgagttcatactcttgtattcgttgaacactgaaattgagatgccaacagtagtagactacttggttttttttctaaaacgtttttttctaaaacgcgcaggagaactgcgcgttaaatatattacgaagatagaagaaacaataagtcaataatggtctaaatagaccagagtacagagtaaaaagcaaaagaaaaacgaccttacggtggccagaaacaaaaatacacataaacatccatatagaagacagccaaaagacatcaacaactgcccctaaactaaggccagatggtgcacagatctttggcacccgccagacaccacctctgagcgccgtctttgatgttctgtataatttggttgccactaggagcatccccctcaaacacacatttattccgctgcttccaaagccaccatgccaacaacatcacaagggagttaatccctttgcgcagcacatgagggaccttgccctccaaattagcccaccaatcttggaaaaccaaatcagcccttgcgggggagaaaatgccgcagattaaccagggagaaaatcctgaaccacacttccctagagaaaacacaagaaatgcactacacgcagaaatgtacacatttgacatataaatttacatgacaatgctccacaggttttgattttaaaaaaaacaaaaaactattgcaattagttaacaattataaacatttctgttttccagtatcatgatccttttttaatcccagatgtattggtagtctattggacacacatggttaagcaacgctatttcttttttgtttttatcatgcattctctattacctaattgtttagtatagtggttcaggtgactttagttgctcaaggcgacgttccattatc

SEQ ID NO: 7571 - DNA, 599 bp, Zea mays
  Intron number 2 from transcript GRMZM2G093670_T01 (locus G RMZM2G093670) derived from phytozome v7.0 (chr-ID 6; pos 1 40632333 to 140632931)
taatcatagttcaagtggtaaaaaggcaaaaactagggttcaatatcttttgttgagttgattttattgctaattgagatcatgaaggcctcattcaccatcacatccttctacaggagtggagatgggtcgtgtttggctgctcatgtacagcagcacgccatcctcgagcctgggcgtgatccgccacccatagttgcaatcatggatgttccttttactgaaaaagacaaataaagttctttgcatgtttatatattttcttgtttgatatttttgcatcttggaataaaaaacaaatattcatatagtgatttaaagacaatgcaattttgttaccttattcgttagattccaaactactctgatgtaaaatagtattttctcacagtttaactacaacagtggacaactagcaccagagatgattagtgatcaatttatgggaacacactatcagtatgtagctttaacatttgattttacactataaatcatcatatgcatatctactgtttgtttcttttattgttgctaatgcgcaatgctgattttttgctgcagatttctgaaataaaaacagcagacattcctgataa

SEQ ID NO: 7572 - DNA, 925 bp, Zea mays
  Intron number 1 from transcript GRMZM2G169486_T02 (locus G RMZM2G169486) derived from phytozome v7.0 (chr-ID 3; pos 3 0136154 to 30137078)
gccgagaagtcacccagctccgcgccgcagggtcagactctcttcctttctcatcagttgtgcataaaacaccttccggtcttttctccgtgcgattcttgcggcaggtgtgacctttctttgcgtggcgactctggtgccgggttgattacctctggttaaattcatcggtaacaatctgacgcgaattattcatcgagtattagcgacggcgaggatttggtacatatgtcgttgatgggtcctgcggctgccggctggaaggagtaggagactagggattcgtccaattcgtcgaattggcgtacaaagaagtggatttctgagctattcgaggatatattttttgttctgatttgtcctgtgagagttcttcgctagtaatcagggctctttacttgtttaatgaatggttgatgagcatgatgatgcttatctggctcataagtttcaagagtaggctacaaaatggatgctctagcttcttgcatcaggcgaaatcataaaaggcgcgcccttttgtggacacagcctaatgactgctggtggttaggactgtgcaaggctggaactaaggttgcaaaaatgcttcaaaccaaactggaactagcatgtttcttggtcttaaacaaaattcaatagatgtaagtggtgggtgggacaaaagttaattcatgtttgaaatttgtaaacagatttctgcaaatgtgttgtgtatgggcgcagagttcaggcttgcatataaattacccctctaacactactcccatcacacaatgaaatgatgtggacaaaatggcagttctgagggttcgtcttgttcttttattgacgactcactgtgcttaactgtttacgcttcccctgatctcaaaacaaaatggtacattctgattttctgactctgtaggtggttctggtggga

SEQ ID NO: 7573 - DNA, 763 bp, Zea mays
  Intron number 1 from transcript GRMZM2G009462_T01 (locus G RMZM2G009462) derived from phytozome v7.0 (chr-ID 3; pos 1 68436614 to 168437376)
aggcttgtgagacctgagacgaaggtataagtgttttataagaacttaagtttttttctttcacaagttatattttatctaccattattcccttctccctaagcatatatctttaatatatatttcaagtgtcgacctaactaattatttcctttgtcatattgtgggtcattcttcaatggagatgcattcttcattgaagatgcattctcatttatttgtgcatcagcatgatgaatccaccacaattatttttctgaaatatcttcttgttgttcatcattttcagtgtctaggatgaagtttcagatatgtcagctgatttcagtttcagagctgcggattttagtttcaaagctgcagatttcagtactagagctgccaaatttcagttttagagttgcaaattccatttttagagctacactatgaatccacacttgattctattttcttttcaatttcagggctgcaagatttctacagaatgtgaagactatgctatcaaaaaaagcttttctaatttacctaggatgaagttcaggattgtttaggatgaatcatgtgtttatctatcttcaataatatttttttaccccatttaactcggtgcggactgtatctgcaatttgctggagctgtttttttctttgaggcaccccacgtttcttctgattttagacattaattgtctgtatcaaagatggtagcttatggcaatgaggtgtgtttatgtttttggtttgttaatggcaggaagcgg

SEQ ID NO: 7574 - DNA, 677 bp, Zea mays
  Intron number 1 from transcript GRMZM2G301696_T01 (locus G RMZM2G301696) derived from phytozome v7.0 (chr-ID 7; pos 6 442684 to 6443360)
cactcttaggtagcgtttggttctagagcctagttgaatggaacggttctattcaaaattctgaggatagaacggttctgttctatgtttggtagttagaacagagccgctctattttttgtttggttctagagcgaagtagaatggagtggctccgacgtgtgtttggttacaatgtagcagatctcaatggtatgaattatacaagctgagaaacatcctaatgctattttactatattaattgtatgtacgaacatacatatgctatacgaattaattaaatttctacctcataatggtatatacgaacatactatatataatatataatatatatatatagagagagaatatgaatatatgaattctttcaagcggcagcatacaaatcagtcaacgaattctttcaagcggctgcatatatattttggctggaattctttcaagcggctgcatacgacgaaggaagaagatagacgagcgtgggcgtatgcgagcgcacgagtccggttgttttctgggagcggacacatgcaggatatcgagggaatattcctatactagaacagctccgttccattttgattcaaaccaaacatccatattactagaacagagcggctctatcctacctaactttagaaccaaacactaccttatatcttgagaactgga

SEQ ID NO: 7575 - DNA, 1049 bp, Zea mays
  Intron number 1 from transcript GRMZM2G041650_T01 (locus G RMZM2G041650) derived from phytozome v7.0 (chr-ID 3; pos 1 9018081 to 19019129)
gcgctccaaggtcggtcggctctcctccatcggtggtgagtacatttccctctcccaagccgccagtgccggtgtgctgtttcctggtaccggcgtcgtgtacgtaggtagatgtgggtagcggcgtaaggaagaagaaaactcctagtcgctggaatctagatgtagggctgagattaaaacctggagtagcattttgctttgtaaagttttggccgtcggtgtgataatctatggcttgggtttggggaaagaactatgtccgtagattgggttgccaacggttaggattagaaggcatttacctcttttggattatttgaatctgtgccatcaatcgtcaatcgtgcggtccgcactgattatgggctcggtatcgatctaggccatccgatcttgatccagtggcccatagcgcgtatcgttttggggaatagaagatctaatccggagcgtcgattggggatcagacggctagagtttacccgtaccccttcgcgggtccattttacttaagagcccctcggtttcattgaaataaacccgccgtcctactgcatagtgttctgagtcttaggatcttttgcgcctgggcccctgctgttctcagaaatgaaggcccagtccagagctgtttaaaatggaataattaaattggaaaataggtttttaatacaaaaatatatgctagaacttcaataattcatagaaaattcatatgatatccaaaataatccattccactttctaaatttttgtaattttattatttatcacttagagcctctgtttggtcatgaaaacagtaagaaaagttatttcccacttaatcccattttaaacacataaaatctttgaaaatccataacttaaattctataactccaaaaattatgattcctgttcctagaattatattttaatatgtagaatattgctgtgtattttgttcacatgcttggtgtgatgttaattttcccctgtatattgtgcttgttgtattgtggcgagtagaagagcccgtgactgaggaccctggtgagcagcag

SEQ ID NO: 7576 - DNA, 1003 bp, Zea mays
  Intron number 2 from transcript GRMZM2G575526_T01 (locus G RMZM2G575526) derived from phytozome v7.0 (chr-ID 3; pos 2 18155526 to 218156528 reverse strand)
tttctgtggctgcacctcgtgtgaccctttttgtggtaagtggtcggtcgataggattgcaccacgtcgtcgttaatctgcgattaatgagtatgtattaactttggcattagatatttgattcattccgttccagttatattaaccgtgtaatgatcttgtacgcacgttaaaattattatgttgttaccacacatgttttagttaaataattaattattgatttgcttgagggttattaaaataacaatttaattagaacgagtctatagttttaactcatgcttttataaatataaatgttaattaacttgtttaataccaatttaaatacttttatttaattatttatttgtcgttgttcgcgcgcgacatcgtatgcgcgtcattgagctattcgcgcgcgtagtcacgttggttagcacgtgtcgcgcgtgctgttcgcccgcgttgtcacacgtcgtgtgtgcgcgtcgcgtgtgccgtttactcgtgtcgtttgccttaccgtggaccgttagcgtgtatctcgcgtgtcgatcacgtgggtcgtgcggcgtctgtgtgtgataataaattgtttttgcttataattactcatgttaataacgttaattcgtcaggtcatatgttttagataattaacttaaggttcgctcgactaatatttattagattaacattctaactagattaaatgcgtagtattccacttaggcttatataataaatatcgattaatataatcaggtcgaatcaaatgttttaactagtatttgtttagcgtaaacccgttaacttcttgaccatagcttcgatttcgacgcttcttttcctcgtgtgaccgtagtaacgcactctacttcgttttgcatattttgttatttttttatttgaatggtgtaatgttcttatgcatatatatatatgtttgtttgtgcctgtttgtattcgctgtgcgtcacgaatagactgtgatccgtttccgagcttcgagggatcg

SEQ ID NO: 7577 - DNA, 556 bp, Zea mays
  Intron number 2 from transcript GRMZM2G054468_T01 (locus G RMZM2G054468) derived from phytozome v7.0 (chr-ID 6; pos 1 18516543 to 118517098 reverse strand)
ttaatacttggtcctcatcatttgctattgccaaggcaagcacacaactataactgtttttctgttaccttcgagaatccaaattgcagtaggtacctgatgagaagtggctataaacttattaaaatggcacagcccaactgttccattcagaccatatctgtgaccatttaactgtggagcttcaaagaggatccaatggctttttcattgagacctgtctcttctctgccgagtatgtagggtggtgaggcatatgttggtttgtgctggctattgcttcaaagttcaaactgataactttgtctctactcgtgagcaagctgatggactacttaataatctgtggataaggccttttcatgtatacagaaatagcaccattatgtggaatggtatagggttttatgattttgctgatgctagttgcttcatcaagtactgtggattgatgagttttgagattttatgctaatacttgctcgtcacaacatcgacatgcatgatatggaatattacagtcattcaataaagcaaaggattttgtgtggagaca

SEQ ID NO: 7578 - DNA, 949 bp, Zea mays
  Intron number 1 from transcript GRMZM5G815894_T03 (locus G RMZM5G815894) derived from phytozome v7.0 (chr-ID 3; pos 1 68233996 to 168234944 reverse strand)
tgcagtgtccatagccaccgcaggagactgaggtaagatcacgggctcttccgctatcattctgcttattcgttcgattgctgcgcctgtgattgtgcaactagcgtttacttgggtagatttcttcactagtggagggactggagtggcaagggcgtaagtagccgccgcgttcagttagcgcggtgatgggtcagcatgctggctggaggaaggctacacttgtggcaccgagcgattcgtgctcggatcgacgtttaggtagaagaagtatattggatgggcctttcggtattatttttttggatgtcgaccaaaaaatgtttgatcgaagggagggctccggacccttctgcccaattgactaagtggcctactgttcgtggctatagtcgtttagtttatcagttattgcatctgctatatagcgtatttgtgattgtatgttcacgcgaggatctattgttgaaagtctgtcatttggtcgtttcttaatctttccagggattacgattctccatttcttgaaaggtttcaattgttctggaaaaaaactctgttatgtttactagatctgtacactataatggatataactgtttttatgcctctgcaaaattttgcggattctttctattgatgttgatgtgtcatgagagctatcttaatttggtgtcacggttccttgacaagtattggactattggtagaatgttctcgccatatgtactgcatctatattattgactcagctgtgactcttgataaatatgcatttgcagctttgtttgagtatgacacttactgaatagtttttggttgacaacttagtgaagtctgttgtatgcatacttgacagaattcatgctcaaccttacctgtgcgtttaactatttgtgtacctttcggttatctccccaggggggttttgtcaagacccacaagacca

SEQ ID NO: 7579 - DNA, 589 bp, Zea mays
  Intron number 1 from transcript GRMZM2G105283_T01 (locus G RMZM2G105283) derived from phytozome v7.0 (chr-ID 3; pos 1 83256138 to 183256726)
cttgtcaccgtcggcgacattgcccaggtgcaaatctctcagatatttcatgaacattagtaagtaactgaaatttgcaatagcatctcccgaaaagaaagcagagattacataagcaccgtaactgttcttatcgtcttgatctggtcaaagtttatagaccattcatttagcgctctagtaaaggctagaggtagtagtgtcattgcaacagaacgtacagcatcgagcggcagagatggcgagcatccgttttgtttatgcagcggccagcgcccagcggcatcaaattctaaagtaggttgcgcataacttcaccacccagttttgatttttgacccagttaggcaatcaggtcccatgtctgcatcagctggtgtgtatcactcattgatcatcgcccaatttggaacacataaatccacacaaaaagaagtcaagcatctctgcttttcaaacacacacacacaaacaaaagtaacaccatcgtgtcatatgagctgttcttcactcttcaagcagcatacagcagcagcacttaccttttgttgccatgattccttttggctcgcgtgctaggtgtggagca

SEQ ID NO: 7580 - DNA, 993 bp, Zea mays
  Intron number 1 from transcript GRMZM2G018712_T01 (locus G RMZM2G018712) derived from phytozome v7.0 (chr-ID 7; pos 9 3079755 to 93080747)
ttcccaacaatttagtgcaaggtaaatctgattcaagaattatatttacctcaaaactaacagccgtcatttgaatcttggcaatgtcatgttcagggtgacttggtaagccaagatagtagacaggagcaatctgggaacaagggataatacagtagctaaaacaataggaacatagagtaccactaatttgtaaacatacatcaataaaagaaacatgtgtgttactgttaataaagctttgaattttaggtgtggactttgtttatgtgtctcagagtccaaggagaccaccccgcgattcgtcaacgtctccgggatggcgaagccgcaacccgacgcctccctgtcctttttgttacctccggacgccgctgccgaggggctgcatgacatgattctgaatgctcgcgacgaccttgatgttttatctccgtggtcggtgggggcgtcggcgtgtggtgtaggcagatgagggaggcgacgatgttcttctgtggtgacccatcgacgccgcagtgggtcgaccaacaccatcaccacatggagattcacaggtatgtatcctggcatgcagattcaccggtatgtatcccatcatctctattctatgcaatggtttgttgaactttttttattcagggttgcaaatggatctacattattgaagagatttaggaaaccatcaccgaacaacaacctattagaggttcacagttagttatgcttcttttcaattgtgctgggaaatattgctgaaatattctatcctgaaaaaaggttcatcaccttatcagaatgtattgcccctaaatatcgtttagttggtgattgttaactcaattttcacaattaaatatgcttgtgtacaatgttactttgaaatcgtatgaacatgttctatcctattgtcattcagtgtactcaacatgcttacgatatctgcactgtggaccagggctctcttctgaagcagctagcaaacaagagtat

SEQ ID NO: 7581 - DNA, 839 bp, Zea mays
  Intron number 2 from transcript GRMZM5G863596_T01 (locus G RMZM5G863596) derived from phytozome v7.0 (chr-ID 3; pos 2 02964381 to 202965219 reverse strand)
gaaggtaatatttgatcttgtttgactcctttatttttttccatggcattgggtacccgtggatcgcgaacaacatttttttggcattattaagtgcaacggatgaaaacaacagttggttcagacaagcaagtttgtcactttgtccacaagtgcgttctggcttgctgtattcaagtagctcctgatacaatgcttgaatagccctggaatggtggatgaagcaatttcgaatctagttttgggtacatgtaggggaaaccatgaaccacttcaattggaaaatgattaacagacagggcgtcatgttgcttgtatgctaccctggaaggcgcggaactttacattttttttgtgttattggacgagaggttggcgttggagcggtttcagtttcagtatgttcctacgtgatccaattgtgcacacctcatatatcctgtttattttattcggaatttggattaacttgtaagcacaaggccacaagccatgtattcatagcatgtaggacaactttgaaggtgaagatttcattattgtattttaggttagtagttgctatactttttttttactcggactcctttggaatcgtcttgaaatcttgaccttgtgcgcattagttaaagaaggattttgctgaggcgtatctgacataacttgtcatttctttttaacatattgaaacttgctttaggaataaggcattcacattcttttcctagagaaggaaatgaaataatttgttactgttcttactacagactgtacctttctcagaccatgtttaatgaactatttcatcttatcctgtgttgtcaatatctttgcagaga

SEQ ID NO: 7582 - DNA, 745 bp, Zea mays
  Intron number 1 from transcript GRMZM2G086656_T02 (locus G RMZM2G086656) derived from phytozome v7.0 (chr-ID 7; pos 1 75389547 to 175390291)
aggtgatcttcgaggaggaggaagatgatggacaaacaacgtgccctgaggagccctcacctatcgctggcggcatggagggcggcagggaatcctcatcgttgtactgacggtacgacatacaacaggtatgtactgtctttgattgtgcttctgtttacaggtagttttgtcagttcacagtaccctgctccactctgatgaaaattgtattactcttctttaaaatatggtgtttgctttgctcaagaccatatcctagaagtacacatttgcttatgctttagaaaatcgatcagtgcttcatgtatttgattgtgctggtacttggcataaaaggatagtgctatttggaagctaatctcaaaggagtatcaaaaaacaagtgattaaacagcaaaaacaatatagtaatataagcacaacctggcattcctctttcatagaagttcttattttcatgtgtaagttttgtatcattgtcgtgcgttataaaccatgcttttccaaactcagtcctatggctttatgagaactatcatgtccttgaattgttgatcagagagggtagcttgatagtaccaatgtcttatcaccgttaaactattgttatatagaatacaaagaacaattttcttctacattatgtacaactaactactttctttagatactactaacgcatatagtttgaattatttattccactattatggtctcttttttttgtagaaaactggtagag

SEQ ID NO: 7583 - DNA, 691 bp, Zea mays
  Intron number 1 from transcript GRMZM2G168119_T01 (locus G RMZM2G168119) derived from phytozome v7.0 (chr-ID 6; pos 1 13344151 to 113344841)
ggaggtggataagaaggaggaagccaacgtgagacgtgagtgctctattcccttgctgcctgttttgaaatcgttatattgctactgcgttttagggattttgtgctaactgctaggtgtgattccataagctgtatgttgcatattctggtgattaggcttgtggagttaagataagaacagtcttggtaattggtaatctacacggaagattgggggttgatgctctgatgtggcttgatttgggttgatcctctgatcaacttatgtggtttgatttaattatctaataacactctagagtgcatccttacaccatttggtattttcgaactgcattccattattggtattagtaggaaaaatgcttgaacttataacagccctgttaggggggaaactacattcatttgccctttatttgcttctagttgacctcacagtaaattatccatggtccaatgtctattgcagtctgacaaaagttctttcactgctgtagttgtttgttgaggcttgggtttttgctgaattataagggagacatatataggttgaaattgcttacatggtgcccttttattttattattgcatctcaatgagagtttcttcagatccaatttctactgcattttttgggacctcctaatataatatatttttgtttctttcctaataaacagaaccaa

SEQ ID NO: 7584 - DNA, 492 bp, Zea mays
  Intron number 2 from transcript GRMZM2G070659_T03 (locus G RMZM2G070659) derived from phytozome v7.0 (chr-ID 6; pos 1 67574864 to 167575355)
ccctgtactagataccatcagggtcttcaaccagggcaggttctcttctcttcctgcaatcttcattctgctctgaccgagcatacgctatttgattgtctttgctctctctctctctctgtctgtggtgtgtatgcaacagtaactgttcttccaagtcctgtcatgtttgcaaatgcttcaaaattatcttgcttagttactttacaataagattttggttcctgaattgaaaatactgccgcatggagatggaattattaggtgctaagtattcagcatctgtgaaagaatttacttgatggaggtgcttagatgtttctttagctgttatcgttttatttttcttagtaattctggtcatcatacaacctttgttttttacttgttgtttagttgctagtactgccagctattaatctcagttgcagtgcttattcacactattaattatcggtagtagtaactggcaactattgggcctataggttt

SEQ ID NO: 7585 - DNA, 911 bp, Zea mays
  Intron number 2 from transcript GRMZM2G094080_T01 (locus G RMZM2G094080) derived from phytozome v7.0 (chr-ID 3; pos 1 93473355 to 193474265)
aaggtaatgggtcatttggtctttgtaaattaagattttaaatcctttgtccttcttgctcttatggaatagagcaaggtaataatagtttccagggagcgtggatggttgatgattaattgcatcggttttattttattttgaaatttttatgaagtggcttatttcaaagttagattgcaagcatatgtggtcttaatcattttgctatgggcacactagaaaaagagagaaatcctcgaatttctcccaagggcacacattcttgtgaatacttatttagacttgctgattgacaccagcttgctgaactattataggcgtcagatagttttatccatggagttaactatctaactttacaaactttctggcaataactatttccataaagttcacctaatcacgtgtgtgaattcagtgttaactggtgatttccttggtggctcgggttcttctcatgacgctccaaaatgctctccaagttgaatgctttctgattatagttttctgccacaatctttctattctagaattctgtttcagtcattatttatacagagtctggtctttaggttagattaccgtggttgcacttctaatgaaattttttcacttgtaaagttgtaatcagtctttcagggaaatgattgcaatgtgcttggtgaaagatcaaacaaaggccaacagccgataaaattaattaagcattttttcaagaattcacaacctccaaagctaactgttaagagctttttaactgatttgccccctcattgggatcgtgtaaaagcactccatttttgtttccatatacttctttcgtatttctgtttacataatgtttgtgatagtttttcttagttaatgactctatttccagctaaaggattcagctagctttgaagaga

SEQ ID NO: 7586 - DNA, 941 bp, Zea mays
  Intron number 1 from transcript GRMZM2G134134_T02 (locus G RMZM2G134134) derived from phytozome v7.0 (chr-ID 6; pos 6 269943 to 6270883 reverse strand)
tacctcggcccagccgcgctgctccacgccaataggtataccaccaccaccgcggctaccgtgttggatgattgctgagtgatctatgctggatctgtttgatgattgctgaatgatatgtgattgatcggttgcgagccatgctcttctgatcatgaagtcattccatttgatctgtttgatgatcgctgagtggtgtgattgatcggttgcaagtcatgctcttcatgaattagttccaggagtagatgtgtcatgtgtgtagactgtttgatgtagttgatactgatagcttagctgcgcgagtctggaaatgattgtgatccaggtagattgctaattgcttattgttaatgacgtgctgatgacttgtttgatccttagatgtgataatcctttattgtttgtcttcgtagctgtgacagacatgacaagtgcttaaatgattattattgggtttatgccgtgactctgatctgatgatagtaccatcacaaattcacaattgaaggaaatgtgttgaatgcatctgtacagactacagaagattgcttgtacgtctttaaaggcatcatggttctgagtgttcttctgtatttagctttagatgcaaacacatcacactgtaaagtatggtggatgttttggcgaacctattcctctgatattttttttggcagtggcgtgttgaacaactaacctgtcttcctgtatagggagtcctactttcccgctttatcaccgattcaccgttaaattacaaatgatcacccagcgaatttaagatgctaaagccagttcttgtggattttgtgtttcacatgtttcccttgaatggtatagttgtctgatgtgataagttttctttgatccaagttttaggatgttgctaagtccatgacacgttcaccctttttaggcttccgctgtgggggacactt

SEQ ID NO: 7587 - DNA, 959 bp, Zea mays
  Intron number 1 from transcript GRMZM2G092112_T01 (locus G RMZM2G092112) derived from phytozome v7.0 (chr-ID 3; pos 1 58443261 to 158444219 reverse strand)
ctacgccgacagactgcccgcacacgccgcgcccggtacctgacctccccctccaccctcccttccctcctgtctctccctttgttttatctatctactatattctcctccattccccgaataaatcaattcctggaatccaagtaaaactaactttataggggaacactaacaccatatatgacataaaatgtgatattatgaaaatatattatacgatgtatgtaatgatactaatttgatgtcataaatcttgactataaattcggtcaaaggttaaaaactctaacttaagtagaaatctatttttcttggttcttgctctttgagaagtcaaacaattttaaggttagctaaatttgtaaaaatatagtaacattcatgataccaaataagtaccattatatcattcatggaatatatcttttataggaaacctaagtgatcgtaccattttgtataaatatagtcaaacttaatgaaatttgacttggttcaaacttagaattgtatattttatttttttgttgacagagggagtactgttgtaaccgtggtgttccaccagtttgagccactcttctcgtccaagtttctttgccagacttagaccatgcaaaatattcttctcttggcactttgattatgcacgtctgtagcgttacaactgaaaaaatgctatgtccgtcatgttgccagcttttccaaattattagttccatttatgctagaagctggagttacttcatgcttctagttgccaacgaggttcaacaattaaattgttctattgcgtttgtggtgtcaggaccaggattagtgtgcggctatttgccttgcttctttcgaccgttttatttttttgtcacacaagcactatcaactgagcctctccgagatgcaagtttgtggtactgttggcacttatctggtatgccattcaatgtatgcaggtaatc

SEQ ID NO: 7588 - DNA, 869 bp, Zea mays
  Intron number 2 from transcript GRMZM2G374430_T01 (locus G RMZM2G374430) derived from phytozome v7.0 (chr-ID 6; pos 1 65773154 to 165774022 reverse strand)
gtgaaagtcattttgcttccagcagcttaaggtcagttaatcttgtttcagtactttgtctgctgatttacttgccccacacaattgttgaatcacattggttatgcattttggactgtgctacatatatttatgagagaattccatgtgtgttgtaaaaaattgctcacatatttataccacagaaatagtgtgttaccctatgatatcacaattcgagttttagtctaccactgctgtctgtttttgctaacttcgacattaactataaagaacattatgaattattgattaggttgaacagaatgttgttatgagaacaaacacagattatctcactgaattgttgattacttgtcttgagaatactgttattgtaggaagcttgtgcattgcgtgtatatgaaaaaagaatcttacataggtatcgatcttctcggagatgtttatttattggtgtttgagaatatatatatatatatatatatttgaattattgcctacatagttcgaaggatcgagataactgtagttgtgttgcctttcctttttccattcagtgcgtagttgatggctaacttcatgactaccatgagtgacttaactgattttgtcaaagaattcaattagtaacacgtctgatgaatcgtaatcctctgtgctacctgtacccaccatagtaaaataaaattttatggtctgttagcctccttgctttgttagtttagagagtactctgtaatttgcttggttgccttgtaatactaggttaatatagctgtttgcatcgagactgttttgtgtattgaactaagaaaaaactctcaatggtttgtagaaccaagccaagaaaacagatatcaattgtg

SEQ ID NO: 7589 - DNA, 706 bp, Zea mays
  Intron number 3 from transcript GRMZM2G430929_T01 (locus G RMZM2G430929) derived from phytozome v7.0 (chr-ID 3; pos 4 3860295 to 43861000)
aggtttcttttgtaggtattctggccgaggacttttttagatcctccaactttgtatattgtcactacataagcacgcatatttcttgttttttaatccatggcgaacacttgtatctagatcgtatttatatacaagtataatatccatttgaaggggaataggatcatgtatcttctcttaacattatatcttgccaattcatgcttgtaatatgcacttcagtaggtaacttctgtcaataccactttctaaggatcggagattgatctacctataacacatttcccccttatttatcatcctcccgtttctatttcaatgactgcatataatccttttctgtctctactctttattgtcctttcttatctattgatattgtgaatactcagttactgtacatcgtcttctttgttgataaaaacatatgtgcaatcaattctttatgtagaacatctcttaagtaattgctttcctacagatttttcatcactagctcaatatgattttacccgaggaacattttgctttaattggtttgatctatcgtggttgctggtaatttgatatgagcaggaggcaactaatcaacaatgttcaggatgcagggccacaccacacatatggattgcttcagtttgtgtgtcaaatctgttttccacaaagaaattatttaaacaaaaagatcgcatcacagagaagg

SEQ ID NO: 7590 - DNA, 761 bp, Zea mays
  Intron number 2 from transcript GRMZM2G057304_T01 (locus G RMZM2G057304) derived from phytozome v7.0 (chr-ID 6; pos 1 34025189 to 134025949 reverse strand)
ataagcacatagtgagaatctgggatcctaatacagtgagtttcttcctttccatcttgttcaaatgttttcttcattagtattcatggtgtaattttacatatatattgggtttgatgtggatttaaagcaaactctaatttaagacattactgatattttatgatccattgggtgttggtttgcttggcttcttgaagtaaaacatggccgtggttataccttaaaaggctttaagctagtttctattatggtgcaatctaaaattctaaacgtatcttgaactcttcctgtaaggctgtaacatttgaatccgtactggtaatgcatgcgatagcctctatctgaagcaaattagggaagttactacttactagaatagaacccaaattttgtatattaggttgtgctgacagctttattccttatttacccttgtttgactttgggtttatttgggaagcatgtatttgcatagcacttgaaacccagctacctttaaacatatctgcaaattcttagggaatatgtgagttatcagttttaccaaattatctgtggttccaggctacatttatgtctatgaggaatatgtttctcacgacactaatatctatttagtacttgcattctttttgttgcttgttgatgatactaatactgtctgatataactagttgctttttctctctttggtaagaatctgcaattaaatttgacatccattggttatatattttttccttgttcagttaccacac

SEQ ID NO: 7591 - DNA, 435 bp, Zea mays
  Intron number 1 from transcript GRMZM2G057304_T01 (locus G RMZM2G057304) derived from phytozome v7.0 (chr-ID 6; pos 1 34026022 to 134026456 reverse strand)
tcttctcctctgagagttaaggatcacatgtaagtctctattttctcttgtgaagggttttcacttgttaatctttatcaaaagttagttccagcccaatcaaccatttctacataaatcttctaaaggaattctcttattggatgggtttttcttactctacttccttctgcaacagggccttaccttttcttggttctccatcctaatatcatgccatttaacacacattctgtttgttttgttaaaaaacagatacaactgctgcaattagtttttgaatctgtatgttttttaatgtgtcttggaagaataagttgtaaacagcgggtccaaatctctattacttttgaaatgcaatcaatagttgaatgcttattgagttacatattgtacctttcactgggcatgtaattgctgttatctgtttcaggt

SEQ ID NO: 7592 - DNA, 818 bp, Zea mays
  Intron number 1 from transcript GRMZM2G319402_T02 (locus G RMZM2G319402) derived from phytozome v7.0 (chr-ID 6; pos 1 9368577 to 19369394)
tccatccacaaggaggggaagaagctactgatgatggtggcgttggcgtcatggtcactcagtgtgtcaagaggagcaaaagcaagaactcccgggttttgaagacgcagcagacactgccccaaggttttttccctcccatggccaatcccaattccattgatcaggaccccaattattcctcaccttttggtgcattctttgcccaattcgcctacaaacctgctaatatcgctgatcgcccagcgaggctgcctcctcgaggccacccatcatctgggtcttctctactcactggaaaagagacctccaaggctgcctggacagcaacctcaaacaccaagcaaccatgcccagcctcagaatcaacctcagattcacaagaagaggcaaggatcgaagggaaagaaaagcctgagaagaagatgacaagggagatggcagtgagggagtctacccgacatttggcaatactggaatccatgtctgcttcctcagtcccagtcgctcccgaaaccccaacctcggcggcgatgacagcagcgacagtgatgcaggataaggagtgcaagagggagaatcaggaggcactgccggcagctccattaattgaggaccctgtgccgaaggtagaaaagaggcacaagaaaagaaaagtggcacaaatcacgcagatggaaaacaaggtgatgacagagggtgcgacggtaaggaagaaacataggcggcagaaggtgaagcaggagcaatctggccaaacaccatttctcaatgatgtctattcaaaggcaggggaagaagctgctgctggtggcgtc

SEQ ID NO: 7593 - DNA, 616 bp, Zea mays
  Intron number 1 from transcript GRMZM2G497282_T01 (locus G RMZM2G497282) derived from phytozome v7.0 (chr-ID 3; pos 1 96093701 to 196094316)
tttttttttagattttttgtaaactttgtcagttaatgtgcactctatgtaccaaaatctcatttgcacttatatgttccctttaccaccaccacgcgcggcaatgtggtggccaaggcaatggactagaaatctagttttggtctgaagttttgagctttgtcttcttcagccaatatgaaatcttgagacccgtgagcctagtgaaatgttgaatatattgttttaataattgaaacaactgatatactaaatctactctaaatattgtgaatgagacatgttaagtctatacccaaaggttgaggaaggtgacaactatataaggatgacgaggatcgcaaaggagaacaagtgttcaacattgaaggaaaaaaacaaaatacaaagcctcaagacaaagacataagctaaaaacctggtgttacgaatcttaatgccttgtcctatagttttaattattttttaaaaaataacttaatacaaccccaaaaattgttttatttatatttaagaacagatggagtatactgaggggggggggggtacggtatatattaagataaacattggacaattgatgttgcactttactcttttctaatatattgaagag

SEQ ID NO: 7594 - DNA, 852 bp, Zea mays
  Intron number 1 from transcript GRMZM2G045259_T02 (locus G RMZM2G045259) derived from phytozome v7.0 (chr-ID 3; pos 4 351698 to 4352549 reverse strand)
cgttctgcggcgcagcggctgggctgaggacggcggtagctggcgggagcgactaaaggcccaggaaggcccactagcacatagaacgtccgtagaacgcttaaaacgtcatagaacgtccgtagaacgcttacacgacgcttaaacgtccgaaacggacgttcaacaccagtttttttagaacgtgcggacgttttagattctaatcacgttctaccgcttaaacgacgcttaaacgtcgtttaaacgacgttttaataacaatgattttgtctgcaggatatgcttctaaaaaaatgttactgtacactaccatcacaatatataagcaatttgcacatattttaggagacttggtttccctagtctcaaagtgctgttttctctgccttgtcctgtgatgaatctttgttacattcatcatttctcgttttcagaggtagtagtatgcccttgaattgggggctctgctgttttgattatttcactctgttctcagtggaatttcttttgatttgtgccagaaatataccatcctttgaaattcctgcatttcaatccatacattgatatgctggtagaacatagaaggtatttttgggctaaatgggtttgttgcgtgccatggggaggcacactgtagcagtttttgtaggcacagattaaatatattagtatgattccaaatatcaatctaatatattctcaattgattccatgtatatcttcattatatattgtatcatgctatataatgttacctggatttaaatttggggtagatagttcagttattggtgtgttttatttgtggttgcatgatttgttcagctatctgctcatttgctccag

SEQ ID NO: 7595 - DNA, 913 bp, Zea mays
  Intron number 1 from transcript AC206393.3_FGT006 (locus A C206393.3_FG006) derived from phytozome v7.0 (chr-ID 6; po s 121255319 to 121256231 reverse strand)
agaacaacgaataccaagttaaggtagagctggtcacaaattggaaggagctgaagaatccatcttggcatccttttaagatgattcaggctatcagataaggtacttgcttagtaccatgcagccatgcattgtctttaatgtttatagaaactgaacaacaagaataaaacctttaaaaataaacaagaacaaaatgtgtgtaatatgtacttagtctagaacagcctattatgttagtgattaaacccttgcattttcactagatctgtatctatcaattgcatgtattctttgacttgagaatcttcacattttgagctttgtttaggtaaatgtaacctggttcaaaatccgttcgattacaggagtttcaactcattgtacttgccgtttaggccttggcctaagctacacacatgttatcaagtagagtttcttagtctatgttgcaatgcaagtgacttatataatgatcaattaacacattttcttgtgagtagtgagatcaaaataactttgtgatgcccagcttcttctttatcaaacaaagtgtacatcccctctcccccgcccaagttccgtttctcccttaggatcaaaataactttgaatcgtgtattgatactatatcagacggatacttctttattaaagtttatgtagcctgatgcaagattggagagtgaattgtgatgcccagcttcatatttaggtcttgaagcattagtggaagaaaaggacaatcaaatccagaaggtatctgctacttctgactttttctctcatgtctgcacaacaccagtggagtcattatctttttagatccagtacaagtctgctttctttgcttgtgtgatcatcagttcctccatcatcgtctatcttgtgatttcttttcagtttcactttc

SEQ ID NO: 7596 - DNA, 1046 bp, Zea mays
  Intron number 4 from transcript GRMZM2G444194_T01 (locus G RMZM2G444194) derived from phytozome v7.0 (chr-ID 6; pos 7 9437372 to 79438417 reverse strand)
tgctatcgtgttgctatctatctccatagaaattggtaattttgatccctcccactgcttctttagcctcactctcttttacgttttaccactgctaagattcagtaattctttgtgataatgtgaataaatcatcatgtaatctgtggagagaacctgttcttgcaaaacttcctgcttcctgttgtgtatctgtaacaacaccatgtatgtgaccacggccacttgtcttcctataacaacttttacaagagttggtaattgttttctatgtgctttgatcgatgtaaattttattttctattctttccaagagtgggtaattgttttctatgtgccaagctcaatattttgaaagcatccatttcatctagttcatcagatataatggttagtgtccccacagatcatctgtagtatgttgttcacaccatgctttatcaaaatgcttgatgcccaaaactggaataacatagcactctcttctattttattcatgattccattgaagcccaaagttggaaataatcatattgttttgtgcatttactttgccagccattagtgggattgcttggatttgtatcgatttctaatgtcagctgttagcaaaaagaaaataaacctcttttgcaacttataatcaggtgtctatacatcctttagttttttcaagaagtaatcagtatttattctttttttgttaggttattactcttgacatggggctccttgttgctgcaactaaataccaaggagattttgaagagagactaaataaacttatggagcaaattaagccaaatgaagacattattctctttaggaaaataatgcttagaaggtaaaacatgccaggttaaatgctcacggatactacagtactgaaaattcatatactcatgcatatcttgctactcttatatttataggtcataacttttcataggcattatctttttctttgtttttttaggaaaaggtcatatctatattacaatgactttgtaggtgaggaactacccttgtcagcattctgcaggaca

SEQ ID NO: 7597 - DNA, 351 bp, Zea mays
  Intron number 1 from transcript GRMZM2G103135_T01 (locus G RMZM2G103135) derived from phytozome v7.0 (chr-ID 3; pos 1 88454782 to 188455132)
cgctttctgcgccaaccctcctgtggagtcatttggtgagtcgtctttcctgctctatatgtgtgcatatccaatatccaatctatatgtaatccatttagtactctaacttaataaaccagtctgtaatattttagaaaactaatttagaaaaataaggaaacttagccaagggcatatcagatgccgaccataacaataatacaccatggaagtttgattcaagtgtatagaataaaaaggtttcaggaaaagaaaggaagcagaacagaacatgcatagcaaaaagaaaattttcttagcaatctttcattttctgtgtcttccttgcaggtgattgctaaaaccagc

SEQ ID NO: 7598 - DNA, 540 bp, Zea mays
  Intron number 1 from transcript GRMZM2G137607_T01 (locus G RMZM2G137607) derived from phytozome v7.0 (chr-ID 9; pos 1 53175522 to 153176061)
acctttggtctttggctggcaaatacttgctgcaggtgagcttcgctctggggagttccttgtcgtgccttggtttatttatatataccctcttgcttcgttagattatgaaagtatttttaaggcgccacatttacaaactaaatatttagaaaacttagtgatggtcaaagtttcatgagtttgatctaaaacatcagtcatttgtagctctgggggattagtagatagtatcattcaaggtcatgtgggtatcggcaggataatttatattcactgtaaccatcttcaactctattttgtgcaaatgatatgtctggtttaatgctgaattgatatttggcacttgagttgtgtacttcttctgtggttttatagttttcctgattgaacaaagaccatgtgctcgtctatgttgagttcatgcttgttattatgtcaaatggcaacttatgactgagtgtcactcagttacttgtgtaaataaattacttatgtctaggcttattatccatttttcaatctgcagagctcctgatt

SEQ ID NO: 7599 - DNA, 623 bp, Zea mays
  Intron number 1 from transcript GRMZM2G123765_T01 (locus G RMZM2G123765) derived from phytozome v7.0 (chr-ID 3; pos 5 0640484 to 50641106)
ttcatcctagcgtcgtgctccaccgcgccctacatgttcttctcgtccacgctccctcctttgttgtgcactgctcgtagctgctgaaacgatttgttgtcattgattggtcgcctccttcgttttagggttcctgttcttcgaccgaacgcgcttcaaatcaaggtttcttcgctatctctagttttggatttgagtttgcctcaagtaatcagtgacttccatcacaaattgtttcaagatttgcgttttttccgtcattaatcagtgaaatcgcatgtacggtttcgaatggttactgtatattcaaatgtggtagacattgtcttctcagattttttccctatatgtacaaatggccttgtccatcttttgggtttcatcattccagaaacctctttcttagagttttagttcttccttcgtcacatccatcagccaaaaaaggattttttttttctttttggtcggacatttagtattgaaggggattcacatttggacattggggttgtattgtcagtactttgtaccagaaaacttattttttgtgtgggggtttagattctaatccccttctttatgcagtgcaactccgtggacaggcaacaagcaattggcgt

SEQ ID NO: 7600 - DNA, 654 bp, Zea mays
  Intron number 2 from transcript GRMZM2G023631_T01 (locus G RMZM2G023631) derived from phytozome v7.0 (chr-ID 3; pos 2 21832939 to 221833592)
ataaggttggatgcatgactcattcagctcaaaataacccatccgtaatctctctgtttccaggaggatttttttgaccttgtaattaattggataggatacccatataactgtgatgcctgcctgccttggtttcttgatctgcatgcagaggatccagcaagttgtgcgccagacgtcaaggctgaaccagaaggccatgtcgtttgcgacgggggcaggagcgtcacgacattttggaagggcacgtgtgaaacgtagcaaaaacattaattactaatatgtttatatatgtaatatgtatatatatatacacataataatatatatattgttcgtcaccctaagtaaaacttcatcagagcgtcttcagtaattaccggtaataactaaatattgttcagtcattaccggtaatctatctttacctctatataaagcaacacttcaaacttttaaataaatgcacccaaaatcttcacaactttaaaaccaaggatgagaccagtcaaaatctcttttttctctttcttctcacacaaatccaatggtctagtttatttggataatcctccctcattaatcatgctttcgcacgcgatcccctcactgggtcgagggtgtgaagtccgcatttgacggtgtcgtacgggt

SEQ ID NO: 7601 - DNA, 997 bp, Zea mays
  Intron number 1 from transcript GRMZM2G104017_T02 (locus G RMZM2G104017) derived from phytozome v7.0 (chr-ID 6; pos 4 1189708 to 41190704 reverse strand)
ggcggcgcgtcggcccacgggtgaagaggggagaggcgagagtgaggagacgacgacacacctgtctctgtaatgcagatcgggttgacggatccaacggctggaggaaagtgtttatagaaaagcccctcactgtccattattttgtgaagaagccaaacccgtcgaattgcaagccagcacagaacagatcccttctcaatcgcatctgggtctggcagtcttctcgcggttgcaggccacaaacaactgctcctcctgcattccccctttccccttccgtccgctgcattcctgctctcttgctctcctcgctctcagaccacagttgccgccgccgccgccctaagccagggtgctgaggctttcgttggcctcttcgccggcagcgagcacccaccaggtactcccacctcttctcttcccttcccttcatgctgtgcgaagctgcgaaccgtcgctcctctgcggggcgacacgggcggaacccgcgccgccgctgcaagagttcgctcgctgccgcctgagcacgcggccggaggcccgcgccggtgcgagggtggcggcagcgaggcctttgtactctcctcgcgagttccctccccaagcgtgcttgcctcctcctgcctgcgccagctagggctgggctcgatctggtgcgctatggccggatccgtggcgtggcgtgggtggagatccacttgcaggggcacggatccgcattccatgagtccggatctgcaacagcggtggcatcagcgcggcggggggtgcgattttttttcagatgcatataagtccctttactggatccgccccgcccctgaatgcgatgttgcaaatttcagattcaatataacgtcagaaaccgttgtcttccagttagcatgcgtctcaaatccagtgctccttttcaatcacatattgaactaaaacactttcatcattgactcatttgattctatccatatgcgccacctgcagcagttctgtagaa

SEQ ID NO: 7602 - DNA, 612 bp, Zea mays
  Intron number 5 from transcript GRMZM2G304940_T01 (locus G RMZM2G304940) derived from phytozome v7.0 (chr-ID 9; pos 1 7507888 to 17508499 reverse strand)
tacaaggtaagttcagttagatagatgctagctaccattgctaatgttatatatatgttgctggttgtactttatttttaaggttctcataataactaacaattgcaattaaacaagttatttcttgttgtaacgttcaaacaggaaactcactagatgcggagttttcctgttaataaaacaaatgtgttgcacatatttgaattaaagaaggggatggtatggaatagctagattctgagtacgtaattgaacccagtgaggagcaaagtagagtggaggcggtaaggaatatcagtatatgagatcatttgtagtttaatttatattcttcaaattaactattatttttatttaaggaattaataatctctcggttatttgtctgttatgtggatcctatccattatccagaattgatccaggaagtttattataaattaataaagctatatctacatacatatatgttaacttcaagtcttataatttgtaatggatttaattttgaaatggagcatcaagtgcaaacaattttgtgttactaatgattttatatacattgacggctactatatatattgatagtccttatggtttcattgtagtttt

SEQ ID NO: 7603 - DNA, 1004 bp, Zea mays
  Intron number 2 from transcript GRMZM2G549817_T02 (locus G RMZM2G549817) derived from phytozome v7.0 (chr-ID 7; pos 1 22621837 to 122622840)
ctgcagctagctcccctctccgccctccaacggtaagcacctccctctggttcgcaaacctcctctcttcgtttagcgtcggtcggatcgagaattcgagcactagaacctaggatagagggatccgttcatgggcgccgccgcggcagatttgtgcgtcgccgtgtgagtcgtttgcctcggccctgtagcgtgcggagggtgggagatgatgtgtaagccgtagatcttaggatgtgtggcttggattggctcgcgtggactgttttggccaaactgatctggttcgtccgatccaaatcatgcgcgtgtgaatcaacgtgagcaacttaaaatctgggacgtcgatcgttgatccaaggacttgcaagacgtgccgatctgttaaaagaccagtttaatcttcgccgtgagttttagatccgacggccaagatctctcgataccccttcgcgatggtcatttttctaaagagtcctcgggaaataagaaaatagaacccgccgtcccatattgatgttcactgtgtctaggataagttaccagtgagtccctgcagttttcagtatttgatgccccatccagataattataaaatcaggaaaatgaattagaaaatgagtttttaatataaaaacaattcatagaattggtataattcatagaaaatgcatataaactccaaattggtccattccagtttctcaattttcataacattattatctaaccattagtgcctctgttttaacatgaaagtcaatttaaaatttatctatcacataatcttgtattaagcacataaaacattagaaaatccataacttaaaatatataactccaaatttaatgattccagttcctgtgatcatattttattgtctagtttattactgtatattatatttgcatgtttgatgtgatgttaatttttgctatactatgtatgtattgtgttgatgcgagtagacgagcaggctacacaggattctgaggttcagctg

SEQ ID NO: 7604 - DNA, 635 bp, Zea mays
  Intron number 1 from transcript GRMZM2G089962_T02 (locus G RMZM2G089962) derived from phytozome v7.0 (chr-ID 6; pos 1 56596544 to 156597178 reverse strand)
tgtcgcaggtgagctcctgttccgtttgtctgccgatgccggtatgttttataagcggttgatgatttcgtggacgaactgtaggcgctcggattggattctgtgtgtaggcattgcttgtttcatgcagagaacactgcctgttctgattgcttctcatgctgctgtacttttactactttggagttgggagacaaaaaggttgtgcataattagaagaggaacacaggggaatttgtactgaagctatcttccttttctgctcggatttcgtatatactaacgcgtggcatggctctgctccaccgtagaatctctactccaaaactttaaggtgtagcggagtctattgttttctcatattggataaatatcttcaaactccatatctaggtgcttctccaaaaacttatactgcacctcttaaaactgcatgaaagagctgcatgaaattggggtgtttggctggctctggctagctcctcctcctccttggagttttgctctagagccatgcaaaacaccctatcattccgcgttgatgcatatctagagtttgagtgtgaatgtatccaacggccgtaattaatacaaatcatgacatgattatttgtcttgattttgttgcaggaatc

SEQ ID NO: 7605 - DNA, 696 bp, Zea mays
  Intron number 1 from transcript AC155622.2_FGT004 (locus A C155622.2_FG004) derived from phytozome v7.0 (chr-ID 3; po s 4447973 to 4448668 reverse strand)
ctttcacgccacgcagccgctcttcgtgtccggaggtactattccttgtcttctccactcgggcgctctaccggatcgtcctcacctcacctggatcgtcccttcgcctcacctcacttcacctggatcgtcggtcggtctttttgtgcgtttattagttccgatgtcgtttctggaggaggcttccagcttcgaatgatacgtttcagtatcgatacgaattcttaatcaagttcctaagttccaatgtaaatcatgatacccagatctttggactcagctcagcttattttgataccacgttcagtgtaacgtgaagtcgatggctgaatttacttgccaaaggacacgaatagtttttttccctagaaaatgtgcatactggcaggttgtttgctgtctatgcctgaagcaaatgcatgggatctcattttctttttgagttttgctgcatgtgatttcggtgtggatagggaagttgctctgcggtgcctatctggctagttcaaatgtaaatgatgggtgtgtggttaaacttgaacacgtaaaactctggagcgttagcttcctgtttaccgtggtggcaatctagttagactttgacatttcacgattgagcttacagatcttctaagatcctagttactgtgatgtaatgcaggtgacgattacaagattaaggtctggaattacaag

SEQ ID NO: 7606 - DNA, 970 bp, Zea mays
  Intron number 1 from transcript GRMZM2G124658_T01 (locus G RMZM2G124658) derived from phytozome v7.0 (chr-ID 3; pos 1 35003880 to 135004849 reverse strand)
ccgtcgtgctcctcgtcggcctcaccgtgtaccaggcaagcccgacggcccatttgcatctcttagcagttcaccgacatgtggggtctctttgagtcattgacacgtgggccagtgcgtcagatatttaaatgcttgcgaattaggtgccaaatttcaaaaatttctcgtccaaaatcttgcgcccagccggcgaaccgctgcccgctttcggcccaaggctgccgtgattgtggggatttgatgcggagtttagtcaacggtgtttcttctcgtgccattcactccgcgtggcgtggtggatggtgacgagataaactcccggacattttttttccttttccagagaaaaaaagaaggcatgtttcctgttcaatgttagctcatagattctggcataaaatcgagaaaagaaaacgtcttcgtatacaaaatatgaagatatgtacaggttacatggagggattacagtaagatttacaacgtttctgcaggagttagattcaacaatttctgtttatgagcctagatagggtagtggtattgaatttttctatagggccgtatcttgttagaaacatgctgctactgcctatcgttctgtttggaatgttagtaccatctgataggacttggtggatgtaatcatatatctcatgactgtagtcctgtacttggtaccaaaccagcttgtcatctgtctgtatcagttgaattaattgtcaccagtttgtagtgtctaaagctcatatttcaacatgattgatcagtgacttcaacctcaccagccagatcaagcataaagcctaactgcaacacaagctgtagtgtttattctttagaagtaaatttagtaatttatgcaccaatttgcctggcttcttgttaattgatccactcttgttgattttttcaactgattctgcctttctgcttgtatgccagcttttgtgtctggtagatttggagt

SEQ ID NO: 7607 - DNA, 893 bp, Zea mays
  Intron number 4 from transcript GRMZM2G469747_T02 (locus G RMZM2G469747) derived from phytozome v7.0 (chr-ID 3; pos 2 05972204 to 205973096)
attgttaaggaaggggcaggtagtgttcaagcactgcttggtaaggagcgattctttttggctagtttccatttatcattcatgattacacatgatgtttgtactgccaataaaacaaaataaattgataggatcatattctagtccatgcagctttgactggtcactggtttcacttcatcatattcaagctgtatttcatcaggactgagaaattaaattctgagcattaagatcactattatcaagtactttgcaccagcatatgtttatttcttatatctgttctgagatttcagatttgtaaaaggaaaacttttactggagctcgataaagttattttgctacttttcacatgatttattctctcttcaggtgtcatgcggctactgaagtatctttctggtttgacattatttagaaaggatgagaaagttcatatcgtggtagattctggaacaggaacaactgctgtggggttagctcttggagcggtatgtctagggtgcgtttgatacaaatacctgcacattctgacaaaaattgtggaaactaaacaatcagtcataaataaatgtcccattccgttgtattggtaatttgaaactgtcagttatgattttcatcacataatcacctaatgttgttagtgctattctctccatgcatctttgctacctatcacatctcatctagttctcctacatgcagactccactcataaatttgaaaatgccccattctgttgtgttgggaatttgaaactgttagttatggttttcattaccatatcacctaatgttgttagtgctactctccatgcatctttgctacctaccacatctcatttaattctcttacatgcagactccagtggagggttactgctgtt

SEQ ID NO: 7608 - DNA, 375 bp, Zea mays
  Intron number 1 from transcript GRMZM2G150502_T01 (locus G RMZM2G150502) derived from phytozome v7.0 (chr-ID 9; pos 1 52040491 to 152040865)
agaagataattcaatatcttattggctctagagtaatatattctctcttttttatctattttttcttgtctatttaacttatcgagtcttaacatgtacattcatgcttctgaagtgtttattttgggttgtttggagtttggttattggtgaatttcttttgatatgaactcactatgttgccattttttcagcaactattgttctaaaattttgaacagttgtcctatttcagttgggtcattggttgtttctcttttgttcactttgttttttaatctattctactgattataactatgtagactaatatatatttcctttactgcatccttttcaggatcataggaccaagaataatccttatcttggttt

SEQ ID NO: 7609 - DNA, 959 bp, Zea mays
  Intron number 2 from transcript GRMZM2G144680_T01 (locus G RMZM2G144680) derived from phytozome v7.0 (chr-ID 3; pos 4 1765722 to 41766680 reverse strand)
ggacaagataagtaagtagtcttatatagtttgcccactcgagttttgtatatcttgacataaatgaattatgcaaatgttgctagagttcttttaggttgaagcttttgcttagttcagtgttgctatcggaaagctaaaattattttcttgccacctcctctgtattgttttactgcttcagctcctggtgcttctaatcgagtactatagaaagcatctctcttgataaatcgttgtgtgcaaatatatggtgcttatataatccatcattagagtatgaggcgtgctttattttgtgtgcttcccacaaaaaagagtagcctattataaactttgtattagagcacatgacgttctaagttttggccacatttctctactattataatgcagccataaagattcaatttttatgttgggcaccataaagatgtttggcaccattcttcccaaacatttatctactattataatgtgtgctttattcaatttttaggattgttaggggtgaagtcttagtctcaagatagcatattgttgtttgcctatattatttagtgtcgattataattagtattgttgtttagtgcttggttcatactacatctaggcagtgttctaaaagtttgggaggaatggaataggataacggtcggctaacatacatcttttcttcagcagccgtggtaatgaatttgaatactgtagttactataatgaatgtttttaacttgtctactcttctttactaatcttttagaactgtgtcattttctattatttctattacttaactgtgttgattgtcttggtgtttatactcttcttcagttgttctctgtgccaactgtggtcttgtacgagccttctctttggtagcctaataggattttgtgtcttttgtttatctctggtatttaatcttatactaaattggcttgtttgattttcagggc

SEQ ID NO: 7610 - DNA, 504 bp, Zea mays
  Intron number 2 from transcript GRMZM2G052933_T02 (locus G RMZM2G052933) derived from phytozome v7.0 (chr-ID 7; pos 1 41817033 to 141817536 reverse strand)
aagaacagtgtggaaaggtcagtgtatactaagttgctaactttacttggatttataatcttgtctggcacctccataagtggttagtgctacataatttctgaatatgcttcgtttagctgacctcatttaagttatgttaatttgatcatcatttcatagcttgttaggttgtactcacaaaattgtgatatttggtttaaaatatatcaaacatgacaccttctcaaaatttggcaccggatattgttgttactgtattaagatcatggttctgcatggctagtcttaagttctcaatgtagtaaaaaacactcaaggtagatgtaaatattttaatcttctgacataagagtttagcatttttttctgcttgccaacttttgtcatgctttgctgatgtttcttatcgttgatcgcatgtattgtgatagatttcacattgcttattgactattttgtgtactatgcttcagcacagaaaatcttttcattagagaagca

SEQ ID NO: 7611 - DNA, 658 bp, Zea mays
  Intron number 4 from transcript GRMZM2G032496_T01 (locus G RMZM2G032496) derived from phytozome v7.0 (chr-ID 3; pos 1 48222139 to 148222796 reverse strand)
ggactgggctgatcaggtatcacctatttacttccatccgctcttgacctttgcgagattctagtttctataagcctctaggactttattatgtgtctcactggttgggtcaaggtatgacttatgacctgcttctttgatgagtggataaagtagaacatgattataacaagccaattttcttttctttaacttccataattgcctaaaaaccttgtcaagctaatctagtactccctccatctcaaatcataagtcatttcaactttcttggagagtcaaaacatctcaaatttagccaaagttatagagagaattgcaaagaataatgacatcaaatcggtaatactgtgaaaatataattaatgaagaatctaattatacttatttggtatcataaatgttattattttattgtataaatttggtcaaatctgagatgctttgactctccaagaaagtatattttgtggagtacattggtacaatttacaagtgaaatgctataacttacaagtgaaatgctataacttacaagtgaaatgctataaaatatatcattgatgaattttatttattttcttatactataaccatcatttgtttctcaccacgatactttccctttgtttcaagggtttactgaaggaggactcag

SEQ ID NO: 7612 - DNA, 849 bp, Zea mays
  Intron number 1 from transcript AC191553.3_FGT001 (locus A C191553.3_FG001) derived from phytozome v7.0 (chr-ID 3; po s 127222784 to 127223632 reverse strand)
gctacccacggtacgccactatcggaattcagctctttatcgagtgttgtcgagtgctaaataatctgtcgagtatttttttagacactcgacaaataagctttttatcgagtgtcaaataatttgctgattgttttctttcgggcaattgtcaaaaaagctatttgctgagtgcacacgaatccacttaatttagatcttgtttagttattaacctcatggactgatgatacagattaaaaaaaattatgaaagattttgacttggtactgatttaaacttattcaggccttgttcgtttgtactgaattggtgggtcaaaacgatttctaaccgaattgcttctctaatttatataaactttgattagctggaatgatcccggtgcaatctgagacaaacgaacaaggcctcaatttgcttcaatccatatggatttgatagggaacagaatggacccttaatttgctcgcgtccgaacctagtattttcttcactttgctacgcgcgcaaatgggctgttatgaaaatgaaaatagattatacagaatatctagaggaatagaattagctgctgtattaatatattaatggaacctgtgttcaactgagaattgttatcaaacaatttgaaaatgggtctttttttgttgtttgtttatataattaattaatactgctgatagatactctagataggtatacgcgtatatatagtttggacctttcattcaataatatacttctatctatattatatggaaaactgttttccccttctttttcacgttcgctgctggctttgaatttgcagctccggcagtactcggcgcccgtgaggacgccgtc

SEQ ID NO: 7613 - DNA, 492 bp, Zea mays
  Intron number 1 from transcript GRMZM2G137971_T02 (locus G RMZM2G137971) derived from phytozome v7.0 (chr-ID 7; pos 8 6746158 to 86746649 reverse strand)
gctcgcaggcgatctattgcacaagcaggtcgttcgtaagatcctatccatctggatctccgtagatacagcgttctgagaattatttctcattattggtgctatttgtcataattctcataatttttaagaatatcaggctgttttttgcccggttttgctatatcatgctcgagtgagaaaagctcaaaaacttgttcacatgacaaaatacttttagtaggatcacgtaagttccaaatataatcttcaaatgtgtgagttctagcagtacagtccgaatgtagtttcagtataaggtggttgttttaaatagaagatgttctgcttagatgccttctacttttatggactatgctgtctatctctaagcgttagcaaatatgcatatttgtttttgttacttcatgccttcatggtaaatggtaatagtgcagtccttgaattgttatttcagagtatatatcctgcaaagatactgaaactcaactt

SEQ ID NO: 7614 - DNA, 532 bp, Zea mays
  Intron number 1 from transcript AC199404.3_FGT002 (locus A C199404.3_FG002) derived from phytozome v7.0 (chr-ID 7; po s 138897553 to 138898084 reverse strand)
tcagaactttcaaaatccaaaggtgatcttctgcctttctgcttttaacgtcctagtggagatgcccatctgatctgcaagacagtacctatactgcctttattccaagagattgatagacgttgagtatattccattcaaaagggttttgtgttctcactgcaaacttgcatgtcttcaagcaacttgtccaagtacacgtgcaaatctaatagtaaaaaaaaacagtttgcactctgtgcagttatgattgctggaacaaaatgagaaccctgatgcataaacatgtattcattttcatacatttgttgcttatagtccagtatatagtcttatatgctattcagaaaaaaaaaggccaaagaagcctgggacagtaccgcgtataaggtcgaggatggcttttagagtataaagtagagtataacgtacatgatatagcaggcagtgcccctcaccttttattccctgctggaagacgaaaaaacaaatctgcatggattgtttatgtcagttgcagatattgacgctt

SEQ ID NO: 7615 - DNA, 885 bp, Zea mays
  Intron number 2 from transcript GRMZM2G312838_T05 (locus G RMZM2G312838) derived from phytozome v7.0 (chr-ID 7; pos 6 4583323 to 64584207)
gcgacccctacgtcatcgtccacgttgccgacaaggtgagttcaattaaaagaagagcgaaatgaaggatttatgctgcctgcgcctgaatcgctagcaaagaaactagtatcaattatgctgacacagcaataatgttaatgtctgtcttggggtgctgattttggaaagtcagcttgatctactggtccaggtggttattcatacttaaataaattgtaccaaattaagtgtcttaattgtcatttcttctaggagtagtataatatataacacctgtctgtctcttccttcgctcctttcttttcttgtaccatgcagaccacaaaaacaaaagttatcaacagttgcctcaatccagtttggaatgaagagatgacattctccatgaaagaaccagtaggaataatcaaatttgtaagtttctatgccgacgaattctactctcgtcaaaaaagcaggattcaggacctgtttggatcagtacactaactgtccatgaatatggatcaatacactagcattgacaatctgaaatctgtggtgaattttcttgttcctttttctcagttttcggtctctctgaattcaatacattaactgtccatggactgaaatctagatctctaaacttgccaaattaatacactgcctatgttatgtgtttgcttacgtgaccaacatggacaccgatcagtgggctcaatattgtgatagcaattgttctcacagcgatcgaaggaaatgtttgcagttaaagtgaaaaaataatagtatgacacttctattacttaacaatattaagcccacggatctgtttcctgaacagaacgaccatcacctttggcaggaggtgttcgactgggaccggttcaagtacgacga

SEQ ID NO: 7616 - DNA, 831 bp, Zea mays
  Intron number 2 from transcript GRMZM2G060991_T01 (locus G RMZM2G060991) derived from phytozome v7.0 (chr-ID 3; pos 2 951391 to 2952221 reverse strand)
cagacaggccagactagcttcgctttcaggaacaggtaccaccgtgtaccgtacctagattgatgctacaaaattaaagacccgtaactatttaggaacaaaattaatgacgtacttgcttatatatggaacaaaaaactttctgcattcaaagtggtatagtcaaatccataatttgaaggccgggcatcggatggtccaacggttccatatataatttgaagtccataatttgaagggacaaagtccattctatcttacttcaactactgtctttgatcttaatctgatttctcttcttgaactttaaaatgatagtgatagctattttacaaaaaaaactttttatataagatcggtttaagataaactttatattaaaaattgtatatagagttttctaaaactttatagttgatagttttttttaaaaattttgagagggtttatgagtccaaatatttaatataagttctcaaaaccgatttgacatgattaataatgttgatgtcgtgagtcttggaaaaaacatatttttctaacttttaatacctaacactgtcgttcaacaacattaatgtatgccccattaatgttggttgcgtcctatattttttatatgcaaatttttaaaacgtgcttataatgttttgtgattctatatggacattttctatttttttcttacaacgaaaacttttttaggtttctaaagatgttttaacgagccctaaatattttatttaggtttttcatgtgttaaagtttgcttcaatgttgttgagcggcgatgcagggctttccccgtggaagacggaaagtcgctgcagt

SEQ ID NO: 7617 - DNA, 764 bp, Zea mays
  Intron number 2 from transcript GRMZM2G015734_T01 (locus G RMZM2G015734) derived from phytozome v7.0 (chr-ID 3; pos 2 10939195 to 210939958 reverse strand)
agcttcacctcaaccttcaggaacacaaagccgttaaaattattgatacgaataatgcagtatccacacaacacggtgacagaaaatatcttagctctatactctttggttttttatgttctaagcctgaacatcgatagcaagctgaacaaaagaactaaatacagagtagtggcacaacacatcgacgtcggctcattgagtagcctagaaaacttaccatcatacttgacttgctatgtcaaatccaaatggatacaaataccaactgctatatgttggtgcaatagaaaagtagtgtcctggctataagttatatctcatgctaaatttcaaaacaagaatatcatcatattctatttgtttgagaacacattgtatattcatgcggagtgaccagatgatagcaatagcagccaagctttgatgtaataacaagagcgactacatggagaattataaacacctatttttgaaatagcaaagaggacaggggagatgaattagcttgcagccaaggttttactgaaatgggaaaaagctaagaaataaagggtaacacgtaggtagatcagggatgcaggtgggtaccaaatggtgctttctaggtccgctagtttagttcatttctctccataaataattatgtataatgtcattcttattcattttagcatactgtcactttctcacactatactgaagttagttgtccctgaatgtttgaagcaatcaaccgaccttgttgcttctatttccactat

SEQ ID NO: 7618 - DNA, 827 bp, Zea mays
  Intron number 2 from transcript GRMZM2G559918_T01 (locus G RMZM2G559918) derived from phytozome v7.0 (chr-ID 3; pos 2 2380038 to 22380864)
caggatctgtacctgtatatgaaaacaacaataggactttagtgccactactgtatacagccaattctagttgattaaaaaagctagatgggggactttcttattgaactgacatgcatgtatcgagtctgtgattcaataagggcttgttcgattagctctcaattcatgtggattgagtgggattggatgagttttaatcccaaacaagtcaaacttcttctcaattttttacaatctcatccaatccatgtgtattgggaataaccgaacaagccctaaagcgggaaagcaacaactatctaggacatgaatatgtaggatcatatgaggttcgaataggtaattagaggggctgaatgattgcggaaccttaaaaatagttacctcgccttttcctaatcataaaaccaaaatattacagttttataaatctggacaaattgtggtttacgttagtaaaaacgtcacgtcgctaaccgaaatccgtaactccggtcgatctcaaaatttaacagattaaacttgaaaattatgaaacaaacctaactaaaatcatgccgatcgtactttggaatctaaagttattaatgaaacgagcttgttgttcttgaaagtaacgaaaatgaatcaagatataatttcgaaattaagaaataaccagaaaagataaatatttcaaacgttgtagattagtaaatagatgccttggtggtgatctagatgaaccaaattatcggtaacgattgaaaacaaagaatcaatagaatcaaaactaagaatacaattagtcaacaaagagagagatggataatgttaccacacta

SEQ ID NO: 7619 - DNA, 899 bp, Zea mays; identical to SEQ ID NO: 5976
  Intron number 2 from transcript GRMZM2G531699_T01 (locus G RMZM2G531699) derived from phytozome v7.0 (chr-ID 6; pos 9 543093 to 9543991)

SEQ ID NO: 7620 - DNA, 292 bp, Zea mays
  Intron number 1 from transcript GRMZM2G143559_T01 (locus G RMZM2G143559) derived from phytozome v7.0 (chr-ID 6; pos 4 0096510 to 40096801)
gacagtatgtaaaggttacatgggtatgtataatgccaacgaaattgtttgatctattcttatctttttacttgaatcagttcacttgtagtgctctttattcatcctatatgtttattttatttcactattggtaaataacactgccctgacatgttgattattaaagttttcatttgactcaacatgagcaacgtgttctgcatcaatcctcttaaaatcctttcatgttttctctgtcacatagtttaccttttattctctttaggagcgcaaaatttgtccaggatcg

SEQ ID NO: 7621 - DNA, 693 bp, Zea mays
  Intron number 4 from transcript AC147602.5_FGT004 (locus A C147602.5_FG004) derived from phytozome v7.0 (chr-ID 3; po s 178846540 to 178847232 reverse strand)
ggtggcccagtcgaaggtactgccatttcttctctaatctctaaagtaacaaagaaaagagaaaaatcccattcaacccctagatattaggtacatgtcatgcacccaataacaatgaatcatttccatttatctgcaatacactaggatagggagtaagggcatgtttcgaagtacccagtttttcataaactagtttatgaaaactaaagtggttccaaatataatagttcatgccctagtttataggaactggatttccagtttttgagatggttctaaacaccatcaaccaattttttagaaattaatttgtagaaattgtagatagaaactaaattcttaaaaactaggttgcttccaaacaaaacctaattcaattattgtacaaatactcaagttttactatgtcacattactactactttgaaacgacatgtaatgtaacacgtcacatttttttcagctcgcattacttttatgtcaggcattactgtaaaaacatattgtatgtgtatgtttcttttttctaatatatgttgccacgttacaataataacacatatcatgtcgagtttattgtatttgcattcaaagtgtaatgtgcatatgtctcgtttgcttttatttacgttgcatttgaaaaaaaaaacatacaagctatttttgtcgatattttattcaggtagctaa

SEQ ID NO: 7622 - DNA, 602 bp, Zea mays
  Intron number 3 from transcript GRMZM2G127949_T04 (locus G RMZM2G127949) derived from phytozome v7.0 (chr-ID 3; pos 1 78007285 to 178007886 reverse strand)
aggagggcgtcagcttcaagaaccacgtcatccaggtatggctctcgtcgtcgtcgtcgtcgtccgtccccgctccactttctcctccccgccataccatgtgtaatactccaactgactacagtttcgtccctttccatccgggctccggcttttgccacgaaaaccgatcctttttttgggggcgctgggttccgtacttccgttcggtcgttatcgatccgccgtgtctgcgaaaattgcggccttttgtgtaaacgcgagaggggtatcgatcccccggcctcggccactgatatgcatgcttttctgttgtgcttcgtgcttgccatttggccaaacgaaaagcgagcgacggggcatcgacccgtggtgatcctaacttatctcccgcgagatcggaaggaaccgggatttaagcgtgatgggttttgattaagcagtcgtgtatatatacttaataataataaaacaaaaaaaaacaaaagattactagtagtagaaagaagataggaagttggtggtgatatggaggagtaataatcttgtgaatgtgatgttgaccagtggttcgaggtgctggacgggctgctgggccccta

SEQ ID NO: 7623 - DNA, 748 bp, Zea mays
  Intron number 1 from transcript GRMZM2G391367_T01 (locus G RMZM2G391367) derived from phytozome v7.0 (chr-ID 3; pos 4 3108691 to 43109438 reverse strand)
ttttgtcctctgtaactgttcgctatttattcgaggtttggcatgtagcactgttaaattttatgttggtctctactcttctcaccaaaagaaaaaacgatgcttagttgctctttgcatcattcagatgggacttttggagtactcattagatttgtattttgagttttgaagttgaaaaattattctccgagtcacttgttaccattgcaagtttgcaacaatgagttcacttttctctctgttccaaattattcttcactttacatttgtaagtcaaaactttgaccaatttcattgaaaaatgcatcgatatatacaaaatattacattagtttctcatgaaatgtgtttttgattgtgcatttatttgaacttgcagatgccaatatatttttttctaagaacttggtcaaaattagagaagtttgactttagacagccagtgaactataatttggaacaaagggggtagttgtttacctgagaaaatcttggatgaggacaactgtgttttatgtactaataatagccagcaaactttattatcgttaaagtcactatctgttgtactttgctattgttctctaaccatttatttaaaagcattctttttctagcacctgtatataccattgttctcctggcataatatgtcttgatgtctaacagtaaatatgtttatttctttaactaggtttgaattttctatacgacttcatttttgtaggcacaagtggtccttgga

SEQ ID NO: 7624 - DNA, 549 bp, Zea mays
  Intron number 1 from transcript GRMZM5G890163_T01 (locus G RMZM5G890163) derived from phytozome v7.0 (chr-ID 3; pos 2 26136493 to 226137041 reverse strand)
atctctcacccccctgttgctgaacccagagagtggtattaggtaacttaagtatccgttaggtgacaaggataaggttacctttctatgtatgtcttgggcggcaaaaaaaatccatgcatttcttgaaattaatacatatacattaaaattgtgtgcacagtgattgatatattttcttggtttatatttagtctatgaacatactcttcaaatctttgtgtattttaaacattgttctgatattaagaaaatattaccctatatgaagttggttttgaattttttattcattctggtgagctgatgtttcgaagttgtatacatgttttaggcttcaatatttacttttaacttcccaaacaactgcataaattaatgtttatcactcttccattgcatcctcaaatgttttctgtttgtagcactgaacatcatcagtttactaaagtattgacctgcactctaaagtttgaaatatctatcttacttgctatgttggactttgccacagtgactggtataatcttgagaaatctaaacgtgtga

SEQ ID NO: 7625 - DNA, 550 bp, Zea mays
  Intron number 1 from transcript GRMZM2G470981_T01 (locus G RMZM2G470981) derived from phytozome v7.0 (chr-ID 3; pos 3 2790746 to 32791295 reverse strand)
aattgacatccaaggtgagtggatgtgctcgtatactgtgttccattagtatgcatttgatttgaacatcctagaaacatgatatgagttattttaaatatcattcaaaagatgtcctaactatatggtgcagagatgttgcacacacttcatatatttatcttcagcattagtgcaaattgttgcattggttttttatgccctttgacagtgaagattgcagctgtatctttaaggtacagataaattatgaaagatataatgataaattatgcaagatatatctgatcaatacagaattacttatgaagatgcaaaaaagctgcaatagatgcatctggtaggatgttttcttaattgtagtttctgcatatgttttcttaattgtagtttctacatgaaaattagtaaaacaactataaagaagattttttttgatgtttggtcaatgataatatatatgttgttagactttttgtgatattcatactgtagtgtattttgatttgtaccagtttagtgcagtatttgttgttggtaaaaaaatttg

SEQ ID NO: 7626 - DNA, 740 bp, Zea mays
  Intron number 2 from transcript GRMZM2G174315_T01 (locus G RMZM2G174315) derived from phytozome v7.0 (chr-ID 6; pos 1 18602183 to 118602922)
agtacgctgacgtcatcaactccgtcgtgctccaggtacggaggcgcgttggaccttctatcttaaggtggtcgctccgtgcggtattaggatgttgccacggagttctccggatgttgatttttctgccttgatgaacaattgctctgttgggatggttttttggcgaggggagggggaaaggggatcaattggatcaaatgtgctttgcttgttgcctcattgagaatgtctttcaaagctgaattagtttgattagacggaacggcaggaatcgtttagttttcacgcgctaaagaaaggttgtctagaggaggtttaagtcatatctgtccatcatggaatgcaatgttcaatttgaggagcagcctgtaccgataaatggaccctgctttctcattgccccacaacgtgatgaatttgtttcatgcagcaagttgagttgatagagaatagagaccatggtttagatttttgaagaaacatagatagcgtgcttgaatatattatatatattctatttgtgtgtgctgcaagtctgcaactaccaatgttggttgttgttctgttgctgtcttgcttattctgaataaatgaacctttatgaactcagccaatcctgtattgtcaatttaattgttatctctggtagtaatgaaatcttagtctcatctgaagtctttgcctttatggtctctcttccaggacgactttttgccaagaacaccgactccgctaga

SEQ ID NO: 7627 - DNA, 571 bp, Zea mays
  Intron number 1 from transcript GRMZM2G059628_T01 (locus G RMZM2G059628) derived from phytozome v7.0 (chr-ID 6; pos 1 18157711 to 118158281)
ctaaaaggaaccacatataatcttggtgttcataggcagtgttacaaattattcaactttgcacgattactgctgttttgaaaatttcttctttattaaccttgcatgtgtaagcttaaggcttaacaaatagaaatcaaccttccaaaatttatttaaactcccagttgtgttatagtcctgtaaatcctttgtttctccctatttgaattcataggtcatattttcaccaaaaagcaggtgttgtagatctgaaagtggtaactcaagggaattcttatgtaattacaaagacaaaattagcacaaactgtatgccagagcaaccttaaggccatattacaccattatgtgtaaaatgttctttttctcgaaccacgcaggagagtagcatgtcatttcattaagaaaattgtgtgtagaatgtgacctaaataaccagtattttagtactgtttcagggtgtaaagtcacgcacgagtgttttgtatgcatattggttaatgtctattagaaaccacaccacatgattatgagttatgactacatatttttttctagctatttgcact

SEQ ID NO: 7628 - DNA, 953 bp, Zea mays
  Intron number 1 from transcript GRMZM2G043843_T02 (locus G RMZM2G043843) derived from phytozome v7.0 (chr-ID 3; pos 2 30536762 to 230537714 reverse strand)
attcgaattcgaaactgcttgctgctcccgtaacggtttattccagattccaaaattcgggtgaacctctttttgttatcctgtttcaaattgggtctacacccttgctagtcagttaaaatccgaactcgtttcgtagaaatccgtcttttatgaaaataaacccccaccaaattttccagagcaatgccctgtttcagtcttcttaaatatagttatgttattggagactaaccggcaaaagtgaaatgacatattcctttgtgtgaaatggggttttagcatcagttagcagatggctgagcaaaatagtaaaattgggaataatcaagaagggggtcgtaagtcaaggcgcgctcatggaatcctcagtaacgtaaggacgcggttaggaatcctcggtagagtgaggatgcaggtagctggaaagtatcaagattgtacatgggattggagcaacgtgcagattcacataactgccacatcacatgctctttgatttggtaccttccggtcctccacagctactgtctgttcttcacctactctgatcggaacaaacaaagaccatagcatgcatgcgctgtagaaagcatccacctggaattaaggtattaatttatcctttgaagtgtggacagcacattgacaaaggctaaaatgtttagtatctgaaaaggattgcctcgtcagggtgagatttttcttcttcttctttcccgtttctttcagctgttgcctgtaggaaggtctcaatttcactattattgacagcgaaaacaatgaatatccagccaatttgcttgcagtcaaagttcatttcccccctcaattacgtgcaaaacgagcaaaaggagtcatgatgcaatctctctgactgaatcttgcttgcattgattaattactgaccgatttcaggtggtggacctggttagaagggccgtgccactcgc

SEQ ID NO: 7629 - DNA, 701 bp, Zea mays
  Intron number 1 from transcript GRMZM2G079256_T01 (locus G RMZM2G079256) derived from phytozome v7.0 (chr-ID 7; pos 7 4260836 to 74261536 reverse strand)
cgacttcaacgcgcgcccctcccattttcacctaggtaacggtcgcatgctacttcttgttgctgttcttgggacggacctacagggattggatcaattagttgcggcctctaaggctattaatgtcgttatgcgaattgcaaaatgctggtccatggtagtaatggggtcttgcgtcgcgtggataccacttccggattttgttatttgtcatatttgcatgtgaggtttgaatgttggatttagtttaggggtgccccgagccggctcaatttgttgtctgttcaacatgaatgtggttgtgctgtacgaggtgtggagctggaatcgggtttctttctgaattacgacttaggaaggcagacttgattttgccgctgtggagtaaaactcagaggcctgatcttctttcttatctcctactttattcaccatggcgtgcacataaatctaacaaatgaacccatggatccttgcacagagatggtatatgtgtttttcttggaaaaccctgggttggttttggattcacggtgttttacctgagcttgactgtaacagtgaaaacatttaaatcaataaatacacatcctgaccttaaaaaatatatatacatccttatatgtccttaagtgtagtccatgatactgtttccaaaacattcttgtttttcagccctactcctttgtacataaaggaag

SEQ ID NO: 7630 - DNA, 823 bp, Zea mays
  Intron number 1 from transcript GRMZM2G106730_T01 (locus G RMZM2G106730) derived from phytozome v7.0 (chr-ID 3; pos 9 3832101 to 93832923)
aaggcaggtcaactcaattccttttccttgcccattatttcggaatgcggtcgagaagataaaattgagacccctgactggactgtgctacctggtactttcttttaagcattattatagacagacgatcttgtagacttgggtagttgccttccatatcaacaacagacaacagtagagttatcattgggctggagacattcagtactttgcttatgagatctggtgccttattggataccatggttttgatcatgtcctgctcctggatgccgctgtcccactaaaactgtttggatcagattctacaactttatcttcattctgcatcaaacttcagtctattatgaaagctattgatttgtcagtttcgatttgaacccgaactatgttgatttactcccagccaattggcaggaaattcctttttttgtttcccaaaccgagggcttccccatttccattaacaaacggacatacagatgtttgagcaagcagctagaaagaaaacagatatatctgtacgacacctgatagccaattgacaagagattaattcctatgatcacacctgcagttctatactaatgctggcagttttgactgaccccaacttaccacaattcatttctgtttacttttgcaacagggttttctaggcctaagtggggcaatacttgtccaaatttaccgcactctggcattgatcccagctctttcatactgatgctggcagttttgactgaccccagcttacctcaattcatttctgtttacttttgcaacagggttttctaggcctaagtggggcaatacttgtcca

SEQ ID NO: 7631 - DNA, 740 bp, Zea mays
  Intron number 1 from transcript GRMZM2G151254_T04 (locus G RMZM2G151254) derived from phytozome v7.0 (chr-ID 6; pos 8 3605488 to 83606227)
tgatctcaatcagttctcggcgcttgagtgccgtggtatcgttccaattttgtgtttttttagttcgtgggctaagaaatcgtgtcttgtttctccaattgacgggggtgcctaccacacggctcagaagaggagtatagtgttttcggcgaaattaatgtgccaattgtggtgtgcaatcgtctctttagtttccctgtttgacgatgcagttcatccgcgtcgcgaaggaaggacccaggcagagcttaacaatttttacctggcgaggggaggagactttgcgtaattatagttcctggggggttggctttgattgccatttacacgcctctactagatatattttcttgtccgctggaaggagtcgtacaaaattctgcatttgtcattcgagtatccttatgtccggagctagctttgaataattgttggagtggcatgtcatgtttatttccatttctagcctagtcctttaaaaaaggagattcctgggattcaaggaggtttagagtgcagctatgccaacattgatataatacctgtagtgctatttgttaactgatatgaaataaaaagaaataatgttatccacttattattgaatttgtgctttcagaccgaaagacaatggacttctcagttctcaccgacgttcataagccatagctgtgtttggttcatttctagttgtttttgttacaggacagatagaagaaaattattggcgctctgacaaa

SEQ ID NO: 7632 - DNA, 1039 bp, Zea mays
  Intron number 1 from transcript GRMZM2G100321_T03 (locus G RMZM2G100321) derived from phytozome v7.0 (chr-ID 3; pos 8 0514882 to 80515920)
tgcgcctacctgcattgcctcggcaaccggctcgggttgtaagttgtctatatcgtttaatcggtttggtgattttcgggctgtacgttctctgtaccgtttaataggttttggtgagttatttattgaactgttttctggggatatacattttgccctcacttatttggtgcaaatctacaattaaaccatccagaatattcaatctagatctaaccagggatgaaagcgaacggatcgaccaggataagctctctcccgctttcattttcacattttatttcggaaagaggataggaaacaggaccagcgggatgaagaaaatgaatcaaatgaacgcaacaaatcgattacggatttgaattggacgtaaaaagcggaaacatcgccgcataaagtataaaaataaagtagtattctaatcaattgaaatatattttctagacatatggaaacaatatattgtaatatacatatggctaccaaagaaaataattaactatggattagtttgttgcgatgtgacatagagtcgtctatgatttgttcattgtattatctaaaatggaatattatatatggataaaaacgagataacccggctaaaatcgggaaaaatgaaaatggtcggaaaaactcatataccgttttcatcccattttcacatttgtcaaaaacgaaaatgatcaggatgtccataaatacgaatttgaacgagttaatgtagaaattggagcggaacggaacatgatatatcccgactgttttcacccctagatctaacgatgttaactgttttttgcatttctacaccgacaccacattccgtatacaggatatagagaaaatagattgatgttgacgtcagagtgtagaaatacaaaaatacggcagacatcgtttgattagattggatgttctatatggtttgattgcacacttgcgccaaatacgtgattggatatgtccattcttgctaatcttgttgcttatttgtggtgcaggccgcagacaacaattgcgacggctgtggtgttct

SEQ ID NO: 7633 - DNA, 574 bp, Zea mays
  Intron number 1 from transcript GRMZM2G153041_T04 (locus G RMZM2G153041) derived from phytozome v7.0 (chr-ID 3; pos 1 90510056 to 190510629)
ttatcttttgttttgatctaggtcttaatttgccttgatatgtgcaaggcctgcagttgaatgcaatgcgagcaacagctcagttatgtgtgtgtgacgctgaagggatctatctctatgctcaagcataagaagcataattttgttattcattgaatgaagaactggctactctacccgttccaaattatatatacttcaagctgtacatgataatcaggtggcaaaagaatgtcaactcaattttttctatgttttctttttcaggtggcagcaacttttgatagacaaccttgttggatatgatactatacctacaaacagcttggtgatttctcctggtcatggtacgcatttgatcctattatgcatataccaacctttaatcattctacagatgatcacagacttggttcatagcaacaaagtaacaactaacgacacaactaccttgcctggaagcatgtcaaacaaccattttttgcactttgtataactgcttgcactatgattcatttatgaactaaagttttggcctttggtatgttttgtaggttatttatacaactttgag

SEQ ID NO: 7634 - DNA, 817 bp, Zea mays
  Intron number 2 from transcript GRMZM2G349475_T01 (locus G RMZM2G349475) derived from phytozome v7.0 (chr-ID 3; pos 1 3722570 to 13723386 reverse strand)
tcaggtcagtcagactcagacagggtgtgcagcaggtccgcgagcgcttttatgcacctccaaagggagatcactgggatactactgcacttgtgttatttattataccggcattagcagcagcctggttgtttaacggctaatggtcctgtttagagtctgtctccgatcagatcccaggaagcaagagctgactttgttacagtgtaaaccagctggaatttaactgaagagcagaataaaagagcaggccgagcaacgggaccagacattcaactctgctgctgcctgctggtacaggcttgagacttgcaacaaccattcattcaaagccagaatactggtaggagtactatgcttctcaaaaaagaaaaaaaaatatatacggacaggagtagcagcattccagacccccagcagtcctctctgccttttcccccctttccattccttttatatttccaaatatgatcatgtttgttttagctttttgctgattctagccacaagaaggtgatgtggacttccaaacgtccaaatttttgccagcttctataaaaatctcttaggtgaaagtggtcgtcgcgatagaaagaatatggaggtgtttggttagagagactaaagattagtctcttatttttagtcttatttagtcccattttatttgttttttttgtttatgtcgctggtgtgtccgttcaaatttatttctcacctagatttttttatctagccactacttatttttttaaaataattcattaggtatatttttttttgtcttggggcttttgcagatcttattcttaatata

SEQ ID NO: 7635 - DNA, 613 bp, Zea mays
  Intron number 1 from transcript GRMZM2G057380_T01 (locus G RMZM2G057380) derived from phytozome v7.0 (chr-ID 7; pos 1 57579185 to 157579797 reverse strand)
tacagatatcttggactatattctccagaaggtgagaggtttgttcattgtggaatttataagaattatttctattattgcaatgtgaacaaatggaagtaacctgaatactttgtctaacatgatggcaaaatttcattcacgaatcacgagtcaaaacaggaaatgttgatcaatgtgtcgcttacatgtgttagttatgtgctgaatttatggagcccttttttcttaaagatcgtttctatatggcatatgtgaatacaacttccatgtagttatgctgaatttactgttgtttcacattttccagaagatacagttagtgatcacatccacaaatagtttggcatgtcatgttacttcaaacctaataagtatggatattggatgaaagaacctgttgtttttaaccttaggatgtatggatactggtcaatcagaaagtattgtttcttacattagtacaggtttaaagcaactaattcccttatcccttgatggttcgactgttcgagtttgatgtttctgagtttatattgtgattggtagaaccatccaagaaaataaattttggacatttttcagaagctaagagtttggtgttcttcaccaa

SEQ ID NO: 7636 - DNA, 893 bp, Zea mays
  Intron number 1 from transcript GRMZM2G065598_T01 (locus G RMZM2G065598) derived from phytozome v7.0 (chr-ID 3; pos 1 79418187 to 179419079 reverse strand)
cgttgagcagcttgttctacccgccggcgcccgcggtacgtttcttgacgcccctctcatgttcgatgctatgtctcgttgtgaggctcgagctcgacgtggaatttttttctttgactttattgtttacgatgatgcagatgggtttcttcgcgtacaggcgcgttcctagttgtataccatagttttcccttttccatttttgttaagtttggtgtgtttcgaatgtggatacgctcctttttcataagtatgtgctattatcgtagagtagcgtttctaaacacgattatagaggattattttagagtgatggtgatatgaaatccctaaaaaggtttatttcaaaacatttctttgttgttggtatatattagtgaaaatctttcttcttttttccctttcgttttcaaggcaaatgggaaagatcaggagttgtacagcattatttacaaagggcagagcgggagcgcacaagctggcgcgacaggtagttgtggaattaccctgttccgtcttattactgtgttatcctatatgctattaggaggaactgttgtgctaataaaaccgaagagcctttgtatcaagagaataattacattcccagagtttttgttttaaattacactcccagatgaatcttgggaatcatgtaggatatagttgccatttgtttagatgatagatacagcgtgggtattgttttgtcgactcataaatacttttgacctccaactcttagtctccatgactttggattgtttattatctggggtgatcattttacttggttagtttagaagcattgagggtatgatacagctgaaaattaactgaacactgatttaatattttgatctcaactgaacaaagattaatttgatgtccag

SEQ ID NO: 7637 - DNA, 383 bp, Zea mays
  Intron number 1 from transcript GRMZM2G036479_T01 (locus G RMZM2G036479) derived from phytozome v7.0 (chr-ID 6; pos 1 51488549 to 151488931)
gccaccacctcgcctgtgaaccagttctcgttgaggtacatgacagccatgtcactagctgtcttgctcctagatcttagtttattgtggtcgtttatccctagagtttaataatatgtggatccctgcaaaataattctcgtttgtaatggtttgatctgtagtttctttgtcatttaagttccacttctttcactgcaagaagatcgcctgttgcttttttggagtagcactgagactgaaattttcaccctcagttgacttgttcattagttgtaccgtgctactgtctgcagttcacccatgtacttctatgaatattgtttgattttgtttagagtatattacttatgatcccattattgtagtgcagtgacctgaaa

SEQ ID NO: 7638 - DNA, 415 bp, Zea mays
  Intron number 4 from transcript GRMZM2G434445_T01 (locus G RMZM2G434445) derived from phytozome v7.0 (chr-ID 7; pos 4 2957059 to 42957473)
tgaaaggactggtgcgtcatagctaaatgaagcacttcccttcaatgttttatatattccagtttataagaaaatagttgcctgaatgttcatttattcttcattctctaatactgtgacccaagtttcatgttagaagcagatagtattatagaatataaatgctttgacttattactgtcttgtaagttttatagggctttgctgacattttcattttatgtctagacatgtgttcacatacatgaaactaatatatatctacctggaactatcagacattttatatgttcgtttttaagttccctatctgacatataatgaagttatttgattatctgtatgacatcatatgttttgtcttgactgctgttattcaggggttgaataacttttcaaaatctgcaagagagat

SEQ ID NO: 7639 - DNA, 677 bp, Zea mays
  Intron number 1 from transcript GRMZM2G469898_T02 (locus G RMZM2G469898) derived from phytozome v7.0 (chr-ID 9; pos 6 4029399 to 64030075)
ctgctccaacggccgcctcgtcgtcgacttcctgggtactgcactgtaccctagtagtagttcgttccaacaccggcagctgtttttatttcgcttccgtgactaatttttcccaactgcttgtacttatttttgtggtctctgggatatctaattcaaacgtctccgtcgctaaaactttttgatttgagtgtcaagaggagcctgctatgacttgggtggtcaagatgaaattgacctgttcttttctttttattaaacaaaaagtttggtagagcaaacctaaaatttgtttgttaaattttagaaaaagggaaaaacaaagatgaggtgactagtgactactaaatttgtttgtaagagtcccatttctttgctctcagctcttcatttctctgtggtgctacccttttaatcaggcgagggcgagggcgaggtcaaaaggggttgattttttccgaccttcctttataaaaagatggaaacgagtggtagaaaactggtggtaaaaagggttgctgctttgccgcgctgtgaatcgttgccgtctccgctctgctgctagagttttagcagagtactgatgcgaattaaagtctcttctttcccttttgtgatgggaacctttggccaattatgcagccgagcatttcgggctgccactgccgccaccgtcg

SEQ ID NO: 7640 - DNA, 926 bp, Zea mays
  Intron number 1 from transcript GRMZM2G386489_T01 (locus G RMZM2G386489) derived from phytozome v7.0 (chr-ID 7; pos 1 32894426 to 132895351)
ttgtgggtcaggtggtcggtgtactctggcttgccgttcatactagtacagagaagttctatagtggcggttataaacctatttatagtggcgtttttcgtaaccgccagtgctaggggccagtagaaatcatcatttttacaggcgggtaactgaggaccgccagtgattcactggcggtcggcgtaataaaaccgccagcgaaaatcgattttcactggcggtcgacgtaataaaaccgccagtgcaaatcgtttccaggaaacataaaacatattttaaaaatagttaaaaaattatttttattaggcccacccggccaccccacccgcccgtctccgtcgcaagtcatcgcggcatttttcgcgcaaaattcgcgcgctacgcggttgttagtattcgaaccgtcgacctcaccctcgcgtgtaccctcccctaccactccgtctatgacatgtcttgtgtctagtttgtagttgttttcttcacatattacaaccatttgagtgtaaattgcttatttgagaccctaaacgaattcaaataaaaaagttgtcaactacaaagataaataacttttgaagttctacaacttttattttgacacttttttcatccgaggtagtttgcaaaatttgaattttaaatttgacatacttagattcaatttttgagaaccgaaatgagttcaaacaaaaaagttgtcaactacaaagtttcataacttttagagatctacaacttttattttggtggttttgtcatacgaggccgtttgaaaaactcgaaaaattaaggataaaaatgatttctagtggcggttttcttagagaccgccactagaaataacacagtcggtggataaccgaaaccgcctgtaaaaatatatcgtccccgcaggctttgagcctttttgtactagtgtc

SEQ ID NO: 7641 - DNA, 624 bp, Zea mays
  Intron number 3 from transcript GRMZM2G480263_T01 (locus G RMZM2G480263) derived from phytozome v7.0 (chr-ID 3; pos 4 2104431 to 42105054)
agctcggtgagtagttcgttgtggttgcaaaacactaggattggctctgagttcactagcgattggtactactgcgttatgggttgaaattgggttatggatgctgcgattcgtatactatccagtgtcctggtttgtaaattgagaaatccacaggatatatgatttgtcgatacactttatccttaattattgatgacctgtgatcctcattttatcttaatagaatcttctgcccaaaaatttttataactttagcttgtatctacagaggtacgggggtgcccgatcaaaccatttaacaaacctagcacttatcaccagtggcagactacatgaaacatcttgaaactaaatcaaactaacagagcatgtgctctgacgtgcatattgcttagctttgttagagagtatgtcaaatcatttacttttttcgataccattcttctaaactaatggttagttgatagtactaataaaactgcaattcagttctcttactgatagagttgtaattgaacaacgtggtattgtggttttcttaatgcttgcatgaattaaaatatgcaagctgcaggtgtcaatgtagatagttggcctagcagctcaggaaccggtgtcgta

SEQ ID NO: 7642 - DNA, 396 bp, Zea mays
  Intron number 1 from transcript GRMZM2G087512_T01 (locus G RMZM2G087512) derived from phytozome v7.0 (chr-ID 7; pos 1 05230862 to 105231257)
tcaggtacattgaaaataaatattggatctcaaaaatggcattctagatccatctaccatttcgcttacacattatggctatctcgcattcatgggctgcaaggtaaaatatttgcattttataatttgttagcactttatacttatttgtttgaatattaatattacatgtttgttagcattttataatttgttagcactttacacttactataaaaagcacgcatttatccactgatgtaattcttatttctgctaatttgaatgtgttattatgctcaagtatcagatcttatgtacactccgcgttgtaaacacgtagaccaccaattctacattgtttttgttcttccttttatgcttttacaatgatttgaattgatcattttcagaaca

SEQ ID NO: 7643 - DNA, 983 bp, Zea mays
  Intron number 1 from transcript GRMZM2G115000_T03 (locus G RMZM2G115000) derived from phytozome v7.0 (chr-ID 3; pos 1 66431899 to 166432881)
cgccggggagatctgcctgccgtctctacgggcaggtaccagagttggagcgtggttactggcaggctgtggctgcattcggcctcccgctcctcctacacgcgcgcgcccggcctccttcaaggttggctctgaagacaaagcccaagctccctgcgctgctgcgcaagcggccgaccttcctgccggcggtactccctgtgctggatcctctgtctagtgttgcagctgccagcgcttctcatcctcactctaccggagtggagatccgtccgggcgtgggttgattccttcttttcggggtgagtgattctagcttgtttgggtggatgctccgagaggtcgttttcttggaactcatcctttgctgtggccatgagcaatcaaatcgcgcattaagacgacatggatttgtgttctccgtcgcgctagccgctaggcccgacgcatctcgttcacccagttgtggctcggctaggttcttcagctcgcaagaccgttctcactctgcccccaccccaaaaaaatatcggttcataacagctcccatggcccacgctaagtccatccctgaacctgccgacatcatgtttttcttcttcttttttatttctgggcacaagactagtcaaatgctgctcactgggtgcattggcgccttaggtttgttcaaaatgtgtggttttggtaaagaaaaaaattattgggctccaaggggctggaaatctcaaaatttgcagaggggacgtccttttcagtgggttgtttacgggagccaaagtttatttttcgtgaacagtgtattgcgggcttgccagttggttttaactcttccatttctactaatagtatctggacatttgatttgccccattctacaatgtccagacccgttctttccttttagcctaagaaaaggccttgccaaatgttcagagtgaaatgctaatgttatctgtttttcttgtgattattgtagtcag

SEQ ID NO: 7644 - DNA, 544 bp, Zea mays
  Intron number 1 from transcript GRMZM2G523462_T01 (locus G RMZM2G523462) derived from phytozome v7.0 (chr-ID 6; pos 8 8026083 to 88026626)
cggagtttggtagttttaataaaatttccttttgatttcatgatatgttttgaagatcaaaacttatacaaattcgtaaactgctgatagtgatccctttttctgatttctgcatatgctgactgaactacgcataaaacagggcattaagatgatcctttcagtaataggcctttttaggtagtaaaggaaacgtttgtgctctggtttctgcaagaggtttgcatataaatattttttctattgcagtctaggctccaacctttggttgataaacactctcaccataagtaacgaaggaataagaataaatgatgggagatacaagaatctgaaaatgaataaatgatgtgacaggttgtaggagagcagcatgagctaagtgaatgcataactctactattatattatatcattcctctcaatccatgtcttttaactggtgaatcatttaggtttctgtttgatttacttatgcttgttctaacgtgtctttaggccttatacaggcttacagagatttgttttaacaagagccgggcag

SEQ ID NO: 7645 - DNA, 885 bp, Zea mays
  Intron number 1 from transcript GRMZM5G839512_T01 (locus G RMZM5G839512) derived from phytozome v7.0 (chr-ID 9; pos 9 0966171 to 90967055)
gagaacataatcaaccagagatatttttctaggcaggtttttctgtaccttctgagtttttgacctttgtgtaatattatttgagttcattgaaagataggcttggcacagtggtgagaaaccttctcactgagccaaaggtcttgggttcgatgagcctctttgcaaaaatgcagggttaaggcttgcctcggttattccttccctagaccccactcatgtgggagtcactaactctggatctatctttttttattgaagttgttttttttatcttttgaaaggtagagtaaaaaactttgtattttccctttgactgtttaatttgttatccaaatacaccctctgattgaaattgtaaattagtttattatatgttggtaaaattatataaaatagtcacgtagactaaaaacataaaattgatactactagaaccatgattaaaaggacttctgcaatatatatttcttttatctgaaataatataatgccttagaaattattagtcaaagtgttgttagagttagagatcagattaatgccctaagcttacctttccctagaaagtaaaacccctggcaggaaaagtagggcacaatgggtcagtgggaattggattttaatgactaattgttgacacatgtgttcttatcaaaggatgttacatgcaaaattcatatcatgcccattgcttatttatattattttacttctttccaattgactgccataactggaatcatcacacatcatgtggacttgtggagaaagatttctgtctatattggacatcagttgtggtttcccagtgtttcttgagtttattgtgcgtttaggcttggaacttcagatgcctgtgaacctttttgattttatacaggg

SEQ ID NO: 7646 - DNA, 895 bp, Zea mays
  Intron number 1 from transcript GRMZM2G108245_T01 (locus G RMZM2G108245) derived from phytozome v7.0 (chr-ID 3; pos 5 3245098 to 53245992)
ggtgagtgattttgttatgttctacaactatttatcttaatgttgttcaacaaaccatagttagtcaccactgattgtcacaatgatataaaagttcattgtcagttggtttctatgtaagtgtgggcttcaactcgttaagataaaaatctcaaccttaactgctgtcatggttcatctttttccaaatttttgtggctttgaatggagtgcatgggatctgtctgttcttaatttgtgcaatgagatggctattgaattgtgtagtaacctttgtttaattctagtgccctggctagcttaaaatagatttatactgttattcggtttgattccttaaagcttacagtagtggtcactagcccttgaaaataaattttggacaaccagaattttgtagcagctttgactaatgttgacattgatctttttactattgtagattgtcattgatgtaaatgttattagtgtcactttaagacgactaaggatcgatacatgtcataagatttgtcttttctttacaagtgaggagattgtgtgaagtactaacctatgatctatgggcaaaatctttgatgagtacattaacttgcaggatagcatactcatatagatataccgttgtttgtcgatcttaacaaatttcattcaggaactagggcatgctaatgttcaaaagagttgtcagcaattaatgacacctggtatttattatatcttcttttgtagagggatagtgtagtctgcttagcagtaggtaattttgctattgaaagattaatctattaccgtaaacttggtgacttaggtagacatctaatttatacttaatctaattatttctctatgtgaatggatacatataataactcaagtagcactacaaccagca

SEQ ID NO: 7647 - DNA, 767 bp, Zea mays
  Intron number 1 from transcript GRMZM2G057955_T01 (locus G RMZM2G057955) derived from phytozome v7.0 (chr-ID 3; pos 2 18018998 to 218019764)
atcgccctgaagcaaaaggttcaccattttcttgctttgctttgttttgctttacctttgctcgctgcctcttctgaagtctgaacttgtagctttttagttagtaccattgtgttcaagataatagctcatatgactttgttatttcaagagatctcacaccaacatattctaatcctccgtgctttattttctctccgtcccaaaaagaatacaattctagcacagtgttatgtcatagtatcgtaaatttgattaattatagataaaaaagtaccaatatctatgataacaaataaatacgattagattattataagatgtgttttcataataaatttatttggagccataaatctaaatactattcactaaaaacgtgatcaaacatgaaccaatttaaccggcatgtaactcatagttgcattctttttgggacagagtgaatacatgaaaactaaaacagatggtaaacagtgaccatttaggatacactataactgacaaaaactgtggggacaaacaggacgccatgtgatttaccatctgaccagcctaatgaagtgcagaggatttagccccttcgaaatagggggaaattattcctaggaaaattgcaaattctcttggcgaacataggattggcaaaccataatatatttctatatggtttgttaatgttttttttttcttactctcgtgatcaactatatcctttcacaattattgcagaagctaatagcaccgcacagcatcttgttgacttc

SEQ ID NO: 7648 - DNA, 551 bp, Zea mays
  Intron number 2 from transcript GRMZM2G443855_T01 (locus G RMZM2G443855) derived from phytozome v7.0 (chr-ID 7; pos 1 18043336 to 118043886 reverse strand)
aaggtaatgacttgtttttaaggtagtatgctaccctaatatggtgatgcacctgatgctgatattggacacccgaggaggagcgcgccgtcgccgccttccacgaccatctcacctcgcaccgcctcctccccgacaagcacgacgactaccacatgatgctgaggttcgattacagaggagtaggggagggggagccctcgttcaagcaattattatacatttgctggtgacaacattggtcttctttttcgtggtcttaagcgtggtgatgtcgagcgtggccaggttagatttcttgaattcaaaattgtcttagaagttttttgaaatattcacttaactgttttgcctggaaactgccttgcatttgatggtacatggttgcacgatcaccaaacaaattatacagttctcttaatcctgatcctcagtgtatgttccttgatttctgggtgttcaatatcgaaactgaacgatctcgaatgttgacaccctgtcgtttcctaccgtcaggtggtgtgcaaacctggtagtctgaagacatacaa

SEQ ID NO: 7649 - DNA, 940 bp, Zea mays
  Intron number 2 from transcript GRMZM2G051771_T04 (locus G RMZM2G051771) derived from phytozome v7.0 (chr-ID 7; pos 3 3996210 to 33997149 reverse strand)
gcccctttgctccatcaaagaccccaagaaggtatatgagatgaccctttttggctatttgtaccagtgttattaaaactacgtttaaacaacgtttaaactacgtttaaacgtcaaaactctaattagaggttgaaaccgcgttttggcattttggcgttctgaactgtagaacacagtgtttcatgcgttttagaccattagatatttttgggcctagtctgttagttacttttgggtccaatccggttcatgtgtgaagttttggtaagccactaacctctctgttttggtatttaacttcatgttattgtctgaaattatgatatattggtatttttcatatgttgtttaaaactacgtttaaacaaaagtttaaacgtttaaaagtcaaaactgaacccatgagtgtttcgacgttttattgttttaataaccttgatttgtaccttgcctaagcatctttattggactcatacagttatttagcagaatgtacccttcatttgttttttatgccaaaaaaaaaaaacgaaccaaaactgcaattagtagcttataatattattgctgagaaaatttgaaatacttgctggcatcatatctaacgataatagcatacatgctatggtacatttagcattaaaaggtgtactccgatgctatttgcatcaatttaaacatctttaagaataggtcattggttacttcatacagttttgacttataatttgtttgaacttgtaatgcctgaagaaacatgcagcaaaatttattaggatgcaattgcactgccaagtttattaattaggtgaatttaggtatttgtacttttcaaaatgatgaatatgtatacagatgaatgtctagtttctaaaatttattggatgtaacgttaaattgtttcatgatgcacaggtgttggttattggaggggggg

SEQ ID NO: 7650 - DNA, 599 bp, Zea mays
  Intron number 2 from transcript GRMZM2G030274_T01 (locus G RMZM2G030274) derived from phytozome v7.0 (chr-ID 6; pos 1 66095060 to 166095658 reverse strand)
tctgaggtttagtttgctcttgccttttgaattgtgcagtgcttttaattcactaatgtttctttgcagccttatctttacgtaactattatgcgtcactttgcacttttgctctgagtgcccagatgcgagtttaatgcatgttgtaggatataacaaccccaaatacacaacctctcaacatagctatagtttctttaaaatggtgcagacccgtattatttacaaactctagttgctccttcaaaatgcatgggaaactgagttattttctctagccagaggacaactatgcctgcctccaattacttaaattaccttgtatagaggttgtttggaagcaaaacatttttagagttttgagataaaactacagtattggataatactatgattatgtcatgatatctcaaaaccatggttttgaaatacttcgtttccaaacacaagtagttattaatttaagatggagcagcttatctatctagatatgtgcatgcctagagatattgcatatgcaaaacttgcggggaggtttgtgaatttgcatcgtgtccctttcagattcttcctgttaacattaaggtgtcgtttggttc

SEQ ID NO: 7651 - DNA, 835 bp, Zea mays
  Intron number 4 from transcript GRMZM2G132628_T01 (locus G RMZM2G132628) derived from phytozome v7.0 (chr-ID 6; pos 8 3226832 to 83227666)
aaggtaactacttgcctttagtttgtgcatgtattgtataaacttgcttgtacacttcagtttaacttttatgctatagcttttagtgtgagtggcagtgagaggctaagtgtataatggtggaaaaatctgctgcattctcctttttactttatagattagggcatttggcactgaagcatgtgcagatattgttgaatgctaaatgaatgagtctggtatcaaatcgcatgcaaggcaaatgaagaaatcagccctttgggtaccattataacttcactagggggcgtgctccccggtgctgcattcaagtatttggtgtcttcaccttgcatctgctgttttccatccgtggtgtcttgcaaactgcaccaacggtacgcacattgtgtgaactgtcttggaaacaccatcaagatcaaaattacatgaaacttatttgaatctcacagaaattccagaacataaaattaatcagtcgatgcataagccagtcttcaacttgatattctccaagattcatagatgatgaagatcagatcagtcactagaatctaaaggtggagttgatatttcgctgaccagttggtgtaactttcatgtgcatgcctggttggggcatacaaaaatatgacctgcatattcatcattgtttctaaagaacagtgcacattttccctctaagtggtatcgtaaaatgaccttttctttttgcttgttttctgaaccttaagttgtgatgcttattgttaagcccctaagctctgttatatgtgcttggtttgtggtatatactcaggttcactgtggatttatgaaaaatagtggtgcagat

SEQ ID NO: 7652 - DNA, 783 bp, Zea mays
  Intron number 1 from transcript GRMZM2G156890_T05 (locus G RMZM2G156890) derived from phytozome v7.0 (chr-ID 6; pos 4 4596424 to 44597206)
cgcccagggcttcgccggcgccgagtagccaccaggtatgcgtatgcccacccgccccttctgttcccttcgcttctcttgacttccctccccttcctgccgtgtggaaccgagttcccaaaccctaacttaagctatttgcctgtccctgttcggatctgatccaactgcaactctgtgcagtatacatgtagcgtcactgctactgttaacttaaacttcttctgcaaaaaaaaaaaagatcggctgtgcgcccatgtccttcactggatccgcagtatgcaccttgtttacatgactacagaccaccgatgaatgtccgcctatctgatcttgtgttatcaaatacttttacagtctcgtcatgtgtagatatatggatccggtatttaagtttgtattggaagatttttttttcttttcataaacgtcttttgcatattgtgagatgatgacttgtgcaaactaaccagtaagaggtagctgatgacttctgcatattagttagtgctgtttccatcaaatcaaagaggaagacatgtatttttgttagacacaacctgttgttttgggcccacagccacaccatggaggttcaagaagtctgtagcgctaggctagtacaagtctatgctagtttccgtaatttcatatgcaaaacaatcggttctgtgactgtctgattgaattgatacctcatctgtgctttcgtctgttcctccctgaaaatttgagatttgttgtcaatgcagctgccgctcaacattcacctctgccaagggc

SEQ ID NO: 7653 - DNA, 397 bp, Zea mays
  Intron number 2 from transcript GRMZM2G434572_T01 (locus G RMZM2G434572) derived from phytozome v7.0 (chr-ID 3; pos 1 11507999 to 111508395)
gggttcacccctcgacagcgctaaatacacaaagggtaccaacatggatcttagggatcataggagcttttgaattttgatcaactgggtgatctctggtgcacaatcatgaacacaactcatggaaatctgtttcatgaactgaggcaatgaagacatgattggcctttgtagtggtagcaaaaaaaatatatggtgctgactcccctgaaggccaaataagttcagttggtagaaaataattgcagatcaagtgtgtactgtatgtgggcaattatgttttttgttttaaattaagaaatttgataggctgtatttttttcagaacattacaaagatcaactattttaattacattccttaattttaagttatgttgtttttacatgtgcagctc

SEQ ID NO: 7654 - DNA, 797 bp, Zea mays
  Intron number 1 from transcript GRMZM2G019879_T02 (locus G RMZM2G019879) derived from phytozome v7.0 (chr-ID 7; pos 1 971932 to 1972728)
gcgacgcgcctgcccgccacggcggataccactcggtaagcctgcccgtctccttccccgccgcgattccgattcacctcggcagctttgctgttccccgtcgaacctgcctggggctgggcagggcttaggttttcggattcgttcgtgggactcggggatgcagtgttttttttttggtacggggagttgtacagtcggtgcagaattgttagaattatgctgagatttggagacgcgcttgattttgttttattgtgtacatgcagagagaggttgatgaatccatgaatttgtttgccttatattgactccaagtccagtcctctgttctactaaacccaaacactagaaaaaaatggagtttcaggttcacaaggtctagacacgtgcttcattgcatttacaggagtatagcgcatgttttctctgtcatgttttgctttacaagtttcattgctactcagttgggtttaggaaaactgtagtttagttgatttctgcaagcgcaccaacctgtgctgtgagttactaaactgtaaatctatttacatttttgggaaattttgagcgatatcaattgatcttaacaacaccggacctattctgctgagaatttgggccaccgtgctcttctagtgtcactaaggatttcaagcttaatgctcatgtaatttcccttctgccaaagctgttcatccttacatactgttccaatcttccaatgctttgtacttaataaagcctcctgaggtaacactgacctatttaatacatatttatctaggaagaagtgg

SEQ ID NO: 7655 - DNA, 666 bp, Zea mays; identical to SEQ ID NO: 5806
  Intron number 1 from transcript GRMZM2G153541_T03 (locus G RMZM2G153541) derived from phytozome v7.0 (chr-ID 9; pos 8 7061800 to 87062465)

SEQ ID NO: 7656 - DNA, 1009 bp, Zea mays
  Intron number 1 from transcript GRMZM2G073356_T01 (locus G RMZM2G073356) derived from phytozome v7.0 (chr-ID 6; pos 1 41077849 to 141078857 reverse strand)
tggcagggaaacacggtatattaccttcagttttcttccacaagatcttcatgactttgcacaactgaaagatctgttggtagcttccttaatcagcaatggtagattggtaggccggttttgagtgacctaggccagcatgacataagaactaactaggtacagactacaaattttgctacctgttcctgcttctgtgaaggatgcatacaaatggggctgtgtttttggttctgcttttctgcctaagatacacctgcaatgaatagagtactccagcatatcttggtcctgctaggtcgtctgctgtgattagctctagctagctgatgcatttttatgcatttgcttacggcatcgagttatctgctgcgtgcttatgcattgattttttttacgctaggtttgttggtttgaggcatgtatatagaaaccgaattacctactagcatgtatgcatgccagtgctagcaaaacttacattgatgaatcacaccactgatacctctcaccacaccctgtacctgtacagccgaaggattttccttgcccccaacatcaccatccatttctcacagaacctgtatggtagtagcaagtttcacactagaagaaaaacggctagtaacaaggaatctaaactaaaggcaaaactaaactgcaaaaaaaattgtggtcaaccatatagctagttctgtacttcatacatgctcagctatggcagtgtctgaacattcagttcagtcatgaccatggcgttatttgctcgtgctggatatatattggcatcaagctgctgtgccagctgtacctccataacaaaaaggaaatgctccaaagtacgtggcagtgttgatctctgttcttttgcttcgttttattttaagttgatttgatgtgtctcagcaagtcaggacttgaatactacccttgccgttggcagtgtaaatttatcctaactctgaattctttcgcattgcagcactcgtcactctggccgagttttcag

SEQ ID NO: 7657 - DNA, 1014 bp, Zea mays
  Intron number 1 from transcript GRMZM2G110166_T02 (locus G RMZM2G110166) derived from phytozome v7.0 (chr-ID 6; pos 1 50602343 to 150603356 reverse strand)
aagatccgtgcaagccaccctccagatcgtcacaggttctcctcttactcctctatctcttacgtcgcatggggggctcggcgggtcgtggctgtgcggtgggcgaattcgccgccccgattcgccgccggagatgtcctcgcgccacaaccaactgccgggtaggcgaggggatgcgtccctccatttgagataccatttgtggtagatgaggctataggtgaggggatgcacccccttcatttgtgggagagggagctgattttgagtatttatttacctaagtagtagaaaatttagattttgggtattgagttaaataagttgaatgattaatctgttggagccctctcggttacctgctgtttttttcggtattgggggttgatttgaataatctgttggagatgcactatttgtgttcggatctgactatatgcatgataacttcaaagtttatgaaaaatattgggtttatatgtggacatccatgtcctattccgacactaggattgagaaatgagaagttggtccttgcttctgatctggcaggggaactttccctttcctcaaaattataatgcttaggctttgctgccttgtttattgttgatcacaaaagttgtttcttaaacatatccattgccatacatggtttcgttcattggttgtggtaaagacactacaggggtttagcccttgtcattgccagagtgcacagtgtagatctgttatttccttgaattagcctaacatgttattttgtagtaatacatgcttcttggtcatataaatctgaacactgaagaataatgtcgataagaagatttaacccttgtcattactatttaccaacatgtacgtactgtatatgcttatgtgcatgctgtttccttcatatttggttcacagttgcataaagtgttgtgttacacgtgcttttgggttgtgcaaatttgatccctgaacataaatcttagtgattgccaatcaaattttgcaacctgcacagct

SEQ ID NO: 7658 - DNA, 934 bp, Zea mays
  Intron number 1 from transcript GRMZM2G344799_T01 (locus G RMZM2G344799) derived from phytozome v7.0 (chr-ID 3; pos 1 46038167 to 146039100 reverse strand)
gataaccttgcagcgtggcggctgtcttgcagctcgtgagtcgcgcgagagaataggttaacaacgggaataggttacggtgagcatctccaagaggatgctcaaaaattttccccaaaatgtgattattagcgacatggaaaaatttattagctgtagattataattttactccatcagttcatagaatagaacacttaaatgaaaattgggccaactaataaatttccagagtatgaagtagtccacttgaaggaagggcttggcccatattcacgtacgtgattttcatgttatgttgtgcgctagaatagttgaacaggcatgatctatcgatactagctaacagatagcatatgtttcatcacgtactaggctacttgttaactttaattcagccaaaataatgtaataattgcagttctgttcatttatcgatgaagaagccacattacttccggaagcaaaccagctagctataagtgtgaccatggcaaataaatggtgggtcatttttcaatgacggtgtacaatataaaatcactagcacaatatgtggctgacaagaggacaacatgaccttcgcacctgcagagacaacctcacttctgcgtttgcaacactgcagatatgtatgttttctacacaaaacaaacaccatttatgagccattctgagcacaccagaaatttaaatctgagaatttttaacaaactgagaatttctaaatggacaaaacttaagtacaaacttatagaccctgcaaggttattgaaaaaaagacctgatgtgcaagctagacgggcaaggtagtaaattatccatatcatttcatcaaaacaaagaatccaaaattcataccattgacaaatgagttgctggtgttcgcgtgttcaaaggttgttgacaggtcgtcactgcaagggaacgggac

SEQ ID NO: 7659 - DNA, 694 bp, Zea mays
  Intron number 2 from transcript GRMZM2G091031_T02 (locus G RMZM2G091031) derived from phytozome v7.0 (chr-ID 7; pos 2 6863304 to 26863997 reverse strand)
gacgggcagaagatctgtgagcaggtcattgccaggtgagatgcaaacctgtaggaatccgaatctccttgcgactgcaaacaattgggctcatcgcataggtattcgttaatgtcaatgttttgttgcatgatgctgatgacttacgattgcaccgaccattggcctgtatgattacattcgtcagtttttgttgcgtttacatattgctggtgaaatgttgtcctatctgccgtctgcagtcaatgcaattgtgctaccatttaggcttcaatgcagttttggcaagggaactcgtaatggcccgcgtttttttgtagtgaatggatggaattaagacaatatttttgataattgtgctgttctgtgtatggagctttatgtttcatggattaacctttggtgttttgttgatgttgctgtgccatatagcttgtggtctgaatttcttcctaaagtagtattactcttcttgcaatggaggtccggttcggccctcgtcccaataatatgatagttgtagtcgcataattgtaagagtgagtttatccatgtgacttgtcgaatttttctctgctgagtaggctaaatgcatggtctgatgaaatctggaggtcctattccttcatctgtatcactacagtttgttgttaattgtttcttaacctgtagtgtggcagcagatattcagact

SEQ ID NO: 7660 - DNA, 594 bp, Zea mays; identical to SEQ ID NO: 4250
  Intron number 1 from transcript GRMZM2G343543_T04 (locus G RMZM2G343543) derived from phytozome v7.0 (chr-ID 6; pos 1 02762179 to 102762772 reverse strand)

SEQ ID NO: 7661 - DNA, 1012 bp, Zea mays
  Intron number 1 from transcript GRMZM2G007339_T01 (locus G RMZM2G007339) derived from phytozome v7.0 (chr-ID 3; pos 2 06416769 to 206417780 reverse strand)
gtgaaggtgattttgtttcgacttgtgagtacttcgcaccttcctgttttgatctattcggtgatccttggtataatgcgaaataaaaaggcactgcagcatgtcaggattaaatttctgtttgtaatgcaatttgaatgggggatctaagctaggcatagatgtgcaggggtgccacttttggttaatctaggcataaatgtgctaatctcttttttagtgtaattaaggggcgttcccatgcttaggacttctatatccatggcctactaccctagctgtttgtgcgaatcaaacagcaaactgacaataactgataggttcatggaacatagaatacaaactctgcaatgttattttagtattttatttctacatttcttgtgtttgtagttactattaagcgaacatgtacatctcatgcctactcgttagagatttgagctgttagcatagttttgttgagttcagtgataatcagcgtagttggtctatcctattgccatatactgctgtacatgcagagacagtgttcatatgcgttttgtcgaaattatagttatatattgatattgctatccccataacaataagaggaaatagaaaaaggcaaatttgtgtccagactccagacctgttggtgctgtgtatgaaaaattggaataaaattattacaaccgacgagtgtttaatcttcattagtgatataaatggactatatcctctcaaacgactacattcttcaggaaatgctttgtatgggaattgggaattatcgctttgatccaatcatgccaactgtacatggttcattgataaactatacaggttatactgaaactaaagtagggatacattactactggatttagtaggtgtatttttagtaaaacaaggttgatggcttacacttgcactttgtgccgcagaatctactcagaatcaaataatctgtggtccaaaattatgcttttcaggtaagctcacaactctgagggtaaaacagagttca

SEQ ID NO: 7662 - DNA, 559 bp, Zea mays
  Intron number 1 from transcript GRMZM2G090744_T02 (locus G RMZM2G090744) derived from phytozome v7.0 (chr-ID 7; pos 9 95059 to 995617)
gggcctcgccgccgcccgccgcccaaacgaaaccggtaatgaatgtgctgcgatcctgccttccttccttgtgcttcaccccgccattcccattctccctgatttgatctgtgttcttgccctctgtttcttttgggtggaaaaacaaattcacaagaggccacggattggattgttttgttaccgcaactttgaaactaatattgacgtattctgatttctggtcaaaagccgattatttttttttactgaacaatcatcccatcccaaagatgttttttttcttctctctttcttatataactcctaactcctaagtgattctggggattggatcattaggtatgcatccaggattcgagatctgataaatgggaagaagaaaaaaagattgctgcagatgactgactccatttcaagaagagcactctgtatccatgataattgataacccaacatgtatacataatgggacgaacggagatgacatctttatgtggatcgatctgtttctgtagatgaagactgatctattttgtctgtcccgcagcaaaagctc

SEQ ID NO: 7663 - DNA, 489 bp, Zea mays
  Intron number 1 from transcript GRMZM2G034975_T02 (locus G RMZM2G034975) derived from phytozome v7.0 (chr-ID 3; pos 2 05024750 to 205025238 reverse strand)
gtcgcttcggctccttctctcactcctgtttcaaggcaattcctctcccctcctcccctccttatgcacctagaaatttccctctaaatgttgcttgtttagttgggaatttggcagggttttgtttatttgattttcccaatccatcttccctatgcacatgatctagtcgaatggaagactcgaatctgtcttggtgcggtggccatgtgccaatgggttttttcatggaagttctgagatataacattcggaatttgctttaaaaagctcggcagtaactagttgcctttctaatcatataaagaataggcacccaaattcccctcaaggacttaacttggctggcctaggctcagattgatttttctttacatgcccccagtcacaagtgcctacctatacttcacatagtgtatttctgcacgatattagctcgtagatatgcttaaaattgttcgattttgttgtattgactagtgcgctggc

SEQ ID NO: 7664 - DNA, 829 bp, Zea mays
  Intron number 1 from transcript GRMZM2G144615_T03 (locus G RMZM2G144615) derived from phytozome v7.0 (chr-ID 3; pos 8 974289 to 8975117)
caaggtcgaatctttcttagctgtagctgtaagaacgggctgtaacaagtatacattgattggttgatccgctgtgaccattccccatggttgtagtgatttgtccataggtcgtgtcagcaaggaccttcaaaaaagcgcttaagaaccagcagcttaccaccacaattacaggcagtgttcttgaaatctgcgtcacaggtgtccccctaattgctgcctgggtggccacctagcttgcctgatctcagccatcgggtgctaaccaccatccaacacccagttgcctacctatcctcttgtgcttgtcacaaaattttccacagggaattgtcatgtttaacaatttaccatttgctcactcttcctattattcactccttacccaaatgatgattgaagtacctatcacctgtaaccttttgttattcagttctgctccttgtgtaaatttcatcctgtacagtctaaatgtaaactataaaagaatagattggtaattcttatttacttatatactacatgtatgttggaaataaatcgggcacagacctgatatgtgtttcactgttttggaaaaataaactgacagcatgctatgccagtaacagataatgttgataatagaaaagaaaaaccttgatgggtgaataattttaaatttataacagaagtcgtgatggacttctgctgaactaacaatatttatactggagaatgaccttgttgcttcaaattatttgattatttgagtgctgaagcactgaatatttgtgctcttttttcacattatgataactgatgttgtacttgtcttatgcaacagaac

SEQ ID NO: 7665 - DNA, 484 bp, Zea mays
  Intron number 1 from transcript GRMZM2G406454_T01 (locus G RMZM2G406454) derived from phytozome v7.0 (chr-ID 7; pos 3 8931575 to 38932058)
ccgtctagcccaggtgagggcctgcatcaatcaagcacccgaccgctttgttttgtttttcccttcttcgccgtcttctttctcctctagcttttcatctggttcttccaattcatggatcctgaggctggggcggcctgtcctggtcgaggaaactttcctgccttctgctaaattttgtttcttacaagtttcattctgaagttccactagctgaagatgcatgccttgtttagatcctagattaatatttcttgtcccttgaatgtatcatggcttgtttagaggcgggggcagcactttccgatctcaaattttgttcttcacttctatttatttcatcagagattcgcagtttttatccgctaggaagggtggtaaaaggctaagcttttttgtgaattctctgcgttgttcactaatccccaccataatcagtaaccatgcttatgtatcatttcctaatcatgtgacagggacaaca

SEQ ID NO: 7666 - DNA, 896 bp, Zea mays
  Intron number 6 from transcript GRMZM2G109785_T02 (locus G RMZM2G109785) derived from phytozome v7.0 (chr-ID 3; pos 2 31271479 to 231272374 reverse strand)
acggaccaaaaagaaggtttgattctgtcttagcatgatccaagcacgtactatcacttttaaattaactgttattttgcatgtttcatagcatgttgtcgtgttatatatgtcaatcttattgtttacatgccctcgtgtattgttttatcctagaagaagtcctacacatgtgaaaataagattgacaccaagtgatgtacgtcccaaatattctgtagtacaaaatgaattagctattcatgtacacctgtacagcatggtataagccagaacatcttaggcttgagccatgtttaggctgcgtcatgtagtatcagttcctgtagaaaaacttggaaaaaaagtatacattacttctcacacaaaccaaataatagtaaattggatctggttacagagcataaaaagtttgaagtgtcatagataggctgagaacatgtaggcatgagcaacacaatactacttgaggccatcaatgttgtttttccttcttcagcctatgtaattgtgttattcttttcctccttaaatgcaaggcagagctcctgccctttttctttcaatttttttgtgtgctttgtaatatgatcattaagtcattaactgagtcaggtttcttttagctctatattttgcttttcacgtaagaatcagcttcaattcattttttgtgcctacctattagtcttatcctttgttcatttgaactttgatgtgtctcaacatgtttgaaacgcatatttgtccttccctatgaatcacttccaacacaagtagaatctgaattcactgtgtatgccatttgttcatacaatgatgcacatttccttcctcattgatttctgttggaattcgcagcatactttacatagagaccgccgaccggcctggcc

SEQ ID NO: 7667 - DNA, 718 bp, Zea mays
  Intron number 1 from transcript GRMZM2G011068_T01 (locus G RMZM2G011068) derived from phytozome v7.0 (chr-ID 6; pos 1 60350250 to 160350967 reverse strand)
ccttcctcaggtgattcgaaggacactggccacgagaccactgtacaatccttccttcaactccatgcgtgtattttaccctcctcctcctcctccaacggtgggccccactgtgctgctccatgtatttgtcgtaggtaccgatgttgcttatccatttcttgtagagttgatttagcaaaggcctagccagtgcagttagttttcggtaacatttcaacgtggcaatttggaggctgtggtcggagatcgttaagcttatgaagatcttaagcgtccgaaatccagccttgaggagctagtctatttgcctaggatggggatttggggatttcagcttaaaggaacaacaactctggaaagtcggggtagtgttaacttcgcatccttcaccgacgtttcacattttagatccattttccttcacattttagaatgaaaaaataatagcttgctctctttgcgattatttttccattcttgcaatgccttgtgttttgattcaaatggaattcatgataagtttgttgactgctgaaaattgcagttagcttagagcaatgttcagccttacaatttctgtgcttattcacttcattctttctatacagagatttggtacctttggagaccgcctacagactttttcgtagtattgtttagatgtttatccaaatttgttcaaccatttgaatgtttctatttatcagagataaca

SEQ ID NO: 7668 - DNA, 963 bp, Zea mays
  Intron number 1 from transcript GRMZM2G146173_T01 (locus G RMZM2G146173) derived from phytozome v7.0 (chr-ID 7; pos 1 45981146 to 145982108 reverse strand)
cctcgcagaggttgctaggtctgctcgctcttgcggtaagtgttttagtctgtgttattgctgtccaatttgaatatttgatgaattggatagggacccatagtcaccgcgataatcatgtgattcttctgcctttacggatcgggctttcaaccaattgccctgtgattgctctgctaatagaactaacttttatgagacttgcgtattttgcgctttacttatttttttcactattctagtctgcggatcaaaaccattgactgttaggcgatgttggataattttggccttccttttgttttgggtagtatatagttttcgcgaatagatctaagcagatctggatagttaagtttacaactattaactaaaatcacaatgaatacgagatcggtcaatacgctaccctatcgaaagctactgtcactcacagtttgttactaggtcactgttgcatcgggtactagttgattgtgcttgaggattttaattttttgaggtcatctagagtaatttattgattggggctgtgctggcacaaaatgaagacaaatgcacacatggaactgatctggtcactaatattagttaggttttagaggactgtgtcatcaatctcaagttgccacaagctcttctaaaactcactatagtgagaaaagctcttctaaatgtatttagaaatttctaggccagaaaccccagatgattttgctgcccctagcctttctaaatgtgctgccaccttggttactgctctttcttccactgtatttttctttctgtagttattggttgatgattgtcacctatatatcttattactttatttatttttttagtatgttgcgaaatatgctttgctttgtttatttcatcttttcttttctaacgttggccagtgctttgtgctgatgcgcctgtgctctgtccttatgctttcttaggttcaaactgtaa

SEQ ID NO: 7669 - DNA, 913 bp, Zea mays
  Intron number 2 from transcript GRMZM2G136016_T01 (locus G RMZM2G136016) derived from phytozome v7.0 (chr-ID 6; pos 1 39490128 to 139491040 reverse strand)
cggctggcccaagcttgccacaggtacaattggaggtgatgactccctccaacaattccttgtgaattttgcttcaatttgttgctttttgagttagaaacacgcacaaacctgtttggaacagcgagcttatcctggtgttattgagttgtgctgaggatgtaggaggggtgtatatgctgggaagtatggaatgtttgcatgggaagaggtggcgcattgtagtcaacctatgtgatttttgtgcttggttttgtctgtgatgtcatgtggacaatttgaaattcagagaggttagagaaaacctgcttagtatggggagacttcttaagttttcgcttgtggtgtctcttggtgacctggaccatccaagattcggggaattgtgagagaatctttttagtaactgaggatccacatttaggttttgtaacagttcaaatatttttcttggacggatgtcttatccttaaggtttactattgttgggttgtgtagttgtctaacggtcatttgtatccccctgcatgatttgaagtatcagtgctttcatgggaatgggacaaggggaggtatcacgagtgttgtgttgtcgttgtgaatttacaatgtcatgcaggttcgagagtggaaaaaacatgcaaactctcactagcagggtttgtacttattcgtctatgcacgtgaaaaagtcagagattagacatatattcgaagttccaaacaatgcacacaagattaagtgtctgtgggcatgatgtctattgtcattttccattatgaatgtcttttttgacatatatggagttagttctttggttatacgtgtaaaatagagtatacctaatatttcttaatctggtttttttgagatttgtattgagttttgcttgtattatgttatgtagaacca

SEQ ID NO: 7670 - DNA, 816 bp, Zea mays
  Intron number 1 from transcript GRMZM2G055121_T01 (locus G RMZM2G055121) derived from phytozome v7.0 (chr-ID 9; pos 8 0367669 to 80368484)
tgaataaatacatacacagagaaatgcagagaaaatgagagatatggcgatcgagaggtcaaacgacgcgaaaacggcctttgaacgagaaatagtgccataggaggtttggaattcgaattgaggcacgaaatgacgtggaatggagccgatacttcatgaataggtttatatgggtaaatatgagtgaagtgtgtgcttggtttgaatttaggcgaggaaaatggaatttgggcactcggctcggaaacgatcgctcaaaacagagaatttggtgaaattgaagcctggtatgtccgattggtgtgaaatttagcgaatatgtaactggaggtgttgtgaaggtgcctgaaaaatttgggttcaatcggagcatttttggctggtttggacatttcaccgaacacgtggcgtgcggtgaattaggtttttggagatatggccatttgaggattgaaaccctcccaaagggagctagaaacctgcagggatactcaagagacacataagaacatctctcaccacatggattcacagaatttgataggaaattgatttgtgcactcaaggggtggaataagctttacagagctgtgaattagcacaacaacaatccaggatattcccgtcggccgggtaccgacggaaaagacactaagaacggagggagtactaatgattcgatgatacatgtaaacactagaaacctcaatagattttcttcactcatgtattggaatgtttctctgtgctgtggcattctagttatccgccatttgtcgctgttgcttattggaccccgtggtgatgcaggag

SEQ ID NO: 7671 - DNA, 973 bp, Zea mays
  Intron number 2 from transcript GRMZM5G892879_T01 (locus G RMZM5G892879) derived from phytozome v7.0 (chr-ID 6; pos 1 61825464 to 161826436)
tcaacggctgtgccagttctaccaaagacgctgtatatggaactctgaacacgcaagacatcacgtgtttttttctgctgtcagagtacgcaatgatacacttgcatcacccagccatttgttgattagctgctaagttgcctaggagcttcttcattaccgagtagacagctaaatctcaactgccattctggaaaatttgagggagcaaccaaatttctgacgatggaattcggttgacagtgttgttggagtgtcatgaggtctctgtttcctaagtataactaatgttgccacatggacaatgtggttcagttccttggttgccatccactgagaatttagtacgaatttgttcagaataaagataggtagttacattaaagcttccctctaacttcattttttaatgctaatgcccccgcaacctttgaattttagaacaatggagttctgagatcattaggaagtcagaaagtggtgaaaatttgaaatttgaattcccactgtgctactgttgatattttgactatttggcactttgcatatgtttgttcttacactgaatgggaaactgacgtgagagttgatgtggtgggttacttttatttgaaagggactggaatcagtaagaatgacactgacaattaagctccctttatgttttttttggtaatgattgcatccattaagattgtttcttgctctttcacattggcaatgtgcgtttgaatcaatatggtagtgacgctgttaggtaagaaaagtctatggtgataacaccaatgatgccttcaacaattatgtattgccaaccgagctttcatgttcagactacagttgaacttaaataaaaaagaatgagttcacactgcagtttactgtttctatgaattttctttggttggatgaacccatgaggtgtacattgcgtaccctgatcatttcttggctgcttgatatttcaggaaca

SEQ ID NO: 7672 - DNA, 674 bp, Zea mays
  Intron number 2 from transcript GRMZM2G049759_T01 (locus G RMZM2G049759) derived from phytozome v7.0 (chr-ID 3; pos 1 93852948 to 193853621 reverse strand)
gaagctgcggaaggagaactcggagctcagcaaaggttcctattgtgttccctgatttcttttcctagtgttctgctttctttttctgcgttgcgattctagttacaaatggaaacaaaaagaacaccttaattatgccgaggtaatgcacatgttcagactgtacgcattatgtctagtattttggctcttccttttttcatacctaaggctgcattcaaagaaagtgaacttttttcttataaaaaactacttctgtgaagtatctaatgctctaaattctaatttcatagcatgctagtagcgtgctagcaggaattttaacagaaggtgcctatcacagagaagatgtctttcaaagtatgtctggtttctcaataatgcttcatgtatttgttaacatcatgtttggtttctcttcaatgcatcttttattcgttagcatctattaggctccctcccccccaattttatccttaacttagtacactctaaaacacttgattacatgatttgatgtcacccacccaaagcatatgtattcttgatgaacagtgtatcatgtatgcatcttgaaaccattcttatgtgtatcatgctttaacgttgtactctctctgtttttcctttgatgaatagtgtgcaaggaggaacacctccgaggtgattcagca

SEQ ID NO: 7673 - DNA, 777 bp, Zea mays
  Intron number 2 from transcript GRMZM2G109605_T01 (locus G RMZM2G109605) derived from phytozome v7.0 (chr-ID 6; pos 4 9000030 to 49000806 reverse strand)
aacatcggagtggaaggccaggtacgtacgcgaaaagcctagtttcatgtccatcatcactcactctggatgtgaaatattctcctgaaattggacattaaacgtttgctctaggtcaaaccccacgtgaacttgttgacccaccaaatgttcagctccatgacaagtcaaaagcatcatttcctgttgaatagtactcaaaaccacgctagtacgcagacaaaatttaatgaacacatacgtagtactcagcttagacatgtacaacaccatttaataagatctgttgagtgatctttagaggttaattgaaaaaatatataagagacgtgcacattcgcgaagagatcgtctatacattattctctatgtgtattctcttaaatacatttatgacatatgggttaagagtcatatcgtgccgtcttttagatgtcttctttacttaaaaatctatccatgaacctaggatcatacatgcccttatcattactgatttctttgagcattttatatattggtacaatcaattgatatggttgtaatcatgcgtcaattgaaagcaaactgtttttgcgttgtcgttgtctggtgacccaattggaagacatcggctaacattctgaagaacagatatttaagagtttaaacaaacagatactttatacgggaaaatttaaaatgatattttatttatttatttgtatgttgctaagtgaagacttgcttctctaaatatagtttttactgtcgctaacatgaaggtatccgctcgtg

SEQ ID NO: 7674 - DNA, 601 bp, Zea mays
  Intron number 2 from transcript GRMZM2G012413_T01 (locus G RMZM2G012413) derived from phytozome v7.0 (chr-ID 7; pos 1 47380551 to 147381151)
tccgcgacaaacaggaggataccgcacgcatcagggtaagcactcggcatcatcagcttctgcttcggttttccttctgtgcattagatattctttcatcggagatactgaaatggaggttggtgtacaaggacaaaattgccgtataagctagcaattgttttggttcttttttcgtaagttagttatgatgggtacactcagaattggagaactttgattgcaagagattttactgccttaaacaatcagaattggcaactttcattgtaagccatttaactgccttaactttaattaattgagttaataagattgacgtaaggaaactcgttaattatgctttagtatttttttcttaaaagagtcatatggaggacaaatccttccttgatttctctgtcaggtcagcattgggcacacctgtgatgtttaacccttatgtatgttgtgaggcaaaataaatctctaaaccttggtaaaatgcatggtgttttcttatgatatcctgtgcaccatattttcttctggagtatgttagaaacaaaacaattctgcagttttctttaacatatggatttggcaaatctgcaggttgaac

SEQ ID NO: 7675 - DNA, 1019 bp, Zea mays
  Intron number 1 from transcript GRMZM2G431559_T01 (locus G RMZM2G431559) derived from phytozome v7.0 (chr-ID 7; pos 5 2861549 to 52862567)
ggagggacgccgaggtgagtgatagggaggagagggcgctgaccagccatggttgagggggaagaaacttggacgtggggagtgggaggagggagggagcaacagtggataaggccaagcaatggattcatgaagactccaggacgatgactacagatttggacgaggaggaaaagtggtggtgataaaatcaaagtgatatttttattctatttcattttttacttttcctttagcaatacaaatttcagaaattctgaattctgcgattaaaatttaagcgaggttaaaatggaccgaaggaggtggtagggagataagatgcgtctgcgtaacttcacagaaacgatgttatgtgtcgcaatcataggcaagaagtgaaacacagccacccacagatttgcacacgccacgcgccacgaagtctggccatagagggaacacgtgcaacgcaagcgtgaaataatttccaatgaagtttaaggaaccagattcgatttcaaggattatttcatagattagagtttgggcaagacgtcgatggcttaacccaaatgatattggattcgatgttctgaaaattaccaaagtctgaattaaaaaaataattttggacaatttagacagatggagacagacacgatatcaaaatcgtgacagacgaagatgattaaaatttagtgtccattttatttgctgatatctcgcgcttaaatccatagtcgctgttgaacgggagataaacaccgggggtgttacaaagatctcctcgggccaaggaatcattcccctctagcgacctccctctctccctttcgtctcaggtgagtctacacgcactccactgttgattttggtcgtacgctagtcaatcgatggaggatgttgaaatctaatgaccagatctacgcaatccttgccttgttccttccccgtgacggccacccagatcctcctgcctaacctctcctttttcgttttcaggccttccactgtatctccagcaaagcgaaggatca

SEQ ID NO: 7676 - DNA, 920 bp, Zea mays
  Intron number 2 from transcript GRMZM2G180622_T01 (locus G RMZM2G180622) derived from phytozome v7.0 (chr-ID 3; pos 2 8620718 to 28621637 reverse strand)
tcttttctccagacttggtaattttggacgacaaggtaacaaagtgtataatcgtgcatagtctgtgttcgtttcttggtagcggctgtcttagcttctcctattgttaaccttctcagtgtggtacggtgattttataaacatgtaactacagctagttccgagctcttattactgtcacttggagatataaagataacataaaaagggcagacctcccgaggagtggtgtttgggaaagggataaaccaaggcatgcctccccgcagatgcggattagctgctttgaacccgcgacccagttacctattgagacaactctcatacaccaggcccaccctttttatataagataagatgttgggagttaaattaatttggaagtctgtgtctcttttgctgcgcccagattcataaccataatcatgtttaaacaagtgctgtgtgaagagccatatttctcacataagttttttaggatattgtgtatagttgtgatataattgtgatatctgtgagatcccttttgttaacatagttttatgagcttggaagcttagaagccatctagctttgaacatgattgattgatcactctccatagaaagttgacttgaacattaagtgaactgcgtgagtattatctgagaatactttgattacatttgatgcttaaactagctcaaagtgtctccaagtaatttgtcgttaggaattaattcactgcattttgttatgtctatacatggaagtttgttgtataaatcttttaatctatctgattagatgtacatctctactgatgtgctatataactttagatgttcaaaaaactaacagtgtttttctctcttctatgagatgcacttccttgcatcatttcatgtccctacaggttttgtattatctgatttttcggg

SEQ ID NO: 7677 - DNA, 829 bp, Zea mays
  Intron number 1 from transcript GRMZM2G390664_T01 (locus G RMZM2G390664) derived from phytozome v7.0 (chr-ID 3; pos 4 3284186 to 43285014)
cacgcgcgtggatcacaaggtgaggctgaccagcggggtggcactgtcggcgcgtgagatgagagggactgcgagtgggacccaaacgtcgacgtgtgggtgtgcgcagttgggctagagtggtgggattgaatgactgggccggcaggtttcagcccatagaaccgagggaaagccttctttttattttcttttccaatttcttttctactatttctatttgctaaattcaaattggaatgtgatttgtgtttcaacattcaattaatgtgcaacactcaaaaagtgcagcatgagatgcagggttcatatttattattactccatttctttaagtaaatgctttgaaacatataaatttaatgagacaatggttattaaataattaagcgataactttatttaaaatgtttattacctattcacaaataaccatgaaatcgttattaggtagcacttttatgaaactcttttgagatcatttcaaagtattgagttccaaggttaatgaaaaggatgatttaactccttgaaggctctctcatttagtcccttgcttcaaatcaaaagtattttaaaatcttggaagaggccttccttttatagtttatagagggaggaataaattgaaagtttctgctgttttgaataccaaatttttacttatcattatttatttaatttcgagaaatacactttatcacggatgatatcattattggtagttattttatctcaaactcttttgggaattctttaattcatcaaaatgtgattttgagtgttacactaatataatatggcagagtggtgacattcaagaacgaag

SEQ ID NO: 7678 - DNA, 1025 bp, Zea mays
  Intron number 1 from transcript GRMZM2G134759_T01 (locus G RMZM2G134759) derived from phytozome v7.0 (chr-ID 6; pos 8 5887270 to 85888294 reverse strand)
agtagctggctggcttgcctgcctgactgcctggggtaattcccttcgatttcaatcccatccaccgacccgatctacaatcaatcaaagtaccgcccgccctccggcctgcggtgtactgttagtctgctgctgctgcttcttatcgttgttatattgctgatacatgtctcgcgtgatagatgtgcaactatatatcagtctcgtcgccggcaacactggcatgcttaaacatgtgtcgctgctgctccgtgatgccggcgacggctgctattagtgttaatgttagtgtcgatcgggtctccttgaacaatggcaggaatctgttgcttgtttactttcttctaatggcaagtaaagttccctaattgtttcgtctgccgttgggtgtttaatactgtcagggtttcatgagacagatcctctcttgtcttgtgtatgaatagtttgtattgtcggatatgctcggctagcccaaatcttcacctgctttgcttatgcccacttgaactagcgaggacaattgcctttgtaacccatgtgacagttgttaggcttaattgttcttggtttatgtattgtgactagaaataaaacgtagttatctagtttgagtcataagcaaatgcttgagatcggtagcgatttcagttcctcttcacatggttaagtatatgtcttgagttcgtcactagattaagtttactattttttgcatgggtattagtattttcctagacccaaacttctcaaaaggcattcatgagagatgagtaacataacggataaccaattaaccatgtactcccgccctctttttatattttgagctaacgaacattaactataaaacggcgggaaggtgtatcttttgtttaaaatgctggagtaacgccatattaatgactacacccgttgttttttgtcgtcttcctgagaattgtttgctcgcgggtagaagtggtactccagacaatgctgcatcacgagactgtcatttgaagttgggatatgttgtttcagcg

SEQ ID NO: 7679 - DNA, 959 bp, Zea mays; identical to SEQ ID NO: 7609
  Intron number 2 from transcript GRMZM2G047930_T01 (locus G RMZM2G047930) derived from phytozome v7.0 (chr-ID 3; pos 4 1860409 to 41861367 reverse strand)

SEQ ID NO: 7680 - DNA, 929 bp, Zea mays
  Intron number 2 from transcript AC187082.3_FGT003 (locus A C187082.3_FG003) derived from phytozome v7.0 (chr-ID 7; po s 38934269 to 38935197)
tccacttctccgtgttttcggctctgattagcctggtactgacgaattcaggacagacaataatagcagtcttgctctttgcgtccacaattatatttctagatctttatgtttggtatatattattcttatgatagtcattgattatggtggatagtactttcattagttatgttcttgtatcttttttcctcatgtaaaatgcctgggatgtctaaacctgccatattggcctgattgatcttttagtgatatatagaaactgcaagctgttatccatggacatctagaggcggcccatgcctcacggccaaagcagatcagatgagatttttttggtcttgtgtggttctttttaatctgctcacatgatacttcttattcattgccatccaatttaattaattgccctcgattgaattggttcctttgccattttacttaggaggataaaagaagacactaccttggcacatgcctgttgccacaatggaaaaaagaagattagtgttgtgtgatatttttttcattcctttgatctattgcatgctatttgtaccccaatcgacaaaatagatgagactcaattcaggagcaaatcaccagtcctgttcacaatccaattcagtatggctaaaatatcaaacttatgctccttgaagtttgtttttttcctgatcttcctttaatatctgatgactgatggactggtgagttcatgatctgcttcatgcttttccttttatatatggtcactacctcactggttagttcatggtgttttttgtctacttctttgcccaaaaaaatcccggggtgaatttcagcatgcttttcctctaggtgtaaagccacccactcgatcaccatatctccctctaggtgttatttttaaatatgctttgttcagtgtaaatcgttgcttgcag

SEQ ID NO: 7681 - DNA, 779 bp, Zea mays
  Intron number 3 from transcript GRMZM2G393436_T01 (locus G RMZM2G393436) derived from phytozome v7.0 (chr-ID 3; pos 1 8327969 to 18328747 reverse strand)
caactactttggtaagtttttttcagcacctccctttcagtttggaaagtactttggaagcacatttgttttccatggcaaagtattgagtgaagtattgtcgttttccatgtgaatgtatgaagtgttgaaaagtccccaacttactatctgaggatgaatctgctaagaaacaggtctgagttttttccctgagaatgtggaaatggtctaatagtacgaggaagtagttgtgttgtggctcacaaagaaaagaagtgattaatggggtcaaagttatcactgaattatgttcaatcttatctggtcaaaactgcacacctttgacatgttttatctcttcacatgttgtgcttgtagttgtagcaaatgagcacgtgaatgggtctggtggcttttcaataaattagaccatgtgatattttgagactggaacttgcatattagtgacagaaaacttctagaggtattgaagaaaaagatcattcacctataaatatttgtggtgctttgtcacacgtgaatttgagataccgaagaagttttgctatcaaagcaaagctgaaacagcagcctaggaatcctaggttacccgttaatgcgtgtgactgagaaatgaccaaacagactttgctttttcacagtcatgtcagccttattatgtttagttaacttaggtcaactattactttatatcttttggtgcaacgttattttctgatatagttgtaatgaaaattttaggggataagagttcaagtcaggagcgtctatattga

SEQ ID NO: 7682 - DNA, 1058 bp, Zea mays
  Intron number 3 from transcript GRMZM2G396516_T03 (locus G RMZM2G396516) derived from phytozome v7.0 (chr-ID 9; pos 1 217076 to 1218133)
ccacgacacgtgcatctgtaggaaccctgattttggtatggtttctacactcaaattcatcagtatgatataaggcaatctgctggctggtatttaagagtggccctctcttcatatcatcgaaaggtaaaactattagtggcacacgttggttttttcctttgtttccaacatgtaacattatattaggggtatgtgcagtttagggtaagtaatatactcctttgtgctcagtaagtaattgatagaaggtagaagaaggtagaaacatatgtgcagtttagagtttacctctttatgatttctgggtagccacaatattttcacattgcaattcaagtccttagtaccctggtaatcaaactaacatgtcagagcatcaggcaaattcattgtgcacctgcctattgtatgctaaagaaatcagtttttttgcatgtgttagttgtctcctaacctgctgcattttcaatttttgtgttctgtgttttgtaatttgggagcaccttcaccattgtgttattagagctaggcaccttcaccattgtgttattgatgatctttcttggtctgaatggagtttttgcacctattcacatgccagagagtttatgcattgtcctccttttttggatacactttctgttaaaaaatgctacacagttgcattctacttaccttgtgattttgatggagctctgttgttgtgcttctttgacatttgtcggtcctttgagcattaggtctgcatcatgcattatgttgttatctattgatctatatatcccatattgtggagatcactaaaatcttagtaatttaagttctgttcaaactttcaattccatcgtccgtgaaaaattgataagtatgaatgtgttgacttgactccattttatcttctccttatttgagcttgtattcttattttttaatacattgctgccctgcactgagatttctattgtaaataaacaaagtgctatttaaattttgatttattccttacgaatgtctgttggtttcaggaaagtgctgagagaggtggcatctagagg

SEQ ID NO: 7683 - DNA, 944 bp, Zea mays
  Intron number 3 from transcript GRMZM2G051771_T02 (locus G RMZM2G051771) derived from phytozome v7.0 (chr-ID 7; pos 3 3996210 to 33997153 reverse strand)
acctgcccctttgctccatcaaagaccccaagaaggtatatgagatgaccctttttggctatttgtaccagtgttattaaaactacgtttaaacaacgtttaaactacgtttaaacgtcaaaactctaattagaggttgaaaccgcgttttggcattttggcgttctgaactgtagaacacagtgtttcatgcgttttagaccattagatatttttgggcctagtctgttagttacttttgggtccaatccggttcatgtgtgaagttttggtaagccactaacctctctgttttggtatttaacttcatgttattgtctgaaattatgatatattggtatttttcatatgttgtttaaaactacgtttaaacaaaagtttaaacgtttaaaagtcaaaactgaacccatgagtgtttcgacgttttattgttttaataaccttgatttgtaccttgcctaagcatctttattggactcatacagttatttagcagaatgtacccttcatttgttttttatgccaaaaaaaaaaaacgaaccaaaactgcaattagtagcttataatattattgctgagaaaatttgaaatacttgctggcatcatatctaacgataatagcatacatgctatggtacatttagcattaaaaggtgtactccgatgctatttgcatcaatttaaacatctttaagaataggtcattggttacttcatacagttttgacttataatttgtttgaacttgtaatgcctgaagaaacatgcagcaaaatttattaggatgcaattgcactgccaagtttattaattaggtgaatttaggtatttgtacttttcaaaatgatgaatatgtatacagatgaatgtctagtttctaaaatttattggatgtaacgttaaattgtttcatgatgcacaggtgttggttattggaggggggg

SEQ ID NO: 7684 - DNA, 627 bp, Zea mays
  Intron number 1 from transcript AC214823.3_FGT001 (locus A C214823.3_FG001) derived from phytozome v7.0 (chr-ID 7; po s 54238928 to 54239554)
gcaggtcacacacatctgccctacaagtgtcggtggtgagttttattgttgattctctgaacatataaccattggtggaatgtcttcaaatagttatcgagttcctgacaataaacatggtaaaatatctaaatatctaaatcagataaacgtagctgtgatgttgatttttgtggttgctgatacttccgaatgaattgggcttggtgaagtaagaaaataaacattttcatttaagtgaagcaatattttaatgctgaatgcagatccatttaagtgaagaaatatttttatgctgaatgcagatccataattatgttattctttttgtataattctataagggcatgccactcttttatattcagtacaaaacggaatgtcacatataacttgaacaatataaaggcttactagtttgattccaagtggagattgaagccgattatggattttatcacggtgatcctagtcatattagaccagcaaaataataggcctgtttcaagttagtaagtatgtccagaaccagactgataacttagcagactaactctcaagtttctgcgaagagtcgaactaacaaatactagcttgaaacttggtttgttcagagtgagaagtttg

SEQ ID NO: 7685 - DNA, 984 bp, Zea mays
  Intron number 2 from transcript GRMZM2G481179_T01 (locus G RMZM2G481179) derived from phytozome v7.0 (chr-ID 6; pos 9 8093091 to 98094074)
tgggcattatcaatcaagcggtaattggtttctctcaaaaagagtccataatatggatatttccttcattaccacattttcagacaagttcaaaaatgtcaagtgggaatctcctccggaaacttggtttcgctccaagttgaagcatatgactagtgggccaccgatattcacttcccttaaagaactattctaggcgaccagctctaggagggtcccatcgtctccctcagtaacaaaccaaaacccattgttcaccaaaaccctctcggagtgtaccggcaatgaacccttcactttccatttgcttaagggcaaggagcgattgtccgtccccgacgcatttcatttcatttcattcggttgctatggcctatcatcgagtggaccatgttcccttcattctgcatggtttcatacaagcacaagtcatgcaccgtgaaattatggtacgtgttgttgctcgctctcaacccgctgctcatgaagattggggattatctcggttcatcctttgcttagggttattttcaattttgaagacactacagacattgtgtgggactatctagtgggtcacatgcaaattaacatctaattcagcattctcacttgggtcatgctcttgtctgttttagttttgtgtttgatagagatcatctaaataatcttggtctgcagcaagctttagggttcactttcactgttgtaaggcataatgaagcttggaactatcggaccatcaattttaatagagaatgatgacttatgttgcttggctttacacttgattattggacccaagaacatatccagaatgttattagatcttttggtcaccttcttatgtgggatgtggatagatcaaaatacatgaggttgcttctacatgcaagggttacatcccttgaagaaataccccagttcattgtttttattgttgctaaaggcttcaacggtgtctcttggacgatacagtgtgaa

SEQ ID NO: 7686 - DNA, 852 bp, Zea mays
  Intron number 1 from transcript GRMZM2G125976_T01 (locus G RMZM2G125976) derived from phytozome v7.0 (chr-ID 6; pos 1 51034863 to 151035714)
acgtgagttaatcactacgatccgcctcccagcttcttgatccttcagcgaaaagcacgtcttttctgctcttgtttcatgtcgcaattatttcttcttcggcgagaagaatctaacgaacaccgctcatggtcacgtcacggagcctacatctcggttgaatctttatttactgttctggcacagattatttcttgtgcttgcgatatgatgatagtacatatggattgcgattcgacctctttcggatatgttggttcggttattatatgcatcaaatcattgtattgcaaacgttgggaggtttccattccctttcattttcccttgcgaaaactaggcaacttgctgtgaagttcttgctgaacagaattgcccagcagatcaaagcatgaaattgggacatcgaaatatatcagggttctctagttttgtcccgaagatttttcttcttcaaaattgctacccgataagattcctggagtttttgtcttctttcgaaaggatgccatatgcatccgcgtaacctgcagcagaaagattctgtttatctactcactatcttttgctaaaataatttctgttgttcacggttgtaatttctccatgcgaagtacaatattgttcacggttgcatcctgattccttgaacatacatgcctttggtgcagtcttgtcaagcggcaggaaaataaattcttgctatgtcctatgctcaacttcctgagtttattggctgcactaagtagttgttagttaagttctacattttgggtgtgttctacatttagactctttgagtacacgaaccttgcaggtctgcaggcgatacaagcagtactaccagcagct

SEQ ID NO: 7687 - DNA, 956 bp, Zea mays
  Intron number 2 from transcript GRMZM2G307168_T01 (locus G RMZM2G307168) derived from phytozome v7.0 (chr-ID 3; pos 1 70433528 to 170434483 reverse strand)
aaatcagagcctttactgttgtttatattcttcaggtaaccaaaccttgctttctctcaaactggtttgttgtgtgcttcttgcactatcgatgcaattgttaaaatttctaatttaagataatgtcaactacatttggtgactatttctgcttcgtatatattctatcccctttgtttgtcccttgttgggcattgttgttgttagataatgtcatcagccttttctatgcaagaatggcagggtgagcgaaactttaataggtttggtggatggttgggtaagtactcgactactaacaaaaacagaaggctactggaagatgtccacagtcatattcttgcctcccagcaagcaaacttggacaggttgttgcttttacatatatttgagatctacctgtgccctctttcgtggcttgtgcttatcgtcacatatctaatttgttattagtgtgccggtatggtatagcgaggctatccgttttcttatctggacatgtcctgaatctgcacttattatagttttttgtatctttgttttagacctccttaggaggtttcccttgtatccgagtccattttggactttccctacttgcttcttaatataatcatgtgcagctctcctgcgcgtccgagaaaaaaacctgctcttattatgttttttttgtgtgcatcattgttgtttgatatgggactttccctacttgagaaccttgcacttagatatgggaatccaataatcatattgaacttaataaaggcaagggcagcatcattgttgtttgatgtgaatgtcttgacttatgcttatattgtcactgacttttatagctgagggtttaatcaccaagttgatagtcttctgctttttgttataagtctgaaattctgaaccccttaattatatttcaatcagacccacgagaagaagccccgtgaatctctgctctg

SEQ ID NO: 7688 - DNA, 819 bp, Zea mays
  Intron number 3 from transcript GRMZM2G050089_T01 (locus G RMZM2G050089) derived from phytozome v7.0 (chr-ID 3; pos 1 85758677 to 185759495 reverse strand)
atacagtaaagataattttgattgttatcgtacttcagttttgttattataaacctagtgttatgcttcatccaagcgtgctatatttgctcttgattttttgatgtgtgagttattgaccgagatgttgttttcagctaatcatctatttgtatatgctgctgaccctctataagtaatacatcctacaaatattatattactgaccacacttgattggtgtgctattgtttatctttctatttggatcaatctttgagtaattaggttccatatggaacaaattagttttagaagctctagctttctacaaaaggacaaagaaaagactacctgaaggtgaagaaaatcagcgctcaagcattaatttggttccagttgaatttatggatcaatatgggattgacttcagattccaggattaatttagtagcactactttatgtttaactttttgaatactgcagtaaagattggagacactattccaagtagtttgtttccatatgatatagtaacctatatttttttcttactggcaatttatatcttgttgaaaatgatagaaatttatgtaatggactattcactattctgtcctatattttgacatacccctggattctttcccccttctggtgtgtatatgtataacaagtgtccacttttgtgcataagcttctttaggagtgtgtgtcctggaaattttcctttgtcaaataactgttctgcacttctgttctgcttttacttttttatatcatctatacttgcatgtttgcaggtggtatattccagtaaatattgttgttggcgcag

SEQ ID NO: 7689 - DNA, 938 bp, Zea mays
  Intron number 1 from transcript GRMZM5G858839_T01 (locus G RMZM5G858839) derived from phytozome v7.0 (chr-ID 6; pos 1 37309419 to 137310356)
caaccctcaggcagctggtacctggctgcttggctgtacgtgactgctgctgcactcactcggaatttcgttatgatccttggctttgaaggcattgcaggggagggaggggggtaggcagtggttggggcatcgctatcgcgcctccctcccatcatccccatcccccccttggttgttaatgggtcctaggcagcttggaccatgaaccttccttcctttccaaacagggacttgttctaacctccatgccttgccgcgtgcaaccgacgccatggcgcacgacggtggcagccgccaaagacataattaaacagctccaagaacataattaaacagctcaataattatacccggcgtttgtcaggaacgtgcaatgttcgattgacccaagcatatacgcgtgtttgtttgattgtttgagaaatgacatagtatatcatcttctcgttcttcatctcttgtttagttacgaaacagaatgagttaatttatcattattttatataataatatgaaaaatgaatttattctactggaatagagtcacgatgcatcatacccaaagtggatctcgtatactttgagcctaaatcatttgagccccgctgtctgtgcacggagttgaaggttgcgtgcctcctacttctctgagcctacaaacagagataaaccgtgtgctgcgactgctacacatgctgccatggatagtggaacaaaaaaatcgatgcttttgtcaccaccttgtataaaagttttttgacattttcttgaacactatgaatcaattatcttctcttctccatactttttttcagcaggcttccatgtggaaagagctagtcagccattctctatactgaatggacattatgctacggcacacctagttttgttctgtagtgtataattggtaagttaaaaagtctttatatact

SEQ ID NO: 7690 - DNA, 993 bp, Zea mays
  Intron number 1 from transcript AC199475.4_FGT001 (locus A C199475.4_FG001) derived from phytozome v7.0 (chr-ID 7; po s 112387506 to 112388498 reverse strand)
ggtacaggtttgagcaaaatttcaaactcgttatgggtacgagtttttttaatggatgtagatatttttcacgagtgtggatttgagatgacaagacgtagcgggtttgtacccattgccatctctaggcacgaggcggaggggtggtggttgtgtgcgtccaacggaagacgagctggctggaggacgcatgtaaccagaacgtgaggttgaagatgagtttagtactgaggtgtgggcccctgatgttagtgagtgtaggtggggtgaaagagagagagggtgggggagaaacagttgtgctaaatgggccaatttgactgagcgtgcattcttcattttttgttgttgttttttctttcttcttcttcttttaaaaaaactcaaaatatatttaaatatagataagtataaattaaaagttatgataaaatataaattcatttcttcttcacttttctcttggcatcgtgattctttcaagaaacacaaagctgacatgatagtcttcacaaatgtcatgaaattccacattctcagtggaagtttcttgttagtttcagtagactgtcatgaagacatttttatgacatatcaatgtttctaaaaagataaaataaatgagtttcatctcttaacatgattaccaattcgaatcaagaaactaaatatatacaaaactatagaataagactacgcattgaggacagatgttttatccatgtttcatttcatttttttcatgatgtaacaatcttggaaacaacgtcactaaactctctctattaagaacgtcctaatgcgccattgtatggatttctatcatattagatgttcttaatcaagcattgatatttgagcttacctcaaaaaaaatacaattatttagagttttattgggatttctctagaacaccttggcattaaatctgattagccaagtaatgttatgaaaaaggtccaccattttgttgtgtttccgaatacagcttt

SEQ ID NO: 7691 - DNA, 546 bp, Zea mays
  Intron number 5 from transcript GRMZM2G093441_T02 (locus G RMZM2G093441) derived from phytozome v7.0 (chr-ID 6; pos 1 61899185 to 161899730 reverse strand)
gtcctctatcaagtgagtagtggtgtcacattttctatgatgctttatatataatagtctgctgatggtgatgtatcttctagattggcatatgtgatatgtcaatgctctctcaggagtcaggagacattgatttgtgtattctggatgatgtgtgatgttttgacccatcgaaaactagactgacattattttttagctgtaccataccataggattatgtgattatggctaggtcgtcttttgttgcgattctttttgaacatgtcttttgtgaatttggttcttgtttttccttcgcataccctctttagaatataaacatatttgtatttgttccacaacctgggcttatgtgattttgacttggtcatctattgatgtggttcttccttaacagggctttctgttgtgaatatgtttctgtgttttgcatacccctcaactataaacatatatgagtaggtacacactaaaatgaagacaacatgcatgcagcaacctattcactgaagtttcatctgtactgtatttgctttcaggaat

SEQ ID NO: 7692 - DNA, 1017 bp, Zea mays
  Intron number 1 from transcript AC213398.3_FGT007 (locus A C213398.3_FG007) derived from phytozome v7.0 (chr-ID 3; po s 138331705 to 138332721)
gactccgaccccttcgccatatcggtgcgccccctctctcacctctcccagagatggccaagcgtcgaatcaaacggaagtatccagagacggtgggagcaggggagcaaaggagctatcaatcgttgattgacgatcggacagttcaatttttttgacgacgtcgatagcctcgccattgccgttttggacctactttaatattttatctagtatccagcagagattttcttgtggtactgacgaaattccagtcattcaaggcgttcaaggcaccgacggaatcaagtcaggattatttttttgttatgtcgtgtgttaacacaagaatgaaccagaaatctagaatacaaacctgccacttgctctgtcataaatgaaattgtcagagcttgcaagaatatgaagatgtaatcaaaagcaaccttcctattgtcgcgagtatcataaaacctgaaaataactggagagaaaacatcaaaatctgacaaaaaatgatttgaaagaatatccacactacacattggcaaaaaatagaataagcatgcatgattaaacatcacctttttgtagatttgataaagtccatagccttcttgacaacatcgtcaggtttgtttgctaggacaagccaaagccagaccaacaaaatgtcaaaatttggtagaaacctaatgtaaatgaaggccatattttgcagggagattaaaatttggccaggctagctagaatgcaagatgaatccaaatgcaaactccttgttagactagagacatgatcaatggatttttgtctatgaggcttatgcatagacactcccataaaacagacaccatggatcattctagttcagattttactgaaaaaacagtgctccttaagtcttgataaaaccatgttttcatgccgactggaacaaaaccatccttccgaggaataaaagatatcacactgtaggccaccagattatgaaacccaatttaaaaaatgaaatgcaggaaatactggaactacaca

SEQ ID NO: 7693 - DNA, 792 bp, Zea mays
  Intron number 1 from transcript GRMZM2G575696_T01 (locus G RMZM2G575696) derived from phytozome v7.0 (chr-ID 7; pos 8 5173207 to 85173998)
ggctgtcgcagccgaagctgagcgtgaaggaagatgtgtgcccgcagtactacgagcttggtcgatatacatagtcacaaccacgcattatgaccgccgcaaggtactgtacatcgtcttcttgtttataaataagcacaaattaacgttgatcatgatcttctgctcgcctctgaaactggaaggaagtgatgtccaatgggtattacccaagcccagtgcggaacaaacactagcaacgaatcctactccacccagccaggccccgcggagccacaaccacgcgtgcccaggagacgagttcaggccgtagcaatctgtctagtaagatcgactaaaaggcgttttaattgcttgattcctccacaacatggctataaggtcactactgatctaactcttctctcaaagtgtttttttattccaattagttcttgcatgagatatatcttcgcttgacttgagttcatagactgactatttcaagctttcaaccagtctttttaatgtaatatttgcagcaactgcaatactgcatcttgtatatagtagtatgtgcttcattcgatcaataatacaagctcttttgcaagttgactaagataattttgccttagttgtctcaagacatggttataagttttccctatgcttttttgttttattcatattttttcttgttaataacacgtgccctgacagactgaccttccaatctaaaattagttctgtttgattgcatccttgctgagctgtatccgatccacatttttttttccaggtccccataaa

SEQ ID NO: 7694 - DNA, 859 bp, Zea mays
  Intron number 3 from transcript GRMZM2G022777_T03 (locus G RMZM2G022777) derived from phytozome v7.0 (chr-ID 3; pos 1 96050597 to 196051455 reverse strand)
tcatgtgagcacccttgcttatcttcagcggtgctgcgatctacttaccccttaagcaccgcgtttcttatgctgcatgtgatgccgggttgctgaacagatctttagcaagtaggattgggcaatggatgtaggttgctgggaaataatgggggtttcctcggtgaataactaactttctcggaatgcttttggtggggatacggatagagagatttgcgatttagttgacctcctgatactggtgtagatagagtggggtgccgagtcaattcaattttagctgcttcattcagtgaatgcatgaatgccttcccactgagcgcagtgggagaagccttcccactcacttaccacttagttctggtttcgacgcagactctttgcattttgcagggtacttgcctctgttattcctctccagatctcacttaccacttatataggacccgcaagcactgtgttctgtccattcacaggatgcatgaatgcacatgcagtcccttgcatgttgtgtgtagcttaaacatcatgcgacatacatagctcaaacgggaatcataggtcgtggtccttgtatgatttatttcttcgaaagaatggaatatgatgatgcttagtaaacaaggacataagtaaaaatcatgacacaactaactgttgtggaactgcttaattttttactttcttaagatttactcaggtgaccatgtgggattccaacactgttatgtcatgatgttttctcacgtttaactttaagttgttccaaaacattataccttcttgaagatcacacttttgaatgcgacttttgtagccagaagccccttctaccttcatttgagtcagctgaaat

SEQ ID NO: 7695 - DNA, 928 bp, Zea mays
  Intron number 1 from transcript GRMZM2G024348_T01 (locus G RMZM2G024348) derived from phytozome v7.0 (chr-ID 3; pos 2 10756075 to 210757002)
gccaagaactccggcgttgaatcccgggcccacaagtacgtttcgtgtatagatttgcagtcagtttggtgcagatgttgtatgactatttgattgcagttttgtgtggaattgattgacctgtggcgatccctttttaggatttagatgccctagatggttaatatgagagctttggtaaagaaaatggggaacagatagccccttttacgataaaaacatatcccaaatttatttggttgcattttaatgttttggtttacgaaagatttttttatgtagcatatagaaaactaagaaaagaagcatttcgtcatcattgttatatgcttgttactttgtaaattcgtgtactccaataggatggtcgagcactaattgaccttgatcactctgcaacttgatgatttcagggaatgtgattcacattgtttattgaattggaagtgaacactttttaagcattttcttagtaattaccaactcaaaacaaaacaatgtagctgttgttagctatgtcatataactttgggtttatccaaaccacagtccagttttctcttgcagtttagaatttaaataaactaacaaaagatagaatgaaatatatttttatatgaaaagtaatatggtgttgttctctttctccgtgcagttaactgctaccctggccacaattttctattactttgcagtttaagtatttccattcgaattagtcctatttttttattctttatactgcatttccagctgccaaggtttcaatgcaagtaagcaactgtcttctgttttcagcctcatgtagccataagtccttttttctcatgctgttgagttttgagtattgaccagaactaaatgcctcctctaccgttgcgctttgtgcacagggataagctggagcttaaagccgtgaaagacggtt

SEQ ID NO: 7696 - DNA, 601 bp, Zea mays
  Intron number 1 from transcript GRMZM2G116592_T01 (locus G RMZM2G116592) derived from phytozome v7.0 (chr-ID 3; pos 2 13204117 to 213204717)
tcagtaagtagcccattttttacatgttctccacaataccaatagcattcttgccctatgtacgattatatgtcatgttcctactgcaatgtgttacatttttcttatcctgattttatttagagtcttgcatgatgctataattgtttttaatagtggtataatatattaataaactctgtgaaagtggtggaaaatagtgctagcaatttgtattcttttctaccacactgaacgatttagcatccatctttccctttgctacattaaactttgatgtgtttattatatatagctaacagctcgatatcttctagtaaagttatatgaaaccttatttcttgtacttatgatctattgcctttcatagtgctgggccctgcctcagtgaagtagttgtatagtatacttgaagatcttttttttttgctctatgctgaatggtgtttacttatgtacttgttttacctgaatgctgcttatttgaatttccttgtatatatttttgggttgttttcttctcttttgctgagaattttcttctaaactactaattttggaggcagaaatttcagcaaaagggaagtacaataatcctgat

SEQ ID NO: 7697 - DNA, 988 bp, Zea mays
  Intron number 1 from transcript GRMZM2G367876_T01 (locus G RMZM2G367876) derived from phytozome v7.0 (chr-ID 6; pos 1 68181302 to 168182289 reverse strand)
caggggtaaggctttcctttgaaggataggtctggcacagtggtgacaagccttctcattgagcgaagaccgtcttgggttcgatgtagcctttctgcaaactgcaggggtaaggctttccttggttattctttctctagactcatgcaggagccgcaatcatttggtttatccttttgctcaccctatgattcacataatgctattgccataagaaaatgtgcttcatgccatagtagtatgtcatatatataatttatttattttcttaaaagataatatatctctactcctttaaagcacaactttcatgcaggtgtgggtgagaaactggttttctccgtcacgcacgtacgcttaggggtggtaatgagctctagattttacactacaaactttaaggatcaaatcggtttaggatcgggccctattcctattcatttctaaactaaaattatttaagggtcctaaatttttgttaagggacatttggatcgtggtccattaccacccctacgtacgctttcataataagccgtctgtgtcgcatgtccacaacaacccagacgtgtcctcctgtctctcgtgtctcgcgtcaccgacaccgcagtgagagtagaagcaacaaccccgcagtgagaggaaaacattcttatttggctggtaaatatttatttgttttcaatgtagtttgctagataattgaaaaatattttgtttttttcatccgactgttttggagatggtagctgttattacacatgacaagaagaatgattcacggcatacttgtgtgttccttgaatcaaagaacaaataaataaaatgtagtaaagggcattgccttctccattttcttgtagattttcatctcaggatgggtaatacctcttctaggtttccttttgcattttcttctggattttcatcacagaatgtccctaatccccctctggattccttttttcttctaggttttcatcacagg

SEQ ID NO: 7698 - DNA, 515 bp, Zea mays
  Intron number 1 from transcript GRMZM2G043212_T01 (locus G RMZM2G043212) derived from phytozome v7.0 (chr-ID 3; pos 1 97722088 to 197722602)
ttcgagggagacgagctctgcggccccgtacgacgctctctcttcctctcttgaaacaatgtgcacattttcacagctcgttttgcaggattgtaaccctggactgacagtgtccatcctattttgttcatgtttcaccgtggccatcttaatccacctcagaggcttcgactatccttttatgtgcatgatgaagggcaatcaagttacaatagaactgcgtacattatatatgttatctgccatgtgccatcatatccaaaattacccatgggctgtttgtggtgagagagaattcattaaaaatgagcttaattggacatgcaagtcaaagtgaactgatggttgccaaccagcctgttcataattgtgacttgtttaggatcagttactaatactatgggtacaaagtgaatggtttgtttgtactatgccttgttctttcttctaatgaattactccacaagtaattgtgtctactgaaatctgattcagtgatttaatttgcaggacat

SEQ ID NO: 7699 - DNA, 591 bp, Zea mays
  Intron number 1 from transcript GRMZM2G096010_T01 (locus G RMZM2G096010) derived from phytozome v7.0 (chr-ID 3; pos 5 5166465 to 55167055 reverse strand)
ctaaggttagttccggtgtcatgcctgattgcctgtactgaataatgccagcgttttggttctgtgttgcttcagaagtactgtatttggtcctagagcaccaaggttgatggtttgtaggaagtagagtgatagcgacactaagttcagtgttactcactacgtatgtataatataatggtttgttttgcttgttcagatagattgaagataagtttgattgatgttatgtggcttgtattagtcacgaatctaaaatctggatggtacatatattctcacttttggacaatgaatggggataccctgtgcccctgccctttcaacttccagaaaaatatcttagcgctcaattcaatttgcgattgctagcaatagagacgtttggtcccttacaacactcaacggatttggattgtacttcagtaatggcagtgatttattttgcacataatgcatcatattactttcacagattactgtggttctgcccatgcgactgaactataaattttgtaccctggtttccttgccatcttggtttacattttatcagggtttaaatcaggaccaatttgaagaatcacaaag

SEQ ID NO: 7700 - DNA, 794 bp, Zea mays
  Intron number 1 from transcript GRMZM2G104045_T01 (locus G RMZM2G104045) derived from phytozome v7.0 (chr-ID 3; pos 1 23149916 to 123150709 reverse strand)
cgccggcgtgcgccctctacgcgcttcttagcctggttcgtgctcagcaaatcctacttgccttgttgcttctggactttagctcagatttgatttaccggataaggattttgggtgacggattctaaatcttggcatgtgctgcttatccaactttgcgttgcatgtgaggttacatttctttacgaaagtggttaaagtgttgcctgatggatggtgaaaaaaataggataggatggctcaaactgtgccaccactggttgtcttcatgtgttgctgccaaatgtttgtgtgaagcttttagtagtaagcttcttctgtgatatctcaaagtaatatctatgaaccgttcactgcgttttcaacttcttttatactactagctagtcctatctagtttgttttgctaccaaaaacatgattcttgcaacttagtagtagtaacatatgtgaactgctcactgcgttttaagcttctgtttggtttggtactttggtttgctaccaaagttattaggatggtgatgaaacacaacagttggatgaatatgacctgacctagtcctgttataatatgaacaacgcagtcctactttggtataatatgactgtgttgttcatattatacaagatttgattacggatattttcattctgactgcgttgttcattgtcatcaaatgtacttgtatagtatgtagcttttacttgcaaaaagtatctgcaggtatgttgtttgctaattttttaatagctcaacatttcagggtgctgctgctgcagttgttcactat

SEQ ID NO: 7701 - DNA, 797 bp, Zea mays; identical to SEQ ID NO: 5015
  Intron number 1 from transcript GRMZM2G134797_T01 (locus G RMZM2G134797) derived from phytozome v7.0 (chr-ID 7; pos 1 49916794 to 149917590 reverse strand)

SEQ ID NO: 7702 - DNA, 478 bp, Zea mays
  Intron number 1 from transcript GRMZM2G087101_T01 (locus G RMZM2G087101) derived from phytozome v7.0 (chr-ID 3; pos 2 09593584 to 209594061)
agagcgcgcaggcgcaagagcaggcgcaagagcaggtgaagttactgaatactcactagtatgagttatgactagcgtgcagtacttgtgtgattccttttattattgttatttttagcttttggccctactcttcttgattagaaaatgataagagaaatcaaaagtgagatgatgtgaccagtgacaacaatcatatcagcgtgggggctttgagattatgtgatagaaaaatcgtagctttatggcttacaggatcgttatcagaacttgataaacatagcgtctctgattttttttaaacaataatatgtaaacaaaggcgcttcttaggtttcaagcctgctgattcgtttcgtttagttcagtagtacctgtgaaggaaacatatgcctcctgctagattcgcctagctaagaaagcatgcattggcatcttagcaggtggttgtgctcaaggtatccctgcactgcaaagc

SEQ ID NO: 7703 - DNA, 819 bp, Zea mays
  Intron number 2 from transcript GRMZM2G168397_T01 (locus G RMZM2G168397) derived from phytozome v7.0 (chr-ID 7; pos 1 34130012 to 134130830 reverse strand)
atccgcttgcggcggcgaggttccaggcaagtattctaatgctccactgactcgttcagttctcaaccgcagcagcggcggatcctacttgttttccctgatactacctgccattgtgctaacgcgactgagctccaatcggctaaatcactgcatttttcgcattactcaactttttaggtgcgcatttcagaaacagctgaacatttatgagtgcgtttggttggacgtaaaatgagggatgaaaagggacggacagattttctatagtgtttgcattatagtgtttgcatgagagtcactatgggtgaaaatcagataaaaaatcaaagagacggtgacgtccccgcctcatactactttggcctcaaaccaaacacatccttaagtggataaataaatgcactgtgggatccttgtgccatacacccaacaacagtattccgttgttcagggtagaaaacaataccacctccgtcccaaaatatagttctttctaatccactttttttctattcatattcatttaatgataatgaatataaacatatatacaaactacattcatatgttacttaatgaatatatgattagtctaaaacgaattatattttgggacggagggagtactatattgaactggcgattctgccacatgtccatttatcgtggattccttcactctgcatcttgttgcttttgagatacatatttgatgtcaatgcaaatcggactgtataaaaagaaagacgccacatcttcatctgagttactactactgcaggaattgggggaggcataccaagtgctcagtaatcc

SEQ ID NO: 7704 - DNA, 921 bp, Zea mays
  Intron number 1 from transcript GRMZM5G824837_T01 (locus G RMZM5G824837) derived from phytozome v7.0 (chr-ID 3; pos 2 08717634 to 208718554)
ccgcctacagggcaagtacttattccacgagcagagtaagtgacaccaccctccggcacacgccctcctctaaaatcaccctcccgtgtccatcgattagaggagtactgcgggtgtagaggggatttcagttgctggaaggattgagcgaatggggattgctaggtagggttagtagcagttagggaaatgttatgtttttgcatagcctggttcactcgagttgaaatggacctgctcttttgtgcacgttttcacttgtgttgaactttggctgattgtattaactataaaagaattgataagattgagtaagtcaacaatacatgtacgagttgtggatcattcttcggtagcattgggtagagttagtagcagttagacatgtttctatgtaagtagatgtccatctgctttagtggcagcatgaaaatgtttatttcatgagttgctgggacttcaataatagatcttcaagaatactcatctcaaccttatacttctaggaatcattcaagtggaattttacctttttaggttctgttgtcttgtattttcttcttattttctacctagctttcaagtttgttgctatattaagtggtcacagaagcatgatactgaggttgtgcgctagcttttctttatttctgttttgattatgcacctttgttattgttattgttgttgtgtttggggattcagctttaacataacctgtttttaactcatctgattaaagttgcaagctctcttgtgcccatattctgttattgttattgttgttgtgtttggggatccagcgacgagttgccgccgtagctggtcgcctccaccgtgaacgccatcaccgtcgtgaacggcgttaatttattctgcattgcagactcgagagaccaaggagccatcaccgccgtgaag

SEQ ID NO: 7705 - DNA, 848 bp, Zea mays
  Intron number 1 from transcript GRMZM2G053284_T01 (locus G RMZM2G053284) derived from phytozome v7.0 (chr-ID 3; pos 1 75899317 to 175900164 reverse strand)
ccgatccccttcgcggcctcgtcaacgacgccgaggtatagccgtatttctcccttgctctggcaccgattttgttccgaggaagtgatcggctgtaggctttcgtttcgatagacccccccgctcgagcttcccgtcgctgctgacttcgatttttttcgtgtccatttttctgttttttgtcatgtttgtctcggctctggagttcggataggcggtgtggtacggttttcaactttaataaactaccgtcatatgtgtagtcgtgtgctctcctatgtgtcatcatgattactatagtacctctgtgatgtttgattggatgctctgttttatgtttatgtgatgaacttcatgtcgagtttggccagttactcagtcagttcataggagcacatatgattcagcatgcaataagatgtgtgctacgccgaacccgtaaattgttttcaggtcactctgtgaagaactggagatgatcttaagcagtgaaaaatcacacgatcacactctcaaacattcagctaaccattttcctcaaccaaattcccctcccccgtgatcctcctagtgtcagccatccctgcggactgcttggaaacttataagtcaattatcagggtttttttacacaaatttgagtatcagtttcttaatcatgagcagttgtgcacattagttttgactgacgactggcatattgcaatggcggcggcggcggcatgcttcttttgtggggtttaccattgcagcggcggcggcatgcttcttttgtggggtttacctgactccatggacactttaacgattaacaccgagtatagcattctgctgcagaacactgagga

SEQ ID NO: 7706 - DNA, 1049 bp, Zea mays
  Intron number 1 from transcript GRMZM2G038875_T01 (locus G RMZM2G038875) derived from phytozome v7.0 (chr-ID 6; pos 1 08716748 to 108717796 reverse strand)
cgctgaaccccacccgtttgcccacggccaagcaggtaccattctttctgttcgccggttgtccaatagtctcttctctctctgtgagttccatagaacgcggccagaaacctcttgctctcagtttccgtcgatgtgcaagccgccaggcaccactagctttatccccctgttccctcaaatccctcttctcgctgagctggacaccgccaggagccacatcccacctcaacgtcggcgtgggccaacgccaggaggcagcagcgccgcccttcctctcctggcacggcggcaacatctcacaggcagcgccccaccctgccacctggcacacggcctgcaggctgcagcatcgcaaagccactgttccagtcgagcgtcgcgtgcaaccatgcatttttttaattccctttggtttacacccataaccaatgtttttaagtccctctctactactgctgaaagcctgtttgctcaagtaagtttgtccttcgcgcctaaggtgttttaactgtgcgatatgcgttcaggaattcaaaacactcggttagccaaaaagtactacaacttggctgcttgccactttcactataaagaaaaggtatattctcccactccgtctctggtgtgattagcttttcggggttgggatgtgtgagtatgtggactttgatatccgtatctacatgatcaattattggtaaaaaggtatctcaaccttaaatgtatctattatacatagaagaactatcaactaagttcatgttttaccttataattatacagttgaaacttcgcatgttgtccctacgtacataattctatggatgcacattcttttttttcccaaaaaaaatctcacttgaaagaacgaatatagggaatccgatctacatcttcttaattgtacacgatttgctggtcgtctgttaacacactatatttttcccttcgcatatttatttacatagtttaccggtcgtttattagcccaatttctaattgattctacaggtcagccctccgtgtggagcgaaaacatctctaat

SEQ ID NO: 7707 - DNA, 963 bp, Zea mays
  Intron number 3 from transcript GRMZM2G361131_T01 (locus G RMZM2G361131) derived from phytozome v7.0 (chr-ID 7; pos 1 8018475 to 18019437)
ggtaaaaacctctacccgttgggtagacgggtacgtgtacgggttggaactacccatacccgtctacccaagggtaaaatatacccgcatcaatacaactataaccatctcatagagctcatattagctaaaataaaacccttctctagctatcatttgtctagataccaagttatgtaatcatatgatttgttatatgtgaaattgaagttgtttttatatgtttatttaatattttgagtgattggtatattggaatttaagactttcctagcgggtacgggttacccgacgggtaaaaatacccgcgcgggtacgggtatgggtaagattttatacccgcgagtatatatgggtaacccgacgggtagatttgtttttatgggtacgggtatggaatggtactacccgacgggtatgtacccgttgccatccctagacctcaccttggtagaccgggaacaagattcgagacatggaaattcttttcggttgtttccttgtttgctttggagagtctaatgtggatggtttttagtggattcattggatgttgtaattgcactgggggaaaatccacatagattagtcatgaattctatactattcagcccccatgtgtcagcccttttctcaattgtcgcctgctggaaagaacatactggaacttggtgttgggacatggcctaacttcaaatactatgcaagcgaatatgggttaatgtaattggagtggactctaacaagcacatggaaaactaggcaaggactgctattgtgtctgctggactcccatcatcaagcttcacattcagaagaggtgtattgtctttgtccaacctttggtattggtgttgtcccttttcacattgttaactttgtttccaatttaaatataacaactgcatttgatgcacaatgttattaggttgttgaagccttgccggcagaagacaattccat

SEQ ID NO: 7708 - DNA, 291 bp, Zea mays
  Intron number 1 from transcript GRMZM2G346259_T01 (locus G RMZM2G346259) derived from phytozome v7.0 (chr-ID 6; pos 1 54429820 to 154430110 reverse strand)
aggatcctgctgcagttcaacgaataaaactgaaggtgatttgatttagagcatttaatatcttgatattgctgttctaggtaatccgaagttccgaacttcatgacctatgatgttattatccttttctcctattattattctattgatggctcttccttttcatttatcatataatagtacctttttaaaaggcaaggctaggatgactctttttatgcaattttacgtcctgtttactgtggcacgcaaaaaaactgaggttgtttgttttgtttcttcaggaagtat

SEQ ID NO: 7709 - DNA, 556 bp, Zea mays
  Intron number 1 from transcript GRMZM2G378547_T01 (locus G RMZM2G378547) derived from phytozome v7.0 (chr-ID 3; pos 5 8717281 to 58717836 reverse strand)
tccccccaagatcaaaggccggaggaggaagaaaggtagccatcacttctcgtgttgcttttttttccttctcccttacaactggtttggcatgtaaaatttttatatcgcgcgtgccaaatggtgaactccgtcggattttatcccttcctcccaagactcgtgggttgttctgcacccttctcttctcgtgcttgttatgaaactggccgccgccggcttgggctctcgatcctcgatctcgccggaaaagtagacggtaaccgccagtcaggttcttcctttgattggtgataaagaaaaactctgatcaaattcttcgcatattcgcacggcagattccgtcagtccaactccatctcctcgttttcttcagcgcccgtacgcaaatgccgtatcttacaaatattgccgcgaggcattctgaaatcgatcgagactttttttttggacagtttttaataattgtgtgaaatacaaatgtttggcacgtttttcggttatacaggagccatgtaaatgtttatttgtgtaattgaaggttagggagtcggcc

SEQ ID NO: 7710 - DNA, 727 bp, Zea mays
  Intron number 1 from transcript GRMZM2G058970_T01 (locus G RMZM2G058970) derived from phytozome v7.0 (chr-ID 3; pos 1 27709891 to 127710617 reverse strand)
tgcgcctagccaacgtctacgacatcacccccaaggttaatcgggtccccgtcccctgccttccctgccccgcctgccgcgaaccctagtcactgccccgcttgggcgcaggttggatgggaaggggccactccttgacacccccgcgccgccgcccgcgatcggtagaggcgtggcgcacgaagcgaatctgtaattctgtactggatttcggtctgctcgaccagtggtgctgccacctagcagactttatcgtgagcccagggcatagagaacttcgtagtttaatgtcccgtatgctatgggattttgcttgtgttgtttttcagtagctgatgtagcctgtgcttacatgtaaaattcgacataatcaatagataacgctatgaactggctcgctgaggctgtcgatgcacattttaggtgcagttttgtgggatacaagatccttgtgtttcgcttcaatagtatgttgtcaggatcaaccaggtggttcttgccttttgatctgttctgagttctgagtaaagcatagctgcctgaattctttgggtcattaataaaaagtattgtattaccagtacatcatacaaacagatcatgttgttcttggcagtcttatatcgtatttgtgttttactatatacatgacgatacttgtacagaactacagatgtaattttagtagcatctttctgcatttggacagacataccttttcaagctg

SEQ ID NO: 7711 - DNA, 790 bp, Zea mays
  Intron number 3 from transcript GRMZM2G033935_T01 (locus G RMZM2G033935) derived from phytozome v7.0 (chr-ID 9; pos 9 651818 to 9652607)
gcggatttctccaaggtgcgaagaagattcttctactactttctattgttatttgtaactattgttaccacttttgtttgcgattactgctttgcccgagaattgcattcgcaggcaatgtacatgcatgttgtttccgcttttacagaaaacaatatttttatgtacggacggggtgggtgatatggaatttaagcttatacctattttagatctgatcgactagctataactgaatttattaggggaatccccaaactggatcattattttctcaaatagaaatgtcaattcagtttgtgataatggaaaataagtgaagaacatgataatagatgtatatatactagtaaacttgtctagcacaggatctacaccattatcgagggaccttgaaactttttttgaatgttgtagtaatccaggcatccaattaagtcatttgattgtgtgtgtgtaatcatgatttacccaaatagtgtgaatcggatgtcagcgactcaatgcctttaaaaatattgtcatttaaggattttctttaatagtaccatcaatcgacagtgcaaagcttttaacaatgttatgtcgtatgaataatttattaccatatttctctcaccgaaagagtagtaccattcagtaaggaaatcaatggttatatatgttagtatagtatatgatgttactatattgagttctctgctctgcactgtcatggcacttgttatgataggcgttttctaaaccttccgtaggcgttaaggtggcaaagtatcccaggtgcagccat

SEQ ID NO: 7712 - DNA, 826 bp, Zea mays
  Intron number 2 from transcript GRMZM2G021294_T01 (locus G RMZM2G021294) derived from phytozome v7.0 (chr-ID 3; pos 5 8676265 to 58677090)
tgttcttgtatttgggggattttgctatcgcttgggtgataccatgctactgcagcattgatctattttgctgagtgttgcgtactgtacaatataaggttcttgttggttccactttgtaattgttggggacttgtccttaaatgctatgaattaagaacaaggcaacacagaaattgttaaacgttaaagtcattcgtccttcgaagcattatttcccttgggatataatgagtttcggacgaaggttatgaaggacataccttcataagcacaacaaataatgaagaaggattcttataaagtatgaacactaaaatattattattaactcacttttattttattattatggaaaaatagaaatgataacgaattacaaatgtaccttcggcttgaaagaagacaaaagtacaagcgtgacgcaaaagcaaatgtcaagtcagcctgaacagtacgggagcactgttcatctatttataggcacgggacgcagcccatgtaaaattacactcatgccctttacatttgctaataattctatagtaatccatcgaggtctaaacaaccctttcatctttaagtcggtttccgtttctgctatcatgccgaagctcccctgcgcatagcttcggctctgctccatccttcgtatcccttgtgcttcttcacactgtggttttgacccaagtctgaaagatctaagtccgaaggtacctgctcatgtattatactccagaaacattgttaaatcatgtttttgaggaccttcggaagccgaaggcccccaacagtaatgctctggtgttgcttgtaggaccacaag

SEQ ID NO: 7713 - DNA, 905 bp, Zea mays
  Intron number 2 from transcript GRMZM2G069886_T01 (locus G RMZM2G069886) derived from phytozome v7.0 (chr-ID 3; pos 1 14442812 to 114443716 reverse strand)
acctctccggttcgtgctgtcatcattaaaagaatgtaagtttggaagccaccagcatcaatactagttttgacttgcaattttgttgttgctgacttgctgttaatatacgcggctctgcacttgctgtcaacaagaaaacatgtcactactgatacatggttcacactgctaattcattgcatttggttctttttttcgctcttgaatgagttcattttcacatctaatgtattgttggccatatgtttgcaatttggcaatcccatcccccacttgaaatacacgacctatattctcaattgctacttccctattatcagaatcatccactctttgtgcagctctagaagactgtggtgcattttctcatgtgggaagacaattttgtaacaaagattaagaattttgtatgaaaatatctgatagttgcaactaagatttcgtttctgtgtatttccctgtgctcacgtaggtagcctgcaccattactcgtctataatgcttcataatgaattgttacatcttacaaggctgaattcttcattttatttgtattctgctgatgcagcatagttaatcttataccctcagtatatggtgttgcactgtattcatgagcatctagctgcagattttacttgtttttattcaattttacttgattccagtcagataaacaactttctttagttatatatgcttcccgttttgagtactagttatttttatctatctttagtgtacatcttttccttcataagccagtgatttgaaattttatcaggaacaataaagagtggtttaaaaggagataattgatttcattattttctttccttttgcctatgttttctttttcacactgcatattctgatgtctcttttcttgtatccagtgaaac

SEQ ID NO: 7714 - DNA, 925 bp, Zea mays
  Intron number 6 from transcript GRMZM2G174792_T01 (locus G RMZM2G174792) derived from phytozome v7.0 (chr-ID 7; pos 1 32091229 to 132092153)
atcactatcaagatctcaaaggtctcgatcccaccgtaagtgtgaagcgatttgtaaaacctaaatgttaaattattttgttttgtaatctacttggcatgtgaaatataaagacacttagtcagagattcttcactattggatttgtttttccagattttcagttatactagcaattctgaacacatacaacttaacactactattttctcataattttaaataaaactgacaaaacagactaagctcatttcactaactataggtgctcatttgtttaggaccactacattgggagttgcgacctattcgattgttaggcacttattggtttaggacttaagggttctgttctgatatagattggaatgtatggacatagctggctctttgatgttgtatattgttttcttatatgtttgcagatgattttaatcagtttccaaagtattgacttattactaaacagtaccagtttgatgttggtttagattccctttttgctttagtgcatttaaattgtaaccactataccttcttgacttctatggatactttttaaaaacttttttacatgtgatttttttaaattctattctactgtttcttttaaacaactaattgcacttgatatgggtgcattaattgctggtgccaaatatcgtggagagtttgaggatagacccaaggctgttctcaaagaagttacagattctgatgggtaggtaactatgaaggatgctcttttgttcccctgactattagatgttttcagtcttgccattaatttattttagttcaaattgtgatgctttggctctatttcacttttttccctcaacaacagtgatgctttggctctctttttaccatcttctatgatatgactaaactaatgtcaccatatatctcatacaagttgcaa

SEQ ID NO: 7715 - DNA, 1003 bp, Zea mays
  Intron number 1 from transcript GRMZM2G701058_T01 (locus G RMZM2G701058) derived from phytozome v7.0 (chr-ID 6; pos 1 08264586 to 108265588 reverse strand)
ccgtgagtagtctccaactcctctctttgtgcgtgtgagcatggcttcttactggtcattccccaatttgtaagggcagtaacaaatattgctttgcatgatctcccgagaaggactagttgtttgtgtttagcgttgttgtggaatatttgaatctggagatgcgcagaacgcttgcttaggttgttctgcagatcactatgggaagttgaggaggcgcttataagaagtaattaagggatgacatccggttgcttctaaaactgaatgcctttacaggtgtgtgttagcttgttctgatattgtactgttgccattgttaagtagtggccggattctatggcacagggcaataataaattccatgcactcagctgctgctaggtgttttgacccccccccccccccccccccccgctatgtgtcactactgttcatagatcaaatatattttggtgacctatttcagcaaatttcgtaaatatatttgggtactgaagaaagtgcagagaggggggcaaaatggccaccttctcctgctctaagcttatttccacatgtgagcagtgagtttcgactggatgatttccttgcgcaacagattgtggcctggagagtaaaatgctcttagactccatgtgtgctgagatttatcttttttttgttaaaacaagttttttttaataattttgccagagcactgcctttcagttaagcaataaaagagagtttatgtacaaggtcacacttaactgccaaacacagagtattcccatcccaacacctaggacctagcctctcacccctgtgctaaatcaagctttggcagagtgcacgcatcaagtttcatgttgcactttgttctttccttatcaaaacttctgttctaactaacattttttcttcgtttgcatgtgtggattcataaatagaccaaacatggtaagcgatcgatgaccacattgtcaattctttgttggattcatctcttatggtgcagtac

SEQ ID NO: 7716 - DNA, 887 bp, Zea mays
  Intron number 2 from transcript GRMZM2G433551_T01 (locus G RMZM2G433551) derived from phytozome v7.0 (chr-ID 7; pos 4 0334830 to 40335716)
gcataggagctgccactgggagcaagcacggggaggtgcgcaggtggcacgctcactgcggcacagtggctaggttatcctagatctcccaaccacgcggggtcatcgaataagagtgtttgcgatttggtatgtgttggactgggctgcgattaataaaaaatttaaatcccgcccatgtgagaaaaatatatatttattttctatttctatttttaattgttttatttattgtgtgaaattcaatagttcagactgattaggggcaattggtagaacaggacccgtgtattcctctctttgcaggtgctcaaccatgaatctatgaatcttgattagtacaagttcaatcatgttattgcgatagctacagttaggaaggaagctaaatgttttcactatctctatctaagcacaacactctacatgtgaattcacggtcaggtttcaaggtgagattttttgattttattcaaccgaacttatttccatcatgagagcctttccatcacaaaatacatcactattcgatgattaatctcaatgtaacttacatgtctaattttgtagtggcttaaatggcatcctcatgtacatttgataattcatagaatcgaaggattctaatgtatggatgcagaacgttgatgccattctaaatacgtttgcttgacacattaacatagtgacatgaccaaactattctttagtttgtaccgtgtagcgatgaattttctgtagtatttcaattgtgccgtgtagtgatgagttttctaggtcctcttcctgtgtcatggaactgaaataccataatacagtctagctatctcaaatttctgtgaactgaagtgcatgttctgttctctgtcattgtagaaggggaagaa

SEQ ID NO: 7717 - DNA, 759 bp, Zea mays
  Intron number 1 from transcript GRMZM2G305793_T01 (locus G RMZM2G305793) derived from phytozome v7.0 (chr-ID 3; pos 1 74699386 to 174700144)
ccccgccggagcccaagaagcccaagaccatcgaggtcaaggtcgcctgagggagcaagcagtagctgtgcttctgaaactttgtgtgtttgagtttgcttcctttggtatcaccaatcatcctatctgatatatcgactgggggttttgctgggtttgaaactttgtgacgcaaagcagaatgccctgatgctttctccatagaataaatctctgcatttctcttgtaaccttttctggtgaattcgtgtcgcgatgaatctataaacacctatttctagactttcctgtcaccaaacacctatttcctgtcatcaaacacctccatatatagttcaagtaattgaaaccagccactccctctattcctaaattgaggtcgttttggctccattcttaatttagtcgttttggttttgcagatggaaaaagaaaaactttgtatgtaaaagttgatccgacttacaatttagaacgaagaaatgatttctggatttcattcgggtgcggcggggcgaggtccgctttgacgccggcgttgatgccgaagcgaatggtgtcgtgggcctcgctgatctccctcttcatgctgctgctctgcatcttctccgcaactccgcctctttctctgtcgcgacttgcgagaagccgagaactcttgccttctttctttgcggggaagaaaagaaacttcgggctttggtcctttgggcttgaattttaggtccctccctgtcctctgttccggacctacttcaa

SEQ ID NO: 7718 - DNA, 829 bp, Zea mays
  Intron number 1 from transcript GRMZM2G174249_T02 (locus G RMZM2G174249) derived from phytozome v7.0 (chr-ID 3; pos 1 45731833 to 145732661 reverse strand)
gtaccacttccagcctcccaagaactggatcaacggtactcatctcttctcttctcttctcttctcttctcttctcttctgttgactttccgtatgccttgtaatccgaggttcttttactggatcaaggaaaaggaagttcgtctgattttttttttgcctaactggagggagtttgacctcccttctctttctgaataaaaattactggcgaggttaatttccctagttgcctagctctgtgttcatggtatacatgtgaaagggaaggtaggtaggctacacaatacttgtgctgcacagagccaaattttctgttggttcttgccgaatgctgcacagagccaagatacatattagtgaaggctcacattcatggcactgcttttacattttagtgaagtcatagcaatgttttacctaaagggatcgatgctattcccttttcgcactacattggcatagtctgaagtattgtgttaaagttttcagttaggcaatgcattcaggccaactgaaaatttgtctggaaatgcactttgcccccgtttggtcttatatatgctgattatattttcatttcaagttcctgataccatctgaaaagcatgttttggactcagggtctttgccctatcaagtttctgatatcatcttttattcttttcccgtccttgaaaaatccaaatgaatcggggaccgtttcaaacaacgactcaaaaaaaaaagatccaaatggtatgttatgcatctcaaattaaacaccaaccgcttgcttccatacataccaaactgcagtagaagaagctcctcttgattttcaggacca

SEQ ID NO: 7719 - DNA, 763 bp, Zea mays
  Intron number 2 from transcript GRMZM2G443881_T01 (locus G RMZM2G443881) derived from phytozome v7.0 (chr-ID 6; pos 1 18860265 to 118861027 reverse strand)
gtcgagttctacaccctgagttccgtggtcgagtttgttcttatatccctgactgcatgttcccagtttggagagatcctatatgattaaaatatctttagctctggcatcatctaaaactttagtacatttatttgtgtatatatatatatatatatatatatatatatatatatatatatatatatatatatatatatagtaccttttctagctaaattcattgttttgtattagattatctcttctatctatgcatttatttgcattgcagtaatgcatcaatttgtaatgtatctctgtttgactctttcatgtttttcttattattaatgcaatactagtttttctccagagtatctaaaatttaccctcatctctaatgatctcaatgtgtatattttatggttttcttatgcctgcgcttacattttgccatgtattttgttatgtttacatttgttgagttccctcacaaattttagggtctggggaatggaacttctagatatctttaccctcgcttagaaattcccttcctcagacctctacaatttgtgggatccttcaacactgggtactcctttcccttgtccatctcaatgcttataggcgtcatcgtcctaggctcccagcactgtttcagtttatgtagctgaggttgcttgctgtaaattaaatttcaatgtgtctaactctggtgtttgttcatgccatcctttttataggtctcggcattccttttgcaccatttctctgaggt

SEQ ID NO: 7720 - DNA, 455 bp, Zea mays
  Intron number 1 from transcript GRMZM2G099529_T01 (locus G RMZM2G099529) derived from phytozome v7.0 (chr-ID 6; pos 1 67511733 to 167512187)
gacgtgagtgctctgtcaaccgtgggcacccagttcagcgaaacaccagtatctacacgttcatttatccaccgcaaagtgttagacttcagggacaatgttggccttgatttgatgatttccaatttaatgagcttgcaaatctttggcacaggtctaaatattctagatggcggtttaactttttggcacatgaccaagtttactagctggttcataagaaaaataaaaaaaagatatctgcaccttctgttttttttatttgttgactatgcatcagaggacctcttttgtcttcctaaacacccatcgaatgcttcgataaaaagtttatcaagctctgcacgttttacacatgcatgacttgtgtagcggccacaacattttacacctgcttctgtatcttgtcaatcaaatctttgcaccatttttaagtattacgtcctctggcagtg

SEQ ID NO: 7721 - DNA, 550 bp, Zea mays
  Intron number 2 from transcript GRMZM2G034961_T01 (locus G RMZM2G034961) derived from phytozome v7.0 (chr-ID 3; pos 2 05027313 to 205027862 reverse strand)
aataaattcttatcagtaagtgcatgatagcaaaatatggactgttaccaataacatagcgtgctctttgttggtccaaccatatgcagttctcatagtttaatcttcagtcatactatatatctgcacttcaaacttttattggcctggagtctagcttattaccctttacattggttcctatagtattaacctaggatttcatgggttgtgcaaaaacatagaatttcgtgcaccatttttcttttgattttggtgtagtatctccatgttggtttccaaaaaagatccaaccaactacaggctgtttataaacgaacaggactctgacagaccaggctcttcaagaccttactaacaccttgatgtctaacaaaaatcttcagtaggatttgagagctcgagtatatttgcacataaaaaacccgttgttgtatctgtgccattgctttgatttcttcatcattggcttatctatttccctgcactaacttcacttgccattcttgtggtagcatcttgacattacttttaaaagagacccgaccaa

SEQ ID NO: 7722 - DNA, 964 bp, Zea mays
  Intron number 3 from transcript GRMZM2G038636_T01 (locus G RMZM2G038636) derived from phytozome v7.0 (chr-ID 7; pos 1 21982514 to 121983477)
cgcgccgccgccgttgcgctgccggagacggtgagttaccaaagctgttcgtcggtcgtcactcgtcacagataatcctctctgtcttgtaacgtaacgttttgactcccaaacgggcaggcgagtaggttgtagccacgttggtactgtgatttcatttgtaacggcatgagacggccctgtgttggttcagtttatttaggctttaccgctttacaggggggttcgcagcttgtctgtgggcctgtggctgcagtattttctcgttgttttcatgctttgtggtctctagcttttgcctatttgctctgccggtcccaccatgacaagcaatgtttttcagccacttccttccttggccccatcacatgatgaagttaatggtccctttctttgcagtactaattgcaacagtggaacttctcaaatttggtttatgtttccaacaaaaccgcaaaattgtttagagcctctttgggagagctctttctcagctccggcttccccggaggagctctaccaaactatttataggaagagccattttcagcgaaaaacaaaagccctaccaaacagtttataggaagaaccattttcagtgaaatacaaaggggccgtagctgcttttgaggagccacaaattagcttctccaaaacggctccagctcccctcaaggagcccctcacgaggtctgccaaacacccccttaattaactagctggtgccttgttagcaaccatgtatctttaatgattatagaacagcagttgtgagatacatgcttactagtccaatagtggttttcgcagttttgcaaggcgttgctttactagttctgagccatgtgacgtggttacaaattaatacttcaactagtcttggatgctatagtttttttgggcattatgatgtgaaatgtgtatgtgatgttggtctggttactgcagaaagactggagggagg

SEQ ID NO: 7723 - DNA, 823 bp, Zea mays; identical to SEQ ID NO: 7630
  Intron number 1 from transcript GRMZM2G106730_T02 (locus G RMZM2G106730) derived from phytozome v7.0 (chr-ID 3; pos 9 3832101 to 93832923)

SEQ ID NO: 7724 - DNA, 888 bp, Zea mays
  Intron number 1 from transcript GRMZM2G053927_T01 (locus G RMZM2G053927) derived from phytozome v7.0 (chr-ID 7; pos 5 0521727 to 50522614 reverse strand)
cgccggcaactcccgaggagcccgacgactacgaggtacctgcacttcttattcttcgtgacttcctttcttctacaagctaatgcgtgagaaaactcgtgcggtgtttcattaccacaagcacgactgtggggtcggcatctaatttgtttgttcccattcgttgataaggttgttactgttaacttgcacccttcgtctgtatttcataccttatatgcaacataatccaagcctgtattaatgtatgtcgtgtcttagtatttgctgttctgcataggcaaaagctgcgttcggtaaatttatatttgattgtttttattttgttgcatgtagtcacctctacgttttagtaaggtcacgtatttgtagtagaggctatatatacgtgagaccatttcattttttctgttcacgggttcgtgcaaatctgcatttccctagaaggactaaatttgatgtactgcctctgttctaaaactataagtcccaaatttatataatcaaataataaaatttatgataccaaataaacatcattagattcttcattaattattttttatagtatacctatttgatgtcataaatctttataattctctataattttggttaaacttgagatgctttgactctcaaaagctaatgctaatgctacattaggtctcttttcagcattgtagaagactgcataaatgcctttgtgggcaaccaaacatgaacaatctacattgcaaagtctagagcaggcaaccaaacaggcccttaaaatatattttattgtcatacaccattgctgctgattcctatctatgcagttgctgatgcttttttcctttcacaaaaatttcagttattggacacagctgggaattgtgaccctct

SEQ ID NO: 7725 - DNA, 1013 bp, Zea mays
  Intron number 1 from transcript AC188756.2_FGT002 (locus A C188756.2_FG002) derived from phytozome v7.0 (chr-ID 9; po s 38370665 to 38371677 reverse strand)
tgtacaaccacctcgtagtttggcaggtgtcaagatctgggagtggtcacaacaacccacatagacgcattgaaggaggttggtgatgcaatgcggcggcactaggtagtgcacccctacaagagaccccatgccttctccccaccggatggctgctaatctacgccacacaggaaagccctcgaagttgaggtgctcagggggcggaacaggtgccttagggggcaaaaatgtgccctagactgtgacaccccgggtgtttatttcgtgtcatgtcgggagatttgtcctaagctcggatcctcagtgtaaatttctatttctcgatcgcgtctatctccttttatcaagttactcgtgaaggtttcaccaaattcggagctattcagtctcgagaaatgctgaattcgaagcgtgttaaaacttttatttcttggaacgaatgcaaactcgaaaatcaatctcgacttataaattccgtccaaactcctgtattcgaactctcgatagttgatatccgacttgtgctcgaatccgctttcttgatattcggtctatattcaaatgttttatccagatccatactcttaaatggaatgctctgttgtgttggcttctaattattcttatctgactaaactcgatatcccggtatctgactcaattttgaaaccaacgttgacaacgatttttaaatatcacaactcgccttgttgaccgtaagtccgaaagccggtccaaacctggactcaaattttattttcaattatgacacaaaagattttgtcacgcagcgtcaaatcaaattctcggtctagttaatcgctcgatctttcgttcgtccgaactctagttcgctcttttctctgcacagataaattccgcaggagcattttattccagtaaataatgaatccttaccctagaagcaacccttttgcttctaccctaagcaaccccactaaaaccctaacctagaggtactaagagttgccctggggtcaaaagagttg

SEQ ID NO: 7726 - DNA, 662 bp, Zea mays
  Intron number 2 from transcript GRMZM2G097916_T01 (locus G RMZM2G097916) derived from phytozome v7.0 (chr-ID 7; pos 1 08603107 to 108603768 reverse strand)
tactgctggtgtcacaggtttgcccactaatcttgattgcattttgcttcacttatctatggatttatggttctgtactacaattctaaaacctatttttgagttggatcgtttagctatattccccaagagttttttacttaagtatctgggacatgagagaacatagttttgttcacaataatgcaaccattacaacttttttatcacagccttgttatagcagaatatggctaaacgagtgaacaataatatacttcatttgatgctttgttaattgttatagcagtatgcaatgcatatggatatagcatactcataattggagtagcaaaccatcttacttattgtttagagtgagaaaactatagacagcagaacattttgtctacaagatgacaatgtgctcgtggctgtgctcctttttttgtgtttttagttgaaatctgatgctacttaaatctaactaatttctcagcagacaacttgccttctgttgcactattttctgagcacataatttactgtctctgcatttctgtttctaggtccttaatgctttgttcaacctttacataaaagaagacaggaacaagcagccgaaaatggaatcatccctcacttgatgaaatttgtcatgtcagactcacctctgcggcagt

SEQ ID NO: 7727 - DNA, 781 bp, Zea mays
  Intron number 2 from transcript GRMZM2G578051_T01 (locus G RMZM2G578051) derived from phytozome v7.0 (chr-ID 3; pos 7 5967449 to 75968229 reverse strand)
gaatatccgacagaacatctagtgtaagttcagttatgtagtttgtaccctttattgttgctgatcacaaaatctttttgttgcttgttgatgatactaatatctacttagtacctgcattctttttgttgcttgttgatgatactaatactgtctgatataactagttgttttttctctctttggtaagaatccgcaattaaatttgacatccattggttatatattttttccttgttcatttaccacacatgctggcatctgaaaaggcattttcagttgctgtatctcttggcatctacaacaaagatgtgatagtagtttatgatggaaaggggctgttcagtgatgctcgtgtttggtggtaagcttttttcttcacaaaaaatatataaaaattgctaaggttgaagaccaaataaataaatgttcattttagctgtgtatttggcgatatgcaaataaataaatgtttttttcttttggcatttagcgctaggggatgctctttgaagtggttattgactagtaaaaacttacacagtagtttgtttgcgttcgtacttgatagcctaaatgccgcaccaaggagtatagattaacgttgaattacatgttgtataggttgagttttgatttacagaattgtctgtgtgctagttggttcatatatgtgaagtcagcaagattatttcaagggagggcatgaaatcctcatttcagaaaacatgttcatttgttgccaggtggggaggactgcacagttcgcatctggagcatc

SEQ ID NO: 7728 - DNA, 807 bp, Zea mays; identical to SEQ ID NO: 5492
  Intron number 1 from transcript GRMZM5G861300_T01 (locus G RMZM5G861300) derived from phytozome v7.0 (chr-ID 3; pos 2 12984792 to 212985598 reverse strand)

SEQ ID NO: 7729 - DNA, 994 bp, Zea mays
  Intron number 1 from transcript GRMZM5G811683_T01 (locus G RMZM5G811683) derived from phytozome v7.0 (chr-ID 6; pos 1 36916158 to 136917151 reverse strand)
cggaggaggcaggtatggcggcgtgggtgtacggccgaatcggccggactgttgacggagtccggcggcgcgcggtaaaaatccgtcgtctgttagcgcacgcgcgattcgcgcggggagaagaacaggagcacgcacctgacgtgtgggccccaatggtcatctccacgcgataaggaagggcgagcgcgagagaggccgagtggtgggtcccagagaccagtgtcaccagcgaagacgggctgcgcggtgcaaatcaaagatgggccgatttggtagctgtagcccatttaggttcaacttcttttctctttttctctgattttcttcttctcctattttcaattcccaatttgaatttcaagtatgactttgaatttgtactcaaattagaaatagattttaatcataccagtatggttaagtttgtgtatttgtaaattttgttttatattttatattatctctttctttctcctttttcctcaaatcctcttctcattatcattttatttaaatcatattattattgcttttaatgcacaaacaaaaatccaatatgatgcaatggtttatttgtgtcttattaaggatctactctttttttacatgagtggtcacatgtaatgataactagaggcacacatacatatataaaggaaacaatttctccttttattcttcctttcaaagtgggtattacatcgagggaggtggccctctcctcagaggggcctgaaagccctcccgagggagatgcgtgcataacaaagaaacatcaggcacaaacgatcaactcagagggtcgggtcaggaaaggtcaacaaaaagcaagtcctaataattgcctaggaaaaagtaaccccaagcaatccacttagattactcggggggctcgggggctacatgatactgatgcgcttgcgcgcattcaagccatgctctagcaagcactgcctttgaggcaactcctacaggtctgcccgtggaaact

SEQ ID NO: 7730 - DNA, 728 bp, Zea mays
  Intron number 1 from transcript GRMZM2G381473_T01 (locus G RMZM2G381473) derived from phytozome v7.0 (chr-ID 3; pos 5 7098920 to 57099647 reverse strand)
caccttgcctgtccagccagccccgtgcactacaagtacaaccccatcaagaccatcatatccttactcggttgcttcatctcaatatgaatgctaatccaaatttagtttcgttttattggttatgatcttaatgattgatggctgtgagcctgtgactcaattcattgctgtgttgttttgtgttagcttttgtttatggtttaattttgtttgtttcggatgtcttatataggttttattattttatttttgaaggtgaagatacattttagaatgagggttggtaaaagtagagcatttgagggtcggtgtttccttcctgcatacaaagttatatggttgtattgctctgaagaaatgttattggatcaccaactggtgatctcggatagggttgcctgctaattataattttaatgatatcattgcttcaggtttttataacttgtaatgggagtaaaggtcaaagctgcagtagactttgaacctagttgagctgttgaaaagttttgattgtagctgcaaagactataataatgttgtgtatctctcacttcactgtcatatggctttcttattttccaactagtagtgctaggggaggtgtagcctgagtgcctagctaccaaactagatcctcaaatagtcataacgtcgaagaagaaaactgatgttagtgcttgctctatctttttgaaatgttgttgtgaactttaacttttgag

SEQ ID NO: 7731 - DNA, 619 bp, Zea mays
  Intron number 1 from transcript AC212367.3_FGT003 (locus A C212367.3_FG003) derived from phytozome v7.0 (chr-ID 3; po s 127659747 to 127660365)
tgccgggttggctcatgcagccagggagagggaaaactaaatgggccacagaaggcaaatgggctttggattcaaattcgattcaaattcttataacttttctaatttctagatttcaaattcgattcaaattcggctttggattctagctttaaattcacaaacgaaataactcagcaagaatgcaaagtattcaatattaatttattggagcaattgttttaattatgcaatgcacacaccgtatttaccttaattattttgaacatggagtcaaattaaaagttcattcaaaacctaatttggaaaaatatttattgcaagattctttacattaaatattttagagaacatttatacataccttatttaatagctaacgtcatataaggatcctctaattcgcctttcccatttttttaagcctcggattcaatgtcttgttttaaaagttcaaaaatctaggtttcaagcatctattattatcatttgttcatttaagaagaatttttattgaaatgtgtagaattcctttttaatgatattttaattcttaatattttttacagtcttttctaaatcaccaaaatatggttttaggtgttacattctacattcg

SEQ ID NO: 7732 - DNA, 551 bp, Zea mays
  Intron number 4 from transcript GRMZM2G316815_T01 (locus G RMZM2G316815) derived from phytozome v7.0 (chr-ID 3; pos 9 9253253 to 99253803 reverse strand)
gcagtctattggttgtggggatttggatattgaaggtatctcctgtgtttaatataattttctttttttcttctgttgttacaatcatgcaacttttgatcattgtagtatagttgtcattctattttgtctatttttttcttaaaagggacacacgaccatgctctgtttgtataatgatctaataataggggatccattagataatatggcatgtagcattactatgatatcaaaactttaattcacatttgtcattttgttaacaatttggattacttttgacacattgtttatttggtttggatggtctattggttcatcaacttagcagttcacttcatagctctatgtgttagcacattgtgtttgtgtgtcttaccctataatggcccttggcccatgcccatgtattgactatatatcaacttatcccatgcccaattagggttagggtttcactttccaacatggtatcaagcctctctcctctttccttcctcctcccaccctctctcttagctgcaacaatcgttgaccttcttcgccac

SEQ ID NO: 7733 - DNA, 1053 bp, Zea mays
  Intron number 4 from transcript AC191287.2_FGT001 (locus A C191287.2_FG001) derived from phytozome v7.0 (chr-ID 7; po s 80305317 to 80306369 reverse strand)
agagggggtggcacatccactggtacgtccatctcgatccacctggtgctttggttttttagtgccccgttcttgagccacggcttggtttgcttgctcctattttgcttggttaggaagtctagattgcttcggcaaatgcatcgtcttgctatgttatgtgtaatattttctctattgtgagccctgaaatcaaaatgtttctcctgcgtttgctgccttcctccatccagttccttgtggatttgcttcttgtgtgttgttgtgctaataatacctatttaattttgcaatttcttgggtggtcaagttctgcacctgcgtgttgtttcttcgtgctatcatagttcatgaagctaactttgattttaaattggcagtcttatgggtccagttggtacccgattgatgttttatatgcttctaacagacaaagtcatgccatagaaattgtgtcagtcacaacaacttagtgtcattgctatcataacataagtcatactatataacttggtgcttttcaaaatgaaatttaatggaatacaacctgggcatgacttttcatactcttttgaactgatatggatgcacacttaggaaataatggcacctgttacaaaaattaaatcaaaaggttagccaattcaacttaaagcaacaacttcccatggatgttggtctcatgatgatattctagtagtcttgaaaatagagatgccacacaactgatgaatgatgaaattaagttttgcttaaaaaattcccatatacataattgcagacttgaaattaagatagtagaagtaatattctataccaacttctacagtcatccaagcaccttaccacatatcatctaagctttgaaattcatagcttagaagttattgttttccccaaaaatatgtgtaataccatgtagttttgtggctgaattactaagtaacttaccataacatggagttactgaattgcttagttggtaactagtatttgtagctcttgttttgtaatacagcaatctgaaatacaatttcccttgccgaaacattt

SEQ ID NO: 7734 - DNA, 718 bp, Zea mays
  Intron number 2 from transcript GRMZM2G127665_T01 (locus G RMZM2G127665) derived from phytozome v7.0 (chr-ID 3; pos 1 96139290 to 196140007)
aataaagtctccaaaacaaaagatttggtccagaggtaaaaatgtctgaccaaaggctggcattcagataaatcagttttatgtttcaaataactcataaatggcatttaaattctagcagtgcaaagaacaaaatcaaacaagataataatcagttttgtcataaattattttttagaataaaaaaatgtttaagaactgtataagcacacctacaattagcaacctctgaagatttgtatgaactaatatttatgtgtaaccatgacaacatcacacgttagacccttgaaagaagccatatcatgtttccaaatattaggctaaatgtctgaataaaagaagaaaaaacactaggtacagttttttgccaagatagtgtcgacgaggaaacaacagacacattgtaagtgattcttgcagtaccaatattcccatgaacttattactaaagaagatgtctttgtgatggtacatttgtccatatttcttaatcatatatggcacactgtacattttccctcctagtgttttggaatccttatttatggtactaataagtagcattctaatctgcatatggttgttttgttacaaagtcatattctatcaccataatttattaaagagaaaaatgtttggttgcacaattacaagcttgctttgtttgattctacttgcagcgcggccacacgggcccaacaatagcaacgtcaca

SEQ ID NO: 7735 - DNA, 692 bp, Zea mays
  Intron number 4 from transcript GRMZM2G127665_T01 (locus G RMZM2G127665) derived from phytozome v7.0 (chr-ID 3; pos 1 96140514 to 196141205)
caagtggaggatttggtgacatgttttgctgtgaagtttgcgaaccatggtaaaccaacacctattgctttgatataatcatctcgatcactggttgatgtatttgaacaggtatccgaaagcctctgtcaccttgtcaaaaaattgtctctttagtatctttgttgaccgtcttgcttttgttgtttataggacatgaatgatggcaaagttgtatgcgtcgttggatttgcctttctgtttgcagttgatgtaaggaaatgctatgctgcaacttttgccacttttgtgttatcatgataagcagtgcttcccggctgggaaatgaaagtcttggattgtctttggtggtaggtgacatcaaatccttgtgtttcttgtgagattaatttctttcacacgaaaaaatggcgggctacatagattattagttatgcaccagataggaaatgcacagactttgtaggtgtgacaaagaggcaagataatatattttgtggatgtatcttagattttacaatgctgatgaggtggcgccttgcattttgcgacatggttagtgggtctttctacgtggattgcattatgcagggacggctagttccttacccaaatgtggttaaagttaggaacagtcttctccctgaaattgatttagtgatttcaaacagacttatatgtgtgttgcaggt

SEQ ID NO: 7736 - DNA, 740 bp, Zea mays
  Intron number 2 from transcript GRMZM2G007590_T01 (locus G RMZM2G007590) derived from phytozome v7.0 (chr-ID 9; pos 1 36905772 to 136906511)
gattgcaagactttgatttctacggcaaaaaagtaatgcatccttatattatttccgtgtattgcaagactttgatttgtacctggtcatttggtttggatgtttgagtatagcaatatcctactttgagtaccgagccagacattattgtatggtaggcctgcaaaagtttatgttctgcaatttgctccgcaatttgttgctcagttgagcatccatatgttgtcgagactcgagacatccagtgacacataataactggccagtgctgaaacagagaaggattacctttctcaattcttctaatgaattccatagattgatggtataggcgcacattcttcatattttataggatattttcactcgtttcttcttatatctaaatgaagggcgggcctggtgcagcggtagagcctaccgtctgtaaccggaaggtcccgggtttgagccccggcctctgcatattatgcgggtaaggtttggcgctgaaagatacccttcctcggaccccgcacatcttatatctaaatgctaaacaaccaaaagacatccttgtctagtgctcttggtgcagcgtcttgtttctttacctttaaataaggtcaaacacatatttttcttaccctctgatcacattattttatgaattcaggaatggaggcttaataatatgtgctgtcatgtatgaggttcagaactaactttttgttttttcttccatgtacagcgagtacaat

SEQ ID NO: 7737 - DNA, 761 bp, Zea mays
  Intron number 3 from transcript GRMZM2G347983_T01 (locus G RMZM2G347983) derived from phytozome v7.0 (chr-ID 3; pos 1 34293714 to 134294474 reverse strand)
ttatttactcaagtgtgtttgttaacttgctattgaaattttgcatcatcacaggaatcgaaactttgcatctttttttccaaggaagcttctttttccttctcgattgcgtgcagagtctttcaaaatttcagtggtcgatgttagtataccaatcaaaattgctcacgcgtacagcgtactcccggcgaaggattgtaacggtgcctccccgtgcgaatactgaatgctcacccatccatccttccaggtgaacgatctcatcggtgccggcaagtcgtaccgcatgttgagcgacatcctcgacaaggacatccagaatgactgctgaagaagcagggaagccactcctggaacctgcgcagggtccgtctcggcctcgacctcattaaggccctcttcgagcaattcctcgataccgagtacgtctccttacattcaaccaaacatgaacacatctcatcactaaagtctgaatatttcaggcaagataggccaccctcactgaatctcaaggcctgtatacagcgtatgatgtccttttgtcagtatgtgtgcgatgacaactgcatgatccagaactggttgtcatgtggttaaatacatttgccaaattgccagctggtgctcacaggctattactgcatgtgtaactgtcaagtgctatgatttggacagatagttgttttgttttaaaatgatacttatatattgaccggtggctctgttctttggcacttctttttttcaggggacattgt

SEQ ID NO: 7738 - DNA, 634 bp, Zea mays; identical to SEQ ID NO: 5409
  Intron number 1 from transcript GRMZM2G318849_T04 (locus G RMZM2G318849) derived from phytozome v7.0 (chr-ID 7; pos 1 45382379 to 145383012)

SEQ ID NO: 7739 - DNA, 538 bp, Zea mays
  Intron number 1 from transcript GRMZM2G335107_T01 (locus G RMZM2G335107) derived from phytozome v7.0 (chr-ID 9; pos 1 0057778 to 10058315 reverse strand)
aacaactaccctcgcaaagatactctttacgtgtggtaagttattgaaatcttgaatatcatcaaataacacgaaactatataaaacacaaactgtagcttaagttcttcattcatatataaatgtgacaagtgaactatatacttacggaggaaagggacgaatgtctggaactgtcctattttggtttattctacctgatcccgccattgatcttgtaggaccaatcatggcattattgcaaagaaaacatcattatcattaaaaggattaaatgacaaagtccctctgtcaaacaaatagatttcttttacatcataatgaaattacaagaaactattttgtagaaagtatagactctatctacgtctttgttctttaagaaacctagcatcaaattgaagatttttcatataacaatatttaaagttaaatcataaaatgtaacataatatgtctcatatgtttatctacatcttgtgacagttgctggtgaataataggacagcaagcgccagtgaaatagtaagtacacatt

SEQ ID NO: 7740 - DNA, 827 bp, Zea mays
  Intron number 1 from transcript GRMZM2G119835_T01 (locus G RMZM2G119835) derived from phytozome v7.0 (chr-ID 3; pos 4 0880360 to 40881186 reverse strand)
agcacagaactgattcaagaagctattgacagttggtgaggatggggaaaaatgtttatctttttttcgttaatttaccaatgatcctagtatccctactgaaaatttggtataacgtgggccaaacaaacatttcttttggtttcaagtcatgtattttgactaccttttctgatgttctgataagttctcgtttttgtaatgcacagagtagagagagtaaatgtatgattatgttgactgtaagattattttgactaccatgttacattcttctttgatcatttttgtttgaatgtaggcaaaggtgaaatgcttgtctggtttgctgtccaccagaattgtgctgaaccttagttcataatgatagtgccatttgtattgcatatgctttcacacactttcacttcatagcaatgccatttaacacaactgatgtcgtatagctgagccatcctacaaatttatttatctttatgcacattgggtatgctttcttcaacacagaagaatctgcctggcttaggcaagtgctccctgattttggatgcttgggaggttttaaagtcgagcgactagtaatgactagtcgagaagtagatgcagaggtgatagtcaatatgagcgacttgactttctctactagtcgctcgactcgtcgactagtcacaactagtcgtagcatttgagttaggcgactagtcacaacacagaagaatctctgcagtaatccaagtttatcttactattttaacttagttgcattgcatttcttcgggtctacacatacaggtatcagtcttgcttgcttggatcttttcaaactg

SEQ ID NO: 7741 - DNA, 1050 bp, Zea mays
  Intron number 3 from transcript GRMZM2G346299_T01 (locus G RMZM2G346299) derived from phytozome v7.0 (chr-ID 3; pos 2 26203089 to 226204138)
tgctgctaagaagcctgctcgcacaaatacttgtatgcctcttacttagttgaagttctaaaatatgattattggttttattatgccgattactgattgaaacatgtcttttctttagtagatatgctcgtgcgttgcgatggtgttcatattcaaatgcatagattagaagatgtttctattcgacgaaaataattctatccacatttttttgtagagactccaaaaaatgattaagaaatctaaggacctagatgccattggagaaatgaagagtcgtgtcacgtggattgtacgtatacttaacatgttggctgttaccatgaaaattatcttttttcataaaaggttgatgcttatcttatgataatcggtgagctaaacttcctgaattttaatttactgatagcatatttggttaactttttgtccactggatatatgatattgattgaagtatgttgactatgttcacttcaacagttcagtcccagtaggcaaaaaggcaatgttggccatactgcatcactagaaactagaaagagtatccatcatcggtgaaactcttggatatctatgtttattcgctaaaagtatattgcagatataattatttgttattgcatcacaaactagacaacagttgtgatttttgatctgaatggagttaaagatgatgttagctgttacgccttgccagaaacaagctgacatctatgatagaacttttaaaagttgacctttgtatgcttctgggagcaatatgattgattggtttagttgattcctagaatgtaactacctataggataagcagttgaagtctcatcctccaaagaaagttgaatcggaaatctttcttgagcatatcaagaaagagaaggaggcagcaaaggctggaaaacgaccatactatctgaagaaatgcaatcccaatacctccttcctctcctcactgtctgtctatcttctaatcaaatggttactatctattcctcaacctgatggttgattttttgttcaccagctgaacttcgtgaaaggaagctg

SEQ ID NO: 7742 - DNA, 326 bp, Zea mays
  Intron number 3 from transcript GRMZM2G047867_T01 (locus G RMZM2G047867) derived from phytozome v7.0 (chr-ID 9; pos 6 5960892 to 65961217 reverse strand)
tggcctggtatttctcttgtttctgaaaaacaataatagaaatttgccatgttttttttcttccaacatcttcaggttcacattgtatgatgatataaaacttggtcacacttacctagctaattttgtcaatttgataacttcaaaagatttgatatgcaaaactgactagtgaagactttcaatattggtgtacttgtgtatgtcaaaactattttccccctaaaaggctttaatggtcctacatattcaggaatcaggagtttgatcaacatcttttattatttacaggagaggcccattcattgaaagtggagaagatcttg

SEQ ID NO: 7743 - DNA, 861 bp, Zea mays
  Intron number 1 from transcript GRMZM2G145262_T01 (locus G RMZM2G145262) derived from phytozome v7.0 (chr-ID 6; pos 1 5484845 to 15485705 reverse strand)
gcttaaagctgcagcaaaatcaaccaaaccatcaggtaattccttggaatcttgtattgggatgataagggagaggctatccttgtcgggcggtcatgcagccatgcctaagggttatttctttaagtgctgtcttgcattgaggaccagcagaaattccaatctacagatatgtaaataatacaaagaagtataacttcaggaattcatgtgtaaactgaactgctgtaatgtttaatgaataaatcaaaatttactccttctgtctccgcatcaagtgagtttacttaaacctgaaccaagcactaagtttagacaatgacaaataataatcgcacctgcacgcaacaatatacaacaaagcctgctttgctgacaagaactgtagataaaaatagtaggttacagtagcagggtaccacatgctttacagcagactagaactcatagtaattaaagtttcttttggatagttgtgtaacatttgttccaaggtctctcagccatctgtcagatagatgtagaaaccgacgaatacagatataaacatagtttcttttcgttaattcacgctaacctaaacatcatgtccatgttttcactccaatgaatttcagcaagttatccattaagacttgtggaacctgaccaatataaaataccaaattctaacaaatgtactgttagttagtgtatttatttgatgattagtggagctgaccccaatacatttgatgtctggctttgcccctcagcaaatcagtgccactttaaagataatgttgcttgtacatctatttgccatcatatttagtaaagaaacaatttttatttaatgtgcagaagtgccactaacagaat

SEQ ID NO: 7744 - DNA, 1019 bp, Zea mays
  Intron number 1 from transcript GRMZM2G034300_T01 (locus G RMZM2G034300) derived from phytozome v7.0 (chr-ID 3; pos 8 112331 to 8113349 reverse strand)
cgagagaggtaactcctggccagcttcgtcccaacgtaacggtgcttcgtgtccgccttcgttacttcctgttcccttcgattttgtctgtgtgctagctatgtgatgtttgactacttcttcggttttgtcttggtgccttcatttggaagtgaggggggcggggaacgtggggctgtgatccaggcagggtgccttgatttccaattccaagagagggggtggggaatgtgggactgtaattcagggtgccctgcggttaggttttgtgccaatttgatgtgatgcctttgagcatttgtgcccggtctagagtgaggttcagtatgttgttggttcatgttcttgttgttctagtaattgtttttactgcttgcggtgcccttgcttcgaacatgctaacttgctagggtttgaacagagatccagactattctggtttgttcaaaggttgcgggctccaattaattactgaccggtaggaaatgtagagatccaaactattcttctttcttctttcttacttttatgtggtagtcatgtgatgttctagcagttcctggttttgatttggtgccttagtttgcaagattggaagaggcggggaatgtgacactgtaatttagagtagcttttggtttgcttctgtgtccattcagttcaatagtgaggttcagcaaattgttggttcctgttcttgtggttatactagttgttttacacttctatatcgtttcccgtgctcctgattccaatttgcttacttgctatggtttgaatagagatcagaactattttttgtctgtacaaaggttgcatgcaggcttaccaattattgagcgctaggaaatttggagaacctgagcgctgcaatgctttcttgtttcttaattggcattcttcgctatacacagtgtatcctaaattcctaatttagtcgtttgcttgaagtccgaactaaacatttcgacccttgtccttcaggtgtgcagattagaaccgttcacagcacacaactg

SEQ ID NO: 7745 - DNA, 715 bp, Zea mays
  Intron number 1 from transcript GRMZM5G839588_T01 (locus G RMZM5G839588) derived from phytozome v7.0 (chr-ID 6; pos 3 9351364 to 39352078 reverse strand)
gatatactgaggtgtgttgcgtcctcagcctctccactcgcaccccctcgttaacgtagtgatgacgcctcaccaatggtactcagttcttcacgctcattggctcattgtgttggttggtgtatgccattcaattaatgtaggatgtgcttagcccaattcatactattaacctatgtcctttagtgctatggttggctcacttatttgcttttattttgcttgatctgtatttttaactatatatgacacatgttttctaaacgtttgctcccacagaaaatgaggaccagtcggaaacgtcgctcactctggctgaggtaatggaaaaggcactaggcatccaaaactagcactttcaatctttagaaaatagcaggagtcatttttttgcccgatggagttatcctttgattcagtcagtattttccctaagaaacaaatcaaccatgtggcacctgaaccaccatcagagattgcagacgagcacgatggtttagagagagttttagcgcctatgcaggggattgtggataatgagaaaagtacttcaaaactattgagtggctatgtgtcattaaggtcagcagaggtggggatggcaagcatgctgtgttttagttttttccttttttgcaagtttttcagaaaaataatttcgattttcctatactttttaggtggttggatcaccatttggccgaattgtgaagtg

SEQ ID NO: 7746 - DNA, 853 bp, Zea mays
  Intron number 4 from transcript GRMZM2G005499_T01 (locus G RMZM2G005499) derived from phytozome v7.0 (chr-ID 6; pos 7 4965838 to 74966690 reverse strand)
ccgatattcttgttgctctttgcttttgcatttaggtgagtgctgggcttcatttccccgttataatttgcctacttggaaattagttgtaaattgcactatatccatattagtacagcaggacactcatattctgcaacaatcgttacagatttgccaaaattttttgttgatacagttttatgtttatcctgccttttgaagacaattagttgaagcagccaattaatgctgtgcactaatgaaacatggtagtcttaagctagaaacgtgttacatgaaaccaaaaaatgtggtcccaatgtaaagcagtgataaacccacacttcccttaacccacgtgaggatctggtgtgaacttcaaatggacacagccacacaaattgcctagtatctggatatgccaagcggtacaatgtaaccttttcaaagaagacttgtaagtaagctaatttcgaataagcacacttttttataataacttgtcatatgaaatatttctcaggtactactttaattataacttgtgaaatattctttaagtacacatgagcattacatattcttttgatagttttgttacaattgcaacctcattggatcacatagaaccttctcattcactaacttatttgattacatactatccatttattattttattgcgacaagtttattacagtctcataatattcatttgttttcttaagaaggtggtcaccatggctaactaactaacatgcatgtctaagcattttctcttcttttttattgttttcgatgttatacgcctctaaatgtttcttcctattttcaaggttggagaatcctagcatcaagcttctaggaatta

SEQ ID NO: 7747 - DNA, 1039 bp, Zea mays
  Intron number 3 from transcript GRMZM2G356628_T01 (locus G RMZM2G356628) derived from phytozome v7.0 (chr-ID 7; pos 1 32541602 to 132542640)
cctaatctaccagggcgagattcagaggtacttgggtaaggaatccccttctgagggttgttcatgtttctcttcctgttgtgattcatccgttctttctgttttactcatattatcatctttgatatttcagcagttaatacaattatattacaaaatgctgcagacaagaactcaagaatttgttgttagagcatataaaggcggcaaaaagaaggctactcacaaatcaacttcccccatcttccagcgttatctttatgtgaaagagaacctgttgtctataaggtttctttcttaatattttattttatatcacgtctaactttcttgcagttttcagtaatgttccttaactaattttatttctcttagcacttgtggcatataggatacctgttttaccgtgcttgatttattacgagattagtaaacttaagttaggagaagatccctcgatcatttaacatagtcgggtgcctgggacctaagccaaacctgacatggctgaaagggtttaagaattaagagttcagttggattcgtccaagttcaaattactataatatttgagttcattaaaaacaattgcacttaagccttaatgctgctaaataactatatgtcaagatcgtttctgttcatctgacatgctaaagtattaatgtaatgaactaagcagttttgtaagaagcaacatctacttttgctattttgcaatgactgtatggtgactactaacatattcagaacttgagctccattctgctggactttatatcatctgaaatcttcctttatggccataaagctccctacgtctcattacatataacatattccttaaggtcaacacaatagaaactacacagcaaattaaagtccagatgcctcttttgcagataaagctatgtagttgtttcaagtttgaatttaaaccacatcttcatctgtgcacattcatcttctgcctttggaagtttgccccagttgacatactattgctcactgtttttttgcagacaaccagaaatttgcc

SEQ ID NO: 7748 - DNA, 935 bp, Zea mays
  Intron number 1 from transcript AC214498.3_FGT002 (locus A C214498.3_FG002) derived from phytozome v7.0 (chr-ID 3; po s 118189872 to 118190806)
gacagagggtatgcaccttctacatatttcttaattttttactattattgattaacctacatgttttttggactgaagagattatgttgctatctgggttgaaggtaagcctaaaatgtggttatacacctaggacaatttgtcttattctatcaactatccagttacgctgcaaatggacacctatttattagagttagtagagagagaaataagctaagcatgacatcataataagcaccatgaaaattctatcatgaaaagaataacataagcaacacatgttcagacgtacctaagcatttcagcaaacacatggttgtcgtcgtccatgtcgacccttcgcacagcagctggtgtgtagtgttatgtttgcatgaaatagtttactcactgaacttaacttttatattgataaaacttgatgtttgatattaccatatgaagttccaatgtcatgaagggcttttcattctttagaggtcattttcttcttggcaaaagaagtttactatataatgagcagaaacggtgtattcaaacaggatgtcgattttgaacacacagtcatgctcaaagcaaaactacattttgatttcgctatttcagtatcatgcttttttacttcacatgaaaacctcatcatcccccaaaccaccagatgtacctgctagatttgtttatccctagattcttttatgccaactatttatttcgtttgctgcgatttgagataccaaactgttttttaatttatgtcgtgtagtggcgaattttctttagtaattcgattgtgcagtgtagtgatgggttttctaggtcctcttcctgtgtcatggaactgaaataccataatacagactaagactaacagtctaaaatttttgtgaactgaattgtctgtcctgttctctgtcattgtagaaggggaagaa

SEQ ID NO: 7749 - DNA, 785 bp, Zea mays
  Intron number 1 from transcript GRMZM2G125516_T01 (locus G RMZM2G125516) derived from phytozome v7.0 (chr-ID 7; pos 1 7519080 to 17519864)
agcgcctcaacaagccggccgtcaagagcatcgaggtgctggtcgctccgtcgtccgtggagttcgaaatgattgctctttcttctgcgtgttctgtcgagctttgcctttgccacgaagggtgggaggggggggggggggggggttcaaattcaggtttctttccagctagatgctttgggcggggacctgttcttggggttattagatttattccccattttctggtttcatacctcagttcgtttttcaggatcgaaggcagttcctccgcattattcaacaacgaaaaaagctacttttgtccgattcttttgggctttcctcgctggtagtttttcgctgtcactttggagaattatctcaaaagttctcgccttttggaggtagatagactatgcaaatccaagcaaatcagagtgaaaaagaaaaaaaaagatgaatgggtcttgcttggagacaggctggctcttgcaaagtgatgctctcttagtgaaaaagggacatagccttgcctttctgagcgttttgctccggctccagtttcagcaattttctgagctcaacgaacgtgccgagctccagaatgtcagcttaatgctgcatatttgttttttttctgcatttctttttaagttttgcaatcttggagtttccttttgaatgaagtagacactgtgaaaaatcgaaagaaagttgacatgagcattgcttttgggagaacagcgctttttttcttcttcccatttgacactgatagaagcctctcactcttcagagtccag

SEQ ID NO: 7750 - DNA, 527 bp, Zea mays
  Intron number 1 from transcript GRMZM2G079807_T01 (locus G RMZM2G079807) derived from phytozome v7.0 (chr-ID 3; pos 3 0010380 to 30010906 reverse strand)
gatagctcctcggacgctcacgggtgagctttctttcacaaactatatgcatgctttgaggtaaactctaccgtgcttcggacacctgggttttgttttgtggaccatttcgatcactaaaatctagctccatgcatctgtgtctgttcgaagtcgttttttcttgtttcaatggcaatgcctactatgattttactagaaccattgtggacattattatcttcactcctaacagcgccctgccaaggacatatgctactgctactctaccagtcaaaggcacttttttctatggccggcctggctgtgaaatctatggccggtcattttttcttcttcgtgttagaacaaaatccaaatagacttgtatttaaagaccagcactttgaacttgtgttaggaatcttgtataaaaaaaagaaaagtaaaaatacgagcggctccccgtctactcgtaacgtacagtgtaacgaggaatgacttgtttggcaggcgtcacaggtgcgcggcgtgcttccggcagttca

SEQ ID NO: 7751 - DNA, 947 bp, Zea mays
  Intron number 1 from transcript AC194344.3_FGT011 (locus A C194344.3_FG011) derived from phytozome v7.0 (chr-ID 7; po s 173484181 to 173485127 reverse strand)
aaggaagaaggtgtgctatcgcaggtttgtggcaagaaattagagagagaagtatggttttcagatcctttgatgtttctttcattaatagagagggaaatgaggtaggtcacctttgtgcaagtaaggttgtagagttggctcgtgctttattttggctagattgtatatgactttgaaccagtaataaagaacttgtgttctgcctaagaaaactggagttggctcgagtccaatcgatgtttataggcgagtgcataggggtaaacattgaaaaccccgatgagctatgtagtcaggcagccgttgagcatctgcttagttgctattaagattaatgttttcttgccatatagctatacattacatttgtgatgaaccttcatattgtaatgcaggagacttacgagtaggagatggttaggaagcatggtgaaaactatgattggtgaggagcgcctactattgacgctgaagttatgcattctattggttaaagacccatgaacagtatgaacttgtgaattttttcaataagattaaaattatgatcgaatagctaattttcttgtttttcaagccattctatgtttaccattgtgatcgattcaacgaagttgcggtctcattgggggctcttcgtcatagatgggttgtggtagcagtcgtagtcggagctcgagcatgaaggagattataagggaccaccaataaaggtttcgtgaagagctacgacaggagcaaatgacattcatctgacaacaatcagagtacatggatgcttacaacacacatgtgcaacaagcaatgaacatgagtgtcttatttattatcaatactgtcatatttttggtctataactaatacacgtactgtatttgaaacagtcctggtttccagataagtcacaacagcaaccattcgtttttcctgaatttcagtcgacg

SEQ ID NO: 7752 - DNA, 798 bp, Zea mays
  Intron number 3 from transcript GRMZM2G157345_T01 (locus G RMZM2G157345) derived from phytozome v7.0 (chr-ID 6; pos 1 55230715 to 155231512)
tgttgttctgaagacctccacaagacaagtgagcaatctgttctctgctcatcagggtcatgtcttttgttgttctttttttgtgtgtcctatgatttctacggtacctctgttgtgttttgtttgattggattctctggtttatgtgatggaagttaaccatgtccagtccagttactcagtcagttcatgggagtatatatgattcagagtgcgttgagctgcatgctatgctgatccgtagcagagtagcggaaccgggaaattgctctcagatcactcggtgaagaactggagatgacttcaagcagtgaaatcacgttgtttctgttgataattcagacgaaatgtggctcaaacatctaattaaccattttcctcaatgaaactgcccccctgatcctcctacccaaataggagtgtggtttcagacgattcatgtaatgggtatatatacgtgatatgtttgttggccataaaaaatgaaacgtgcatggtctgatggtagcagacaaatttacgaccaatcaagtatcaagataatgaataatttgtattatcagctagcaccaaagtttggttatctctgcgaatttcttgaaagcttatactcgcatgagtcaagtatttgtttttttaacacaaagccaagttccgtttcttaatcatgaacacttgtgcacattagttttggctgatgaccgtcttctcatgggcgcttgctggtgtggtttgctgatcaaaatggggtctttccttgcaggtacactggacagcagtgtggcttgctgagcctgc

SEQ ID NO: 7753 - DNA, 903 bp, Zea mays
  Intron number 2 from transcript GRMZM2G170035_T01 (locus G RMZM2G170035) derived from phytozome v7.0 (chr-ID 3; pos 2 130094 to 2130996 reverse strand)
tgttccaaacaatacattggaattccacttacgtatgttctcttcctgtttctgcaccgtaattacttcctctcattcataacgctttgtatagtctctcaaaggcaccttagaaattattcctatgtaatactgttttctatatttagcagccacttttgtcgtagctagtacatgtaccgtcatacactactaaagcatcctagtaaaatacagatggtttgcaatggaaaactttggaaattaaggtacacatatacaagatttttttttccaaaattatcgttccatttcacttcaccagaggaacacaagatgtatgctagggatatatttttgcttgctcagaataattaagtactataagaactggtgcagcggtagagcctaccgtctattatgcgggtaagacttggcgtttaaagatacccttcttcagatcccgcacaatgctggaagtgtacgacactgggtatgccttttttttataggaattttgatttttgaagttcattatagccacatgcttctcctatatattcaaaaacttcgtcaagccataacagtagccacaaataaacccattcatggaagctattaattttaatgctactcttttcttcagtctgaattatgccatattttcatccagtttctgaaattgttaagagtattagaagaggcaaaaagatgtcccattcaacgcaatggctgagctcatgctaaagatggaatatgatttcagaccctgatagtttgtcgatcacttttgatataaatactgaacattttgtttggacgcacatgcatcttgtttgttttttgttccttgatcactttctgagggttatcttctcttctgtttcaggaagaggcagaccaaccttggattggccaacaaga

SEQ ID NO: 7754 - DNA, 838 bp, Zea mays
  Intron number 1 from transcript GRMZM2G369652_T02 (locus G RMZM2G369652) derived from phytozome v7.0 (chr-ID 3; pos 1 50270779 to 150271616 reverse strand)
ccatcgtccgcgtcgtcggcaagtttttcccgggtgcgcgaatcgaccacgtagttttcgttaatccccccccccccccccccccccccccccccccccaaatacacacacacaaacaaactacaattgcaatccttcaccattcttttaggttttttttgttaaaatcatgattgggatgcgctccttaatattatttgataatttgtttaggtgtgggattcccagtaacgattggaaactagatcttttcctggtcgatagtatatacctgctttgaggtgaaattttaggtgaaaccagaatctcatccagcaagtacctacagtaacgatttatgttgcagattgagaactgccgaccgacgtctatttaatggatgatagatcagccaaaatgtcttacagtttgaaatggagggagtagcctttttttaactcggatacgtgtgttatctacttatttaaaacaataatcggatacttggctcgtttggttgaatttatcataaatttattgtaccaagatcaagatctgatgtaggctgtagtcttcttcttcttcttttttttttttaagctcttctacagctctacccgcaaaatgaatatcttcttatggtcattctaaatcaaggatggttgatcattctgctcgctgagctgcatgaagttattagttccagccagtatatctgtagacctgatcagtgttctgattctttcactattgctattgacaatccaacaagcggaataaggctttcatatcttcattatcctcgtgcttcattgctacaagcttagtcttattgcttccgagactattcttggtgtca

SEQ ID NO: 7755 - DNA, 1047 bp, Zea mays
  Intron number 1 from transcript GRMZM2G019225_T01 (locus G RMZM2G019225) derived from phytozome v7.0 (chr-ID 6; pos 8 273436 to 8274482 reverse strand)
gcgacagagaaaccctagggtacaatcattttggtcggttggtggcatcgtgtttcttcggtggaggtcaacctttaatcaaagggtacatgacctaaataaaaagtgagttggtagtataagtacaattttgtaaaatctagagaagtttgagccagttgcgctacattttgtggcttctcttgtctagtaaaaaatagctctgccgttttaaaagccatgtttgtatgtctttgacatttttcaaagagaagtcagagctaaaactccgtcaaacatgcccttagatgcattgggagattaacgccctaaaatagattattttttatttttttaattatatatttttaaaagtagtttcaaagaagttaaaataaaaaacattcacaaccggacatatatgaccccacacgtcagtaagctccccctcttccctggcctgtaccccgctagcgtgctgcagctatgctacggctactcccctttttctttcccatctccgatttcaaaattcaaaagtccccttcctcactcgccttctctcttctccacgggagcgaggccgaggccgagacctcgaggcggtcgcgtggcgtctcggaacccgggaggaatccacagaaaaatccgcgcgtggggggccgaatctctgctcctggggcgagccggcgaggcaagcatccgaagcactgccccttgtttgtttccgtcctcctccacgactccacattccgctgggcgctgtccgatctcctttatttagtggttacagcgccactgccgctactgatagcgccagtcgctctctgcctcattattctcaacgccggcggccaccgcggtcgtggctgcggtctttgttggaatagctaggttgagctgattcggggctgtttgtgggcatacccaggtcgaactgattcgaggctcgttctggtagagtggaatgcgtcggatttgagctgcttagggttgggattggggggtttcggtatttctttttcttttttagctgcagttttcgtccctctcctgtggccttccttt

SEQ ID NO: 7756 - DNA, 765 bp, Zea mays
  Intron number 1 from transcript GRMZM2G096470_T03 (locus G RMZM2G096470) derived from phytozome v7.0 (chr-ID 3; pos 1 82088180 to 182088944)
cgccctctccttctccaaggtctggtcttgtttaatgctataattgctagatcagtactaacactggcaatgcaatagcactaaaggaccaatttatttagctactccatccttttttttcttgtctggttatctgtcattgcccccagttaggaaaacccttttgctttcccattttcaaatgcaaatagatgcgatttgactagtcttttcattaggcgtattccactcatttgctgttccaacgccaacttgatattgtttccaaacatttttcctcataggaccccaactcgagatgcatcaccaggccaagggaaccaagattcatcgcaggagttccagcctagaagaataagcttgcttgccccattttcttccctcggatggcgagacaagaacaaggtatattcttctggcaattggataggaatttaggattgattcaatattatagaatgaagtaacacagttataacagtaacttctttacctgaactcctaagtggcaaatgtcataatatggttcctccgatgttttttcctctttgaaaaatataacagtcccttctttgtataattacttctctagtagataaaatatataggtacttggagtgttcttgtatattttgatctgtatatgaactttaggtcttgtctcttctcccttgcctttctttgtgaaaagaaaggttctgctttacctgatctcatgtgatttctgtaccctgcctttcgcatagggcaagcagaacggctctg

SEQ ID NO: 7757 - DNA, 493 bp, Zea mays
  Intron number 1 from transcript GRMZM2G051043_T01 (locus G RMZM2G051043) derived from phytozome v7.0 (chr-ID 3; pos 4 160965 to 4161457)
cgttttacgttgggtttgggcaccagccgcgcacggtatgatttgattcgtgacgcgctccttttgttcttcttgacttggttcttcatcggagagcgggggcgcttggatcggtgctgtgtgtaggatttggttgcttttctcatagtctgtttggtaaaggctggggttttcttccttatgtctgtgtttaactgtgatacctgttggtggttcccgtagttggcgttactcttttggcggaggggaaggttccccctctttttaatgtaaaggtttgatcttgacgaagtgccaacctttagtgggaccgatgatgcacaattttgttctattgagttgatctgcttttatagttttatgccatgcttcccctaagattactcctaggacttactagatgatcagatgtttgtaagtgctaatattggacgtgttgatcccgttgagaagtatatgatgcaagtgttttttttccatcttcagaggggga

SEQ ID NO: 7758 - DNA, 487 bp, Zea mays
  Intron number 3 from transcript GRMZM2G554475_T01 (locus G RMZM2G554475) derived from phytozome v7.0 (chr-ID 3; pos 4 0915800 to 40916286 reverse strand)
caccatctgcactaccaaagcaatcccagaacaaggtgagatggttgaggatctatgttgtgttttcttacaagattgtatcctgatcggttattgtggttccactatttgttcttctggaatgggaaacatcgtaccatcatttttcttattttctatttgctgtggtgctgtcctgtgaatataatggactacatgaccatttgatgttggagtccctttgatgtttgtacaacctttggttctaaatttgatctagtgcatggttaatcttctagacccttagcatgttcgaattccaaatgaaatttcgatctaatgcatgattaatcttctagctctttagcattttttaattccaaagtttcatttgtctagtcccatgctggcactgtggtgtctaaattcctgaatggaatttggtcttcataaacattcaattcaatgttgtaataatttgtttcctttcttcgatatgtgcagattg

SEQ ID NO: 7759 - DNA, 621 bp, Zea mays
  Intron number 2 from transcript AC194387.3_FGT004 (locus A C194387.3_FG004) derived from phytozome v7.0 (chr-ID 7; po s 59335355 to 59335975 reverse strand)
ggactgcatcaagcgccgcatctgcaagatcaaaggtgggtcgttttgttcgccatgtaccgcaggttagctggatctctacgtcagtgcttgatttgatttgtttaacttcccttgtcgtaaaagttgctcagatcccatgtagttcagctttgttttcttatagatcagttggatctgaaggcgattgttgctggtagtagtagttgcataattatttttactctcgctgagttcagatctatcactatatgtccgatttagtcttgggacagagatccgctagtttttaagactctatagccttacagcctggtgccttaatttttattactcggcactaaaattatatacaaatgtgtttttagatccatgatatgttgtctgtctgttgttcgtagtcctagatatcttcgttttgtcactactaaaaacaccgactggttctgatgtactgctatttattgatctgatattttggtcatgtatgtgattggtgacttgggctttactagagaaacattcgtggtatagttttgaagagagaagtgagtcataaaattagagatatctgcattcattgtgatctatctttaacacttcatttttactgtagacatc

SEQ ID NO: 7760 - DNA, 613 bp, Zea mays
  Intron number 8 from transcript GRMZM2G366797_T01 (locus G RMZM2G366797) derived from phytozome v7.0 (chr-ID 6; pos 1 65031012 to 165031624)
aggtacttcatgagccccttccaaaatcccgatttttttcctttgatttcaacccttcattttcctttgcttcgtcctctgctccaatgcttcaggaatatagatagtcagaaaaaacagaaaatgagcggaggggaggcatcaacatttgttagtagtggaatattcgatgtcacctggttggacctcactgataaccagttgaccggacctctcccaacctccagagataatggaactagattggaccaccttcttaaggcacaacatttgttagtagtgtcataaaatgacatctgtttctgtcccttattctttatcgctcataaaagataatctacttctactgttctttctagccattttaatcaaaacatgttggaaggttcaatcccaatatctctctccagctccagcatgcacctcaaacaaatgtcagtgactcagatcaaagatttaacctttgcattgtgatttactaggaattttctaacaatgctgccttttgtcgaacctttttgacctaaacagatttattggctagaacatggctacatttgtatatggcaattaaatattttgatattcttcccttttcaaacagctgggtggc

SEQ ID NO: 7761 - DNA, 1006 bp, Zea mays
  Intron number 2 from transcript GRMZM2G301096_T01 (locus G RMZM2G301096) derived from phytozome v7.0 (chr-ID 6; pos 1 36649216 to 136650221)
aggtgaccaagtaccaggccgcacagaactgcaaggtacgtatgcacgcatggttacatttactatagaactggagttattttttgatgcaaaggctgccaggtcatggtgatttcacgtccgttaggctcgagaggtggactcaaacatccaagttttgcaagttttgatgttggatgttaaatttctatgctcactcctcgtttggttattgatgtactatttccatctcatgtcacaaatttggcataaggaatgggtattggtggctattgactatgtttgtttccacgtattatacatgtacaatggaacatttgataatagttttgcatgaactattggcgttggctatctaaaaggacagaaaggtagacatgagcaacagatctcgctccatgggctgaaactgggattcgtgatggtcagctaagcataccttcgccttcaaatttgcgtagcttcttttttattctgcaagttgtttggtctgccgttcaaatgccttattattctgcgagctgttttaagattgggcctcaattttttttccaggcagaaagtgctactgccgctctcaactgtagcggtgtggtactgggatccttgccaataaggtaaaactctgactgatcttcttacgctttgcattgaggaaggagctcttctgggcggttggatatcagagtcgttctagtgtgttttcagggtgagcccgtccaaaacgcccgtgcgtccccgcgcccctcgccagctgatgtcgtcctaggtatacatacaggaggtgctgacgatgacactgctcatatataagtaatagagatagacatgtatgaaaagggtcttttgttttcaagtagtgtgtagttgctgttacttttaacagctaatgcaatctgaatgagtcacctatgaatgccatactggaatttgttgcgcttttgttgatcattattatttttacaatctaggctaggggattgaagaagcacttgaagaggctcaa

SEQ ID NO: 7762 - DNA, 685 bp, Zea mays
  Intron number 1 from transcript GRMZM2G560571_T01 (locus G RMZM2G560571) derived from phytozome v7.0 (chr-ID 7; pos 1 74280855 to 174281539)
caagcgaaggaaggcagtgaaccgtgagtgcctgcctgccttttttgcaagccttcgctgcatttttttattcgttcattcattttatgttttttttccttcagaaagcgagggagatgaacagcatccagcactcactctcccgttccaaaacgaaaaatcaatgttaataatacattaccctctaattaaaaaaatatgatgatacacagtagatgtgcagacggagtgacgtattgtacggccgctgcggctgtgctgacccactcaactgaagagagagagagagagctgtatgtcgtctcattaatccacaaaagaagtcgtttgggcttttctgctccagatttttatcaagcagatcttttgttcgttggggaccgcgacgctcaaaacaaaaggttttgttgggttaatcgctttctcaagcggctttaggttggaagaagggacgagcaagattttgcagagaactcgctatttaggctctgtttatgaggggttgagggctttattttaaaaattatagctttggttttctagcttcaccattaaacaacttcaatagatttataagacagttcaagagtgtttaacttgactccaccttctgtaatataattaatttgtacgagttttcttaattacacatgatgattagtgggtggagcaagagacattaatc

SEQ ID NO: 7763 - DNA, 826 bp, Zea mays
  Intron number 2 from transcript GRMZM2G166706_T01 (locus G RMZM2G166706) derived from phytozome v7.0 (chr-ID 7; pos 1 39212099 to 139212924 reverse strand)
atagtttactacttcagttgaaaaccattgctttggtatgttttcaactgaaatggctaattttgagcttttcaaatagaacaggagtagatgaaatatgtgtcagaatttcaatagttttgatattttctccaacttttagtttgtaaagcagtttttacaatgagtccagtttaatagcactaataataatataggttgcttgatgtgcttttttctgcattccattttctccatcttttagtttatagagcagcttttacaatgattacagtttaatgtcaatgatatactacaatgaattccctattgcactccttcttgtgtaaattacgttgtcttaactattgatttgctaaaacgtttcttatagttttgtcataaacaaataaaactctttccattttatctgtcacactgtcaccttagtagcagtttaactacattgatgatagttgtgcattacccaaaactgacactgaatataattctccctcaaactaagagtcgcacaacaacatgggtgttgttgctgatgtggcaagtatgagtaatgatgaactggtggccactgatgcagctagattttttcttcttctgttgctgctgctcagctcctgggcatgtgattgaagcacatcgatgatgcgctgcataactaacattagaattgtactcaaagcagatctatctaaattgagatgaggcctgatctattaaaattgttgctgttgatgaactctcttttatcggtctgtggggattgtttttagataacttttgtgattagcaagtgatgattccttgtaatcttgtttgcagcgga

SEQ ID NO: 7764 - DNA, 696 bp, Zea mays
  Intron number 1 from transcript GRMZM2G175272_T03 (locus G RMZM2G175272) derived from phytozome v7.0 (chr-ID 6; pos 1 13793433 to 113794128 reverse strand)
ggcctcttctggatcattggtgtcagtttttacaggtagctgaagtcaaatgcaatttttatttcattaatttgaatctcagagttgaagcatcaggcgttacttgtatcatagttaaagcataaggtgttacttcctcctcatcttgagctcttcaaaattcaggtcagacacaataaagccatatctagagacacatggtcccagctgctggaatttgtgaaggtacttcactactttgtttgttctacctcctttgcatgtggaactccagttgtggcttgtgggctaaattaggcgcccagttcaaatgcaaatgtattgcatttaggtggtcagtttatgctgccacaatctggtagagaacttcaacgatatgattgagaggtatttccatctgatagtgaggtgtattaggcgatgagccatgactttagtcgttaggtagttttaaaatctgtggtttaaaatctgtggtagccttgttcgtccaagctaagctctgagcagctgaatcgctcagaagcaacatgcagttttgttcctcatcagtaattcattatgtctcctattaagttcaagaggtttccataattttcttgaagaacttgctgtcatgttggctttttcaaaattttattattgttttgttttcttgcagacgaccgatccacagttatccaactacgacgacga

SEQ ID NO: 7765 - DNA, 1051 bp, Zea mays
  Intron number 1 from transcript GRMZM2G123953_T01 (locus G RMZM2G123953) derived from phytozome v7.0 (chr-ID 6; pos 1 02947710 to 102948760)
ctcaagaacgtagcagcttaagaaccccaagctgaagaaatgtgtacctgtttcttatcgatttgagaatcctgatggtgatcagcgatcgtgagcttccatgttatgtgttgtgatacttgagacttttattatgactatatatgagatattgtctattattatgactggatgatatgtgtcttattttgactatggatgagacttttgtgatgtaattgatgagactatgaattttaatattgttatgtgattgtgagtgagatgttttatgtgaaaatatattgtgctatatagttgttgatatatttgttatgttgtgtaatgtggtgtaaaataaaaataaacaacatttgtaatattggtcaaattaacttcctagaggccaactgcgctgtaggaagttagccagcaaacttcctaagggctacagtcagccgtaggaagttagtcagctgacggcactgacgccgtgaagctactaacttccgagaggctcctttggctgtaggaagttagctaacttcctagagggctctaggaagttaagctaacttccgacaaaaaattcccgagagccaaacttccgacgggatggctttacttccgagggtttagctaacttcctagagtttacggctaacttcctagggtttaggctctaggaagttcactattttggtgtagtgtgaatagggtgaatctgaaatttacaaactttaagcacaactacaagccggggttagcgttagaaatataaacgagtccgaaagagagggcgaaaacaaatcacaagcaaataaggcagatgacgcagtgatttgttttaccgaggttcgattcttgcaaacctactccccgttgaggtggtcacaaagaccggatctctttcaacccttttcctctctcaaacggtcacttagaccgagtgagcttctcttctcaatcaaacgggacactaagtccccacaaggaccaccacacaattggtgtctcttgtcttggttacaattgagttgaacacaagaaagaagaagaaaagcaatccaag

SEQ ID NO: 7766 - DNA, 457 bp, Zea mays
  Intron number 1 from transcript AC201969.4_FGT005 (locus A C201969.4_FG005) derived from phytozome v7.0 (chr-ID 6; po s 64640067 to 64640523)
gtcatttgcgcaacacgtggcgacgaggaggacctgtgcgatggtcaggcgctgaagaggagggcacgtcaaaaatcgacagcagtcctcatgaccagtggcggaggacgccagaaaatttaggtgttgttgtcgcaacgaaggaaaaaattatgacacaatttaaaaaaattatgacatagtttaaaacaatttgtagcaagatcacaacaagctttgtactcttcaattcttcgtacatgaataataaaagttcttatctaatcttttatagtcttgcaatcatcaaaagaaaattcatcagaatagatatacgcgagccaagcaagcttatccacatcaaacttagagaacaaattaaactttgattgttttgaaaaaaatgatgagaataaaaaaaccaacacaccttgagtgttcaggtttatcaaaccagttaatctcttggcacattaaa

SEQ ID NO: 7767 - DNA, 810 bp, Zea mays
  Intron number 3 from transcript GRMZM2G032847_T06 (locus G RMZM2G032847) derived from phytozome v7.0 (chr-ID 6; pos 1 57863683 to 157864492 reverse strand)
ccaataagggctgggaattccgtggtgtgcacagggtatggacataaaactggacatcctatatcttttatatgaaattctgcccgttgttttgtttttgaggagcactattgtacagttataatctgttctgcttttgctaggccatcatctgtggcaaagttggacaagtccctgtgcaaaaaattttaaggaatgggcatacagtaaccgtttttactgttggaactggtggcatgtttgaccagagggtaattgggcctaaggatttgccaaagccagctcagtggcaccgcatagctgtccataatgactacttaagtgcttatgctgttcagaagctggtgaagaagtatgtggtttaataaaaaaatcctcatcttaccttgaatacaactatatctatcttttttgctatggatgctgttatatatatatatatttttttttcttttaccttgtgttagttctgctgtctatgttgagggtgatattgaaaccagggtctacaatgacagtgttaatgatcaagtcaaaaacatacctgagatatgtgttcgacgtgatggtatgctgattcgcacaagcttctttcctatcatgtttattattgagactgtattccacataagtagttttcatatgtaactcaacagcaatgacatttttttacgtgataacatagggtgtccttgtatggtaggttacatctaccttttattttcatgtctccgttgaagaaagcctaatgtttggataactattctatgtgcaggcaagattcaattggttaaatctggggacagtgct

SEQ ID NO: 7768 - DNA, 938 bp, Zea mays
  Intron number 1 from transcript GRMZM2G071869_T04 (locus G RMZM2G071869) derived from phytozome v7.0 (chr-ID 7; pos 1 23064240 to 123065177)
tcaccactgccaggttctgctcagcttcctcccaggtccgatgaatcttgatagtcgaggggatttgtgcaagtgttttgtttgcgcttatgtcacattatggcattagcgatcatttctgttcaaaatcttactgtaaactacaataccaagagatggaaccattgaggtaggcagaacatgtactgctgaagattgagaatttgaaatcgccttggattcagaagcaaataaatgaacgaggtttcctttatgttctgtttcttgtttggattcagaagaatgggaaatgtgttcattttgtaaaggaatcagtagtacatctgaagagtgcaggtgtgttcgcagttcttatgctgtggtgctgctaccttcgtaaatatgcagcacattttcacaccgaccagtttttttttgtgtaccctacgaaccaaagtaatgtaattatggtatttggtaccagttcagatgacatataatttgttaaagattatggcgcagtgagtgaaaataatcaacgtttcttgagagatgtttggtgggataatttcgatcctcatgtcaaaatgaaagacatataccgtgcaatcacttatttggaggaagcctgtaattaaactattaagagcatctaatttatatccatcgttttatatggaagtggttaaacgttaaatagacactaggttttagatgaaaaaagattaaatataaaataatagtcaccattagatgtagattgaatgcatatgatattttaggtggaaaaggttaaatataaaataatagtcaccatttgattgtacgtttgcattagtacaatacaagtgattgcataggatattttctaaatccaaagtgaaacaaacatatcacgggtgttgtcggcgtttcgagacaggggggtccctaagccgacgagtgagtgtgctgcgtgc

SEQ ID NO: 7769 - DNA, 471 bp, Zea mays
  Intron number 1 from transcript GRMZM2G032676_T01 (locus G RMZM2G032676) derived from phytozome v7.0 (chr-ID 6; pos 1 48093526 to 148093996 reverse strand)
aaaaaaagctttcggttgaaacaacaactaatcaggtgaaagatgttaaccgtatctgtttattcttcatatgatacagcatggctatgcccagttctcattctggatcgtagtcatattgatggcaacttccttgcccctaggtgccccataggcaagcttaacagacacatgacatcttgcaagctgcaattgttgttgagtgtgattatatgcaggctttgcatttgtatgcatgcttaagaaaggtatctgacataagaaaaaaattgaaaaatataataatcaaaataagcatctaatgggaaatggatgttgggttgcttatgatattgtataaaaaagggtgtgaagggaaatggatgttgggttgcttatctgtgaagattgtacagaaggttgttccatacacacggctaattttagtatcttgcaggatcctctggtgactaaaggtgcaagcttggttcc

SEQ ID NO: 7770 - DNA, 989 bp, Zea mays; identical to SEQ ID NO: 5796
  Intron number 2 from transcript GRMZM2G111696_T03 (locus G RMZM2G111696) derived from phytozome v7.0 (chr-ID 6; pos 1 58917548 to 158918536)

SEQ ID NO: 7771 - DNA, 604 bp, Zea mays
  Intron number 1 from transcript AC214478.4_FGT007 (locus A C214478.4_FG007) derived from phytozome v7.0 (chr-ID 6; po s 93168457 to 93169060 reverse strand)
cgacgtagctgtcgtccggctcaccatatcccgcagtaaggaagggatgcacccttctttgatttccccattatgcctgccttttctatttgtttagatcttgtcttattttggatgtgactgctcttctcatgcaggttgttctccgtgtgtggccaaggggaagaagaaatcacattttttacgatgaacacaagtaattccccttccttggtctccctcagaagtcacattatgagttgttgtgtgtttcattatgctctctgttatccacataacttgcatatgctgctagatgctgactttgtatcttgctagaaagtaatccagagcttattcaccgcatagtaaaaatctgaggttttatacacatcaacactggtataattcttctccgcgacgactacactggtataattgttctccaaatggatatggctcaacagcgccatattagtagcagagttgtattccaaaatatgaggttttatggctttgaagaatgttttgtgctgatatccattttttggatagaaaataaaataacattgttacatggtgcatggtaggagcggccgtgaagatcgtcgcactccgcctgcag

SEQ ID NO: 7772 - DNA, 1001 bp, Zea mays
  Intron number 1 from transcript GRMZM2G120244_T01 (locus G RMZM2G120244) derived from phytozome v7.0 (chr-ID 3; pos 1 72814292 to 172815292)
tcctcgccgtcggctccctcgagctgcgttcactggtatgtgcttgtttgttttgatggatactggttggagtcctatctgctgcacatgccaaccattatcattcatatatgttgttttatttatgagcaggcacttggataattcactacaaacttagtgcacaactattttagtttgagctcttcaaattcaattacattaatacggtgattgcattcatatgaccaagaaaaactgggaaaaaagaacacgtctagcaaggatttgcatctgtatatccatccacagtgtagccatagaagattgctaaataattaagcaaagataagtgtagcattgaagaaccaaagtcagatttaagaaaatgggaattcaagtcttttgccgtttgaacaaaaataaaataactcaaatgaaagcagtacctccacacaagttgataagattatgttacatgaaaagaataacaagcaaagttcagactagatccacacaagttgataagattatgttagattttcatgtcatggcaactatagtagtgctttgcttacctgatgaagaaaactccatgaaaaaagaactcatgtcctacttcatgacatatttatactattgtttgcttgtttgatgtcaaaaaatcagggaacaaatcattcaaatgtagcatccaattttcatcttattgtttccttagttatcttagtgatgatagacgaaatttactgatgaacctgtacaggtttatgagatcatacactagataatacattcccatagtccatttctggtcctgcagaacaacagaccttgtggagggtgttctgcaaggtaggaatgggacagtgttctgctatggagctacaggggctggcaagacctacaccatgcttgggacaatggaaaaccccggggtaatggtgcttgcaatgaatgatttgttctccaaggtgacgtagaagaaccacacaattaagctgtcatacctcagatataca

SEQ ID NO: 7773 - DNA, 960 bp, Zea mays
  Intron number 1 from transcript GRMZM2G560141_T01 (locus G RMZM2G560141) derived from phytozome v7.0 (chr-ID 6; pos 6 1894531 to 61895490 reverse strand)
ggacaagataagtaagcagtcttatatagtttgcccactcgagttttgtatatcttgacataaatgaattatgcaaatcttgctaggagttcttttaggttgaagcttttgcttagttcagtgttgctatcggaaagctaaaattattttcttgccacctcctctgcattgttttactgcttcagctcctggtgcttctaattgagtactatagaaagcatctctcttgataaatcgttgtgtgcaaatatagggtgcttatataatccatcattagagtatgaggcgtgctttattctgtgtgcttcccacaaaaaagagtagcctattataaactttgtattagagcacttgacgttctaagttttgaccacatttctctactattataatgcagccataaagattcaatttttatgttgggcaccataaagatgtttggcaccattcttcccaaacatttatctactattataatgcgtgctttattcaatttttaggattgttaggggtaaagtcttagtctcaagatagcatattgttgtttgcctatattatttagtgtcgattataattagtattgttgtttagtgcttggttcatactacatataggcagtgttctaaaagtttgggagaaatggaataggataacagtcggctaacatacatcttttcttcagcagccgtggtaatgaatttgaatactgtagttactataatgaatgtttttaacttctctactcttctttactaatcttttagaactgtgtccttttctattatttctattacttcactgtgttgattgtcttggtgtttatactcttcttcagttgttctctgtgccaactgtggtcttgtacgagccttctctttggtagcctaataggattttgtgtcttttgtttatctctggtatttaatcttatactaaattggctcgtttgatttttagggc

SEQ ID NO: 7774 - DNA, 904 bp, Zea mays
  Intron number 1 from transcript GRMZM2G473706_T01 (locus G RMZM2G473706) derived from phytozome v7.0 (chr-ID 6; pos 1 68593249 to 168594152)
gcggcaccagccccgagccctagccctggtggcggcgcagcatcattctccgtccgggcaggcagtgcagggatcgcgcccgccgtcgacaagacaaatccgatgacaagacaaatctatcttttgtcttagcatcaatcatctcatcaaaataggcttaccatcctttgctgggctaatctagagacatgaatacttcgaggtataattattcaaaggagtcaatctccaggtcatgcaatagccataatcaatctctctttcagttcaactgtttccaggaagccaaaaggcttacgtactcaatccattttctgctgtcccaggttcagccaatgtatatgtgcagtcagctgggaaaactagtcacttttttccttctcgaacgatgcacgagagttagtgccatttcatttcattaaagaagaagagtacaaagtaatatgaccaaggaagccatgcatagacgaccagtcactcaattaaaagtgaaatgtcagaccgtgcacactgctaacattcagtgtaatcttgtggaatctttatatgaaagttgctgaatatggaatgcatatagacattgaatcctttcagtaatctcacctggaaggaagaaaaaagcttgtgtttcatttgctggtagagtttcattttttattattacataaataatatattgggcatgacttatcttctttgtgcctacattgttacatatatttgtaaaactttctggcatctcgagcttctcttgatgcttttaattaatagttttgattcagaataagtttgatgctcaggcccactaatccttgacactgcattatgttctaggcaatgtgggtcaggactatgctaccatttagctattttttgttttttcatgtggcagagttctcctcca

SEQ ID NO: 7775 - DNA, 1050 bp, Zea mays
  Intron number 1 from transcript GRMZM2G702045_T01 (locus G RMZM2G702045) derived from phytozome v7.0 (chr-ID 3; pos 1 85501841 to 185502890)
ctcatcttcctcaacacttcgcctacgcccaccaggtgttcgacagagtgccatctgtccgtcttacaggctggtatgagcatcgctgacatagcctcaatcacttccttatctagatagtttgttttgtatagttttgtcaaatatttagaattaactccagtgaaatgtaaagactgattaactcttgctctatcaaacccaacgccagagtctgaatgtactatattgaacaagcatatacatggagtcagatagagtttcatgcttagtttcatctttctgcatgccaaatttatttcgaatgcctcagtctgagaatacagtgcctgctgaagtatgaaaaatagtttgtgatatcaaaacagtttcagctatttgcgaactttatcttgaactataacaggcaatcagtgcgtaaattttcctagggtttttgactaggggtggtgatctcaggagcggtctgggtgtcagatgatatggtccatgctactggtaaacacgatctgctagatttcgagaggatcattcatttccagatatgctttactgttgtacagttactatttatgcgtcttttttttggggtcactggtttgtggattggacagctgaagaactagctgaatatatttcaacaaaggtagttgcccatgtctcggcaaaagcttatgatctcgctattttgttgttttaagttacattttactagaattttagccacttaggggtaccatgcagccaaattgagtaattctccaagcattttgagaagtatggggcaatagctgattttgtaattatgtaggacaagcatactaatatgcctcacggatttaatttttttacattttttgatccgtctgttatagacaaggttttggaggaagatcacgttatggatggcagaatagtagggctttaatttagatcgatcgtaacatggtacctaagtttctagctccacaatgcaatttagttgacatttagcttctttcgagccctctcaacttatttatgtaggttggggtcaagaggacagtctcg

SEQ ID NO: 7776 - DNA, 854 bp, Zea mays
  Intron number 1 from transcript GRMZM5G828278_T02 (locus G RMZM5G828278) derived from phytozome v7.0 (chr-ID 9; pos 1 55092484 to 155093337)
tcgtcctcctcctctgggtaccctgtcagctccaggtgacactccaacccccgctcccttgtttccctgtccaatttgatctgcatggtcaggcgttttaaacgacggctgccattggtaacttatttgattagtgtagttgctgagtaggcactgtggcacgacgcagtaaccccttcggagttcggattaggcagtcacctctttcgcaactgtaatgccaggtgtccttgttcgtgcgtgcagacatcttcaaggctattttgtcagcaggatttgtgtttcatcctcgaaatagaaactgctatccatctctgccctcaataaagtagcctgtcacagaccgttttatttttaacaagtggaaagtccattctatgaatgaacatatatagcttggaatgcgcgcattgttctctacttgcttcgtcctctgaataacttccgtgttgaacatttccgcttatttcatatcataatcacatgatgcaaccacctatgcgaatgcattccctgtggatacattatttcaaaagtctgaatggcatgctcatcactgttagtctgttatttctgttcacatgttttgtaaacttcccatgtctaccatataataactagaagatatgtatcacttgaagttagatataattgtgccacattcactcgcttgtttggaatgaggtgctgtggtgcagtaggaagtagtatcgacctcacttccagtactctatttcttgtttatattttgcttgtgcatttttcttcccacagtggtgattctgatatctttttctccctaacacccctgtctttcaggcggcagcagcagctagttccatacaagctaaagt

SEQ ID NO: 7777 - DNA, 900 bp, Zea mays
  Intron number 1 from transcript GRMZM5G839411_T01 (locus G RMZM5G839411) derived from phytozome v7.0 (chr-ID 3; pos 2 02931070 to 202931969)
gctatcacaacatcatctgaagctataggtaagaacctcctcactgcatttttgaagatcgacatctcaatttgcttctgctctacagttcgaattacttaaaattattcacgttttattcaagtttggcagacatatgatttaaaagtttttttttggtatccctacagtcttttgtttttgtcttaatctcaatgtcgtacaaaattaaacaggttatactcatcagcattggtccgaagatgttatagatctcttctgtctttctttctgtgagaactagatcttactaacttcaaataaacgaaagcggagtagctgaccaaatgataagtgcccttgaataaaaattaccattctaagatgatatatgattcaattctgggatgttctgtcaggcgactgtgctctttaaaaatatagcataaccaagcagtgagcacgtttgcttgtgtcggcctgtcgggcagaacgcagaagtaaatgttcatttgtaatgtgaaatactaatctagctgcataagtcctatctgtgtacgctgcagccataatatggtgaaaacacatggagctctccttcatttatttactgaaaagataataggcaggaaggtctacctatttgattgtacagaaaaagtttaaaagaaacaggcaggagggtgcttgtgtcttaagcattgtactgaattttctcaattaacctatgtttgaatgtatatttggacatttcttttttggtgtgcacctataaagcaagcagttcagcttatcttctgaggttttaacttaatgacagaattatcttctgaggttttaacttaatgacagaattagttgaacaatacttatctcatgtcatgtctcaaagatgaagcagaatcaggtactccaggacct

SEQ ID NO: 7778 - DNA, 550 bp, Zea mays
  Intron number 2 from transcript GRMZM2G405708_T01 (locus G RMZM2G405708) derived from phytozome v7.0 (chr-ID 7; pos 1 27213352 to 127213901 reverse strand)
taaacgagtacgcctggaacaaaggtacacacgctgtatgtagcacaagctcattctcccccattgacttgaaatttatactaaaaatgcctaaaaaaaaacaatgaaaaaaccacagaggctaacgtgatcttcctggagtcgcccgccggcgtcgggttttcttactccaacacgtcatccgactacgaggagagcggggactcgaggaccgccgacgacgcctacatctttcctcgtcaactggcttgagaggttccccgagtacaagacgcgcgccttctacatctccggcgagagctatgccggccactacgtcccgcagcttgccgccaccatcctcagccacaacctgtacagcaacagaacgatcgtaaaccttcaaggcatcttggtaataatatataacgccgcgttctattaattctcttctctctgcatgccttgtattttgctatgtgttcgtttgccggccggtaattaattttgtgtcttgtttgattaattcctttcaggttggcaatccatacctggaccggtacaagaacca

SEQ ID NO: 7779 - DNA, 917 bp, Zea mays
  Intron number 3 from transcript GRMZM2G162531_T04 (locus G RMZM2G162531) derived from phytozome v7.0 (chr-ID 6; pos 9 7611655 to 97612571)
gaactatttggaagcctcaattcactttcagaactgtaaggcctaatgaaccgttgttttcgtatgcaaacttgacttgaatattgtgttgttgaaattattaatcatgcacaaaccatttcagtattgaatgccctcttcattagaaattaagtataattttgagcacaaatacaatattcaaaatataacattgccaccgataaaattataacatatttattttggtcacaaatgtaaggccatctacgcctgtcctaagtcaaaaaaagttaactctgactaacagtatattatatgaaactcaagcttattatattataaaatcaagtttctctgcagatacaccagaacacttttttaacatagggacgcttattttactaagaggacaagcatattataaacctagtttttataattaatctggtaagaaaatattttgctgtaactctatataattttttggataaataatagtgcaaagttaactaatttgacttaggacaaagcttgatggacttcagtttccaatcatagcaggtatctgtagaatctaataaagagatttttcaagaaaatctactgataccattttcatgtggccaatctaacaatcatatatagacattattggttcaaattaaaataatttgactcatggatcctagggtgacttattttgactcgaaagagaatccatttataatacatagagctttcagatactatctgactttttaaccttttaaagaaatgcattcaaaattgcttgagctatccaagcgaggatgacactaattttattagtgttggtatagtatatgattagctgctcctaagccctatgaattcatattgtgataattaaaatccttacagagacgtatctttcaacaacctcacggggaatcttc

SEQ ID NO: 7780 - DNA, 911 bp, Zea mays
  Intron number 1 from transcript GRMZM2G110369_T01 (locus G RMZM2G110369) derived from phytozome v7.0 (chr-ID 3; pos 1 34682849 to 134683759 reverse strand)
atttctagtggcggtggtttcttaagaaacccgccactaaaaataccactggcgtttgataactgaaaccgcctgtaaaaatcaaacttcacagaagcatttgagctcttttctgctaatggataaaatatttatcgagtattatttgacctttgacgagtgtaaaagggtcttgttccccggtggcaaagaagtcgagtgtggtgatacataacttgcacaggatgcatacgggaaaggtagtgtcctttagcgaagatggcgtgttggtgatgacatataacttgttgaagcgattgaaagcttgttggtgatgatgcgcgtatacagtgcagttgaatttgaaagctagttgaggacagatgagacgtggatagctgactgcaggagaccaaagctactgaggtatgtatagattcaaagttattagctggccatggatgtcaacatggtgaaatgtttaagccgttagctgcggtgcgtgtgtctgtgtgtttaaagctagctggcaatgcattggcagtggatgacgacataatgaaatgtagtggcaatggatgtcaacatgatgaatagtagtttgcgtgtgaagattcgaagccggccagagtgtggattttgtttttatatataggattaagttcgtagttaactaataagcaaagcacactgagaaatcttgttggagcgcagttaatgcatgcacacgtacgcacgcaggaagcttgttgctgactacatatatgtttcatgttttttttaccactcttctgaaggcccaaattaactagtgcgtggtctggtctccatctcgatcagagagctccgtccgtcactttcccctcgttccattcatggagaatatgctccacctagccccgtcgtcccaggcccaggcattggccttggac

SEQ ID NO: 7781 - DNA, 1011 bp, Zea mays
  Intron number 3 from transcript GRMZM5G865116_T01 (locus G RMZM5G865116) derived from phytozome v7.0 (chr-ID 6; pos 1 41584084 to 141585094)
tcttcagtgatatagccaaacgtaggttctgttatttggtaggcacatatgattgcctttcaattttggctgtaccaggcaccacactattgttcttccatgagttgtgctccctccgtcccaaaatagaattcgttttagaccaaatatatattcattaaatagactatgattatagtttgtatgtctacatttattatcattcattcgaatatggatggaaaaaagaggactataaagaaatatattttggaacagagagagtaataaactatttactgaattataatgtgatatcgaccactagtatttatttagtgatttcaattgcttcatgtttcttaaggctgttggcatgtcacatatattcagctgctgcaagtacttatgcataaacccaaattgcctccaggccatggcagtccttgatatgctaatgacgtgtttggtttgatggatcaacttatcctagatagggtgatgcattatgagttcattccttatttcttatactattaccaattattaacttgtcagaaatggggtggtacgatgatggatcaattcattctattccacaaaccaaacaaaaaaccagagtaggatgatgatggaccacatcattccaccaaccaaacaccccataaatgcccatgtttattgctttgtttttcatgtattttttttgcaataaggtactttagtaattgattctcttattttaatgtgtatcattgtatatgccttgatttatttcttatcatccggactttttaaaaggggaatcaaatagtttccactcgatgtgcatttttattgttggtacctgcacaatgaacactgtagtaaaacattttcttacaacaatttcatatattttagggattgcaaaactatattactgtcaccgataagttttacctttaacttttattgtttatcttggtaaattgatacttacttgactaccttgatttgcaggattattagagaagagaaaaaacagcgctg

SEQ ID NO: 7782 - DNA, 785 bp, Zea mays
  Intron number 1 from transcript GRMZM2G103617_T03 (locus G RMZM2G103617) derived from phytozome v7.0 (chr-ID 7; pos 2 8399162 to 28399946)
gtccaagcggtggatccgtcccgaggtacgtacgccgttgctgtttcccatctgatcgttcattcggtttctatcgatcggagaattgggtcatcggggatggatggatggatctgacgggatttgccgatcccggtgtcgcgcgcgtccatggatcaggtgtacccgctgttcgtgccgatggccgtggccttgggcatctgctcgtaccagcttgtgcgcaacatcacgggcaaccccgaggtgcgggtgaccaaggagaagagggcggccggcgtcctggacaaccacgacgagggcgagaggtacgctatgcacggcctcaggaagttcgtccgcgggaagaagcccgagatcatggcctccatcaactccttcttcgccgaccctcccaaggacgattaagctagattccgtcatggatggatggatggatggattcccgattcccgatcgtccatagtatgttttaccattcattagctgccggcggcgcgccttgattcgtagccgtcgtcggtacatttttttttgtttctaaaattctaattctcccatataaatggaacatcatgcatttgtcgtgtttgcttgcatggctgcgaacgaattcagcacgccttgtgattttcatcacatatttgattgataacggatgactgtatgatattgttgcgtcccaacaaattatgttgatttatttacaccatacgcatgtattaatatctttcctctttacaccacaaaacggcggcggaagagaggggaaaaaagtcgctgacccg

SEQ ID NO: 7783 - DNA, 854 bp, Zea mays; identical to SEQ ID NO: 4681
  Intron number 1 from transcript GRMZM5G891037_T01 (locus G RMZM5G891037) derived from phytozome v7.0 (chr-ID 9; pos 1 12136769 to 112137622 reverse strand)

SEQ ID NO: 7784 - DNA, 431 bp, Zea mays
  Intron number 4 from transcript AC196437.3_FGT001 (locus A C196437.3_FG001) derived from phytozome v7.0 (chr-ID 9; po s 36415711 to 36416141)
gatttgcaccccactaagccgtaagttcagattcttcttcgagggtcattcacgaaattttcaccattttgtctgcctatgcagcgtgcttaccgctttggtatgcttgttattattgttgatgatagtttcttccagctaaatatgttaagcatgcatattagtttattgttaggctcggctcttatgtcatataggctaggaaacacatcctctgttcgtgggggcagtaccaatataatatgggcatcctatattgatgaattgtattgtaaccaatcggtttacggtttccttgttttgatggtgaatcatatgacatactaatgaatcaaactgctacctgcaagttctgatggcacaactagcatggtttgcaaacaccatgtacatttgtatatgttttaggttccaccccaacatacatcttg

SEQ ID NO: 7785 - DNA, 1027 bp, Zea mays
  Intron number 2 from transcript GRMZM2G004177_T01 (locus G RMZM2G004177) derived from phytozome v7.0 (chr-ID 9; pos 8 6511637 to 86512663 reverse strand)
tatttggttcctgattctacgatctgctgcaattggtatattgctcttttcttaaaaaatctctaatctaatgtgcagatacctcatgtgactttaattcagtgtttccctatcagttatctaagcatatcagaagattggtacgaatgaactgttattcataatcaattaactaatgaatgaagtgttcttcatagttcatatcaatatcattgtccttgatattgttttttgcaagttgagtgcactgcatgagaatcatcaacgtgttcttagcttttttgaccttttatattgcccgacacttcaatggtagaccactatagtagtcttcttatcttatttaagcatccataaagcaggacctagctaggtacatatatttatagtgctcagttttatgggagatctgaaaacttttgtagccatcaacttgttgtccagaaaccatgtaataaggggattaggggaaccctgtgaatagctatgagataacagcaaatcttcctgctttgtgtgtccacctttgcttccatctcagctggtttggttcagaagattcttcttctactggtgatctttttatcatctatgtgttcttgtctaaaattatcacttcttcactgccttgtgcccttgtgtgaaactatcccttttgtatgtcaaggtgactctgtttggttatgaggaaagaacattcatttccttccttatgatctggtgagcgttgctgcgatgttaggacactgcagtcatagtagcagagaattctatcactcgagtgtcggcagatggggaaagatatatatctatcgatcattttgtaaatatgttgctgtagaaaagagtgttaaatttatttatctatttattttttgaaatgtcatcagccttatcctttataagcagcagtaagatctatttattgttccttatttatcttttggtcgttttgcttacatatagcagtaatttggctatcttataagcagcagtaagcttataatcatcgccttttggttcagac

SEQ ID NO: 7786 - DNA, 721 bp, Zea mays
  Intron number 1 from transcript GRMZM2G132009_T01 (locus G RMZM2G132009) derived from phytozome v7.0 (chr-ID 3; pos 1 7399612 to 17400332 reverse strand)
caaggagacctccggagggctcttccttccacgaggttagatcagaggaaagccactccctttcccttctccatccatctcctgttttttgttttttccatttattatctattcattttttagcattcctgtgaaaaagttctgggtgcgtaatggatttgtcgaggtcttatctgctttggtcggaggaggttttcttccgtcgtttcaatttctcgaagagaagatcgagttgtcgtgggagaaatcatctccttcttgctactactgataaagaagagtgccttttcatttggtccccgcggtttaggtttttgttcctgtgtaatactcctactagttgctcggtgtgaattctgacgagcgtttataataaataaataactttgaattccatccgttttcagggctgcggctgttggattgtgctgaaagatctcagtttttatctccaaggaaggattactcatcgcgaatccggatctgtcggtggtggaaactggaaagttgccacttttatgaggcgaggctgtgaggaacccgtgtccctcccgtggatgtggtgagccctgattggcgcaccaggcgagaaggggcaggagcccagtaggtggtgacagagcagggtgagagggagaaccggagaagagaggtagccggtatacaagacaagcaggcaactataggaaggacgaaggaaaaggagaggagggagctctcc

SEQ ID NO: 7787 - DNA, 804 bp, Zea mays
  Intron number 2 from transcript GRMZM2G065105_T05 (locus G RMZM2G065105) derived from phytozome v7.0 (chr-ID 6; pos 8 3933518 to 83934321)
ttcttatctattatcaatttttttaaataggttgcaactgatcgatgcatcatggccatgctttttctcattgttgctggagtcatagctataataattgttaaggtgagtgcttaccttcttcagatattttctttcacaactactattacttaggcgtatatcatccatgatctatccaattttgtgttgtgattcagttaaaatggcttggaaatcatacacttagccccttttacatgatcttaccactccgtcgtttttggcctttgggtttgatgtgaagtttactgaactgtggaaaatgaattcgtcctcaaagggcaccttgttcttgtgggagatgaagttggcaaaatagtagctcatagttgttgtcaccactttgccctgactgaaatattaacacactagttaagaaatttagagataacagggctagagtgtcaaaccatccaaccattcgtgcaccagcactcatttactgctcaaaccgcttccagcacctttctttctttctttcttctttgtggataaaaatcatgtatacactagttcaggaaccttatttcaaaatagaagagaagaagaaaaagggaccttatacaccacaagtgagagatatgctactgcttaaacctcttcaaattccgggtagatgagtcattggcatgcggcaacaaacaaaaaaaaatgtcataggattttcaggcttgtttggttactacggcggttgatgaatgatgtccgtactgttccattttgccagattgtgaacccacacaacaaggacattcgcgacat

SEQ ID NO: 7788 - DNA, 687 bp, Zea mays
  Intron number 2 from transcript GRMZM2G038412_T01 (locus G RMZM2G038412) derived from phytozome v7.0 (chr-ID 7; pos 1 9498101 to 19498787 reverse strand)
gttcctcacagccacagttcgtggagttcagcaaggttagcaatatgcagtgaattattgttgtcacttgttttctatattttctattttctttgagtagatcttgtagaacaaatctctactatatttcagtgggagtttcttcgtccgtctctaccgtcgcgctcagcttctgcgtccgcccaccaattaaaattgctgcccagcaaaaacaaagcgaagggacacgaggaatcgaacccaggccaccaggtccaaagtctggacggccaaccaccacactatagaaccaattgttgaggatagatattgtaaatattgttaatacagaaaccgtagtagcacacgggcaactgactagtcaactttgaaaagacacttgactcatgtaatcctgtaaaaaaatgaacttggctcttgtgagtatattgtcttacgttcttaggtaaaaagtgtactggtctgacatcgctatttttttaatgacataataatcaacattagaaagcatgttcagccgtgtaatcattcttgtgactattgaccttacattctttttttttgggggggggggggtataccgaccctgtgtcactaattttttaatgacgtcaagtagcactttcatattttgttccgagttgaaataagctgtatgtcctgcagcaaatcgtgttgtggaggtca

SEQ ID NO: 7789 - DNA, 551 bp, Zea mays
  Intron number 1 from transcript GRMZM2G005296_T01 (locus G RMZM2G005296) derived from phytozome v7.0 (chr-ID 3; pos 1 6602349 to 16602899)
gatctctaggcaactggtactgaaactgacttcttccttcaaaattttcagtggtaatctttaggttagctatgtatgcccactgtggactgaaatccttcattatttctatggaataatgatctgtattgcattggcatggggacggatatgagaatgtggactgaaatcctttttctgcacttggaggtgcacaatattgtcaatgttcatacttgctacatacttatgaaggagtttgtttaatgttgtcttaatctatgttaatctgatagtactattattttgagtttgatatctcttttgattactgttgcttttgctaaaaagtaaatttggagtaatgaagcttggtaccgctcttgtcatgtatatggaattttcaattggtaggggttgctgctaagtgctatttaattgtcttgtgtttatcatattgaactgcttaagatatatgtcagcacttttagtttcattttctctctgctgtcaccttcaatgctaaaatttataatgaccattcaaagcgaacaagggaaccaggcatcaaa

SEQ ID NO: 7790 - DNA, 854 bp, Zea mays
  Intron number 1 from transcript GRMZM2G366009_T01 (locus G RMZM2G366009) derived from phytozome v7.0 (chr-ID 6; pos 1 55890724 to 155891577)
cactgcttgggattaactctgagaaaaacaaagtaagtagagaagcaaagattaactctaagaaaacacaatggtaagtaggtgacaactatatgaacatattcaaagatccttctcaattctgatgcagcaacacaacacactacatgttttgagaaactaatcattgctatttgctagctcagtaataaacaaatatttgaaataaacacaaactgaccaggtgagcaaaaaggcaagtcgaagagaacgtcctattaaggttattgaatcaatgacaatcccactcgctcccataataatgttagattgtattgatttttaataccatgccatcttcctagaaatttgttggacaacaacagttcgttctaaacctaccttaatttagtattttcaacggttcgttctaaatcggccttaattttgtatagattttcattagctacttacaggcaacaataatatttctacaagaggatgaggcaaacgtaccacttcctggggacatagaggtccacagtcttaccctcctcgtactgcatggtgacagttgggggaactaccgcaagagcaactgaaatacaataggaccaactatcaggcacataaaaagagaacaacactatgcaatttgagggctcattcagtactgtaacaattcaaaattgatggacaagcaaggctattctatatttataacttagttatgcaaacaactgaagtccaattcaggctctaatgaaaaggcataactaaaactgaactatacaagcaaggctattctcacggacgcggttgtttctgccttggttaagaccatgacgcttcccttgccacctcagtttcgaggg

SEQ ID NO: 7791 - DNA, 426 bp, Zea mays
  Intron number 1 from transcript GRMZM2G025074_T01 (locus G RMZM2G025074) derived from phytozome v7.0 (chr-ID 6; pos 1 46462675 to 146463100)
aggttttccgctccctcaaagaactcttccctgaggtgggcacgatcggtggtcgtccgtgtctcgtgtacaacctttgatatgtcatgtgtgaggggctgcaaaagaagttttttttcttcctgaatgtatttttattttttatgaaggtactagggtaggatcactagctctagcctctaggacacacacggagattaggatctgttgttgctgtgatattcgattcgattttagtggttatggataggccgtacatgattatttgacgattagatcaaactataggcattagctgtgttgggttcacgggcagactgagttgccacgtttgtgccgttcctggctgtgttttgtgagggcaagtttgtctgattcctcttttgtgcaggttgatcatcgtatactgaaggctatcgcagttga

SEQ ID NO: 7792 - DNA, 790 bp, Zea mays
  Intron number 1 from transcript GRMZM2G446515_T05 (locus G RMZM2G446515) derived from phytozome v7.0 (chr-ID 7; pos 6 2301272 to 62302061)
cctcttcatcctccttcgccgccgtggctgcacaggttgctctctctctctgcttgcctgctccttcctttccttctgagttagtcaccagtatctcaattggaaagaaagggaacggcctgtctgaactggcagctctgcgatgcgaaatgggaagagaaggggaacggcgaaaaagagtgagctcacagctcagtgtgtgtatctactgtactgtacttatgatgtcataaatgaaactctgcggtttcaaaagagttgataagtaaataaatacatgctggacggctggacctgcacgggaatagaatggtcaatcaaacttaataatataatacaagtaatatttgtacgtttgataatacgtactgactatctgaaaatcctggaatgccgtattgtgcgaaaataacataagcagagaaaataattaccaccgtactattacacgagtgttgttatattttgcgtcacgttttttttggaccgtccaccgcaattcatacgcaaaggaaagggtaaagggtagtagtagaggaggacaagcaaagaaaagcggtgggcgtctgggcgaaaccgcagaggacgtcacggacctcacggctttcattgcgtgggtttctcttttctccgcccttcccgcctcccgaggacgcgctccaccactggccagtggccaccgcctcctcctccccgggtcctcccaaattcggtgccacctgatctgggtcaaatgctgacgcgtgctcctcctccaccttctgtgttcctccagccgccccgccccgtg

SEQ ID NO: 7793 - DNA, 778 bp, Zea mays
  Intron number 2 from transcript GRMZM2G320360_T01 (locus G RMZM2G320360) derived from phytozome v7.0 (chr-ID 3; pos 1 74906894 to 174907671 reverse strand)
gtttgaagtcctggtctactatctatttccttcaggttaatatatttagcattatgccaaaacatcatgaggcatttcatatcctcagttgaaacgaaattatgtggtttaattcctttcctcatgagataatgctattcattcaccagaaatgatgattgaagaaatagctacgattatcaataaacattactactgagtcatgtttttatgtgtgcatgctaaagatgatagctgaaattctggatactatatgttttttattattctgaattttctgctcaacctataccgaccatgttgcttaagtgtttcaaatacaaagctttttgtttggcattttgaatgttataaaacaatgcatttataggatcagggtgtctttaatgccttacaaaatttcaagacttctgtagttatattataagatttcaaacaactatgaacaatcattgatgcacatgagtataaatcataattcacaaaacttcaaagttgtagacatgtatagctaaacccatgccattcctacctttgaagaactcttggttgtaccccataatgtcttggcaccatcagaccacataagctctgaggctaatttagctgccatatctacaactatcagatgaaaatactagagttgagatgttatgtactattcttgaattgatactgttaattggtttgttaattcttgtttaagctttgaagcatcattttagttaagaaaactaacaacttttttgtgtgtgcttcttatcttactctatttcag

SEQ ID NO: 7794 - DNA, 658 bp, Zea mays
  Intron number 1 from transcript GRMZM5G894349_T01 (locus G RMZM5G894349) derived from phytozome v7.0 (chr-ID 6; pos 1 18860447 to 118861104)
gtacccagtgttgaaggatcccacaaattgtagaggtctgaggaagggaatttctaagcgagggtaaagatatctagaagttccattccccagaccctaaaatttgtgagggaactcaacaaatgtaaacataacaaaatacatggcaaaatgtaagcgcaggcataagaaaaccataaaatatacacattgagatcattagagatgagggtaaattttagatactctggagaaaaactagtattgcattaataataagaaaaacatgaaagagtcaaacagagatacattacaaattgatgcattactgcaatgcaaataaatgcatagatagaagagataatctaatacaaaacaatgaatttagctagaaaaggtactatatatatatatatatatatatatatatatatatatatatatatatatatatatatatatacacaaataaatgtactaaagttttagatgatgccagagctaaagatattttaatcatataggatctctccaaactgggaacatgcagtcagggatataagaacaaaccattcgaccacggaactcagggtgtagaactcgactttttgctgtcacgtacttccgatcctgaacaacacaagtataatgaacactgttatctatgtgaaacaggtcg

SEQ ID NO: 7795 - DNA, 954 bp, Zea mays
  Intron number 2 from transcript GRMZM5G824124_T01 (locus G RMZM5G824124) derived from phytozome v7.0 (chr-ID 3; pos 2 0304665 to 20305618)
tcagagaagggctacatagcctgcaagcaacacaggtaagaaaaagcaggcatggggaagaatttttggaggccttggagtatccggtgttgttggaccctcccatgcctctacatgtgccccgtctccatctctatctgcatctgctactgcttgtgagctatcagcttacttggatagcgacgatgtcactgcatatgaggatgagtttgatttacttctacggtgacgtgaccataagctaaccttttcagttctttctataatggctagagacattttctctgtacctgtttctatcgtgtcttcagaatcttgttttagtttgacaagcatgattattgaggagaggtgccgaaggctgttgcctgaacatgtggagatgcttgcttgcataaaagactgggagttgggtgatagaagactccatcattctattgacgaccaagagatggcagaatcctttaccaatttgtattgtgatgttccaaaagatggatctgcgcctccttatggtagcacatctgcaagtgcatatgttgcttctgcttgtactggggctgttgggcattgagagaaacagagctggggcctggggtctggggtctggggctttgcttcttgattctgtaacctgatggttgttgctttttgattatgtaattggttaaggggattggagagaagagcagtggtgtactcttttgtattgtaactttgaacaatgctataattatgacttataaaaggattaagagttgcattgtactcttttttcctttctaaagtttctcacaagggtgagttttacccagaaaggtttttaatgagacaacattgcacacaactcttagacctttaatttatcatgttttgtttctttggttgttttttaattttaatctagtttatgcatattttgaggtttttcgggtggtcacaggctagcccgac

SEQ ID NO: 7796 - DNA, 782 bp, Zea mays
  Intron number 1 from transcript GRMZM2G142168_T01 (locus G RMZM2G142168) derived from phytozome v7.0 (chr-ID 7; pos 6 8455473 to 68456254 reverse strand)
aaaagtaactctaaggcgccaagcatccactggcggtcccttatgctagatacagcacgtgtgcttggtggtgtggtatgatttccaagcctctgtgcattgtgcacactagtgtccacgctagctatcaagatcagtcgctgtgatgtcgcaaacgagttgtgtgtacagtagatgcaaaaggaaatgctgatttacctatctttgctgagaaatctctttcccatctcttttctctccctcttgctctcttgtgtccgctgagcttgttttgtgatactaatatacgtgatttatatgatttcaaacgcaaagttcctcgttcaactttgtttgaactttgtttctgaagtgtttattgatgttgggtaccagtcgaaattctatgaagaactacaacatggcaacataattaaattatggggcaattgtgattatacacttctgatcttgcaattgtgattttacctctccttttttaactttgtgattttatccctatgctttgaaaatgaagctgcgccctctcctttaacaccattagcgaaaatcggaattagtgattaaaaaataaaaaataaggggtaaaattacaattgcaaggggagagaagggtataatcacaatcaaccctgaaaaattcaacattttttcagggttaattatgattatacccttctctcaccttgcaattgtgattttactcctggttttttatttttaatcactaattttgattttcatcagcttcgttttcaaaacagtgtggtaaaatcacaaag

SEQ ID NO: 7797 - DNA, 818 bp, Zea mays
  Intron number 4 from transcript GRMZM5G802854_T01 (locus G RMZM5G802854) derived from phytozome v7.0 (chr-ID 3; pos 2 11806225 to 211807042 reverse strand)
ccaacaagtattgtattgaaaactcccagaagcgggtaagttcggtttggctctgtcaagatacttagttaagtattttattatcactgctgtaggatgccggttgaatagataattcatattatatgtggtcatttttgtgcaaaactgcaaattcctgaactaatatgttagcctaatgtgaactgagtatgttgaatcagtggaacgaaagttccaccactaatgcttaatgctccgtttgcatgttgatattggagggcatgaaattgaactgggttgaataccgaatcagccatggtattgaaatgagatgcaatttcaattctattgtttggatgtcaccgtattgtagtttggaattgtgtggcctatatccacgaataaagaggggtgactctatattaggagagggagtttccagtcataatccaattctagggaattaggtctctgattccaaatctcatttccatatgcaatcaaaaaacaaaatttaggaaagctgattttaattccctattccgttcaccaatatctacatccaaacatggtcattgccacatttatcttttaccgattgactatgttattgccattttaatgttttttttggttttcatacgtgaaattaatcagcatggtaggttctgatctggttccctaatattgtcttaaccgtaacgtgggagactccggatagtgtagtctgttcctccctctttattgtgtttcagcagtgatcagtcacttattcatgttcatggtcttctttttttatagtataaaccttctgtagaagataccgttcttggtat

SEQ ID NO: 7798 - DNA, 918 bp, Zea mays
  Intron number 2 from transcript AC200205.2_FGT001 (locus A C200205.2_FG001) derived from phytozome v7.0 (chr-ID 7; po s 67146572 to 67147489 reverse strand)
gttcgtgactgcaatttggagtgtggtgctgactggtgagcaatggggcatatgtggagtgtggtggtgagcaattttattttatttgacaaatcagtttaatttatattatatgtatttgctgataacatatatatttaggattttaagttatttgtgagctctagagaaattttatggtactattatattaaaaactaaaatgatgataaccagttagcatctctaaaatactacatgatatttattgagttatttatatgttttataagctttttcaattctttttcagcatgtctatagattatgcttttatctaaatgctcactaaataatttgatatcttttcatcggaaagaaaaatataaagatatctaatggagtgcaatagatctttttaaagagatgcattgtagcaagaagaatttctgcagttctccaacttgctttatatttatagtagtatggcaaagctctctggaggattaattgagcattttatgtatggctgaatgcagtactcaactttgaacctttcaccagtactccagtagtatatggtaatgatattcaactcagaattcatgaataatcatatcatgatgataaataaaaagaattccctgttccatctactgtgtccagctttttagtatccaacttcaattggtgttgttatctctatattcatttggtatttagtgatttctgatattgttttttattaagtgctataggttgttagcttgtgtgcaaaatctagagaagttgtttcctcccctattgagcaccacacacttcattatcatgtacatccttttattgcttttatggaaattaatcttgttatgaatatcactgatggttatgtaaatttttgcaggttaggcaccttgatacttctaaaaagagtgaatt

SEQ ID NO: 7799 - DNA, 519 bp, Zea mays
  Intron number 3 from transcript GRMZM2G336865_T01 (locus G RMZM2G336865) derived from phytozome v7.0 (chr-ID 3; pos 2 6007197 to 26007715)
ggataaacagctgattcaaggcccaagtaaaacaggtaattaagcaccccaatcgaattttcgtcatgatcaatttttcggacaccgagagtctaaagtcgttatcgtaaaccggggaaaaaaaagaattgagcttgtttgtatcgaagtaaaagtgtgggagacagtgaaccgtgtctcccgatccagaaaccaaaatttaccttatatttaccgtagctaaatagccagtgaaattttggaggtgtctggcctggtcaaataacctttttaagatcaaaattgcttgctgtagccggttctcctagaaaagcataatcggatcaaagaattttggcaaatctgagaaggagctatagacttcacgacaattgtgacggagatctggcttttaacatggcaagaagactaaagaccagcacctttttcacaaaagtgttgaattaatcgctgtgaatcttctggtttccctgccgtgcaacagagaaggccaacaaggtagtgtgcagcacggaggag

SEQ ID NO: 7800 - DNA, 747 bp, Zea mays
  Intron number 1 from transcript GRMZM2G542990_T01 (locus G RMZM2G542990) derived from phytozome v7.0 (chr-ID 7; pos 1 7579401 to 17580147)
ccgcccaggctaccctcgatcgcgtcgccagtcaggtccagcccatcatgcgccgccataagtgaagcgtcaaggtcctctcagcgatgatttagacgacgttgggattgtgctcctctctgcggccgttgtcgccgtgtgccatgccgcctcacgctacctcgtcgtcgacaccgcgaggattaggattctactccgtgcgccgctccatctccttccatgcgggtgcccccgccctcaacaagcccaccacatcgctctcctctgccgctgtgggtggtgctgggggcagcagggagcagattcggacaggtcacccatgtgccgcatcacgccgcaaccgccctcacccctggccacgatcttggcttccgacgaatgtgttagggaccgtaggcgacctcatcaagagtggagcattcaggcaggtctacctcggcatggacctcgattccagtgagatcctcgctatcaaacaggttagtcttccatctcgattctggtgatttgatggatcttgtgttgttttctcgctgactcagtttatctatgtatctattcattcattccactctaaaatgcttacacgagagtcttttgactaggcacatgtaacacagctcgaggaacttctcccacaataatattgttgtaagtacactgtcatttcaacattgttatcctctttttttggttgtggtgtttgatctaggctgtgttgtttgatcagaggtatattgggacggc

SEQ ID NO: 7801 - DNA, 817 bp, Zea mays
  Intron number 1 from transcript GRMZM2G120661_T01 (locus G RMZM2G120661) derived from phytozome v7.0 (chr-ID 3; pos 2 23371488 to 223372304)
agaagggtggaggtggttctggagggagcatctttataaaggctgcatcgatgtttatggaatgattttttgttctgctttctttatgctaagtgaattgagatatgggaatgcaagcttagttaatcaagtagtgtttgtggaatgattttctgttctgctttcttatgctaagtgatttgagatgtgggaatgcaagcttagttaatcaagcagaatttggaaaacagttaccaattgggaagaccagcagtataaattggtgagaaatatatggcaggaaaacagttcctgaaaagtgtatctttctgtctcatgctattttttcttgtatattttggggggccaaaacatgtattcatgacgacattttttatatggcaggagctagatgtgatgatgagaaatcacttcgtatgtctcaaatgagcttggcgaagaaatttggctaatctagatcttttgttgcctccactctgatggaatatggtggtgctcctcagtctacaactccagaatctattctttcagttttatatttattgttgttattgctcagttttggttacacaagtttgtgttcctgcaggttttggatcctgaaggagaaagcgggtcctaagggaggaagcagagcaattggagctcgaactggagatgcgtagagagttaagggagtagatgttgcaactcttgtggcctacgctcgagctgaagccagattagtggttaatgttatgaattactttaacaatagcggagttctctttgaattcttggtcttgacaaattttggaatgtttctgttttttggcag

SEQ ID NO: 7802 - DNA, 1054 bp, Zea mays
  Intron number 1 from transcript GRMZM2G043926_T01 (locus G RMZM2G043926) derived from phytozome v7.0 (chr-ID 3; pos 1 97713787 to 197714840)
ctgaagccaacggcaaggcagactccgtctccgtatgtgccttggttcccattttccttttgatatacaggcatacagctggtgcttaactgcttattattaggagtaattcatatatagcacaagacataattgctattaccttgtatgaaaattgcgtgtgcgcatgcatgaatatctgtcaacatgactattctcttctcttttatgaattggatttaccaaacaatcacgtgcccgcatccatgggcgctgttattgatgacttggcaagaacaaacaaaaaacaaaacagagaactttagttgtgttgttggtttattgcatccgaacactctcggctttagtggcttactttgccacaacttgcctaaggagtcagctaaattgaaaaactaatcttagacagaaaatgttagacaagttgtagcaagttagacacttgtccttatagctacccacggaacaatagcagacacttgttcatgaagtattcggtactatgtcaaacgatgtgtttgagatgagtctacttatacacaacaacgagttgcctttgatgattttcaatctttacaatttatggtttccctgcttcaatatctctagctcacttctccttcaatcttacaatttacaaggattaaagtaaagtaaccggatccaacagcaaagtagctagatcgctccagatcgattaaggtggcgtttggtttacgaattgtaacgtaaatgacaactgttatgattcacactagattaccagtggtatcaagtttaaatatgacattatcagtttctagcatgatatctaattatagttggatttaaacaaacatgatttaatattaacagctaccgttcacgtaacagatatgtgaatcaaacaacacctaatatattcatttgatccttacctatctatctatatctgcaaagacatattttcacaaacttgatcgtaatccaaaaaggtgacaaaggcatggattggttattaacgtatattatctgtgcaactaggtggagacacgtgttgttggaggaaatacgt

SEQ ID NO: 7803 - DNA, 934 bp, Zea mays
  Intron number 1 from transcript GRMZM2G156126_T01 (locus G RMZM2G156126) derived from phytozome v7.0 (chr-ID 3; pos 2 18186303 to 218187236 reverse strand)
gcctacgtcatccccgagatcaaggtgagccatttgcgcgaccacacacacctatagcatagcatcacaaattcacaatgataaaccatggccgcctagctcggggctcgtctgatctggacgccgtcgctgcctggcctagcctgtcctgaaggggaacgagatcctctgacgtggggaggagccactgacgcgtgggccccgcgtgtgacagggcccacgtgcagtggcccaactgctctctgcagtacgtcagaggccgaaggtgaatgcggtcccactgccacttgttgtttattttccttttttgatttttttttggaagaatttagtggggctagctcgaaacgatctgtcctgactcgatcactcgaataaagaatttcgcggcgacacatttaggtaggaccttggctttaattcgcctcgcagcatgctagctcgaaagtcgaaacgatctgtcctggcgcacacatgtattagtattaggtacaccctggcgagccccaccaagaacaacgtgtgcgcctattgcttcctattagtcctcgtgagttgtgaccattagtattcaagaatcgatgcgtagttttctagaattattatggaggaaatctgcacgtagttttctgctgtttcctccaggtagttggctggaaagttccatatagctgcaaatcgcggcgaaattattgtctatattcattattgaaaaacaacgtcgtgatgtgatggcaccatgctacttgactcctgatatttttcgatggaaaacctgttagttttagacttttagtagatcgtgaatgcagccgatcagtagtaatacgtgacagatatgaaatgcgaagtaccaggagcatttgatctctgaagagtgcccgttggtttggtttcaggtcgaggagctgaagaggcactacgggttgcggtt

SEQ ID NO: 7804 - DNA, 999 bp, Zea mays
  Intron number 1 from transcript GRMZM2G546254_T01 (locus G RMZM2G546254) derived from phytozome v7.0 (chr-ID 6; pos 1 61349078 to 161350076)
tgggaaggagaaagttgcgccggtgctgcgcgccggtacgatcgtgttcgctgaggttctcggccgaacacttggcgggcggccgctgctgtcagcgcgcagactgttccggcgcgtcgcgtggcacagagcgaggcaggtcctctatgccgctcctttcttttgttgttggaagtccttcgaacgatctcttatcaatagtttgacgcactgcccaagtagagctggaccattagaaactaccagttcaaaccaactgcttatattcgagctaccagtagagctggattattagaaactactagttcatgaccaagcatcaatgtgcctgtttgtttcagcttatagattatataacctggattatataagagattaaataatatggattatataatctatgttaaataatttgggtgtagttgtttgacaacctaactaattgaaagtttgattgttgattttagtcatgtgttgtgtggcaggagcaataaaaaatagagaaaacaattttttgtttaaggtgtggcaatagtgggtattttggcataataatttgtttgttttttccatttagattatttaagctagattatataatctgggcatattataagctgaaacaaatagacccaatgctattactcaggacatcaaaattgatggtaggctgtggtgcctggttggggctgctggcctgaggaaagtatggccttagtccttttggaaataaatttggagggggtggcaggttctttttgctgtttggtagtttttatttgtcatgtatggtttcttgtatgcatgttgttggccaccgtaaggaggccctttgttgttgtactggtcctctaggaccttaatcctttttcttcttaatatattgacacacaattctcctgcattttcgagaaaaaaaagaaactactagttcatgaccactcgaccatcttattgttgccagataatataactctaatatacttatttcctgctctc

SEQ ID NO: 7805 - DNA, 739 bp, Zea mays
  Intron number 1 from transcript GRMZM2G481714_T01 (locus G RMZM2G481714) derived from phytozome v7.0 (chr-ID 7; pos 3 5494823 to 35495561)
cgtctgggaaaaaatctggggagaagaagagcggcgtgggatagaggcgctggagatattttcttttttttagaaattcatagatattttgaattcagattttgttagcgatgtaacatgggtcgaatcaaacgataccgataacccaaaagtttcatgtaaccttttcaggtttagcctattcacccccctataggttattttcaattggtatcagagcttcgtgcctcgttttacgcttaaccgtgtgagtaaacgatcatgtctactcaaagagaccatgtggatcctcttctcgaggaaatcccaaccacatccactagcgaggaaatggaccccaaggttctcgaccttgccatgaagattgtcgaaagtatgttcctcaagatgaaagaggaagacacaaagaaaataaccgaagaagaatttcagaaaaaggctcaagaagaagagtaaagaagaaggggcgatgaagatagaggaaagggaaaaatagagtacaacgacgacttggttgaactcttggtgtccaagatgatgagtaaggtaaatctcaacaccgagtaatcttgtacccagagtaaaggtaacataaaaatctggaaccaacgagaatcattcccctccatgttaagagaagctgtgacaaactaaatctactcaggaacttgataaactaatatatatatataagtattttgcaggtgttcatacctataaacattcgtgaacttcactg

SEQ ID NO: 7806 - DNA, 521 bp, Zea mays
  Intron number 1 from transcript GRMZM2G496485_T01 (locus G RMZM2G496485) derived from phytozome v7.0 (chr-ID 7; pos 4 2684836 to 42685356)
cacaagaagcaacacaagaaggtatgtgatattacctagccaactttcttaacttcttaagagtgtcattcgttcatttctcttataaagattccatgtttttttattatagattagctacaactttcttgtattagcaaaatacaagtcttattaaactaggaccaggattccaataaaccaaagctttggacattttctcgccattctggaatctagattatgattcatatgttaactttgatatttatctgcaacactgatatataacattaactatataatcttcaggtgttaatgtacatttaatgttagctaatatggttagttgtcttctcaatcttgtcattgttgcatcctttgtaaccttacactttgtcattatctttgtattgaactatttgacgcatgacatctaataagatgtttgcaaaacaattatttttactatgctcatattgccatattggtgctggaagtctaactcacatgtatttaccatttttctctataggatatcc

SEQ ID NO: 7807 - DNA, 710 bp, Zea mays
  Intron number 3 from transcript AC191304.3_FGT012 (locus A C191304.3_FG012) derived from phytozome v7.0 (chr-ID 9; po s 149734443 to 149735152 reverse strand)
acagtccgctgcgactgggaaaaggaggtcagacacacacacacactgccggcaaaattgttgctcattagataaaccagatgttcttctgcttgccgcttgccgagagctaacggtttggacgcggtgtcgtttgcaggccatgatcgcgactcgcgagcacgcgcatgcacaagatgtcgcaggttctgcatgtatgctagtttcgtcaaatcagatcttgcccctgtggaaaagcaatgcaaggtgctcaggaatcagggacagatcgcccgggtccgctttaggccttgttcgtttacgtcggattgcaaccagaatcgttccacctaatcaaagtttatataaattagagaagcaatacggttagaaatctttctgacccattaatccggcagaaacgaacaagcccttaagacgaaggagaggcctggcttagagtggcgtcgcactgatggtcttttgcttgtaccttcgtcttctaggccggggtagacgtctagtccttgttgatgaccttgcttactttgggtcgccgtcatgcaactatggcggccattgttttttttacggaatacattcttcgactagttatctctgaccactgggcaccggccaaaaaaagaaaagagaataaaaagaaaaaaaatagctccggcaaccggcgtcgttgtttttttttttttgcagtcgtacactcgtactgtctc

SEQ ID NO: 7808 - DNA, 682 bp, Zea mays
  Intron number 2 from transcript GRMZM2G064936_T01 (locus G RMZM2G064936) derived from phytozome v7.0 (chr-ID 3; pos 1 67683577 to 167684258)
ctgcagatcacagcctctcaagtggttcacgattcgtaagccctctcaaatcaatttctttttttacccatttggatgctgcactggatgaattgtatacgatactgcactggatgaattgtatacgatactgcactggatgcactgtctacgatactgcactgaatgcatcgtttatgacctatgagtttgttcgtttcaaaaatgacctacgagtttgatttgttttatgctgatgaagaaaaaacagctagtgtatacatgaatagcacatgattttccaagcttttaaattcatattagtaaggactacagaattatctcttatataatgaaattggcgccttaaaacatcactaaataaattccacgccaactattgatctgttgttgacttggaaacggtagaagtatgaattcttgagcaggaacagtgagcagcccccaaatattttaccgcctgatttgttgtttcaacaagctggtttggttgccatcatacataaactggtgtccaacttcttgacattgaaatgaaatgtgtcggtgctccattgcaactgtaaaccatgccaagtttatgtattgcacagttgcactttggccccaaagtaatagataggctaagacagttgcatccaagtctgttagccatttcatgacctttgttctgtctgaacag

SEQ ID NO: 7809 - DNA, 282 bp, Zea mays
  Intron number 1 from transcript AC206516.1_FGT005 (locus A C206516.1_FG005) derived from phytozome v7.0 (chr-ID 9; po s 141823373 to 141823654 reverse strand)
gtgctggtgctcacgggaaggaggtaaacaggttcccgacacaatccggtgattaacagtaatgcggtgttgggtctgatctttctttaaagtctacagtagatttggatgcagaaccgaaatggaggtgtggaaactgttttgacttttcgtcaggtagtagaatcttcttctagcagtaaatttttctgctatattttttttttgaacatttcgtttctttacgataaataataataataataatatgtgcatcctcttttgcaggagctgctggcttga

SEQ ID NO: 7810 - DNA, 344 bp, Zea mays
  Intron number 1 from transcript GRMZM2G132335_T01 (locus G RMZM2G132335) derived from phytozome v7.0 (chr-ID 3; pos 2 15990656 to 215990999)
attcgtcacccttctcttggtatgcctagtttcttcccctcttttttcacgcaactcattgctgggtgtccacgtgaatttgttctacttcaattaaaaagagaggatcaggccatctatgaatttgagatctaaaccatcaatggtaataatgcagttttactgtctacgaccctcactttttgaatgatggcagctgcgaaggctgtgagattgatcaactagcgagagtccgaagtccttagttagcaactcaaaacttaaaagggcttcctgacgatgatgaatttgtcttttcttgtttcaccttgaaagcttctccgcagcaagggtagcttggcagg

SEQ ID NO: 7811 - DNA, 938 bp, Zea mays
  Intron number 1 from transcript AC194599.2_FGT005 (locus A C194599.2_FG005) derived from phytozome v7.0 (chr-ID 7; po s 164574929 to 164575866 reverse strand)
ggcggggactggtgggagtacgaccctcaaattaggtatagcagtatatatttggggatgctaacatctcaaccatctctctagattttttgtcattgaaacatatattcagacatccagttgcccgtgcagcgacgggttcgatgtcaatgctgctgctacggtgctgcccctaggtgcgtactgctgcttcacataatataaatccatttcggttttgatttatgcaacaattgttcggtagtagcaaaactcgaacctagctgtcattagagaagttttgcacttttgtgcctttgagacccatgggttcatgaccaagctgttgccataattaccaatgtataaccattttagaaaggaatttcaattctagatctgtacacctagatgcagccccttttggttattttcaagattggcttgtgatatctgagtaatatggttcgtacacaggtacgtgacagcattagtacagtgtacaaaacagagaactcaagcagggaagacttcttttgtagcgaaattgattccttctgatcaactacttacataactgaagtaggagctttaaagaaaatataaaacaaacggaggaagaaacaatctagcacacaatgtaccttcttgttgcttgtgttcaattttcttatatcactatcaatggcacagcttaacatcatcttaagtgtgaatcaattgatgcaaactccatacattaactatttgttagattctgtaaaattttgttaaaaataaatacgctttaaattgttggaagtatggggtcggcgagctggataccccaccagttcctcagctacggctctgatcccttccctggtgacgtttttctattgttttacacccccaccttgttgttttcatgttgtttttctaggtatactggtagacttctcctttttctgcttcagtga

SEQ ID NO: 7812 - DNA, 734 bp, Zea mays
  Intron number 1 from transcript GRMZM2G452529_T02 (locus G RMZM2G452529) derived from phytozome v7.0 (chr-ID 3; pos 1 95882511 to 195883244)
cgccagtagacttgacaaaatacttccgtgccacagtaaggaagcactacgtatttttctgggttacggttacgggagactactgaggaaaaagtaatcacaggcggctcctcacaccaatccccttcctccattcctcttcccgtaccctggcctggcggggtcgcgcttagccagccgttgcaggtctcctccgtttaaaacagggcacctagctgttttggtgagaaaccctagattgattggagttggatgttctggagtggcgaggaaccctagattgattggagttagatggatgcttgctcgttttgttagttcctttaccgtccctcaaatccaaacattccttcctaggactggcacggtgctccagttcatctaaagcaatttgtcttttgggtaatactggtttgtgttcgttttttccaaaactgtctggggttcagtttcagctgaacctgctgtccgcacgccctttgtttgagacccctttggatttattgttataatgagttttgcttgcccggtgttcaatcagtgtaccattgaatttttagcagagcactgatcaagcgttttgttccaaggattttttaatcagttctaatgcccatagattatctcatacatgtgttgatttctacacattttgtatttcatcttataatcaaatctggtctgattgactgttgccttttattttctttttagtaactttttgagtaccagtg

SEQ ID NO: 7813 - DNA, 494 bp, Zea mays
  Intron number 2 from transcript GRMZM2G116158_T01 (locus G RMZM2G116158) derived from phytozome v7.0 (chr-ID 3; pos 1 3596183 to 13596676 reverse strand)
cgaaggagtgcctacatcagcggtacttcagcaaggtagttaagcacctatttggatcatggttcaattattataattgagattatgaattgtaataatcagagtgtttggcttaatggattacggtgattgattttaggttgtttaaatgagaaattcctattttatcctatgtacttcagcaagttggataatcagttagggccaatttagactttcagcatcttagccaaaaatgagaaacacatttaactgatctgtcattaaatcatcatcattctaatatttaagtagtttggtatatgataaagcaacatgcattcttttttctattccttttccttatttgggttcagttgattcatggcatggtgagctaatggcttcattgagcagcagtaacagtgatacacaaattatttcactgtctatctgtgcttctattcttcaccatatgcttccagcacatctgatattttgatcttccttaacag

SEQ ID NO: 7814 - DNA, 983 bp, Zea mays
  Intron number 2 from transcript GRMZM2G024851_T01 (locus G RMZM2G024851) derived from phytozome v7.0 (chr-ID 3; pos 1 38880201 to 138881183)
tctcagtcggagactgacaccaaacgagccaaacagtgagttgcattgatactattgttgcagtcagtttgaagtattatgttacttcctccattccaatttccaaatcacaagacattttattcttttttctagatgcatagattttgctatacacttgcatatacactatgattagatacatagtaagagtcatgcatctataaaagccaaaatatcttataaaatttggaatagcagggattagtttcgtagaacccaacttacttgggactaaaaaaccttgttgttgttgtgtagtagtttcgtggactctgtttttgaaacatcattagtggtaataagtgtaatggtagaaagcaaacactttagtgaaaccagaattctaattttcaatattcttttagactaaaagatgagcacatagctataccacatgccgcacagtaagtttgttttctcttatgatgtgctctgtttaagaactgaattaagtgattaaatagcacaaatgtatttagatagacattttattggtgtatttactgtggcaattctacatgggtacaaacttgaagtgggaaactctactcatgtggagtagcgtccctaaaatacaagtgactatgtgacttaaaaacaaaatggaatttggatgcaatgaccactgaccaatcaatgtgcaaatagattctatgggaagttcgccagctccttaggatgtttccagtcctaataagatggaactgtacatatggaatgtgtctcaatgttttccatctttaaattcggaatacacttgaatacaatgtaggtgcacatcttcatgtgcatctagcttcattttgttatcaatatatacacacttaagtttacacaatgcaggagccatgtctcgtgtccatgtagatatatgctgatataccttgaattttgaggtgtgtttatttacatttttactttttataacaattgcagacaat

SEQ ID NO: 7815 - DNA, 920 bp, Zea mays
  Intron number 1 from transcript AC235543.1_FGT002 (locus A C235543.1_FG002) derived from phytozome v7.0 (chr-ID 6; po s 148722321 to 148723240 reverse strand)
gtccagctccttcgtcggcatcgtccaggtaagcaaccgggtggatcagctagtgcatccttctcttctccccctctttcatctctgtgcatcggcgaacagtagaagtaaagcaaaggctctttttttcctcaagaaattaaccaacacatttgctgccctgtcgctgaacaacgaaatgtgatgtctcgaacgatcttgttcatggaacaacaaagtcaaccctgcatcgtcacgtcaacgccagacgccatgagataacaactgaaacaatacacttcgaatttttgaaagaacgcgaaactgcaacgataggagagtaggagacggctggtctgccagcctcatattgcagtcttgccgtatgccacgcagaatacctccaagctaccaacacggcaacacgtcacgagaacacgataaatttgagagtggaaactgatgttttcctttactgcttatcacgagcgataacaagatatacttcgcttggagtattaaacttcagaataaaatgcaaaggtaaattcaagcattttttgacgcaatacaaaattatgtctgcaacttgattggcataaaagtttcctaatacagacagaattcagattcgatgattgagctagtggaaatgtccacgatattgggctcaagttttacctggtgacgactgacgaggaacaggaagattgtgctgggaataaaaaaaagatcaataattcaaacagtcattctcattcctaaaaaaactgtggtgtatgtcctgaagaacaataaacgttttaaatttgctgaagacccaaatcattaagcccaaatgcccaatgaatgactattgctctgaacaagcacagctattttgctattaagctgattaacggaggctaagtattttcgccatttctgcagtcttcattttt

SEQ ID NO: 7816 - DNA, 780 bp, Zea mays
  Intron number 3 from transcript GRMZM2G078851_T01 (locus G RMZM2G078851) derived from phytozome v7.0 (chr-ID 7; pos 8 2558326 to 82559105 reverse strand)
ttgatgtatctaaaaatttgcagtgtggattagtgattgttgatttaatgaacatgcaaaatataaagcgcaacatttaataatacccgctaagaacaaattgtatacgggactgacaatagctaagcaaccaaagtacccattttgcttgagtcttaaagcaacatgaggaatccaatttacacgtttatacatttaatagctcatcagtttgctagtttgccaaagaaatcaggattaaatagaacaaggatagatgctgagattgagggtttgatgcttcaaatagaattcacttgataaaatttatcatgctattatgtgtccgttgttttcttccaacatatgcagatagactgaagtttcattggaataattttgtactgctttgttgaattctattttcttgatgcaaaatatataaatataatgtagcataatgcacgctctgatttttttgggcacaaactttctagcaaatcataatggagtgttgtacttcagtactttgaaccttctcttggtatcttacgcttctatgcttcaggatgatgtatttatacttacatcaaaatgacatgtcctatagttcagcatacacatgtatttttgtactgatttgaagtgcatgtgatgtttgttattagattatataatgcatgtcatacaacttccatgtttgcaatatttcgcttctagacttctggttggtgtgtagcctagctaaccctgctctatcatgcagttggattccaggttcacaatacctcttggagcaag

SEQ ID NO: 7817 - DNA, 431 bp, Zea mays
  Intron number 3 from transcript GRMZM2G024858_T03 (locus G RMZM2G024858) derived from phytozome v7.0 (chr-ID 3; pos 1 52846589 to 152847019)
atcttctgcctttttttagaaaaaggaattaagtactcctaacaggataagttggattattagatgccctgtgatgctttggtttattgggaaaaaagatcgcaattgatattggttattcaaagcagacacttccctactgcatttaatctttactgtatttcctttgttatgttatatttcattgccccctctttattttggttcctggccttgttcttttgtttcttctgattcattttcagttctagctgtgtgctgaagtgttattctggatgtatacttgattatttgtcagtttcctaaacgcacagcacattactaccattactccccccattgctatctaggtctgatatggtttttgtgagttcttaacttgttgtttttgtcattttggtccaggagtgtagcaccaattagttcgagtg

SEQ ID NO: 7818 - DNA, 808 bp, Zea mays
  Intron number 1 from transcript GRMZM2G044968_T01 (locus G RMZM2G044968) derived from phytozome v7.0 (chr-ID 7; pos 1 35210308 to 135211115 reverse strand)
tgatcaagcacgaccacttctctcccgtcaccgaggtttatttttttcccttccccactctcgctttcctttcctgggtctggtggccgcttgttggttctctttttttagaattacgcttgattttgtggcgtgtagcaaatctgtgtgctccgaggattagtcgttcgtttcgacgaatccgtgttgtttgggcgacggggttcagatggaggggcattgattccgtcgttggtctgtgactctgtgtttgccctgcctggtctgcgcagagtgtcgtgtttgattactgtttccatttcagttcagttcttgctaaatctcaagcgatttgggatccaatgctgaaggcggatctttcactgttgtgcgtccttgacttttggtttcggggcttagatagggtttatattattcaacttatttagagatacaatgcgtatataatattttagaacggatggagtatattattataatttttccaagaaaaagttctggtggtggcccgcattgttgagaagaaaacaccaacctggggatatcataaagcaaaaggggcagtcactattcttaactttatttattgcaaacaatcactatcagcacatcttaaaatttgagatagctccctcagtctctgtctctccatcggaagaacaaactggtatcctgaactaaccggctgcatcttgtagattaaaccattgaattattacacagtattggaaaggatccagattattgcaaattttcattttttcaactggttcaggcatgccataaccaaaatccatgtttgcaggag

SEQ ID NO: 7819 - DNA, 1021 bp, Zea mays
  Intron number 1 from transcript GRMZM2G055458_T03 (locus G RMZM2G055458) derived from phytozome v7.0 (chr-ID 3; pos 6 6278808 to 66279828 reverse strand)
gtgtcgactttgggaggggaggtgcagaatttcaggttattctttgtcttgtgttctaaaagatattccccacatcaataggctgggaagttctccttttgaggagattttggcatataatcaatgactataaaatagtatggttagttctgatgtagatgccgtttctgcatttgggttctccagagtctgaatttgctactacgaaagcaaatggagtaatcatggcatatgtcaggatagtcagcttgtattactaaactatttatgtgaatgccattggaacataggtcttggtgcaagcaaacataacctcatatgttttacatgatggaataaacaaaagaataatgctcaagatgagtaagcactgtgcgtggggcgtcgtcgtgttttcttaggccatgtatggcacgtcttgcggagttggagctgcttgtcccttgggtcgagctcaacatcgataactctggatgggttgtgggggggggggcttcgttgtctgagctgtttgtgcattctgtataagtttttgggctcggttttccttaaaactaggtcaattctatacttcttaattgaaaggcagagcttctgctgttacgttcaaaaaaaagtaagcgctacaagaatccatcctctcttccattctgttacactgaaaaatcatgtagtaattgaatcttaactgggggcataggtgtattcttcttctttttcttagataatggaaagaaatatcgatatgtaactaaatgttagtgcttaaaatatgtggttattgttgcctgagaatcaatcaaattgtgtagtgcagttttgttggatacttgactaaaaaactattaatacctagagtcccacatctcaagacagaccttttagggaacataaaagaagacccttttgagcagtaccgcacagaagaaaaaaatgattgtcatataatggcattggcatcaataatagttgtctttcgtatataggtattggcagcataaagtgttagatttgtccttga

SEQ ID NO: 7820 - DNA, 799 bp, Zea mays
  Intron number 5 from transcript GRMZM2G009091_T03 (locus G RMZM2G009091) derived from phytozome v7.0 (chr-ID 7; pos 1 17979487 to 117980285)
tggctgatattactgaggaaggagttacgtttcaggttcattcttgtggtcatttgtaatgtgatgtttctagtatgatctgtgttgacagttttttgagtggaaacatgtgcgaaagagcctctagctgagttagttaggtggtttgagtagcactcctcaggttttgagttcgactcgttctcacatgggctacggtgtcgccgtgtatgggtaggataggggttccgggttttctcgatctgtctgagaaggttcttcttaaaaatgctcgggagttgtcttaccccatgcagttcgagtggaaacctgtggtccttgacaatctggccacatcttgtacataaaactgctccccttaattgaaaggcagggctcttgccatgttcgttaaaaaaaacgatcggtgttgacaaaaacccaaatttgttaccaaatattctatggtaaaatatttgtctagttttggaagttgggggtggatgatgtttcgttttggagttcaagaggaaggggcgggggttcaaaatggactgcactctagaagattaagaaataagctttgcatgttggatccttgataagatgtatatttagttgatgcatgtcgagatatagaattggggttttgtgccttttttgtagttttcccttatttatggaagggatttttcttgcatttgctaacttggtccttcctctagataaaattctaacgctgaagttaactcttcttttttcctctctgtacctctctaattttattgctctttcatgcccaatctgtagtcacctgttg

SEQ ID NO: 7821 - DNA, 653 bp, Zea mays
  Intron number 3 from transcript GRMZM2G364851_T01 (locus G RMZM2G364851) derived from phytozome v7.0 (chr-ID 7; pos 3 6228388 to 36229040)
tgcttcttgacaaagtcaatctcacaggatatcaggtcagctacaagtggctgacatttgtagtttttatgtgtttaaatcaatcaagtactatgtttggtttttctttgtcttctctattgttttcctttatcttgattcatcatatttcctgtattcttgtaatcttgtaaatgcaaaaagatcctgtttggaatgcgttttttcctgttcctgcatttttcctgcgaaattgaacttattcttgtgaaattcctgcttgattcctgtgtctgaaacaggccctaaaaggccactccagtaagagttctagttgaatggtatatactttcttgtctcaacctttatgttgctcctagaaaaatcccatgcggaggttagttctttagtattatggtttgatggcttaggagactcgggcaatttcaacccaagcaatggacatgttgtcttgatgtcatgacaaaaatataataaagtcaaggacatccttgtatatattttgttgttaataagagaaacattaagtgcaatgcaatatctccatcctcatctggacaagttgctgcttctgtagttctagctttaatattttaatttgaattctataaattacagatagggaaaactaaagtgtttctgcgtgctggtca

SEQ ID NO: 7822 - DNA, 929 bp, Zea mays
  Intron number 1 from transcript GRMZM2G568884_T01 (locus G RMZM2G568884) derived from phytozome v7.0 (chr-ID 7; pos 1 55705109 to 155706037 reverse strand)
tgtgatagtgaaagtcattttgcttctagcttaaggtcagttaatcttgtttcagtaccttgtcttgctgatttacttgccccacacaattgttgaatcacattgcttatgcatttgtggactgtgctacatatatttatgagaattccatgtgtgttgtaaaaaattgctctcacatttataccacagaaaaagtgtgttaccctatggtatcacaattcgagttttagtctaccactgctgtctgtttttgctaacttggacattaactataaaaaacattatgaattattgattaggttgaacagaatgttgttctgagaacaaacacagattatctcactgaattattaattacttgtcttgagaatactgttattgtaggaagcttgtgcattgcgtgtatacgaaaaaagaatcttacataggtatcgatcttctcggagatgtttatttattggtgtttgagaatatatatattatattatatatatatatatatatttgaattattgcctgcacagttcaaaggatcgagataactgtagttgtgttggctttcctttttccattcagtgtgtagttgatggctaacttcatgactatcatgagtgacttaactgattttgtcaaagaattcaattagtaacacgcctgatgaatcataatcctctgtgctacctatacccgtcgtagtaaaataaaatattatggcctgttagcctccttgctttgttagtttggagagtactctgtaattttcttggttgccttgtaataccaggttactatagctgtctgcatcgagactgttttgtgtcttgaactaagaaaaaactctccatggtttgcagaaccaagccaagaaaacagatatcaactgtgatgccacactcaaaagcttgtttggtgggagggacaaggttggg

SEQ ID NO: 7823 - DNA, 651 bp, Zea mays
  Intron number 1 from transcript GRMZM2G138074_T03 (locus G RMZM2G138074) derived from phytozome v7.0 (chr-ID 3; pos 1 87711478 to 187712128)
agtccgtctacaaagccgtcaccgcgcctggtacggtaaaatcactcccactattgccttcctccgttgctggtgattaatttccaggtggattgaaagacaactgtttgctttttagatggattattactacccgattcgtggaaactgattttttttcgaaatctagttcatttcttagaaaataggaatcttactctgtaccttactgtataactcattattaattagagtggaaacttgttctttttttcctccttactgtacaactcattattactgcaactcctttctttgtcacttgcatattatttctattttttcaaaaaaattagtttatttttatttaagaaaatgggaatatcttaaaaaatgaagttaccaaactagctctaactgttctgcctacccagttcttctccaagtgtagctatattttgatttctgagacagagttaggttatatgtattatcttggtgggaaaaacacgcaatatattgtgcttaacagataggagaactacgttatcgatttcattgaatcattgagctgtttgttctcaatgaaatccttgcactcagagagcacacccttattttccctgcttacacgcaggcagtgcagggaagccgttggttgtaaagaaccac

SEQ ID NO: 7824 - DNA, 865 bp, Zea mays
  Intron number 2 from transcript GRMZM2G166366_T01 (locus G RMZM2G166366) derived from phytozome v7.0 (chr-ID 6; pos 1 15375081 to 115375945 reverse strand)
aagaggttacagaacttgcttattttggagcccaggtactctttcattttgagaagaatcaaaaaacaacatttcccccaagaaaaattatctgtcttggactgttaaaggggctatgatggttgacatgcaatgattcatttttgtcattaatgaatctttctgcaaattatattttgaatgctcaagaaaagagttctagaactaaacaacaaagatatcagacacaagatatttcattttattgcagatttttaggacttggaccctgtatagtgtgtccagactgcttctcagtgaataaactaacctttcagttgcatacttttcaaaaacgaaagatctttagtgcattactaggggttcgatagataaactcgacttgcgggggtaagacagcccccgggcattgtattaagaaaaaaaccttctcacacaggtcgagaaaaccttcgaacccctgccccacccatacacggcggcatcgaagctcatgtgagaacgaccacgaccggggctgagccttaggcctgtgctttgacgtgggacagacgaggggatttttttaagcacaacctgaaattcgctcccacggggagtcgaacccacgacctgaggagtgctactcagaccacctaaccaactcagctagaggccctttcgcggttcgatagataaacctctattccatttttaccttttaaagttatactgattgttgcttggcatttgctttactaatcagcatgaagttgaacatatagctcatgatgtcagtcttagtcactcttctgaacagaaacgagaagtttaggttcattattgtggattgtgcactccaatgcaggttttgcatccacaattg

SEQ ID NO: 7825 - DNA, 499 bp, Zea mays
  Intron number 1 from transcript GRMZM2G137971_T03 (locus G RMZM2G137971) derived from phytozome v7.0 (chr-ID 7; pos 8 6746158 to 86746656 reverse strand)
tctactcgctcgcaggcgatctattgcacaagcaggtcgttcgtaagatcctatccatctggatctccgtagatacagcgttctgagaattatttctcattattggtgctatttgtcataattctcataatttttaagaatatcaggctgttttttgcccggttttgctatatcatgctcgagtgagaaaagctcaaaaacttgttcacatgacaaaatacttttagtaggatcacgtaagttccaaatataatcttcaaatgtgtgagttctagcagtacagtccgaatgtagtttcagtataaggtggttgttttaaatagaagatgttctgcttagatgccttctacttttatggactatgctgtctatctctaagcgttagcaaatatgcatatttgtttttgttacttcatgccttcatggtaaatggtaatagtgcagtccttgaattgttatttcagagtatatatcctgcaaagatactgaaactcaactt

SEQ ID NO: 7826 - DNA, 1015 bp, Zea mays
  Intron number 1 from transcript GRMZM2G062429_T01 (locus G RMZM2G062429) derived from phytozome v7.0 (chr-ID 3; pos 1 90782917 to 190783931)
gattcggattctcccccccacatcgtcctttccaggtgcgcgagcgtgcgtgcgtgcgagcgatccctaagctattcctctgcttttaatctctcttattattgctctcatgaggtttcgaatcctggtttatgcgataattacgagcgggggagatttgcgcacttcttccaaaaaaaaatccccccctgttgttgtttaaactcgagaatagctctgcggattggagcgcttctggtcggcctgtaagggcttggggtttccgccgcgttcttctacaatgatttggttctagctgtgtggcgtgcattttcactagctctagcgctccgagcgtcacgatctcgtcacggttcgtttcgggttcctggtgctggcgttggttgtgtttctccacctgtgctctgtatatctaccatctattttgatcagttattagtttctaggtcgccacgatcggtgcgtctaggtctgattcctgaatttaactcgattggttggtgacttcagtttgatcactttgaatggtttggtttcaaattattcggtccttgtctcaaaacaaacgattcgccgtcagacttatccttaagaaaagggtaaaagtaacggctacctgttttagattgttctaggatgctggcaggtgaggtgatttgttggcaagcgaacagcggcactaattctgttttacataattggtacgagtagtaggccttatgtcacaccgatagcgactgacatctgtttccgtggacttgaagaagggatgggcgtcatgagcaagcctctttctaaagcagcttcacctagttttggttatgatcccatttgaagccgtttcacttggaatggaatggaatggagtcacagtcacaccctttgccaaaaaataaataaatgctgtgctgtgctgcgtttgccctttgccagtgaaagaacatagaatgtctagccttacagtgtataaccatctaactaacattagcattaatgatgcaggttgcaggcttaa

SEQ ID NO: 7827 - DNA, 509 bp, Zea mays
  Intron number 4 from transcript GRMZM2G062429_T01 (locus G RMZM2G062429) derived from phytozome v7.0 (chr-ID 3; pos 1 90784631 to 190785139)
ggtgagtttaaaaatcaaaacaatctttttcttcatattagacaatctttaccatagttcttaaggcggtatggtgagacaagaaattgtccaccacctagatgcctaggcagcgcctaggcgagcaaggcgcctcggattgtttgaacgtctagacgcctaggcgacgtctttaaaacactgatctgctttgagcccttgatatatatacttgatagatagatctttaatgaattcaacgttatgcaaacaggaaatattttgtagttctcttctaataatgtaatttttgaactttagtagctgttctggttaagtaattttacatcatctgttcagataagcaattgtttcttgtggtggtaggtagtaaactcctctttatgttgccttttgtggagccagctttcgtgttaggctgctagctgcttgggaaacactttatgtgactggctgccaataatatcaaacaattaatatgcagggaaagaaaaatcctggaacagatt

SEQ ID NO: 7828 - DNA, 952 bp, Zea mays
  Intron number 1 from transcript GRMZM2G004932_T01 (locus G RMZM2G004932) derived from phytozome v7.0 (chr-ID 6; pos 1 60038383 to 160039334 reverse strand)
tgccgcacttcaccgactacctccccgacatcccggtgagcgcgctcccccctgcccgcctcccgcccccctgtctctgtagaggcgagtatttgggttgggggtgatgcgccacagtagggactagcggtgtcgcgtcccggtctgctgatgctctttgtgcagtaggcttctacttctgtagcttagtgattgttgtgcgagtaacttattttggaggggggtggttgcttgccatgttttggcatttggtcaattgggatttcctgttatggttatggagatccatttctggaggctaggatgctgtggccgttgagcgtgattgcaaccctttaattagttgcgtttcaaaggtgggctaaatttagctaacgagtccttgtactactgtatataaggacaactcttagagactctatatccttcgtaattgctaaagttaaagaatttggttaaaaaatacactccaacacctttaaatggttatccatgtatagctatcttttattcaaacaagctatagaaaagctgttgcagagtggaaatatataggaagcgataatttagagagtgaaatttagaatgattctttggagatgatctaagattctaagatgtgggcaactgggtatcatgtgaaccattgcctgattagttagctgttgagattatgttttgtgcgggaagcaaggtatcactattgtctggttcgtgcatgctgccaaaaaggcaaaaaaaaaaaactgttaccactcgaccaaaatggaaatctgtaggaaaaaaggcggagtactctactggtgacatttttatacttttgttgacgtatgctgaacattcacagcttcacgttacaacattaaaggaaactatgatggtcgatttgatgatttgttgtttcttcttgttggcagacttatcctaatccactacaagatcatccagccta

SEQ ID NO: 7829 - DNA, 952 bp, Zea mays
  Intron number 1 from transcript GRMZM2G458935_T01 (locus G RMZM2G458935) derived from phytozome v7.0 (chr-ID 6; pos 1 5247023 to 15247974)
atgtaatgcgtgatgtcatgccaatgtcactttcggctagagaataaacaaaaaaaatgtcgtgttggctagcacttggctgttaggttggagtggcattgggcccaatgcgagaggtggcccgtgaatggtttttttttcttttatttagtttctatttcatttgctaatgcaaatttgcaactcacattcaaataaattttgaatttcaaactaaagggttaatgcatactccgaaaactccaacatgccaatgcaaagtgaaatttatttattttattcatgtcgacaaatgcttgtaaatatgtaatattaatgtatacacacaatggttttattttgagaacatttcaatgtctaatccaatccaataatttttttttaattatttatatcaaagtttatgatattttttttaacctaactctctcttactacaaaatacatttatgtgaaactttggaagaattttagcataattccaaaattaagtgtttgggtgttacagtctaggatactgacaccttgatccaaagaataagcgagaatgtcatgtgcttgcttctctgtgttttgctcgccaaaggtcaactggaaagattgagataacagctaacccaaaccatttcagcattcaagcataacatataacaacccatttaaaaaatagaatacagaatctactcaagtcgtagctatttcaaaccatgacattaagtacatattgatacagcatcttcttgaataaagcagttggctagtgatttaagacaatgcaaagtttattccaaggttccaggccagactgtgtattatcaagtgtcgaaaataacccaacatgtttaaaattgactcataaaccaatgcctgtttaaaatccataagtgatgtttctgttgtcattggtgtacaatcaggcactggctgatccatattttaaaggtcttgcaga

SEQ ID NO: 7830 - DNA, 853 bp, Zea mays
  Intron number 1 from transcript GRMZM2G310144_T01 (locus G RMZM2G310144) derived from phytozome v7.0 (chr-ID 6; pos 1 03412710 to 103413562 reverse strand)
ccctcctgcgcaaaaacctcatcttccaggtctgctccccaatcgctctgggctatacatgtccctcactcccttttttttccttctctggtgctttcgatttaagacttttacctgccaaatgggcatgcggtttcgatctttcttgtcttgtctgttgacgaagagacttctatggatcacagtcatcacaggatgttcttttggtcgtgtgctgcaggaagtcatgggttgaagtgaccacctgctattctatttgttcccttttcagaattacattcccatcctatttgaatgaagggccacatagacatagttattccacgattttgacactggagtaagtatgcccatagtttcaactgttccaattgtccttttggcaatcgggaggacggggatgaggccgaaacatatctgtggagaatgaaaaaaaccagccgattcccctgtcaatccagagggctctgatctaattcctgcctaaccaaacgtgtcccaatactgatggggacttagttgcaagtcaaaatgaaaagaattgattgagatcgctgtccacaaggtacgaaactttgtttctgaacatcaaaagacgcagtgatgccgcctggcctgcgctggagtttctactgtactgatgttttttttttctttcgcttttcatcttgtaagcctaaaacacgtacgccgccaagcgatccttccaggttattaatggcaaagtgccacggcacttgttcttcaattacatcctggttgcatgcatgggtcaaactaacaggctgctgctccccctccatttcttgtcgttgcagaaacgtaacaggaagggaaccattcggctaatcat

SEQ ID NO: 7831 - DNA, 928 bp, Zea mays
  Intron number 1 from transcript GRMZM2G426483_T01 (locus G RMZM2G426483) derived from phytozome v7.0 (chr-ID 6; pos 1 17012574 to 117013501)
acctcgctctcaacgctgagttcatcaaccgtaaggtgcgttttcttccctcccgcttgtgtattgttctcccctgtatattggagccgtcgcatgtgtattggagccgtcgcagtccgctttcaataaggcgcaggggaggctaggttttgcgatagtttcatcgccgattgccacaccctgttttctggatgatcgagttttggcgtggggaagcccagaacttggtactgaagataggaatagttgatttgattgccgggtgggtttagttgtttgattttaaattctgatcatgattgaccactattcgaagtttagttggtattgaggcaggggttttggcttttttatgctggagctgaagattggtgccgaaaagaagttgagctgtagaattttttttgattaatgtctgtgtcaattttgactaatcccattttgttgttgcatggtatgcttcagtatttttttattaggttagtttgtacctaaaagtttacggaatagcaacataataagatcttgggggcaggagaagaggctatgcacctttgttgtagttcattcatatgaagcatcttaaattgaaatacattacaatgtaaagtttgcacacactgaaatgccgagtgtggctagtgttatattcaatttagcagaaagcatcatgtgaccagttagtctatgattttacttgctgttctttgtagcttcaataccctttgctcactattttttcttctaatttgattcactgttgtacttagcacaccacaatcatttcttatttgaatgcccccaccaaaaaaagttgtggaacctgcggaagtgaaattgtttgcttcctgtcttatagtgaaatcatcagttaattttctgcattatttcagttatcaggatcccctattacgctgaaagaaggatc

SEQ ID NO: 7832 - DNA, 631 bp, Zea mays
  Intron number 2 from transcript GRMZM2G471121_T01 (locus G RMZM2G471121) derived from phytozome v7.0 (chr-ID 7; pos 4 1909531 to 41910161)
ggcagtgagcttccccgtctccatcaccgagcaaggtgtgttctctgtagcctgtactgaatatgatttccctccctacttctatctgaatatctaatcagtgcttacaaccttgaagcgaaatttggggtccgggttctagggatcattcatgatttacatttttggacttggttaatttatgactctctgatgttctatatgtttaatgattctctgaccgttgaaaaatcagtattgcctatataatcgtcttagtacagcaaattcaagtaaggcaacatgctgttatttagagttagcttaatacatggtggcaatgtgtcgtttctgtcatcattgctatatagctatagacccactctagcattgctacctccacctttcctttcccttcatccatagcctgagacactcttcaaccattgtcgtttggtgtcttctccagagttgggcgccgctgctgcgacgtgttctttgaagacatgatgtccctttctttttttctttctttgatgcagtgttctttgttattttagttgactcctaaatcctaatgcatgttttgactgttgttaggcttgctgcaatggcgtcggtgatgtgagccttgaagatcctcgttgcacac

SEQ ID NO: 7833 - DNA, 867 bp, Zea mays
  Intron number 2 from transcript GRMZM2G444383_T01 (locus G RMZM2G444383) derived from phytozome v7.0 (chr-ID 6; pos 6 1908016 to 61908882)
ctttgggtgattcagatactgaggtatgtacatttgaggtgtttagataatttcttagactgtgctgttcgacaattgggctaccatttgaggtgtgcattaagaaattaaactgaggtatgtacattgactcgatgaggcatgctgagttgaaagcatggattcgctccatgatgttcggctttactctcgcattccatcatgcgtggtccttgaactttcaatacaattatatatgacatccattgtttaggcttatcatgtatcaaagcctagtctattgaatatttgcacctcattagtctacatgtcttgataaattgtaaattcattcttctttaggaatggacttgatgtaacttttgaaatttgtatggagcctccttttattataacatgaatacatattatttagttctcagaactaaaaatgtcttctatgcttcttgtgaaattcacgcctagttatttcctggaccagtaaggttagaggatgtgcttgtgtgatctattttttcttggcgaggaactgtcattcttttctcaaacacacaagtgaattgtgtgcctttaggcatcaaactctggcatgaaagatgaatggtatcaatgtgttcatgtgttaaagctatctgagcgaacccttgctccatactaatgtaaatagtgtgattgaaatagtatcagtaattattctaaagtctaaacacagagtttttgttttggtttcctctgtttatttctctccatggttcaataacaatgatttttatgaagtacaccagtgcttgtacattttttaggatatgctttccagtaaactttgatacatttttttgtatgctcactcctactctatctgcagga

SEQ ID NO: 7834 - DNA, 877 bp, Zea mays
  Intron number 1 from transcript GRMZM2G120943_T01 (locus G RMZM2G120943) derived from phytozome v7.0 (chr-ID 3; pos 1 10461539 to 110462415)
cttgcgaggagtggggattctttcaagtaggtgcctccattcattataagttagaaacgtagtttgaactaatcctgttatgcagaaaagtatgtatatcccgtatcttgaagagccaatcaattttaaatgtaactagatttataaaaacatattgctcctttcttttttattttggcgtagttgttttttctaaaactgcaatcactcgttctattaaaaaaatgtatgctctttgaaaactactccctccgttcaaaatatagatttgaagttcaatggttaattttatacctcttcctttatagaatatctgtgtttacttgtatttgtatgtttaatactatgcttaacaatataaaaatatatcttatatatttatatgcatttatgttatgctttggatagaatagataaaaaataaggctatgaaatgaaagggccaatttggtcaatttacttgtgaagtgagaaataaaagaatgaaaaaaaataaatggagtattgttttataaattcatttaatgaaattagcgttgttcttttaattgcttaaaaacaagtgcggttttctgaatactgtctcaaattagttttgttttgtggatttctccatcgtagatgtgttcatgtatgcttgttggttcgcgtcaaaaggaggtcctatgatgtactagtcttctaggacctaaaactgttttccttaaattaatgacgggtaagcgctttcgagaacataagtagtgctgtgtgtgaatgacaactgcttttgcttctttacgaaaaataatttcgtgtaagatttgtgcttatcctgctggttgtcaaaaatagcaattcacttcatttgccgtaactcactcacaggtattgagtc

SEQ ID NO: 7835 - DNA, 978 bp, Zea mays
  Intron number 3 from transcript GRMZM2G032384_T01 (locus G RMZM2G032384) derived from phytozome v7.0 (chr-ID 3; pos 1 39174209 to 139175186)
tcccactaggtgcctttgtgctgctttgcgtatgtcccattcatttcaaataatctgtctgaatcattttacattttgttacttgtcatattgttagattgaaatttagttttcaaaattgaagctatttgctacttcaacttgaaagtataatccagatgggggtcgcatacttgaattctcaaagtggggatgctttacatcgattgtagagaactctctaattctgggttatgtaaattataatctttggtccttactccttagttaattttttctgaataaggtaattttttctgaataaggtatttattatttgtaacgtagacataaactccagatgtactatcttcagtccttagtttttattcttctgaatatagcatagttttttacaaaggatgttgacatatacctttctcaaatcatttggtatttgggattccaatagctgttctggagtttcctagaaacagttaacaagacctgctcttgtagctagaattttgggcttttgagatactgaaattttatggcctttgtagtgaatgcaaaagaataattggtggtttcatagtgctgccttgcttttctgttacctatttaatctgcaagaacgacatggacagttgggggtacaagtagcactacatgggttaatgttgtgttgcatattattaatcaggtttagacacatttggcttatctacttaatcaccatgaactggaaactgtgtgattttactaggagggttgtaggacttttgacagaacacctgagtttgcttttcatttctttttcatttaatttgtctgtatggacatgttctcttttgcttggataccacaaatataattgggaactgagattttgggattaggtcaccaaatgaaaggtgcatttcaagttttgcttctgtgatgtttccaattttattttcagttatttcacctgttttgctaacttattgtctgaaa

SEQ ID NO: 7836 - DNA, 852 bp, Zea mays
  Intron number 1 from transcript GRMZM2G450515_T01 (locus G RMZM2G450515) derived from phytozome v7.0 (chr-ID 6; pos 1 35382735 to 135383586)
gtcaaggcaaaagaaagggtccggtatgatattgacattcccttagttcctttgagttaatgcggtggtgtgaatggggacacttcgagtgctcagtattctgaataatttgcaacagttatgagtatcattttgataaactactcagtactctgaattggaattcattgttttcactgcattttcctacattttgctgcccatttaattcaatgtgagtaggagtatcacatttgcatatcttcttcctaccataaagcttaacaagttcggcttgccttcttgcctaaaattgagttacaatatactttcgacagcgcaccttgtctacttgtatgctgtgttctttgtcatctaaactttgtgtgaactgctgtagctatgagcctggaccggcttttgaggaggtcaaagaataagccatgcttgatatatcaccaacaaactcgacagaattttggttaattcagtggcctaaagaccaggtaccattgatcttttgcataaaattcagatgacaaagaacatataaagagaagcaagatgacaaaattgaggtagggaatggactatctctcaaaattgaggtagggaatggcctatctctcaaaattgagggactaaagaagtaaagagtaaagaaatacttgtgccctttattttatttttttttataataggttttattgtactgctactttttcagtgtaaaataacttttgttttgtgtacttctcttttcatgtaggcatatatcagtatatcaatctatgtttcgtttactcttagttctttcttccttttgaccagcagctcttgtctttgtagtctgagctggaatatctatccttc

SEQ ID NO: 7837 - DNA, 816 bp, Zea mays
  Intron number 2 from transcript GRMZM2G462972_T01 (locus G RMZM2G462972) derived from phytozome v7.0 (chr-ID 6; pos 1 34741759 to 134742574)
agctctctcaggtaacgatttcttgctttgtgaggtcgctctcacactgccctcatctttgttgtgctgaccggccaattaagcggcatagccaataagttggaaaccatcagaccacacgcccagtgatgatggtgtatgtgaacaatatgcagtgcagatggaagctagcagcacaaaagctttgccataccaatctgaaaaggaattaactgaagaaataaatgatcactgttatagcactggctacttctgaatcaattgctgaggcaaatgtatgtttaaataactacagagggagtacataattataaaatctgataaagccctacagctacaggagccatagcttgactaggtttgagctgttgggggtattgtctatgcctggtgtgcctttttgtgcactggttgttctggcctctggtggtaaatccaaggaacatctgtttcattactgtgtttttttaaatttgtattcttttggtccctactgaagtagggcacttcatgataatagttgactttgatgctgtttggactttggatataacatcttgcttttgacttgagaatgttttgttttgcgcaactaatcatgcactatcttatattcaaggcttactatatgggatactgtccaaatacttggtaaatattctgaaaaattctggtgcacagttaaaatgtgctaggtcattttttgccaaactcaatttatgatatcccttgcttacgtgttatccaacttggtgattttagaaatgcttatcagtatttgcttggtttatatgttgcagtgttacaaagaacagt

SEQ ID NO: 7838 - DNA, 1001 bp, Zea mays
  Intron number 2 from transcript GRMZM2G376684_T01 (locus G RMZM2G376684) derived from phytozome v7.0 (chr-ID 6; pos 1 02314370 to 102315370 reverse strand)
gcctcacatgtaagtgttgtgctcgctgttctcctacagtttctcgcttccttcctgcatttgcattgagaacttccttttctggtatctaatattgggtttcgtatctagtctaacccagcttgctttggaataagaggctacaatgttgcacctgctgcttttctgcttctatgtattttcgttcacattttagcaacatctactatgtagtcattatcctcacctttgcatttctctttagacaattcatcagttgtcatttataagattaccttttttctctctcctggattatcctttaataggttaatcaatatcattacctttgcattcctctttggacaattcatcatttgccatttataagtttgtttgtttctcttgcaccatccttttaataggttaatcaatgctatgatattctcatatgcttgagagctcgtgcagttatcatatcttttaacactttgaaggtgttcttgtactttttaggttgttttgtctcttactagatcttagcctacatgacctttaagatgccagcaccattgtagctgcagttacttttcaggatgacatacttgatgttgatgttcattttacctatgtattttgatcatggcacatgcctcgaaccttgctacatgttgctttactaacttgatatgtgtggccaagtatcccttgttagattgttgatcgtggtggtagatgttgaattctgtagttaaacgtggacaatgtcactttatataactattccatggctagttatgggaagtatatattgatgctacttttaactattctgataaactgaaatatctatcatttgtggtgtttatattatttgtgttttgaaggcatttcatgttattttcttattcttcactcgcagtaaatttacctggaatttgaaattcattttcactaattcaatttgaccttgttggacattaatgtattgtgtttatttcagttgcctggcagcacagata

SEQ ID NO: 7839 - DNA, 383 bp, Zea mays; identical to SEQ ID NO: 7637
  Intron number 1 from transcript GRMZM2G036479_T02 (locus G RMZM2G036479) derived from phytozome v7.0 (chr-ID 6; pos 1 51488549 to 151488931)

SEQ ID NO: 7840 - DNA, 822 bp, Zea mays
  Intron number 1 from transcript GRMZM2G020678_T01 (locus G RMZM2G020678) derived from phytozome v7.0 (chr-ID 3; pos 1 50800438 to 150801259 reverse strand)
gctgagtccagtgataataatcatctaagtgtaagaccctatttcacacgcatatgttctgtgacccaattgacattcttctgtttattttcatcgtgtttgtgacatctggtttgtttttcatgttctagatgatctacttatcgttgggttacctgatggtgatggccctattggacatttcaaactatccaaacttgttcttcagaaggacataaaggtactataatgttgtttggtgctatatttcctataattattattgttatctctatatttttttctacattttgttgtcatcacaatgtaacagttatgatgtatgcatttttgttgaaatgattttttgttgaattgattaaattagtatatagccttccatggttggcggttaatatatgacagtatatatgaggagaataggaatcaaacaagtgctcaacctcgaagatccaagcatactagcctagaagtaaaatgttactgcatgccactaaatttatctttaaagatataaactttaatcagataggcatgcttttgattgtatctctgctgaaaaaacatgtcatgcgaatactgaaaaggactaacatgaactggacagccttccgacatatattgaaagtttgatgaagagaattcatgttaagagctatagtcttggccgcacttatgcaaacaccaagatgctaattttaccatattattccacatatgggattgcatcttactatgcttagatgccattttgtgaaacacctgattcttattgttttgtctatagtgccgaactgataagattgtttcaagattttcgac

SEQ ID NO: 7841 - DNA, 981 bp, Zea mays
  Intron number 1 from transcript GRMZM2G027027_T01 (locus G RMZM2G027027) derived from phytozome v7.0 (chr-ID 6; pos 1 10028318 to 110029298 reverse strand)
cctcagcaacctctgcccacctacaagaacaaccggtgaggcttgcaccacaccgtgctctaactacgcagttgagttgctgctctaaccactgctccccacaactctccccctgttacagattcaaccactgccccctacatccgcgccctcaataggcgtgttttgtgttttttaattatcttcaattatatatgtttgatgacccatggggattgagctcatatggatttgcttgtgataatttgacttggatcccccctcatatggattagctacctgttcagtactgtaggcgttttgtgctttagatctggtttagcaaagcctgtttggaacactggttttacttcctatagtttcagaaatttagaactgctggtgttaccgcgcatcagctgaagatcgaggccatcatgttctgtctgtaatctggacagatctgctgctgttttcagctgatgcgctgctggttcctgtttccttaagaggtattttgtcgaagccatcatgttctgtctgtaatcccttctattttgaatcttcgtttgtgatgtgaacgcttttgcttgaccattccagatggctgaaggcatcaccaaacttggaaaggctttctttctcctcgctagataaccctgatttgtgaactaatgtgcctatttccatatcagaaaatatagcctacaattatgaggtaaacattatgtgtaagtaactgtatacaaaggtgaaatggtgcatgcaatttaacataataaaatgcaaaaaatatccaattacctcaactctgaagtccacaggaaatcgatgttttgtgtcccacagaatatcaatctcgttcctatgaagtaccaacaagttgtcttcaataaaagctgtgctaaacacggctctgaacaacataacataatttctttagttgtgattttattttgtttttaaaaatgtctccacgatttcttataggagttgagtggc

SEQ ID NO: 7842 - DNA, 873 bp, Zea mays
  Intron number 2 from transcript GRMZM2G424991_T01 (locus G RMZM2G424991) derived from phytozome v7.0 (chr-ID 6; pos 1 05988244 to 105989116)
tggcagaagcaagttgtatgtagcacatagttatattcatcattgataataaatcaaactattgacttgatccttgatgtatgtttttcaacatttttttgtctacgtgtttagtatcaatatgtaattatattattacactttacagagtggtacacataactgatacaaacctaaaatcaaattgaaaagaacaatcgcataggatcttgatgctacgatatgatgctactcaaacaatactacttaggatatttctcagcgctataattagcctaccttatgattaagcaaggaatagttatgggctaataaggactaattgttgtaactaacaattaacatatattagcttccattagctcagaattagcctatatttggcctttctaattagtatgagaatacaggggataacttttagcaccatggagtcaaacaaccctttttaatgtcttgatgttaataaccttggatggatccaaaagaaaagctgttatacatttttgtgtatatagtgataccaatatacgtgtgatcttttctataaattgtactaaaaaactaaaattttaacttaatgcaactgtaagaactgacttatttaggaatggaggaggataccaacttgcttgagactaaactgttagaaaaactattagtgtttgatccaaaggaccggctaacagtagaagaggtagtcttttgctgctgtctcatcttaaaacttttttgtgtctaatttttctttatggatctagatatgtgatgtcgcttcaaccttactttgtaatcctaagtatctgtggcatttctttcaatatatctattattttaggcattgtgtgatccatacttcgaaggtcttgccaa

SEQ ID NO: 7843 - DNA, 672 bp, Zea mays
  Intron number 2 from transcript GRMZM2G149768_T01 (locus G RMZM2G149768) derived from phytozome v7.0 (chr-ID 6; pos 1 36570298 to 136570969 reverse strand)
atttgctgctgcaacaaggtatgctttcaggaatttttgtttcaaaagcctctagtataatggtatgtgctacttttgcagaatttggtgctagtataatagttctggagttgaatacaggatttgtgaaatgcatatagtggctagagcttcgattaaccttctgtttctttcatatttagtagttagttaacttaatagcattcattagtttgctagtatgatctgttgtagaatattttctcattaattttcatagaagtttctcgctcaattgttccaagtaatgtttagatgttattggaacaagtaatgtatgtacaagtgtataagcatttatttatcttcacttgattggtatggttatttaatgtgctggtactgcagttttattgtaggatgcattgacatatacctgattagctctgtattttgtcatatgcttcttatttgttacatccaggacttgctatgttggctacatatatatgaattacgatacacggtgatctacctatttatgtgtagttgtcactgctgtggtatcacatccacagtttgcctgatgttcatgtcctttattattccattaagctaatagtattattctgttccaagcatatactatctatgtaccgtggataatcaaagtaatggtgttctgttttttag

SEQ ID NO: 7844 - DNA, 768 bp, Zea mays
  Intron number 1 from transcript GRMZM2G149768_T01 (locus G RMZM2G149768) derived from phytozome v7.0 (chr-ID 6; pos 1 36571414 to 136572181 reverse strand)
tctgcgcctccatttcggcctctgtcccttgcaaggtagctaatcctctgtcgctcgatctttgtccttgaggtgctcgatgagataggcagtggttgaaagctgtgctctgttgcctccccgtgcctgaagtgattcggtcttctgtttgcgattaattgtagctactgcgtctccattctcttagttttttgtggttttgtgtgcttccatgtttggatgacctgattcttacggatagttgcttctggatttgataaattacatacgcaccgtgccaccgtagttggacgacttcttaattgcgcttgcggtcgtgttacgtggtcttaataaagtcagatcgaatttttgaggtgtagagctgctgcagtttctatttgaccgatacttgtctttgtagttcatgcgcagtaagagttgtaacctcataatatgaccaaattcctgatctgctttatagagttgttgtgcctaattttgaattcgtcttactggctcaaaattatgtgcgcacgcttattagtttgccctttattttctctgcctgctttatttttttatattacattgattgctctgtttaatatttgcttctttatttttacactgcttatgcgtatcaagctcttttcaagctcaccggtgacaacgttagatctagtttctgatcccatctgataaattgtgtcgttactggtagtattaatttactagtgtttctaatcgttgattcgtcttgttaacagttcaatctcacctccaacc

SEQ ID NO: 7845 - DNA, 710 bp, Zea mays
  Intron number 1 from transcript GRMZM2G109624_T01 (locus G RMZM2G109624) derived from phytozome v7.0 (chr-ID 9; pos 1 55686587 to 155687296 reverse strand)
gcatcgcctccggccgctcgtccgtctccgatccggtgagagctccatttccccgcccattccccaccgcgattggtggcccgggcgctcgcattggctgtttaatggcgctagctaacgtttgggttcgttttgttggggattatctcggtcgtctgttgcggcagcgtttgttcgttctgtttgcttgcttgccccccccccttacaaacactaaagcgttgcacggcctgttgcctcatcaggtagcaagcgctttattatgctttagtcgatttggcatttggctccttgccctttaaaggcgacatcttgtttgtttttgctcaagttttcatttttttccagttggtctaatagatgtggttttggctgtaatgcgttagcaatgtgagcttcataggctcatgtagaacatggtagtagcctgttgaccgagactctactagtaaaggataatgacaggttctggtcagtctattggttcaaaaaaaagttcattcgggaaggatttaacctatggattagtcaggaaatggctcccgttcacaaaaaaagaagaagaaggacatgggtaatgagggttgttacattgaagaagctctgccttttctttttcctataaatgctaaggagttacaaaacaaataaccatttctcgttgtctattgttagggtggtgactctggctccaaaaggccaaaatttga

SEQ ID NO: 7846 - DNA, 610 bp, Zea mays
  Intron number 2 from transcript AC197266.3_FGT007 (locus A C197266.3_FG007) derived from phytozome v7.0 (chr-ID 6; po s 38328625 to 38329234)
cctcttctgggtggtaaagttcaatcccataaggttcctagaactaatgatgcaattaactctgattctgctagcacaaatgaaaaccctattcttggtggaagactattttctcctccagttgtttctagggttcaatagagacatcaagctgatgttgcatttcaaaatcaaagtgaaacataatgacacacgagaacactgatatccatttatattttaaaaaagtacaccatacattataagtttagaaccacacttgaactgattacacccatatgactacaataggttacgacgttacgcttcaacaggagtcttccaaggaaaatagcttaacaaccatagcaccctaaaccttacaagctaaatgattcccactacattttttatcttggggccatcctctgcacagcttggtcacacagtttagcagttttgtttagcgcctcatctcttgtgcagcctcgtctttttcaatatttggtcgtagcagcctcaaccttttcaatatttggtcactcatctagctttccatgtagtataatcgaggattgtggttgtaaaaatcgcaggttcttggtttaccatacaaatcaggagcagtaga

SEQ ID NO: 7847 - DNA, 973 bp, Zea mays
  Intron number 1 from transcript GRMZM2G427408_T01 (locus G RMZM2G427408) derived from phytozome v7.0 (chr-ID 7; pos 1 67028858 to 167029830)
tctttcgcagtcgccgatcccccctcccgctcgaggttgctgtttttctttttgagatttcccccggatcttttcggtgctgttttgttgttgtttcgtttcaggatcgcgtagtctcggcgatttccccgagagtggtccgtgcattctcgcctcgttttgttttgtgattttcactaggggtttggtctgatggatgcgcgtgcttgtaggttcttggaacttcagggttggaggaatacggtgtgcgctagacagcagtctccgcggttgttgtacacttgtacgtgaaatcccatccgactgcaatttatatattttttctgattgccggtgcgttgtttcttggcattgtagtttgctcgtcagctaccgtctgttccgggatatcgacatcgtttgttcttttgcaatgcctttttgttgtggacctctgcctcaggagagaatcagcttgtttcattgaagacttccctgtgtagttttcggtttcgctgatgtgcagaaattaactgaaattggtattattatggccttatggacgatatggataagttatgagtagttctccacctagatttagtattcatctcttgtcaaatttacagagtaaaaaattgcgtaaactttagagattatcactgtaaaagtgcattcacatataagagcttggggttttaaagaacattttttcttaacgtataaaatgtacattactggagtaactagagtccaaataaataagatgcgtgggactcttttaaaccttttaattctgttgtggctactcaagaatatatcaatgcttagtttgattcatatattggtatcctgtattcctgtgatatgatatagatgattttgtcaatttggaactgtagaagcctgcttgatttcgctcttggaaatctcgtgtagctcttctgaaggctatttcttactagctctacggggaaaactttttgcagacaca

SEQ ID NO: 7848 - DNA, 487 bp, Zea mays
  Intron number 2 from transcript GRMZM2G153938_T01 (locus G RMZM2G153938) derived from phytozome v7.0 (chr-ID 6; pos 3 2203689 to 32204175 reverse strand)
attgattggaaactattaggtaaccatgttaaatcttgacactgcatcatgatattactgaaaaactgaaccatgtacgtgattgagcaaacaaattttataccaacaaaaaccaagaggatagccaaaatagataacaataggactgagctggtggtggccattcttcatccatacagtcaaattcttcttagcaaagttgcagtaaactttttttaataaaaaacagaaaaccaaaaggatccagtgcctagacacattcaggaaatagcaaaccacaaagtaaggcatgaaaaaaaaatcaactaatttccttcggctgcttgaacaaacatgcaataaagccagtaaaaatatgaagcattcaaaccttgcaccaccggacttacattaaaaatacgaagcattcaaatttcacaaaagtagtaagtataatggtctaacttacagattgttaatttcacaggtatcgcagtggacgaagccg

SEQ ID NO: 7849 - DNA, 814 bp, Zea mays
  Intron number 2 from transcript GRMZM5G845878_T01 (locus G RMZM5G845878) derived from phytozome v7.0 (chr-ID 7; pos 3 6646584 to 36647397)
tcaaaaaggataaatattttttcatttcaaatacggtatgttatctttgcaacaatttctttggttatttcatgttcaactctttctctatttgctagataagtttctattgcagttctagctacttaaatattcttccaatcagcatacataaacataagcattgttttagtgcctttggaacttctgaagggtgatatttatgattgacagcatctatgtatgtgcactagttttcgatgttttatgttgtaaaatcaaccatgtcatagagttctttggagcagaaagtcattacagcattgatccatcaggattattggtacagttagcatgtgaaatttgaggacataatatgacttaatcaactctgtagaaatgagagggacgggagaaaatttattttgtaaatagtcgaagaacaccattttaaattgttatgctgcaaagtaacaagatcttcacctattgagtattgtcccattttctgattcaactgtagaactgtgattctacccatttttgtaaatttagtgttaggacttaggaggcaccatatgcagttccttcttatttaacattattgactttgtgctattttcatgagataaccttgaccactctttttacacttcagtactagagcactgattctagagcataaaaactaatagaaccgacatagcatacagtaaatctcctttgatttatctatattatgctccaagttttttggtgatttgccatgcactattaaccactctatttacactaccttacaggtaccgacaatcctgtgtagagtccagaaaag

SEQ ID NO: 7850 - DNA, 597 bp, Zea mays
  Intron number 4 from transcript AC217499.3_FGT001 (locus A C217499.3_FG001) derived from phytozome v7.0 (chr-ID 3; po s 221154112 to 221154708)
gcattactaccttctggtgagtccttactgtctcacattttgatgccccggaaatgcgttaagttgccagaaatgtgattccacagaattttactagttcatacttaacggtgttggtttcagtgtcctactttattttaaatttagttgttatccacagcacaatcttgcaacagaaagctttgtcgaaaggataaatattttaaatagcacatactgatatgatgagccgacgatatactgttgtatgacattgtgccaatatcttgcagacctattgtcacatatctcatgtaacaaaggagccactccattctaacaatgtggagtgttgatgatatttttgtggtgtgccaggaataattctttacctgatttacgtgataaatagtatgcctacattattatgtctaggtgactaggtcaatattctaggttctgtttcattttatattttgaatgttatcacaaatattagtttgctagacaacagttttgtgttcttttgatgtgatcttctcaatttctaaagccatcatcttgtctgtaaaacctcgaggtttatttttttttcttttctgcaggacttctgctact

SEQ ID NO: 7851 - DNA, 977 bp, Zea mays
  Intron number 3 from transcript GRMZM2G161102_T03 (locus G RMZM2G161102) derived from phytozome v7.0 (chr-ID 6; pos 1 22545687 to 122546663)
tgtactaggtttctattctatctcgaatataagtttatattgctataatttatgctaagttttaaggtgtaagtgtgtaggtgtgatgttattgatggggtgaaccatgtgggaaagcataagcggaaaaccaattgaaaaaaagaaggcaattgttttgtaggtaggatagtaatgttaatttgcagtagtagtatgtttctaccaaaattcaaagcgcatgccaaattgcgaggagacattagcggagtgataaacaaaagcgggaaagatttctctaagttccagtgttgatttttactcatttagtccttggttgctaattgtttatgggacagggagacttgatgtcaatggggcttgtggcgcagattcgttttggccagtcatgtaggtctagaatgctatgtatcttcttttcttgtgcttatcttcagccaataatgacttggtttaccatcctctctgacaggtcgctttcgtactaggcatttgttgcataattttctatggccaacatggcacggtgtcacagatgcattgtttcatccttgtttgattgggcttggaccaacaagcttgaaacacagattccaattagaatatttgactcatgtcttgtccttcttgattggagttaaaattaataattaattcactttttgtattaactactcacttaactgtgtggcatttttttggcataagcacaaggtccaccagcacttatttgcatcggcttaggcaatgatcaatcatgatatgatgatggctgcagcttaccagcaattaaaatctgtttgatatttcttggattatgtctatttttatgccaaaactgataaatgatgaatatgactcgaaccttaaggttgctcagacggttttgttcatttagtgtttataacttattcatattgacaactgtccatgtttctacagctcactaggataagggacacatcagcagctgaagc

SEQ ID NO: 7852 - DNA, 765 bp, Zea mays
  Intron number 1 from transcript GRMZM2G098606_T01 (locus G RMZM2G098606) derived from phytozome v7.0 (chr-ID 7; pos 4 8961407 to 48962171 reverse strand)
aggtcagtgagcccgcccacactctacttgcttgctccttgttctacgagcttcggctgcgctgaggcggtcatggtcgctgttcatgtggaattagacgtgagagaaggagcgtgcaacgccgccttagctgtggactcccatcataaaattcgaacatggagaaacttgaaccttttctaatgcaacattcatgtgttggtattctattttggtatattatagattttgcaggacaagatggagttggaaattgaggcatatattaggcgacattatgaaggggaaatttctgacatagaaataattgagaaagaggatttagatctagtttttcacttgctctgcatactgaatctaatattctgtttgacgtccataatgaaatgatgtcatggcgataagtttggctctgtttaattgtttatgtctaagatttttctacaggaattttgatcttcttaggtttgtgtcgttctacttgtttatccattgatggccatccttgtgttatagccatagtgatgttcatatatctctagaatttagctgaagttgaatgctttatatgttcagactgaaattttgatattaaacatgtagattatcgttatttaaatatgagtaagggagatgccaatgtgctaattgtttgtttcttttttctgccattttgatgtgcctgggccaggtgtagaatataacttttaacatcccactcttgttgcagaaaaatcatctttttggctcgaacagaaaatacct

SEQ ID NO: 7853 - DNA, 526 bp, Zea mays
  Intron number 1 from transcript GRMZM2G049027_T01 (locus G RMZM2G049027) derived from phytozome v7.0 (chr-ID 6; pos 9 1354214 to 91354739 reverse strand)
aagcactcgtacgacgacgtcaaggagtgcaacatgtgagatctctgatgccacacgaaagtgttgatgtaaacgtctgggtgggaaagacggctttttataagcttggtggcggctgtggtcgaagaaatttgctaacttgtccgaaaaatttctaactaagatggcaaattcgtggtgattgattcgagtttgggtttgagattatagtgatcatagtctctggtcctctaggtcggtcttagttagccctcggttgctacatgtggtttgattcaatataataaacttggctacttcgataatttcactgaaagaagctgcatctgacatgatattccgggaatgcaatgtatctggctgtttttttgctacaaaaatggccatacaactataacttgtaaagctgtgactatattattctaacgattagtttttgtattttgattgttcaaagttaagaatgattgatttccatctttcatcacatctgaatctatgttgttccatactttacaggtacaag

SEQ ID NO: 7854 - DNA, 671 bp, Zea mays
  Intron number 2 from transcript GRMZM2G470950_T01 (locus G RMZM2G470950) derived from phytozome v7.0 (chr-ID 3; pos 1 22158986 to 122159656)
ttcgaaggatcgttaaagatccgtcatcgctacaagtaagtcgcctaaaatttgtttattgatctgaaactgttgggttctacataccaaggtggtccttcggttttcagttttatcgtgtgatttgatacttggtatatggtttgactgtacaacacgagaagaagcttgtggagtctattaaattcgctaacgcatgtggagccatcaccaccacgaagaagggtgcaatcccatctttgcccaccgaaaccaatgtcttgcagctaatagagaagacatagatagatcatcgtatttgctttggttttcactggctaccacttctgcaaattgtattgtatgctgatctggaacataagaagcgggttctccatcttacctgccctttttgctcaccctagctccccttgtgaaaggttgttttgttttagaactctacttgcaataagcagttcgctggtctgccacatacaacaaaccagtcaaccttcgaattcatcagtgccataactataatttgttaagattttaagatcggaccacataacctaggatagttttttttttacaaaatgatcatgtgtctgctttgttgagttaatccactacgacattcgagttttctttatgaagtttcactacgacaacaaccgtactggacaccaaaa

SEQ ID NO: 7855 - DNA, 707 bp, Zea mays
  Intron number 1 from transcript GRMZM2G586401_T01 (locus G RMZM2G586401) derived from phytozome v7.0 (chr-ID 3; pos 1 7568062 to 17568768 reverse strand)
aaaaaaggtgatattgtatccatctattggaacaactgtaaaaccatttgctcatgccctatataatatcttttgaaagaactggaagaataatttgctcatgagtcatgtccttaatgtttctcatttcctgtaaagaaaagtcgtatgtttctattgatggttaatccatctagggttcgactagatggtagaacataataacatatggagcaatacttggtgctaactttgtttttactgatttcaatgcatctaaagtgcatgaaagggtcatgtagaggtgctaaaacacctccgaacccttttgatgaagaaaacaacactggtgccatttactgaaaaattacaaatttgttgtgagactttttttgattcttatctttacaaccactagaaactactccctccattccaaatcctaagttgtctcttgaggttgtatagtggtgtgatcgagatcgttgtctttatgtttctggtgcaaatataatgatttatgttgtaggtttgttgtatttatttagttcttaatgcaatgatgctcagctcttctgtccatttatttaagtgaaaaaacttccagttctgatgtagtttatatgccatattcacttggccattggcataagtcacttgcactctttatttgatgctaactttcttcatttacaaactaggttccactcctgtttggatctgttgca

SEQ ID NO: 7856 - DNA, 382 bp, Zea mays
  Intron number 3 from transcript GRMZM2G340672_T01 (locus G RMZM2G340672) derived from phytozome v7.0 (chr-ID 6; pos 1 26000346 to 126000727)
ttggagggattgaaatcgaggagaactgggacaaggttaagactatttttcttcctactgagaagccaacgacgtttgattaatgtgctcctttgattgcaatccatccattggaggtacttgttgctctcctccttagttctaacctcaatacctccatgttaactcatttctcgcattggaggcactccttatttgctgatcaggcacacaaaaaatttggtgacttcattaaaggagtatttgctgtcttccacatattttggaaatgtttatttgcctgctgtagtgaattaagaaattttcatgtcactatattttcttattttccatgtttataataattatgctccatctccatacggatttctcatttcttgag

SEQ ID NO: 7857 - DNA, 275 bp, Zea mays
  Intron number 2 from transcript GRMZM2G110688_T01 (locus G RMZM2G110688) derived from phytozome v7.0 (chr-ID 9; pos 1 52028462 to 152028736)
ggacggacgtcatcagatttgatctctcacccagggtaagctcagtgttcctctttttattagctttgaatgtgatatgcatgtgtttagctaaatgtttggaatatatgattgctacaggttttttgtgtgtttaatcaagtggtcatttagttttgagggtgtagggactttaggatctatttgtttgtcaatcggagcaaagaaaatcataattcagatttgatttctttgtggttctttcagtttttctttattctaaatttagtcaaaaa

SEQ ID NO: 7858 - DNA, 962 bp, Zea mays
  Intron number 1 from transcript GRMZM5G804047_T01 (locus G RMZM5G804047) derived from phytozome v7.0 (chr-ID 6; pos 1 07623569 to 107624530)
cgccctttgccggctacgagcacccaccacaccaggtacgtttgtcccttcttgcctgtgcaaaactgagcacacgaacccttagctaagctagttggctaaatggctatctgtattcggatctgatcgcccatccggtatcttcccttcccgctgcgcgtaacagagcacccaaaccctaagccagctgtattcggatccgatctaatcgcaggtgtgtgcgcacgtattttggctactaacttcgacattttagtaaaaaaatatcggctgtacatgtctacccatgttctatactcggtccgccacatgctccttctcttcaaagcgcacgatcaatctgcccatcaacggatgctgcttgtttccccaccaaaaagtaaaatcggctccaacccatgccccatggactagctggttccaccctgggatgagcatcatgctagacagctagagcgatttccatgcatggtgaacccctgggatgagcatcatcctagagtgatttccatgtctttgatctttgacggtaggctatccagtgaggaatgcagcatccatcaaatacactgtcttataaagtgcagcacataacttgctttgatcttttttcttgcgttacatgtcgctttatgctatttgttgtgctatgtgacacctgtttaagtctctataaataatcccctatgctgtgcagtacctgtgtagattttatcattattgcatgaactaccaaaatacaatggctcagcaaatgcagctatcattagttgattattatggtatcatgtagattgctgtaactatttgcatgtgtcatcaagtggaattgcttagcaaatgaagctaaaagcaacctttgttttgttattatgctattttttgctggtttggccgttgctaagtttggcatttccattcttgcagatcactgtaatccaggctgaattgtggctggtatt

SEQ ID NO: 7859 - DNA, 714 bp, Zea mays
  Intron number 2 from transcript GRMZM2G041544_T01 (locus G RMZM2G041544) derived from phytozome v7.0 (chr-ID 3; pos 1 40962686 to 140963399 reverse strand)
ttggtgggttagcccttcgtgtgtcctttgtttgctccacgtagggcaaccttcttgtacttgttaggttttgggctcggttttctttaaaacagggtcaaatccatttcttcttaattgagaggcaaagctcctgccattacgttcaaaaaaaatagcactaaccaggctgaagtcaatagactgattaccataactttaaatctttacatgtgatttcatcttgttgtgttactagctttgagttaggatttgcctcaacattttaaaagacataactctgacaaaactgaaattcactctgttacgagtgaaaacaaaactttccacaaatcacattcttttataaagatgaccttagtgctccaacacatgggatcttcaatatccttgttcgtttttttcagaatgaaatccaacagtcagattttccagatcgcaatattgttctgggaatctacttatatctgctctaagttcagttggactaaaattctaactttcttgtactctccaaataacatggatatttgcagctttaccaattaatggggaaagtacgaaaaagcaaaatcttctattaggtgagctttgtacaattgtaatttgacagctaacaaggaaaagataaagcagaaccagactaaggaacataactatcgcaggtattgtgattgggcttagcagtggcatcgggattttacttctcggctt

SEQ ID NO: 7860 - DNA, 275 bp, Zea mays
  Intron number 1 from transcript AC198479.3_FGT007 (locus A C198479.3_FG007) derived from phytozome v7.0 (chr-ID 7; po s 118086116 to 118086390 reverse strand)
ttcaagcaagggcataagtaattttttttattcaggagacatccactcccttttaacgccgtttccctgccgttctgacgtgggtggcatttaaaggataaaaagtttaaaacgatggtatccaagggaacacatatttttgatggcattgaaggtattattatagcttttgatggcattgaagagattttctctttgtttttctcacttccatggcgaagcacgggcactgacctatattccaccttatgaatgtaggtttttgtctcgagagg

SEQ ID NO: 7861 - DNA, 478 bp, Zea mays
  Intron number 2 from transcript GRMZM2G122198_T01 (locus G RMZM2G122198) derived from phytozome v7.0 (chr-ID 6; pos 1 22034769 to 122035246)
gcagtctcttcggtttgctttaccttcgaacagtaaacgttacactttttctggtacacgagatgtagttaagtaaaatttagtccaatgcttgaacaccagtttatgctgcgtctccttgtgtatagtctgctggatttcttttcttcgatcttcagcagttgtttattcaagaatgcaagaaacagttcacacaaacgttggatgattttgatgttcttaggatttttgtatgaggggatactgaagattaatccaatgctataagctctggatactatggtaaagagtacaaccaaataggttttgattaatcttgactacaaacttgctgttttttttttatttgaaacttctctgtttctgtttctggaaaccaataatgttaacacatttgaatatcctaatgatacaatgtattcttaattattgaaactcaataccttttacagcacgtccaatatcgactgcagcaaga

SEQ ID NO: 7862 - DNA, 844 bp, Zea mays
  Intron number 1 from transcript GRMZM2G455664_T01 (locus G RMZM2G455664) derived from phytozome v7.0 (chr-ID 6; pos 2 7548086 to 27548929 reverse strand)
tcggacctcgcttccaccagcaaggtatacgcccgcccgagcccagttcgccacctgatccctgtcgatttccccctcgaattccccgggggattcccgccccgctgccgcccggcggttaattccgcgccgaggtttagatggatggatgggcctgagctggctgagagagtgagagctcggaccctagtttttcccagcgcttgctggcaccactgccttatttccaactgcggttcggcctcttaatctgctgcccgccgtagtccagccccgagttttggggctgtgtgtgttgttgggaggtgttctatgctgcctgagccaccgaatctgttgagctcacgtcccggcgatgtataccggcaacgcgaatctgtgcactggaatgaatcaacgatcactcaatctcacctagacaaacgaagagcagaggctgtttttggtgttgcgaaaagaacaagcagcttctctgttgtgttgtctctttattcagactttctaaagtgataaacatgcagactatgcgcttggtttacaactaacagaatcagctcctcatgtactgtactgattgataggctagtgttggttccttctgtcacatgacgcagtactcattcaagctactcctagcttgcacatggcaaaccgacaaaattcactcctaataaatcgttgtagagttggtagtcctgtttttttggtccatggatcaaacatggcaagtgtggcggtgtacttcacgtgcgcagcaacgtgtaacggcactcttgaatatctcacatgttgacccttgtttgtcacaggataaacttgcgtattttagaataaaggagctcaa

SEQ ID NO: 7863 - DNA, 644 bp, Zea mays
  Intron number 2 from transcript GRMZM2G411134_T01 (locus G RMZM2G411134) derived from phytozome v7.0 (chr-ID 3; pos 1 26774460 to 126775103 reverse strand)
aagtcaataagattccccatcctacaattgacgaggtaggtttctagatttaatcaaaaccactttttgtaggctcatattattttcatgttgcgccatttttggaattggtccaaagtccaaacataaacaaacctaattataagtatatccatgaatttgaggtattgaataaaataatgcgcttgttcttgcacaagaatgccaatatgtttcttatcttattgtaatgaaaagcttgttttgatattattgagttgttcaagtttttgaaaaggaacacaaaaaaggagtcgacaatctagcgtctgggttatatggaaacatagaaatgcttgtgttttttagggggcttctgcttcggttaacacaattttgtgtgagcttaagaacaagcagagtctatggtgcatggctggtacaaaggaactgtatgagctaggccttacgattgcaaccatcaaccacagttgagctaggtttgttggggaccttgagtctgtgtaatagcctcactaatatttggtccctgtatgagtgaggatcctgttggggatcaccccatttctctaatacaataaaaacaactttattaagtttttaaaaaaagtttttgaaatcttgttcctggtgctgacagatta

SEQ ID NO: 7864 - DNA, 643 bp, Zea mays
  Intron number 1 from transcript GRMZM2G060134_T01 (locus G RMZM2G060134) derived from phytozome v7.0 (chr-ID 3; pos 4 6510842 to 46511484)
tatcgccagggcggcagggctccaacgacgtccaggtgatggccattgcgaccgggaagcagctgcccgcgcagaaaaggcagggatttgggtttttgaggaggagatggcggcgcatttttgcgctgtgcggcctgttgttttcgccggcggaggaatagggaggctagatgaggaacggttgcattggagtgagtttttttttgacttttccctataataggaattgggaggaggtgttttgggtactcttgaagatgcttatttcccacgtcctaaacttaagcgactaaagtttagttactttagtccttcaaatagcaaacagatgactaaaatagtttttccaaatagaatgtttagggactaaagtttaggagggagaataaaggaaccaaaccatccctaaataatataacagaagtggtcgtttatatttcacatggcatcactgatgacaaaataaataaagcgtgttacagcttgctggttacattcagtagcctccgggacatcgaaatgagacgaggataacgagaaaaaagattacagatttccatgttgcttgcatatatggactgcacaacggtgacaagaaagtagccaacggtgacacaacctgcgaagtccggtctagcaggtc

SEQ ID NO: 7865 - DNA, 665 bp, Zea mays
  Intron number 2 from transcript GRMZM2G088664_T01 (locus G RMZM2G088664) derived from phytozome v7.0 (chr-ID 6; pos 2 3138818 to 23139482)
ctgcacgctgttcaggttagtttgcaaatactgatgtttgagttgtcacacactgatactcataataatttaaaacaattgaggcaatttatctgctggagtgttatttatcacaaggagaattaattctttggcgatgaacaggacatagattgaaactattttctaacctggttcatatttacttgtatttcttttgtgctacaaaacttgctaaataattctcccttgtgatggggggactctttagtacaaaggtctggaaagttggcatgtggatggtggtaatttgtgtgttgtgttagatgagatattgcaaggcacatttactgcaaagaatctagactattccctaggctgttcagagctgtgactgtcaaacaatgtgttcaaatcacgtcaatcataagatccttggatgttttttcttttgttaagtaaataccttacttgggtgcttaagtcagttcctaatagttttggaaccttgattagcagtttggcactatatgcaggttcactgttcataacagtaagatatttcagtgttgtttatatatcttttcaggttcactgttcatattagttgtatcttacattctgtttttttcccattaataattttggcaggttgcaaagcaatttgtggagtctgctctttatca

SEQ ID NO: 7866 - DNA, 582 bp, Zea mays
  Intron number 3 from transcript GRMZM2G057569_T01 (locus G RMZM2G057569) derived from phytozome v7.0 (chr-ID 7; pos 1 20439667 to 120440248)
gaagaccacatcaggtttgatttcaatcttccaaagtcagaaatgacatttcttttttgttattctgtttcctcattgaacatatttaagctcttgttttagttttcaggtccttttacttctattttactatttatacagacagtcaaccaacatttagccatggagccaatgctttagtgagttattgttacgaccgttgcagaatgtggtctgttagtgttaaagatgccacttgtcgactcttccctctttgctcatctttgaatgaggaaaccagaatatgaaccaagtcaagataattgctctgaagttttattttaactgtatcaatagtctgaagttgtgtcgttctgttagaccacactagtttgagctttattgctgccttgctggtgacagatctgaccaaaccaggtgtagatacacggttgcaccccatttgtttcttgtaagactgttacttttacgtccacataaattaattgacactctagttgaatggtgataattgcgtgttctgaagctttattgtactatctaaactctgaattcacgatattgcataatgcagtctgaagc

SEQ ID NO: 7867 - DNA, 913 bp, Zea mays
  Intron number 1 from transcript GRMZM2G453655_T01 (locus G RMZM2G453655) derived from phytozome v7.0 (chr-ID 6; pos 1 44285998 to 144286910 reverse strand)
aagcctgcagggtcctcccacgcatgcctagcctgcaggaaaacatttgggaaaacgcaagtcagtcatagacaacacaattttaaacatttatttagtttgttacaaactaataaaaaacactaaacccgataacgcgcataattgcatatgtgtatgatggcaacataaagttagctttaatgcaaatgccgagagagcttcaattttacaactagtcaaacaggatgacaagcaaaataagaataaagcagtttagtgggagaggacaaaattattgcttcatgctctgccctgaacataaaatcaacatagaaaataggagatgttgagatgacaaccaaattatcaaaatagcaccacattaacttctcataaacaatttggttcacaaacactacatatacaatatacagcggcaatcagacagagaacagaacattactccatctgtaattgtatataagatagtgtttgcaataacagaactaatgtaaagctacagcatctatacgaagaagtcagaaattttgagcataccatagatatagacaaacaatctggtactgactattaccaccgacttcactcagtagcaatttgattgtaactatagacaatgtttgactcagttggtggataatggatcttcaaaaacattcctttaagttgatcgtgggaagtcatctcctccaaaactttatcttctgagataaacttagaacagtgctccatttcagctttagataacatgttcctaacattattgaactcgtcttctgtagagaagaccaacttggataagtgatccttttctgcttgcctatcatatttgtcaccttcacctgttccataagttatcaaattatatgtatatacaaatttcttctgacctatcctaaatgctctgctg

SEQ ID NO: 7868 - DNA, 941 bp, Zea mays
  Intron number 2 from transcript GRMZM2G348015_T01 (locus G RMZM2G348015) derived from phytozome v7.0 (chr-ID 7; pos 8 9431844 to 89432784)
ttcggcttcgatcgaagtgaagccaccgcttccatgttagaaacgatttcttgctttttcctctctttcttcgatggataaacacggcgccatatgagcaaagtttaataattagattggcacatagtaaagttaaagaaagaaatagagatataataataaatagacgtagtaaccatggtggcatctgctttgtgaatttgtgagtgccctaagtatttttttgtatttttttatcatattatcctattacctagaatcaacacacaacagcaggaacataccttaagacacgatttctttgcattttttttaggaattagaatctaactaatgaagtagactaatttttagaacgtggcattctataacttttcaaagtttatatataagtctatcttaaattcatggggtaagaaatgtaagaaatggaaattgattatatagatttatatgctacttttctaatatacaacttattgcaaactcttttacttgcttctctataatataaatgtagtttataattatctatctcatatgatttaggataatatacaagtatattacatagagaaatatattaactcaactagttttgtctaaattatagacaaattatagttattagaatggaattcaattccaactaaacaaacagtgcctaagagaaataggcctgactgacaacattattgatttgatgcctcgactgcattaatgttaagagtaaaatcataatgcattgccagcgaactggagaaacatatttcagtagcataagcaaaagctattagatatgtcaaagatcaaatgggcactccctttatttcaacagatccatgcagttcaaattgtacatttgcaattcagtacacatcagactgctagaaaaaaattcatgatttgcatcatttattctttttaacagaaaacatcac

SEQ ID NO: 7869 - DNA, 807 bp, Zea mays
  Intron number 1 from transcript GRMZM2G074908_T01 (locus G RMZM2G074908) derived from phytozome v7.0 (chr-ID 3; pos 1 80256139 to 180256945 reverse strand)
cctgcgacatcgagaagctggaacgcgacaaagaagtaagtgctatgtttttcagttttgaatgtttacgtaccaaaataaactgaagccggtcgaaaagtatctggatccatttcaaaatgtgaaacgatattctacttctagtcgttgtccaagccaacctgttctgagacattcaagtgcacatgtgcagacatctagatatggaccacactttcttctcaaatttaccaagccgtggcccgtggtttctgtttgatttgcattggctgttcggagatacaagcagtatcctgttgccctttgcttagattactttgtagtacccaatcctgttcggcgatttatgggtagtttggtaatctaaagctaacgcacatgtcaacattctacattaggttatttgagcgctaacctttttgttcgtcatagatgaaccgtcattctcaaatcaaaagtttatcagttagattgcagaaattactagtaccagttattaggaatgaatctcgtggtgggcagatagtggaggcaacttttatgcccgtgctgcaaacttgcctcagagagttgattagttatttcgattctttcggaacttgtgttgccttaatataagatagaagatactgatattttgtttatccgatgctgatttgttgggtacttgtgtgtattattggtactagtaccagggtaacagggaccagttttccaagaaagggactagttctccaacttcccgtagttttctgatttttggatttcttattaattctgcagttttgggctttggttgcaaactag

SEQ ID NO: 7870 - DNA, 787 bp, Zea mays
  Intron number 1 from transcript GRMZM2G111657_T01 (locus G RMZM2G111657) derived from phytozome v7.0 (chr-ID 3; pos 1 94802810 to 194803596 reverse strand)
agtgggcgaagcgcagcagctcttcggtgccggtggtgagtatctccttgctctgtaaaggtttcttgcatagtttgctttcgagtgtcagttagcttttgctccagtttggtttcgctttaatagatatttatggtggtgaaattatctgagttttttcccctgttcgtgtggacctttttccccaacaagtgttcttagactctagctgctatgacaattatctcccagttgactaatatgagaaccgctaagttcatctgctaaacattactatccctccgtgggtattacccgctccacatattgagatcatgagatgttcttgtaaataagaggacctgccctgtttctgctgttcaacaagagcaaattagattaataagccatcgggctggtggaatattatatgatcaaacttctccactctttttcttaagaaaaaaataaagaagagatgtaactagtgtttatttgctctagtccctatcacctttaattgtgaattgtgatgctagctttatctagtttttttttccagtttctgtttccctctgctatttacatgattgtgtttgaaagtttcagagttttctgttttagcatcgtatgcttgattttcgcaaattgatgcttaatcatcgatttccatctatttggtatgatatggttttcattatctttacttctttgggtaactagctttcccaaattgaagtctcaactttgaaacgttggagttagacctgatctttgtgttaaatatgatgcagggaaggttcataat

SEQ ID NO: 7871 - DNA, 567 bp, Zea mays
  Intron number 2 from transcript GRMZM2G318592_T01 (locus G RMZM2G318592) derived from phytozome v7.0 (chr-ID 6; pos 9 5633024 to 95633590 reverse strand)
ggctgcgcgagatcgcgcccagcgagagctccgaggtcagggagcaccattgccgttcaatgcccatgcatgctgcttgcttgttcgtattcttcttcgacattttggttgttcatattcttttcggcatttggcattaaaggcgcctagcgctactgcattaccacttttcaaatttctttccttttttttggtttgatctcttattgcacttccgttttactctcgatcgctttagaagcgcaagcgcttgcttttttcttgtcatttaaaggccaatggtagtagtcactttctgtaataactgattacaatctagaaggaaacgttgcccatagatcaaatgggagcttgaacgctgaagccaaataacagatctgatctggtgaacttgtatggaggaccagagaagaccgagtaaactattccatgtggtgatgtggatttcagtttctagttatgcagtaacttccttgtcgccttgatctttttcttcctgcccgacttgactaactcttccttctgtttccaggttctttcatcagcaacaaaggcttctggcgtgaa

SEQ ID NO: 7872 - DNA, 890 bp, Zea mays; identical to SEQ ID NO: 5288
  Intron number 1 from transcript GRMZM5G866954_T03 (locus G RMZM5G866954) derived from phytozome v7.0 (chr-ID 3; pos 1 75693825 to 175694714 reverse strand)

SEQ ID NO: 7873 - DNA, 340 bp, Zea mays
  Intron number 3 from transcript GRMZM2G340342_T01 (locus G RMZM2G340342) derived from phytozome v7.0 (chr-ID 3; pos 2 5351841 to 25352180 reverse strand)
ttcttgtcaggagcaattgtaagttttttctacttataaacatagctgcattttctcctttgcatatgtcatgggtttctagtttcaaaccattggaatttactatcttcaacatccatttattatttttcttcaatgatcattatttttttctgacaacatttgaatttgtaattggagcaaaaaaatacttatttttcttataggaaacatgtttttactcatttgtactggagctttaataagaaagtgttgcatcgataaatgaaatttgtactgtaatgagtgaaaccattgctttgcaggccactttttgccaacagcttgctaacaattgtag

SEQ ID NO: 7874 - DNA, 811 bp, Zea mays
  Intron number 2 from transcript GRMZM2G137569_T01 (locus G RMZM2G137569) derived from phytozome v7.0 (chr-ID 6; pos 1 02221228 to 102222038)
ctccaccaggtacctaacctcatcccatccgctccaagttttcagggattcgggttcctttactggcacgtctgagcttgatttgctatgcggcctttgaaaatttcgatcccgggcgagctgcctaggcagccacatacacggcggaatcgtcgaagaaaaaaaaaagtcgggctgattccggtgcgggaccgagccgaatatacctggtgtgagcaacgcgacgcctacgcacacagtaatcctatcccagtcccagcagcagcaacttgcgctttggtccggcaaatgggctgtgaattctgcgccgcctgaccgtcgcccgcccccgccccccacaaacaaggggtggaagtgtttggtttctgtgtcttcaagtgtatctaccctgctagtatcttgtgtggcagcgttgacctggttgattaagccatttttggcatttcgcaggctctgtttacacgagtctggtcctccgctattcccacataaatgattaggaagagaagagtccagcctgaccaccgtcgctttctttttcccaaagctttttagaccgtattccaatgacagcaccggagatctgcattctaggtttaacacatgttgtgctaccgacaattactactagccaaagaccaaagtagaatcactggcaatgaaaaacaccaagttttggatccatcaaaatactacaagctcacaaaaacaataacttccttctctctctctcaagaattgagtattttttgtccgtgctccagtgagcttactgcttttttgctgccagatcaaaagggaaatatcaatc

SEQ ID NO: 7875 - DNA, 748 bp, Zea mays
  Intron number 1 from transcript GRMZM2G465598_T01 (locus G RMZM2G465598) derived from phytozome v7.0 (chr-ID 6; pos 2 8073726 to 28074473 reverse strand)
aaaggaatattgccaggatacaccaaaaacagcaggtaaagtaggtgtcactgggagagtgaagtcctaaacagtaagacttaacttcaagcgaactgaaatattgcttataacatcttcatccatcatgtctccaaatccattattctcttgacagtcctggagtgctggattatccaacaccctccttagtacagtagaagctgttgttagtctttgtacctaaatgtaatagcacaattagaaaaaaaaagaaaataacatggttaatccttaagaatatattatcagagcataataccatttcctctggtgatgagtagtctctgggtccagtgaggtcaagacaacttcttaattctctgtatggcctacacttttcagatttcggtatagatccagcaattccgatacacaaacaaacagtagaaaaagagggacggcggctcggcaaaagaatttgaatgggctcatcagatccagatcatcataccataaaacaaatggagcaaataaaacttgccatgaattggcaagggattatgtaaagaatgcgagaacattcagattattcggactccacaaattcgccatctacacagaggagagaggacacaggaaggggataccttgaccaaccgagaaggaagtagagacgcttccccccataattaattgatcagcaatttccagagttgaaaccgaaatcgcaggcggtccagaaggtcccaggggcaggagcggtgag

SEQ ID NO: 7876 - DNA, 946 bp, Zea mays
  Intron number 1 from transcript AC197030.3_FGT002 (locus A C197030.3_FG002) derived from phytozome v7.0 (chr-ID 3; po s 73135745 to 73136690)
ggaggagaggaagctcccaacgcgcagccgtgaggaagaaaggaacaggaaaaaaaaaggaagtggcggctgtggtttttctaggggtgggagtgcaaaaatgcctccacttgctaggagagggctgctatttatagaggggcattagggctagggttttcttagtgggctgggccgggctggaatgggcttggcccaaaacatgaaatcgggtcgcgctaatttattttttcgaataaaaatgttcccgcggaattcgtctgtgtaaaaacagagcgagctggagttaggacgaacgaaagattgagcgattaattcggccaagagtctaatttgatttcgctcgagaataattacctacgcgtgattcgaaaataaatcgccctgagatttgatcggttttggatttttagtcggagaaggcggatcgtgatattttaaaattgcggtcgatacggggttttgaattcagttcggacatgagatatttatccgagtcggataaattgatttgatgacgacatattaagcattctgtttgagagtacggagtcggattaaaatagtcagacatcgagcgaagttcgaggagttagactagggctcagatcaaataacagtcgtcgagagtttgattaaatgagcttcagatgagaattatcaagttcgcattcgtgccgagaattaaaagttttaacaggctccaaaattggccttctgtgagattgaataattccgaatttggcgaaatgtgaatgaataacctggataatcagagacatacgcgagcgagaaagagaaatttttactgagcatccgagattaggatttatctctcggcgtaacacgaaactgacacctggggtgtcacaatacgcacatacctacaagctacagtacaacatagcacaccagataaaactgggacaagctctgaatctagatt

SEQ ID NO: 7877 - DNA, 907 bp, Zea mays
  Intron number 2 from transcript GRMZM2G152889_T02 (locus G RMZM2G152889) derived from phytozome v7.0 (chr-ID 3; pos 1 42702873 to 142703779 reverse strand)
ttcgtttcttgagggtaaagctcttccatatgttggtttagagtttgtaaagttctgcaataaactactatgtgctatatgatagcagtagctacttttagtggctactggctttaatttattttattggtactgaagtttagtttcagaaaagaacaggaaagctaaacctcactcaagtgatttgaagcctccccacacttttttttcagccaatcaactaatgtcacgattgtgtcatccccaacccctttgaagctagaattcagggttgggggtttgggccttacctgtggcctctgggcttagagggattccagggagcttcccgggccagcactagtatggcaaggtggcggccgcatggatgctgattgcagttattttttgatagtttgatgtgtattttttaagtatgaactatgaagggtaagttggattgaaaagcatcagttaccataagaggtagaaataatttcacttgccaaatttatgttagggtatcttttatggatgattatgtgggaattcaactaaaagatactgtagttaagaggaattgagtctgtagtttgtttttttttgttttattggtgctaaactgctaagatgtatttacagtgtacaaggacagaaatctacctcgagctgagctcaacagcttgctagtaatttttctgtttatgtttttttcgattagatagtaaactactttagtatttacaggcaatccatatagtgctttaatatttggttggtctagtgttttaggtactaggaatatatatttattagattgcgattttaccttttctttcatctcgtatcaaggttaaatgttttcccatgcattaatgcttgattatctatagtatcgccaatagaaattggagttgtcaaattgact

SEQ ID NO: 7878 - DNA, 871 bp, Zea mays
  Intron number 2 from transcript GRMZM2G008764_T01 (locus G RMZM2G008764) derived from phytozome v7.0 (chr-ID 3; pos 2 04281895 to 204282765)
gaagcggccttgctgatcctgtcaaggaagcagaggtatgaagcaagcccttcaaaacttgctttagctggtggcttcgctggcataaggggtttcgcacgtttgtttcgtgcggagttctgccatagcccattgcagttgcgttgccttctttccttgtgcttacttcgtagtactgattattgagttgctctgcgctacgcctgcattatgatttacgcaacatgttcatatgtactcttcatggagatttgcaccagtaaaatcacatctccatgatgtaggaatgattttttacattaacgatgatgattttatatattgtttggtgttgatcatgtgtgtttgaattaatcttggtagggtcattgataagtaagcctgcgtctgatgatgccaccaataatgcatccttgcaatgtctttgatgtcacatttgttattggtatagatttttcgttagctgcagagtgttctgtccgacaataggcctgcagagttgtttagttttaaacatatagttgtcttagtgggtgtttagtggcattgttttcaagactcctgtgtcatatagaatgaaatgaaacatggatgaaacaaacactcaatacatcataaagtttcattatatagtttcataaatatttaatttcatgattcatagagttgctaatcgtgtcaaaagagtttgatctccatgaaactcacttcttttatctattcttaaaactatttgcaacatggtcagaagtgcttatgtcacagcttattgaaaactctgatggaacttccactgaggctggcctaatatcattaatatgtgatgacattgtctggatgtttggatgacatgtttcaaattgcaggcagg

SEQ ID NO: 7879 - DNA, 946 bp, Zea mays
  Intron number 3 from transcript AC188713.2_FGT003 (locus A C188713.2_FG003) derived from phytozome v7.0 (chr-ID 6; po s 66032853 to 66033798)
cgtggcgttgtactggctgcacctcaggttgagcagtaaggagatgccgctcactatcgcagcttcccccgatatacgacctcctacaacttgagtccccacatctccaaccatcattagccctttctgcagttgtgatcctgcctcctcaaatggttaggcttcacactttggttactaattcactccctcccctcctctctccttcctccctagattttgctagatatggctgaatttgtgttgtgtgctcatgaccggaaattgttttcccctattggacagttatagctacggtgctaccaatcttatataagaatttccaaattaggatgtcatgcacattagctaattttgagccaagtttcatctatgctagtgtgaaggcaaacgaacaattacagggtaacatggtaaggatagggattctgctaaaagagcttacatttcaacacacttacttaatgcaggctacttaattttgatttaggagataacattcaggtatgtgttttcttttccctcactaataagtacagagtgagagaaaccatttaggtttgtgcattgctcaaaagtccctacaaatggtgcatttctattcacttgatttcatggctgaatagtatttgtttatagtgaaatactagctaaaaatttagaaaggtgatatgttgaatactccctctgttttttgtaagacgtttgtctcttttgcaatctttggccttatgcaccttgtgttctctggagggagcaggtgtttgcttggagaaggtagtgctatttgagtgaggattgggtgtatatttgtagaactattgctcgatacatgtcattatggatatttccccacttcagcatatgccggtgaccatattatttttcttttgtgtaaaaagagtagttcactaatattattgtgtttttatgcagtgattactcg

SEQ ID NO: 7880 - DNA, 988 bp, Zea mays
  Intron number 1 from transcript GRMZM2G169878_T01 (locus G RMZM2G169878) derived from phytozome v7.0 (chr-ID 3; pos 2 9694219 to 29695206)
ggccactccaccgcgctccagcagaaggtgcggtgccccctcccttgttcttcctggccccgatctgatccgctctctgtgttagggtatgggtgacgtggtggcactcgatctgctgggttcagatctgattttcttggtgacgggatggcttgccggcgatggtgcaggccgtccactccaacgacccctccgggcagcttgaggccaccacacagttcaggaagctgctttctatagttgagattgggatcttatgtgcagttagcattccagatggatagagtttaggggttgagatttgggccatgctcgaggtattaggccatacccaaacgtgagggtatggtcagttgtagctgtttcgggcaattgttgtatacaggacttgacttgtggattgtgagctatcaaaattagtcgttgcaccctctcattttcagattacttaatttactgtctcgtcagaaaaaaaacaaaccctatcctatggcctctgcaacatgcatatgaccatgtatgcccaaaagttctgaaaaaagttatactcctgaaagcatttgatttcatgaaccactattctattttttccagtagtgttctgcttgcagctggggcaattatcattgcatccatgtgtgtgtttgcgcatgcatgtgtgtgttatacattgttttattgtcttaaaatggtatatgcagactatgtgtgtgtttgcgcattagtgtgtgttatacattgttttattgtcttaaaaaggtcatggagagtctgcgtacctcttttcatattcttgtacatcgtagatagcagctttgatatcttgtgggattcttgtatttgttggtgaatccagatgagtgcatggtacttctttcttaattcccactacaactttatgtgaaagttaagtagtaacttgctgattgagtttccataaatttctctcgtagtcccccaatcgaagaggtgatcagcacaggagtgg

SEQ ID NO: 7881 - DNA, 747 bp, Zea mays
  Intron number 2 from transcript GRMZM5G858318_T01 (locus G RMZM5G858318) derived from phytozome v7.0 (chr-ID 3; pos 1 93565962 to 193566708)
tcacaccagctgcgttgttgcgcccaattttgaaggtaaatgagtaaaattagagcttttgattgcaatccaatccaaaaatgcttgtttgctatatttggtgggattgcatcgtcaaagccttttcttgacctctcaaaaccagaacatttagttaaattgaaggatcgtttgaagaaatactaccaaaaggtactgttcccaaatttactggtaaattcacttttggcgagccttacatggatgttcttacgccacaatgcaggcgcacaaaagagttgttgataaaccaattactgaagtcagagaagcgggaatatgcatgcgtgaaaattctttctatgtagacacattgcgtaggtcagtccaatgcttactatatcgatattcctctttacttttgatagcatagacatatgagtatatgaaattggttgtcaatctgtctacatggtagtttttcatggagcaaactgcggctctgttttttactaatgatttagtcatttaaatggacatgctctaaattattcccttcatttgataatccagcttttgtgatagaagatatgaatacaaaggtcttaacaaaacatggaaaggaaaactcgcataagcgaaagctagtggaaattctatgaaagttcaggaagcgcatgtttgattgtgcgctacacatcatacaacctcatttcatgtttcagacatctgaattattttccttctctaacttctcttttgcaggat

SEQ ID NO: 7882 - DNA, 1031 bp, Zea mays
  Intron number 1 from transcript GRMZM2G082794_T01 (locus G RMZM2G082794) derived from phytozome v7.0 (chr-ID 7; pos 3 0272843 to 30273873 reverse strand)
gcgaaggagtttctgctcccgcgcaaggtccgtagtgcatccacaaggttgtcaaaaaactttgtgcatcttctttattgctacctcatttgtctcacgattgatagatgaacaaactatcccataagctcctcgtccgatgggcttgattgacacatatttggtgtccatctcaaataaggtctgccacatatagtagtaatattttccttggtttctgattccatttggaggatccaccacattgccattttctactaagaaaataaaagaaaacaatttagtacacaactctataagcaatggttaaaaatagaaaaattggaaggactaccgatgcagaaaaacaaagaattaatagaattgaagccaaagaccatatatagtgtggaaagagaagtatatgaacaggaactatttgtcagtgaactacaccactaaaaaggtgaaggggcagaggagtagatatttttttttcaaatcagatcaaattaattcaacagagatcaggtccatacagtgcttgagttcacaaccacatttcactcccacagtatggtgtcgtaaatgtatagtcgtgctcaagtataacctggtcagaaggcttgctgcaagaaaacaagttaaaagaacctgtgcttagtattttttaatgaactcacaattaacacatgatattttcattatctgtttttttcaaaaaaggccaatataaacacttcatctgatttttcagctaagactaatataaacacctcagagttctattgtacttctcttgaaaaaatgcatgatacgaagtaaataaataaatttaaataaatccatcaacagatctgtattttttaccataacttcgaaaactttaagacaaagtggactgctttgaaatagggcaggtaatgccaagctaatccaacatcttttactatgaatgctcagtagtatgagttgagtactaaaaggaagtacaattatagataacatcctcaacttccattttgctgcagcaggaacctcagcaggtggca

SEQ ID NO: 7883 - DNA, 697 bp, Zea mays
  Intron number 3 from transcript GRMZM2G041094_T01 (locus G RMZM2G041094) derived from phytozome v7.0 (chr-ID 7; pos 1 26488905 to 126489601)
tcagagttgcatctccagaaaggcaggagaacaaggtactgagtcttaccattattttaatacaaaaaattatatgttgtattgttctttgcaaatcttttgaccatcaaactatattggtgcatttgtgttcatttccattgcattcaattaatcagatccctgttgtggaagtcgtaaatgtgcccaaacacagtaagcagcgtgaccacaggcaagaagttaaaatgtcaaaattccagctttgtaatctacgcacatgtgccactttcattgaaaattgtgctccttataacatatctatatttggcatgaagtgaagacttacgctctgagagcgctactaactattttgctatccataatcgttgttgttggtttgcacctattgtggaaaggtatattctggctttctgactgaatgaacgaaatggaagagtagatggcgagacaaaggcatcaaagggtgcaatattgtaaaaaaagagataaaagagttactttgagcctaataatcaatattgacatgtggattaattaatagacgttagggattcagttctgcaggatcataaacatgttgtcgttttctttctcgctataaattagtatttgtatacgtaatgtattgttgtattttcattttgctactctgataattgtatacgtttcttgtgcagaactgcaaaagcttgat

SEQ ID NO: 7884 - DNA, 844 bp, Zea mays
  Intron number 2 from transcript GRMZM2G503321_T01 (locus G RMZM2G503321) derived from phytozome v7.0 (chr-ID 7; pos 3 3932246 to 33933089 reverse strand)
aattggttacttccaagagagatcataattcagaagtaagttattacctttttccttgcctcagactcatccttctctatttataaagcttttatgtttctcttctaattgtgtagaactgcataataacaacattgtaatgagttatcatatatgtttgaatgaaacagttacatgctctttgtatgaactggacatagattttttgtaatatccattgtccatcccaaaattagcaaagaagttcgacgacattgggggtgcaacatgcccactcatctgtttgccttctgagttgttcccagtcttaggaggaggtgcattttcgacatattcaaattggtaagtatggggtttgctcctggttgtagtatctcaatcaccaatgatgtcaggacgagagttggtcttcaggctttttctcatagaggctttcattttgctacaatgcataaattggataggaaattacactttacttaaacaaaaaataaaacatgttcatagagttttttagattagcaggaaaaaataaaattagagagttataaagcaaactcccttgtgtcacattacaaaatagaaaaatagaggttgttacttgacaaatgacaactatatgtagagaaacgagacaaaattgttgtgtgttctccagtcagtatataaaacatagctttgatgtaagctttcgtgcaccaagtccaccagtcttatttctaggctttttagcatcgatcgtctccttgaaagaatgggttggagctctagccaaacgaaagatctcaaactctttctttttaattattttttctctctcttaacacctatgtcagcttcagat

SEQ ID NO: 7885 - DNA, 1030 bp, Zea mays
  Intron number 1 from transcript GRMZM2G038303_T01 (locus G RMZM2G038303) derived from phytozome v7.0 (chr-ID 7; pos 1 64994678 to 164995707 reverse strand)
gagagaaacttgaaggggagaggaaggagatacaggtacactcctcctgatccctctaataatgagtcctcgattggtcagttctgttcttgagttcactgtcgcttcagaatggatggctcctctgctctccgctgccagagtggcatcgtgctcgctctgctgggttgccaattcgccatgccttagcggcttagcctatagccttgcactgcggtttgattcggttcatctttttcttcaatcttgtcactcacaaggctttccccctctggttttcttgattttccgcttggaaatttgccatgccttagccttgcactgcggtttgatttggttttcttggccatgcttgcttggataagctttggcttcaggcttcagcctagctcgcattgcacgatgtgtttgttgttcctagaatccgagcgcaagttctgtgagctgaccactatttcgtgggttgcctggggtggcgcgttgatgtttttggcagttggggtggatgggaatctgcaatcccttttctattctatctaggattagatgacttgaatctaagtttgtgtagattgtgttgatttcttaattcaattatagatgtgcgataagagtcatcttgagggtatgaatatgcatgtgagaacttcaggggagtgtcgactgtcgagccaggtttctgagtgcgtaataaacttctgaacagctgaagcatctttcctacgaggacctactcggaactgacaactcacaggcacaaaattagtgatatacagtgctgatccactctcggtataaaacaaagattttctagagtattttccactgtccaaacatctgagatggaaaaaaaacctggctgatgatgttaatgagataatccactgaaagcaaataccacttagcactgcaatagatgtaaagctgtaactgataaagtagggtcgcaatccaatacgcatacgcttgtcctttagcttgttattgtcaactcggctaattcaacgctgactacttgccgcacaggttc

SEQ ID NO: 7886 - DNA, 920 bp, Zea mays
  Intron number 1 from transcript GRMZM2G145162_T02 (locus G RMZM2G145162) derived from phytozome v7.0 (chr-ID 6; pos 1 8536591 to 18537510 reverse strand)
tcgcagtcggaagctgacaccaaacgagccaaacagtgagttggattgatattattgtttcactcaatttgaaaaattatgttactccatccaattataaattataagacattttgtttttttctcaatacatagattttgctatgcacttagatgtacactatatctaaatacatggtaaagaattgtatctagaaaaaaacaaaacttataatttagaacggagagagtagtttttgtggactctgtggtcttgagacatcagtagtggtaataagtctgattgttgaaagcaaacacttaagtggaaccataattctaatttgcaatattcttttagactaaaaggtaagcacatagctataccacaagctgcacatcaggttgatttctcttatgatgtgctttgcttaagaactgaattaagtgttactaaacagtgcaaatgtgtctgttctgaatgtcttgtctatgtatttggatagacattttattggtctattggctgtggcaattccacaggagtacaaacttaaagtgggaaactctactcatgtggagtagagtccctaaaactcaagtaactgatttcaaaacaaaatgattgtatgcacaatagagggttttagattagatgaccactgagcaatcaatttgtaaatagattatgcgggaagttctttagctccttaggatgtttaagtcctaataagatggaactgtacatgtggaatgtgtttgtcagtgtgtgccatctttaaatttggaagaagcttgaatgcaaaataggtgcacatcttcatgtgcatcgagtttcattttggcttcagtatatgctgacttaagtctgcacaatgatatttttacttttgttgacaactgcagacaatacgctcagagatctcgtgttcgcaagatcc

SEQ ID NO: 7887 - DNA, 694 bp, Zea mays
  Intron number 3 from transcript GRMZM2G179090_T01 (locus G RMZM2G179090) derived from phytozome v7.0 (chr-ID 7; pos 1 5471041 to 15471734 reverse strand)
tgctggtcaagaacgtttccgaacaattactactggtaattattttcgcctttttttagaaaaaacaaaactctgatcctcttgtggtgctactaccgtaggcataatttcagaagcaccctatacatgaccttaagaaggctcaatctagaccaagacattaacacttacaaaatgatagatttatttgtgtcctgaaattatacacatctggtacttttttagaggaagggatggaaaatagtttgatgcgattaaaaaaacacaactgtcttgtggctaagctgggctgactgagccatgacttattagtaaaatcttgtttattattatgggttccgaaagagctaaagcccaccttgatcatgaagtatatacagaaaactgcctaagcctgaaggttcaggaagtacatgccactacacgtctggtgttgactagtttcacatgatgagtaaactataacggttatatgtcgttcatctgtaaatctttcaacggcgacacgtatttcatgtataggtcggtaaatcagcgacatggtactgggtgctggatcgcatatattttccatagcctagcgaatgcaaagtcgcgatccattttgtcgatcttcaagcaaaatacctgttcctttgatttactgttctttttttcttctctcccccattttgcagcctactacagaggagcc

SEQ ID NO: 7888 - DNA, 555 bp, Zea mays
  Intron number 1 from transcript GRMZM2G142150_T01 (locus G RMZM2G142150) derived from phytozome v7.0 (chr-ID 7; pos 1 45307459 to 145308013 reverse strand)
tcgcttctgcgggccttactgtgctgattgatagggtcagagatgctcaacttgcttacataacatgcgtagatcgaaaatacactatacgtttacgtgccgtacaagggagtttcagtatttatttatttttaattgatgcattggttcctctgttgaaattcaaacttctattgcaatcgtttgcaaaattgttaaccaagatcaagtggtttcttaagaaatttcaaggttgacaaaagtttatgttcttaaaaaaaacaaagtgctcaagcatctgtcacgagtcgcctctattctcaatagtactttggtttcgataccatggaacaaaactaactaaaggaatcattctgatagataacactataaatttagaatacactcagtttttaacactagtctatgcctctatggagacatcatgatagtggtcaatatgtttcttcaacagttgcagctgtgcttggcactataatatgtttactatatcacaacacactatttcttatggagtcgtggtttattcacatataggttaagtttttgaaggaa

SEQ ID NO: 7889 - DNA, 927 bp, Zea mays
  Intron number 2 from transcript GRMZM2G141941_T04 (locus G RMZM2G141941) derived from phytozome v7.0 (chr-ID 7; pos 3 5611013 to 35611939 reverse strand)
cttgatccacttgaagtgttcagtacattctgtaggttagtaccaaccttttgtgtaaatgtcaaatgaacatattaattatgtgcttcaggtctctgtttttttcttgatctgtcatttccttttttttgttatataggatgtgctcagttaggccattttttacagtaaacctactttatcatttttttccatgccattgggaagctaatgtgaactttcacggaatgacatttccttgggtacaagcactatatttaccttgtataggatagtcttatttaatgttgccactatgtcttttaggacaatatatattgccatttatggccagtaattctcgatttgttttattattgtatttgttatatagaatgtgcaatttctctgcaactttcattgggcggcggtacttatctgaatgtttatgtcctactacctttttagaagtatgttttgaaggcaggagatcctttcctttgaaccagaatgccctctttgaaactaaaatatctgttgggaaccaaaattgtcccttaaatgatcttaatattaatttaataaacttcagtggaactttgatacttattattgacttatcttctttcttggtcttggcacttgcttttgtgtttatatagaagaaaaaaaaatctgttctgatgagtacagaaaaatgtgttttcagatttttttttttgcttaaactgcttaacttcttaacttgaaacaacaacttattttttcaacaattctaactgttaagtgaattcaacacagttggtttcaagatgacaagtaagaaaagtaacagatctacagtcacaccacacactgctctgcatatggaatgggacaggatttcttgccctatttgtatggagcaaccccacaatgctgttttacttatatgcagttcatacaaga

SEQ ID NO: 7890 - DNA, 460 bp, Zea mays
  Intron number 1 from transcript GRMZM2G353967_T01 (locus G RMZM2G353967) derived from phytozome v7.0 (chr-ID 6; pos 2 8237542 to 28238001 reverse strand)
tgccatcatagagaattgggtcggtttcggcccaggtaaaggtgaggatttcactatttcttttgtttttcttttactgttttctattttaaattccaaattcaaacagaattctagtttcaaatttcaaatacacatttagtcaaaacttagttacgcatacatgaatatatttttattaatctattcattattttatttataaaatttgcttatgaatatgtcactcgtattaatttctaatatatgtcatatgttcatttatatatttcaaggaagtgtttataattatattactcatataagtatcctttttatatatccctccccttataacagaagacatttcttttaaaagaaatatgcatcattaataggatacatgattaacatagattcctcatttcattttttttcttgactagctaggttttttgtagaagctagattccaggtttta

SEQ ID NO: 7891 - DNA, 985 bp, Zea mays
  Intron number 1 from transcript GRMZM5G874840_T01 (locus G RMZM5G874840) derived from phytozome v7.0 (chr-ID 3; pos 1 89600602 to 189601586)
gtgtcagggccggtcattgggtgagtgttctcatctgcttttcgtgtttagagctatatccagcgtggtaatagtttgactagaggctcggcaattggcagttggtctgacacgtaggagggttcaaacttgaaaagcataaataactatgatctcttcatttcgagcctgcctctattccagtaaccatctcactgtttaattgtgtttatttagctgatggcatatatgtatcacgatcttaaaaagccagtgaagtcaatactcctgaatgatgtgtgtatcggtctattgattaaggattgggaactgagaacatttgaattggggagactcagagaattcagatcaacaatttgaaccggcatatttctctaaaatatagttgctctagaatattaattagaatatctggtcacaaaggcttcaggcttgcacactctatcaacgtacggacatgaggattataggttttggagttgaaacatgttagctatttaatgatgttatctatggtcatataaacatgtgcttcaatttgatcgatcaagttggcacatactaggaaggagcactgaagttgggttgtttgcatgcaaagtgatacttcataacgcaaatggctcagcttatgtgtcaacattttttaatgctaaggtcaggcaatcagctgcagctgttgcccaacataacttgaagtcatggaggattggaggcatatttcagttgtacacatcaatctttatgcttatcggtaccattgtgccatctctttgatgactttgtgttgtcctttttcatctaccaaatgtttgtgaaaaaaaaagtcaaagtagaccttctttggttctgttgttctggatattgatgaatttgctgttcttctgtcctcaatgttttatcttgctctctatgttgcacgttattattctctattctctattctctatggtccttttttctaagggaattcatgcactatagg

SEQ ID NO: 7892 - DNA, 988 bp, Zea mays
  Intron number 1 from transcript GRMZM5G889152_T01 (locus G RMZM5G889152) derived from phytozome v7.0 (chr-ID 6; pos 5 2886540 to 52887527 reverse strand)
tttttgcctctggtaagactctttttgttccattcgtagttgcagcttcctactatgttcgttttaccgtggctaaccttaaacatcatctaaaattattttttactataatagtgtatgatgctgctagtaaaaataattagtgagttaaattgagcatttttacaaatatgttgaacagactttttctttgtgtgggtgggtgttgtataaggcctcctaagcctacaaatatagaaaataaatagatatttttagtatatatttctagaactgctacggtggtgggagttggagggagagggaggaatatgtattagagcggacactttggagaatctggttatatatgtgtttattcagtcctagattatattacgatcgttttggtgtagtattttttaaaaaagagaacctacatccacccttagaatttggttgcctttgcctttgagaatattttcctcgggataaacgagagctttagagggtgttcggtttctagtaactaattttagtctctttattttattttagttcctaaattatcaaacatgaaaactaaaatatagttttcgttttcatatttagtaagttacgaactaaaaaggaacaaattaaagagactaaaaattagtcattagaaatcaaacaccaccttatttacccgttagaagaagtattactatctatatatggcaactagttagttggggataatgcaagtaacattgtacctggtcatttcttgcaaataaagaaggaaacccatgaaacggaaaatgaacacacgactacacgagtgaagttttcataccattttagaaggacgacagcaaagattcgccgctgtttttattagacaagaaggttccatacaaaacgcaaaaatgtgtggattttactatgatagctgctatcttcctcactcgcattcacatctctgcatgcaggcggtcgccggagtcgtcacggtaccaagtcttgt

SEQ ID NO: 7893 - DNA, 720 bp, Zea mays
  Intron number 1 from transcript GRMZM2G381473_T02 (locus G RMZM2G381473) derived from phytozome v7.0 (chr-ID 3; pos 5 7098906 to 57099625 reverse strand)
ccgtgcactacaagtacaaccccatcaagaccatcatatccttactcggttgcttcatctcaatatgaatgctaatccaaatttagtttcgttttattggttatgatcttaatgattgatggctgtgagcctgtgactcaattcattgctgtgttgttttgtgttagcttttgtttatggtttaattttgtttgtttcggatgtcttatataggttttattattttatttttgaaggtgaagatacattttagaatgagggttggtaaaagtagagcatttgagggtcggtgtttccttcctgcatacaaagttatatggttgtattgctctgaagaaatgttattggatcaccaactggtgatctcggatagggttgcctgctaattataattttaatgatatcattgcttcaggtttttataacttgtaatgggagtaaaggtcaaagctgcagtagactttgaacctagttgagctgttgaaaagttttgattgtagctgcaaagactataataatgttgtgtatctctcacttcactgtcatatggctttcttattttccaactagtagtgctaggggaggtgtagcctgagtgcctagctaccaaactagatcctcaaatagtcataacgtcgaagaagaaaactgatgttagtgcttgctctatctttttgaaatgttgttgtgaactttaacttttgagatggcacaagacaa

SEQ ID NO: 7894 - DNA, 781 bp, Zea mays
  Intron number 1 from transcript GRMZM2G364265_T01 (locus G RMZM2G364265) derived from phytozome v7.0 (chr-ID 7; pos 4 4721315 to 44722095)
gtcaacgtttgctagcttatttggcaaaaaaatagagtacgttataagaaattaataagtcagttggatattcgggagaaataatttaatcgttctcatttttttcttattttattagtagtcttatagtagtcttagattttgcattttgatgagcttcgttttgaggaattcatggaataaagaataagaacaaggatacataacataaaaaagaatagataagacgatattcgccctccccctacatatttgattttttctcctatacaaaaaccagcaagacctactccattggtaattccatcaatgacacctttatcaaaaaatgcgttagttcggctaatcttcttatacctaggataaaaaccctagtatagaaaaaatctatataaccacgattatatgaccagttgtatatcttttttttacttcatccaaaaagctcttttttggattcttttttacaagggaattttgaaaattcaaattctgaaaaaaaataataagcagatccataaaagatatatgctatgaatagaccaaaaattgctaaacttacagaagaaattgcattagtgagaaattcatatgaatttatggaagaattagaattttcctggaagaagtttattgaaggagttagccactttgataatatggttaactccaatattctattatcttttactccattatcaaaatggattcctatggatccaatgaacaaagtaaaaagtagtaatataagaagaggaaatagcatagtatttcccgtttc

SEQ ID NO: 7895 - DNA, 778 bp, Zea mays
  Intron number 1 from transcript GRMZM2G064189_T01 (locus G RMZM2G064189) derived from phytozome v7.0 (chr-ID 3; pos 2 21394 to 222171)
aaggcagcgccgtttctgaagcctctgattgaagagtacgtctactttaacatgctataccttctgcacaatttattttcatttcagttctaccgatagtagttatattgttggtttaaacttcccttatgttggacacatattggtgccactttgctcgtaccatcaattaggtataactaaaaaaattgcatgattatccctttaggtcactgcttctgcatatgatgtcatctcgaaccatcaattaggtataactaaaaaaattgcatgattgcccctttaggtcactgcttctgcatatgatgtcatctaactgactttgatttaactgggtctgggagaaaacaagttactggaagaaagttaacaagtaccaaactggcatacttttttttggacatgcaggaagctgtttatcattatatgacttgcagaatcatactcgccagtgcttgattagaaaaccaacctcaacccaaaaaacaaaaaacctttttttctggagtgtgagaagatgtgagccacctcgaaccccagccaaaccccataactgtaactcctctgtagcaagtgataaaaataccaatcagactaggacaactccaacgaagacacattgattatgatggcactaaattgaccaagccccaaattggaattttttctttttactctgttataatgggcatgtttcttatctctgaaaccttttagttgaattgtatttttcttttcttcaggcatactattaaatcattcatccaaggtttccttc

SEQ ID NO: 7896 - DNA, 493 bp, Zea mays
  Intron number 3 from transcript GRMZM2G059121_T01 (locus G RMZM2G059121) derived from phytozome v7.0 (chr-ID 6; pos 1 51441610 to 151442102)
ggctgctcatatacgaagcatccagagattggttggtaagttgaaatcttttgcctggttgatcatttttctgttattcttctttctcttctaatgttaacattaagctgtgctagtgaagtcggagtaaagctaagctgtaacatggtatgggcaattatatttgtagggaagaatattgagtgtaatatatgaatcaaaattcatcacaattttttagaagtcttcatggtcacttcttagtttcctcatgtactttaatcaaacatgtagctatgtatcgtttctgagaatactgaccacaacaccaaggcatgaacatgtttcctcatctttctatatcacgaacaatgtgttgcgccataaaaagatgtttggatcagtcattattagacagggcaatcaactcaatgaatagaacaccaggaatcgtgataaaccgttctgaacccttgcagcctacaatcacaggagagattgagacacctgtagc

SEQ ID NO: 7897 - DNA, 931 bp, Zea mays
  Intron number 1 from transcript GRMZM2G022224_T01 (locus G RMZM2G022224) derived from phytozome v7.0 (chr-ID 3; pos 1 59910268 to 159911198)
tttctaggtgtgttacttttgcttcatcatcaaatatttgtttgtcgttcatattatctagctaattttattttataactctatatgaatatgtatatggaatgaggccacaaccagatgcttcaaacatacctgaatattatgactccagctgaatatatggtccatacacgatttgtttgaagaagtgtgttatggaaaaaacattgtatgcacttaaattgcagttttctatttgtataagtatgatttatatgattttgagcatcaaattatttgtgaattttgcaacgtgatttgaacaatttgcaaatataccatatcaaagtttaaattttttcctaattgaaggtgaatcagcagcgaaactcggtcgagtatcaaatcccgccgagaaataccgaaacccgttttttcaaatttgaaaaggtaaatcgagtgggacgggcgaaattcgagcaaaattcggtaaaatttcattttcagcagtagccgggaaacggtaaaaaaggatttgtaatcctgggcagcaaagcggaagcacccgcccgctggaaaataaaagtggcacaccataccatagagagaggtgaggcggtcatgcccatgcagacagtgcgaaccagggaaaactttctcggcgagaaatttttgagaaaactggaaatcgcatttgtcggtagggcccggttatttcccttgccgctcaaaattttcagttgttttgaattcagccgacctaatcttgtccgcatgtatttgggttgtgaataaaaggtccaaaatactactcatatataaatatggaaccctaaaacatctacagccgtcacccgctagccagtcaccgccgttcagattttctccctagcttctctgctgttctttacgtgcaggctgcaactcttcaaattttctccatcccgccagc

SEQ ID NO: 7898 - DNA, 1009 bp, Zea mays
  Intron number 2 from transcript GRMZM5G854930_T01 (locus G RMZM5G854930) derived from phytozome v7.0 (chr-ID 7; pos 4 5822053 to 45823061)
aaggtcacccttcgcttccttcgtcggttagaacaatttgaattaggtcgtgttagagtctggagtccaaacaaacgcctcaatttgtccatatacaaaatttggctcggcttccatcaatgtccataaattagatttgctctattttttatattgacatggagaattgcataaagctgctgtcagttagggacttatggtgttttaatcagcaatagaaagtaggtaatgttagtcttagtctaacttgagatcaacaaaattgtgtattggtttcatccaacctaagtttcctctacaaaacacagtagttgagcatcattctatttttactgcttccttcagtatgtggttaaattcagcgagattatattccctaccaatttcattgttggtgctgctgatctaagttggatcttgaaatactggcgcatatttaatactactaggaggttacttgtgtttataatgcttatcatcattttttgtgattattgcaagtcatagcgttagcccaagatattttgacaattgcaaagcaaacggagaatgcccagaatgttgtaggtctatcaccactaggttattcagctagagtccagtctgaggtagctttattcttcggtactcgttagatgggttcttttcttagctggaattctgaataagcgatatatacatggcaattgttccattgataaaagggattgtcctgactaattacaatttacattgcttatattaagacataatggcttgctttcctactctactctgacagtcttgtggcagggagtggatgatctttcacattcccataggtttgtcgttgtactagagttcaagctgggtggagtgaagatggagaatgtgtgagcttctctttgatatacctatcgtcgtttgtgtctaggtaatcttatctttaatacttttcacttcatttcattacaacatactctgtggtttttcagggttagttatcggtggatatcgcagcttattgcac

SEQ ID NO: 7899 - DNA, 1023 bp, Zea mays
  Intron number 1 from transcript GRMZM2G119879_T02 (locus G RMZM2G119879) derived from phytozome v7.0 (chr-ID 3; pos 4 0877709 to 40878731 reverse strand)
aagtttaggtaaacctgcatacattttatatttacttagcatgcatatgcatctatttcataaacgttgtatagttttctaccttgtaacttaagttgagcaccatacttaagaagtatcaaaatcatcaagtttcaagtttgaactgagttccattctcttattcaaagataacagtggcatgtctattctgcagcaattcctgttccataggccactagaatctggttatttttgttggagtgaagtgcattgtgagttcctaaaattcgttaggttgtgccattggagtccctgaacttggcagctgaagattcaggtcaaggcatgctcaaactatatcggtagtgaaatagggcatggtattagagagaactgcagattgttgcaattatcatgtgaaatcagcaaggatttcatattctggattatagagcaaactgaaaagttttcatatccttactttctttgggcttaataattagcaggaccatgctaagcttatgagccatttgtatcccttgtgggcctgacacaaccaattttgttagacataatcatgtgttgagtgtctgatttggggtagagttccattggaggtagggcgtcgagcggggtcccgtgcggcagcgccaggcgcggtttggtttcgttgggacttgtgagcagctatcacttatggtagccggctgcctggcttggagccgttgagctcgagtcagaactgtttatcttggaacaattactcagctggacctgccgatgaacaattacgagcatgagaaaattactctaggtttttagattgactatggactcttgttgctttgttgaacacttgaaccaaacttctataaaatggactcttgcgcacttattctagactgacattcttttgtactgagtcaccagtgcatacttgctgatattttgatgttggattgggtaacatctgaacatcttgtgcccactcttgactgttattcaggtaatagaataaacatagaaggcgctttcagtttg

SEQ ID NO: 7900 - DNA, 662 bp, Zea mays
  Intron number 2 from transcript GRMZM2G049758_T01 (locus G RMZM2G049758) derived from phytozome v7.0 (chr-ID 3; pos 2 0645776 to 20646437)
tggatcttgagcgaccttacacaaaaaagaaagaggttagtatatattgatgatataatctaaacaagagctactcgacttaacttaagtttcggcggatgggtagcttgattcttcgtgtggtctaatagaaagaaaatagttgcatcaaaattaattagggctctaatgacagctatttctaattgtttcagttacgttattacttagttctctgtatttcctatttgtttcactgagatcaaaattttgatatgtaattccattttttctattagatccttacttactattttaaagacaactaactatatactatttcaaagttttatgtgttctttgaaaacagctatcaatacatctgtatgtactaatgtatctttaaagtttcatagttctatcagtgtgactatgctcccttgtaattgttacatgcaccctatacgagcgggggaagagggggagcgaggggagcagcaatggcggaggaatttgcggcccaggcggaaacggaattggggagcagatcaccatgtttccaaactactttcctttagacaaatagaacaataataaactaatatatgtccattgatttagaagaaataacttgatcctcaatttcattttgcaggctagaatagtaggtgggacaggcactg

SEQ ID NO: 7901 - DNA, 627 bp, Zea mays
  Intron number 2 from transcript GRMZM2G002396_T01 (locus G RMZM2G002396) derived from phytozome v7.0 (chr-ID 7; pos 3 3376154 to 33376780 reverse strand)
tggtgagcgccttctttgttatattcaaattaattgataaacttgaagaatatattccattcacacaaagctattaacccatctatatccccttcctttcaatttataatttatctgacctttttacctcaaatttaattggctcgccttattcaaaaaaataatattattattattattaacttttattgtagtatcgttttagcatctaatgtattttaagtatgctggttttttagtttttttttaaaaaataagataagctggtcaaacatagtacagaaaagtcaaatgcaatataaattactcactctgtacaaaaatataagttattctaaaatttttggagagtcaaagttttttcaagttttactaaatttacaaattttaaaaactttgactctccaaaaatcttggaatgacttgtattctgaggagggagtatttcacttctgtatgatgcagaccttattgaaagtatttagccccaaaatttgaagtcaaccagcccatattcttcgaagactctcaagaacagcttactatatgtttatccagctaacagaaggaaataatctatttacttgtgcgtgcatatgtgtatggcggcagttatacgcagctatc

SEQ ID NO: 7902 - DNA, 323 bp, Zea mays
  Intron number 2 from transcript GRMZM2G159899_T02 (locus G RMZM2G159899) derived from phytozome v7.0 (chr-ID 7; pos 2 2627848 to 22628170 reverse strand)
atagcagattgggcccgggggaagattatgtatgcctcgtttttatttagattagtttttttttattcctaaactgcttgcaatttctgaagaagattatgtatgcatcattattttcgttctgtttcattttaccttttttttctaatgctttgcgacgatggtgctaatttctgcaggtgtctgaccttcgcatggcagacgaggtttcgtttacactctatcgatcgttcggtttttgatttctacttcatcttttacagtaacaccatctgttcgtttgtgcaggaggagttggaccatttctaccgtgttctcgccat

SEQ ID NO: 7903 - DNA, 939 bp, Zea mays
  Intron number 2 from transcript GRMZM2G111846_T01 (locus G RMZM2G111846) derived from phytozome v7.0 (chr-ID 3; pos 8 802987 to 8803925)
cgtccttcttcctcgacgcaattgtggagtggagggtatgcgaccttttctttttcttgcctcgtttatttcaatctctgtcatctctagatacactttggaagtaacatgggagcttaatttggtgcttagagcatcagaaagggtttaattgccttaatcgttgtctgctgtgttgccctgagtgttatattgtgtaatatagtcaggattacatccaataaaaatggaaacatcttcgaaattccactcagtgtggaatggaccttagttccatctattttgtttatttcttttgattgaagaattaacagaattcaaggctgttcacaaactgcacaaggccatgggcaaaattttgttcacaaatcgcacaagcacaacttttgctaactctatctagtagaagcatagaatacctaaaagtttgagggcatgtttggtttcctacctaaggcgccacaatctgcctaaccttaggcgctcgaattgaagaactaaggttaggcagaaaagtttggcacattgtggcgtcttaggcaccaaaccaaacaacccctgaatccatcctgctgccacgctgccaccccctcccaaacaattgatttacttaacttttttgtacctcagcattccccagcattctctgttgccatgcttaagctgcatcatgcctcaatcaccttactggccaatgcctgctccatggttggctaggtttttttctgccccgtgtcttggtccaccactatgcatggcttgagtgaaatgcaacactctcgactcgaattccaccattggattgctcccaccatcgtactcacctcgcatcacctgctactgacaaaatcacaccaccatatatgttttcacttcatacttgcactttgtgtgtgtgttacagttcgatcaacttctgtggcttccatcatatttgat

SEQ ID NO: 7904 - DNA, 969 bp, Zea mays
  Intron number 2 from transcript GRMZM2G383833_T01 (locus G RMZM2G383833) derived from phytozome v7.0 (chr-ID 3; pos 1 88807693 to 188808661)
gagttctcccagagcgacggcggcggcaacgacgggtgaactttccttccctcttctgcgctctatccctccgatctcgtggcacccctttcgttgcctcaacgatatgcttgtggcctgctcccggtgcctgtctcgtgcagcggtatctcgtatccggagtcccgagccgccggtgggcttggtcctctagctatccgtttcgggcatggtttcttagttcgtgtgatcaagtcgcctcgtaaacgcatcgatcgccgagctgacatgtataatgatcgatgcatcgtatgcgttcgagctaggcaggcatgccctggcctatctatatggtatccatggtccatgcttccgtagttccgtcgtgatgcaaaccaccaccagtgatggagattgccggcctgctggggactagacagtgtcttcgttttgtgcgcttgtgttgttgtacttgaaccactgctttcacctgaagctctgaattgatctgtcagccgtggctattgctgtacgttggaagagttgccagttctgagtttctgactgtagtgcacatatgtttcccattcagcaatgcatatgattttagaaattcatgagatgaaatattctacagctcggcttcagtcgcaagtccaattttcctattcttttatcccaggtatatgcgtcaatgtatccatggcagactgtaactgtaagcaagtctttactgggactatttgagtactgaaacctgccgatagttgaatacttaagtatggctaaatatccagtttgttagtgtcatctttctgcagtgtcataaaatagctgtctttttggtttgaaaaataaataaatgaatgtgctacacatttcacagcactacacagatcgaagatcattttcaggttcatggactttgaaatatttgatgttttacataattcgatttgaagcttatgtgaactgctttctttcaggttt

SEQ ID NO: 7905 - DNA, 923 bp, Zea mays
  Intron number 2 from transcript GRMZM2G011662_T02 (locus G RMZM2G011662) derived from phytozome v7.0 (chr-ID 6; pos 1 65350101 to 165351023)
accgcggcgaggagctcctcttcaccagcagcaaagtgaatccccctcccctctttttcttatttcccacactactcctaccgtcgtccagtaatctgtaatgcttacaggttttcagattttccttcctttttgcttcagtgttcttctagcatttctgtatgtgttcctgaaaccggcacctgtgaaaaggcgtctgttcaaccggggctgcaaagaacaacactgtgaatcgtattcatgtataattgccgttgtttctgtagtccatcctgacggctggagaagcgaatgacaaattaagctttgctatgtgcctacgttacctgtgagctgggactattttgtggtcctaaaatttcagtagccagttgttcattctttgttacggtttttatatatcatatagatatgtattaagatatttatttaaatataattattgtttattaaataataataaggtacatgtggtttggtggttagctccaaatttatagagtagggggtgaggtttgattgctcgctctgcactattttatggcgctagagtccataatttatagagtaggtggtggggtttgattgttcgcttatactattttttggcgctggggtccacagggcagtagctgagagagcgctgtgcgggcactgaacgtgggtccacagggcacggtgctgagacggggtgcatggggtgggtttagagtgtcagtatagagggtaaaaccgtaatagtaccaagcattaggttcttaataaaataatatagatatagataatggtttccctcggcttcatgtgctgacacctcctttttctcgtcttccttaatagggccagtagtgggactgtgtagccttactaaagcactttcatgtctgttgtttttgacgtgcaggcaaccttcaagccgccaa

SEQ ID NO: 7906 - DNA, 779 bp, Zea mays
  Intron number 1 from transcript GRMZM2G353828_T01 (locus G RMZM2G353828) derived from phytozome v7.0 (chr-ID 3; pos 1 16352729 to 116353507 reverse strand)
atttcgcttttcttttttttaagcgtaaaggtaaacacggattttatgattgggatttaaaaggacaaccaagggtggattgaaaacaatattgaacacaatattaagactgaatttgattcggtggatatttccggtgtcagatgaattctttgaaattagatgaatttgtatcattaatttactttttgaagatttagatcgaggcgaaaagcaacagactaaattaaacggatttcggcttcggtatttcaatctgcatttgattcagttgattttagatgaattccgtttgctattcgaacactcgattagagaacaatttaattaaaaatccgtagacgcgatgtcacggatgacaaaaagaggattaaattattttacactgaaagcttagtcgtcgagttcttcttaatttgttcgggataaaatcattcgagtgggtcgggcttccgaattcgtattcgcgcgagcgatgaattttaaataatcaccggacacaccaattttcggaacaactatgttcagaacattacgaaaatttaggaagagcccggataaataaaaatgatgtcaaactcgcgacaaacgaaacatatgcgatattaaattcgcaataaatgaggatgattaaaatttaaaatccgttttatccactgatattgcgtgcttaaatccgtactcgttgtcgagaggaatataaacacctggggtgttacagcgtgccagggtcgagggcgtcctggatcgactctttcgtcggaaggttgcaggcggtg

SEQ ID NO: 7907 - DNA, 268 bp, Zea mays
  Intron number 3 from transcript GRMZM2G032231_T01 (locus G RMZM2G032231) derived from phytozome v7.0 (chr-ID 3; pos 1 41834615 to 141834882 reverse strand)
aggtgtgcttttcttccttttatttatcataagaaaacaagcactattcaacttctgttcacatatgattgaagtcaaaacaacttttcttcttctgaagatgaggtcactgtattgattaaggagagaaattgaaatttatagatctaattccaaaaatgcactctaaccttagttcaccctgaatctgtttttgtcatgttttgatcttttttgcacttatgctctttgttgatttaggacaatctgaatcaaataatcagtggaa

SEQ ID NO: 7908 - DNA, 511 bp, Zea mays
  Intron number 1 from transcript GRMZM2G459913_T01 (locus G RMZM2G459913) derived from phytozome v7.0 (chr-ID 9; pos 6 8779344 to 68779854 reverse strand)
acgacgaccgccagccgatccagcctgctcccaaggtgagtagaatgcggggagagttcttgtgcgcgtgtttgccgaagctgacactcccgaagacgtcgcttgtcttcttctactcaaacggacaaagtagctacaactactacaagagtcctttgtttttccccaattcattagaagtttagatgatcacaacgacaacaacgtatctcccatgcgtggttacaaactaagatatgttttttcttaaagggaaaataccaacctgaatacttttttacagggatgtggagtggagttattgcagtcattgcacttcgttttttctttaaaaatatacaaacatttttgtgatggacaaacattttgagacactgcttcctgaagatgtgagttttgacaaaattgtacagagtaaattttgtagctcatttcaatcaaactatgaacttgtgaaccataagctaaagtaatttttctaagtaaatttgaatgaaatatctacagttct

SEQ ID NO: 7909 - DNA, 457 bp, Zea mays
  Intron number 1 from transcript GRMZM2G412885_T02 (locus G RMZM2G412885) derived from phytozome v7.0 (chr-ID 3; pos 1 22121101 to 122121557 reverse strand)
gtgacaagtcttccactgatcagtttaatctgcaggtgagtttctttttctcggtttccttctctagttttctgagtcagctctgttctctgactagacatgtgagtttattgatttctcgtagttcacagtttctcctgcaaatttttgtttacggaatgtttcagagttcagggctacaattgacattcttgtttcatggaattttgttggttaaacatgaaattcatgaatcagttttgttttcaccatacacttttttagttcattccgaggtgtgagcttcgtattaatctgcaagcttggatgcgatctactactctttattttcctagctctcatagaaagaataaagttgctaaaaccaacagttttgacttctgattggcctcttcaagcccactgactagtttgtcgctcaggtagataccagcatctcttttccatatctgaaggc

SEQ ID NO: 7910 - DNA, 946 bp, Zea mays
  Intron number 1 from transcript GRMZM2G462062_T01 (locus G RMZM2G462062) derived from phytozome v7.0 (chr-ID 7; pos 4 7401341 to 47402286 reverse strand)
aagcgctcagttcctaaccactacagcttgtgttggtttgtgctatataaagaatagatattgtaaatatcccatttaagcaatgtctacctatatgatatatagaaactgtagcgatgcacgggcaactaactagttttctttaatatagggttgaattggttacatagtttgctttatttcgtcaaattcattcacatttcaaaattcaagtctgctggtgcatatgctgacccaagctgactttgactgtagcgtggaactcattaaacctttctgaaccctatccatgcaatactactgcatgtgcaattaacgagtatgattactgttttattttttgtctgaagtgtccttgtttgttagtctaccattactgtttcatttttgtctgaagtgtcattgtttgttagtctaccatggtattgcctatgacctgtatgcaagaccaacatcttaggttatgcctttttgtgtctccaagagtttcagatgattggtccatcaagttagaatatgcatttgttaaggaagttgtttggaaaagtctgctggttggcacgttgcatgtagcgtcaccttgaagtcttggatgtatagtgtttaagtgctaaagtgtctcatgtttcagttttctgacaggtcgtatggacactttcaactgatttctcttcaacactaatgaaattattttttcatgtaatatttgaccatacaggtctattattacttaattgttgtattttcttttgaactttgaggagaatatccagtgcaaacccagcgttgctagtggttcaaaattgcaaaacctacactactatacttctatactgcattctgaagagctaactcaattcaagacgagaacaatgaatttttataaaacttgctaattgataaacgttgtttgttatgcttttacagggataaccctagtaatcag

SEQ ID NO: 7911 - DNA, 508 bp, Zea mays
  Intron number 2 from transcript GRMZM2G107457_T01 (locus G RMZM2G107457) derived from phytozome v7.0 (chr-ID 7; pos 7 264652 to 7265159 reverse strand)
aggtcagtatttctgcctcatgttgataacatgtctgtgcaccattacttttctgccttctgagaattggagtagagtcctttatgaattgttaggttgtttctgtttggcaatgcatttaactcttgtgagtctttcctcaaaacttaagaacgaggaccctatagcactgtaactgacaacttttaataagcaccaaagactgatcaaacataaggttccatttttattttggcattttcttatgataatattttgtagctgtaatataatctaattcggttccctgcaatgtcaatacctgtgtaagattatttgtagtacaattcacaaagcatgaaccattctgctggtcactcaaaaagcatgctattcatgtcatatttgagctttgttgcacttttaaaattacaaaataattaaaaaatccaattacctcttctaacatcacctaccaccgtacttcatttcagaactttctgtcatctacccatcctcttattggcca

SEQ ID NO: 7912 - DNA, 518 bp, Zea mays
  Intron number 2 from transcript GRMZM2G080507_T02 (locus G RMZM2G080507) derived from phytozome v7.0 (chr-ID 7; pos 1 45625771 to 145626288 reverse strand)
aggagtttcttccaatcaaagcgaggtgatttcactttcttggttggtttcaattcatgtattgtattgtgataccaaaatgtacaaaacccacaactactttgctgagatcgcactatacctgccaatcaactgccagctctacacaggtgatttgtgtagttgattaacctcgacttagctttttaataaagccacactgagcctttggtgagtttgatctaaaaaattgaaatatgaaaaaacgcagatgtttatctttcccactgtcatgtggaaaaagaaaaatattctttcattcagcagttgggctttcaacttctctcttcctacctttcttatagatcaaagcatacatgatacatgagaaaaattgcttcatgcttacatggtttttattctcatgtctgagtgagtcagttgtcgtgtcacaagcataatcatagacacacagacagatcttgcaacatttactcattaatgtggttcatgggttttgaagctcacaggatttgata

SEQ ID NO: 7913 - DNA, 841 bp, Zea mays
  Intron number 1 from transcript GRMZM5G813259_T01 (locus G RMZM5G813259) derived from phytozome v7.0 (chr-ID 6; pos 1 62773424 to 162774264 reverse strand)
gcagaagaaataaaggtttgaatgtcatattctgatttttcctcattgacttgacatggccacttgtcaactttttttctgaaggaatcttgaaaaatagttattaacagtttatagctttgttacaaagccctgaatatcatacagacacactcgtgttatttaaggcaaccaagagtcaaatgttattccaaattctcttagcaatcttatgttaaaagaatcaatcaaaacaaaaggttcctaaaatactataattcacttttttttaattagtaactgaactacatagcttggttctggtacataaactcctctatcttcctaacattgtagttgagaatggtttagtaaggttgcagtagagagtgaatattatgctttatctttattttatttttttgacagaggtaagcccagcttttataggagagatttgtgtttttgccattatatactataggctttgcaaaattgccattaggcccacatttcatagactcagatggacccacaagtcagagactcagtggcaattataaacaagaagacaatctttgcagtggcaaaaatacaaatttatcctttttttatagaaaacagaatatcagatacaattacataccacacacctgctgaggacttcagctttatatttctatgttgagatttcttatagttccagcttggcagcttctccctacagatacaaatcaagtgtgttaatgtacgatatgtgtttttgtatgttaaagcttcatgaaatagcttaatatcttacatgtttccttctcatgttacttcagaatctaacagggggtaccttgcttcttcgaaataa

SEQ ID NO: 7914 - DNA, 989 bp, Zea mays
  Intron number 1 from transcript GRMZM2G050561_T01 (locus G RMZM2G050561) derived from phytozome v7.0 (chr-ID 6; pos 2 1901184 to 21902172 reverse strand)
gggacggcaagccgccggagcgcttcaggcgcagggtatgattagatcattctatcaccgaccgatttagcgtttataatgaatatcctgtgaaataagttgttaagaaggagatctgtcaatgcatgcttgtgacttagttctgattagcacttgtctaattagtctttttgctggtaagtttatctcgtctatgatgcaccttttaactgtttccagttcctctgatggacacacccctgaatgttttcatatagcatttattgttctgattagtacctgtaagaagtaagatacacctgtctcgtgatgtcttgatagccgtgtcttaatggtcaactgccttcagttatactccgtatttcactatttgccttttagctgtaagatgtttaccatgtgttcttatccaaccaatttaaataggatgtatgtgaatagaatctgctatccttagttgccgtcatcgtttttgtgttgagttatgtcctggtgctgctgctacagctctagctccagcaccggttgctgctcgcccataggctttagcttttcgaccgtgttgaaagtcttctgcccacacagtttcggagttgtcgcctatgggtgtgtgtgaagctgctatattagagttactttttgtctaaaatctgaagaatttcaaagaatctgaatatctgaacatttgaatatctgaatttcatgtatagggtagaacattgcttggttatacccgtaattttgatctgatttgtttttttagataaaaaagtgaagcagtctgttgatatttgatagtttgatctctgctctggcaatcagtcctggttttattgtcaagaacaaagtagtagaattgagtttggcttgtttgctcttgctaggtgaaaacaagaagatggaaaatacaagcactctgtggatctcccgaaaacaacatttgagctgagagcgaaatctgtacagcgggagccagagctccaaaaatt

SEQ ID NO: 7915 - DNA, 675 bp, Zea mays
  Intron number 2 from transcript GRMZM2G139700_T01 (locus G RMZM2G139700) derived from phytozome v7.0 (chr-ID 3; pos 1 37579567 to 137580241)
cctacgcctaccatttccttcccggctctacgagggttagttagatcagatcatcttgtgctctaccataccagcatttgtttatgttctttgcgcatgcgtgtttttgtttttttttttaatttttgaaaatgaagctcacgtagaccatgcacacacactacgaatactagtaggacaggacagcactagagacagaacgtaatgatgatgggagggcagcgcgtaggacgacaggagtagagctgcagggtgctctgcactgcagctagtagcagtcgagtgcatgcgtgtgggatacgaccatctgcttgctcctgcaactctgctgctactgtgtcattacgtgcagtgcgtggatatggcaaagcccaaacctgccccggctgggaagatagagcacagggattcgaatcttttctcggccagtgccgacgatgatgctatcagcgtgctcgatctcaccttgtttgtttgtttctgctgccacctgccatggtagcactttgatcgatttcatggttcgatcagagaagtactagcattttccgcggagtacatttttactttattaactatcatcagcagtaaaaagaaagacacctgaactgtacagcattcactgtccgccttcctccaggacgagtgggtgatcgcgagggtgttccagaagcc

SEQ ID NO: 7916 - DNA, 974 bp, Zea mays
  Intron number 1 from transcript GRMZM2G414601_T01 (locus G RMZM2G414601) derived from phytozome v7.0 (chr-ID 3; pos 1 71816713 to 171817686)
ctgttgccccttgataggagtagagaacctgcaaggtgagcatacctacatataagatcatagtcaaccaaacggtaactccttaaaaatgtacccggatgtgacaaactgaatgcaaaagatgaaaaaattacttggaagttggagagaaggatgtagcgatcttccaccccatgatattgtgggaagaagtgagaatgatgtcgagccgcaagtcctcacagcaagagaagcctacactgagtttggataccacatgagaaaaaaaagaacacaaaaatccatcacaactcgaccaacaacaatccaggagtagcaaccgtaactatcacttttctctcctccacttgagggaagacctagaaaacgcaaggttgaatgactacactactgccagactcgtcatcggactcacaacggatgcatgtaggcatcagctgagaacaagagcacaattgttttaattgtaaatatagattttactgtttttagcaaatacaaaaggcatgtaggcaccaaaatggtatgctgtgacataatgactgaaacgagacacactattcacgatgctaaaggtcgaagacatctgacagcacatcctcttgtcaatagtttcctatcctttaagccaagtcgataaatagagaaactgtcacaatagcatacaagattagatgtgcatacctagggcatgtgggtactgttttctaagcatagttaacggagcctttgaaaacttggtgacaattgacaaaaaatctctactacttattaaggctctaagggtagcctgccgttctgccttcgttcaatctggatcgtccatcgctgttgttcaatctggatcgtccatccgcgcccgcaaaaatttgattgtagcagggacgtttattaataccactaactgattacacaagctgactgctttctctgtagcaggcacgtttataagttgctaccgtactcttttgctg

SEQ ID NO: 7917 - DNA, 1028 bp, Zea mays
  Intron number 1 from transcript GRMZM5G839920_T01 (locus G RMZM5G839920) derived from phytozome v7.0 (chr-ID 7; pos 9 7223579 to 97224606)
attgcattatcctaggtgcttatgaaagtttttaccttttcttcaatatgaagtctgaatgtgtggtgtggcttgtctgatctatctagcaggtttagtggtactcgcatcagctaaaccttaaacttgttttcttcttaatgcctccgtgatcggtttaagttctttcgttgcggagatggcagcggcggcggggccgtacaaagagatgctggaagtggtgaacgcgtgcgcgacccggatccggtggcgcctcagtccagcttccaagcgccgcctcctcaacggtcagtgcccactcgcttgctgctttctcttagtagttgtagtcgttttttaacgggaaatacaacagggaagccaccagcccaccactatgtaggattttattaattgaaaaatagtgttgtagttgttattatctctatttaggacttgttgttggcaattgtcctatttcttgcttaattcgctaccgccatgctgtctttctgttctactgctaaaacacttattttttgtggtcgttgaatgaattgttaaccaaactcaattgcagaagacattcatccactaatcgtcacatgatccaccttagttcataagtttataccaccgtagttataggtcacttggtcagtagctgcaacttgcaagtgatttagggtttaataaaaaatttctggtagtaaagttgaaaggtatggtttgaggagagtgaatggtatcatgtcgaattacagtacattacaatttacaagtaaattgattagtcctctggtcttttgattggtagcatgtttttcctatgtaattgcctctgttcttctttaggggctaggttcgttgtaatcatttgaccgtggggatgtttgtactaaattcttatttctcttaaggaaaatcatgctaatgcacgaccacgaagaaaaagtaaattcatgaacaaatctacctaacttatgatttctgttggattttaactctagtctacctctttgaaattaaaaggttgtgctgtggttgtt

SEQ ID NO: 7918 - DNA, 835 bp, Zea mays
  Intron number 1 from transcript GRMZM2G005700_T01 (locus G RMZM2G005700) derived from phytozome v7.0 (chr-ID 7; pos 1 74991045 to 174991879)
tctcctacggtagctccctcctccaggtgcctgttctgttcgagtcccgtccctatagtttctaaactttcagaagaaaactgcattttgcatgaaaagctggagttttttgtggtattaggcatgcatagcaaggtttcagaaacaatttggtcccctctagcagttctaccattcaggtcttgcttttatagaaagatccatgttgcctgcaatatactttctggaaagtgtaccgaccagaattttgatctcattagtcttgtgctgttgagctatccatgtatactacagggaaaagaaatgccttacagtttgttttaaacagttacttatttgcactaacattttggttggatcattgttattggttgcaaatatttggattatgtcattctgaaatctcaaatgcattaaacctcattgggcccgacattattttggctaccaggaaaatgaggggttatggtttcacttttttttcctcagttgaaatccaatttactatgctcaattgcccatcatgaagaacatacaatttatgaatcttgaacttcagaatttcttcatttaccgtcctatgaaacatgaggacaggtttcacaacacattttgacattatatatttatcaagtcagttgtggtgaactgtgaaaaaatgtgcttgttatgcatatcagcacctcttgtattagcattcttcccctagcagtaaggtcaacggcactaagatgggaaataatcgaagcatcttatgccatggcagttgcgctcttctttggccactgactcttactttctctttctggtcaaatattcattctttcagacctct

SEQ ID NO: 7919 - DNA, 932 bp, Zea mays
  Intron number 1 from transcript GRMZM2G491845_T01 (locus G RMZM2G491845) derived from phytozome v7.0 (chr-ID 7; pos 1 966542 to 1967473)
aatatttaacaaagtgaaccaccaacatgagagatgtcataactaataatatctgaaagcatcaacaagaagtaacatatgcgtgtacataaaaaggaagcaaaaaaagaatgcaataccttcgatctggattgatctttttaggacaacggttttagttattataacttttatgaccgcatttcctgtccacaccctgtctctaggagggctccaagaacaatgcaatgtctaggtattaaagacacagaggcatttgttcctacaattccataaggtctaagtgggtaagcaatacaacggtcagaccaacctcaaattgcataataccaaattttacaatattgacatgttttgttcatttcttttttattgctaaaatgatatactatcatccccttctttttgaaacgcactacctttaattgtatatgcgtaaaatggactattgcccaaaaaatgttatcaaaattaatgccagtatcggatccattgtcatctttcaaatctccaaacacattggaaatttcttctccaaattcaaatgatgccaaatactgcatggttaacaacgcacggacaccctgcacgggcacatacctagatctttttttgcattgtcttcaacttagctggagtaagctagaaagatccctttgtgctcactacaaccaagcaccgttcagcttagcacaaaataagaacagaagcatagaaaggaaataattataaaatcatttgactcacgaagctagaaggtgctgaagtacatgttagccggcggcggcaccctacctgcagatctacatgttcgaaaaccagggccttgttttggatgtccagaatgaacccttgaccttgcaaatctgcttgatccgttttttaaatcaaatggagaagattaaccgtcggcaacccagttcaacaaacca

SEQ ID NO: 7920 - DNA, 512 bp, Zea mays
  Intron number 3 from transcript GRMZM2G058310_T01 (locus G RMZM2G058310) derived from phytozome v7.0 (chr-ID 7; pos 1 55358570 to 155359081)
ggtgttcccaggcgttggagaattcatagtgagttctctttccaaaaacaaatatttttctgtatttttttttggttattacaaaacaaaaggggattcatctccatgtgttgggcagagacagactagtcttggtccgtgcgttggtttctgctggaagcagtcacaaaagaaatgagagaaaaaaagtataaaagtggctaaatcaaaagttctcttggatgaagtaacaatttgactgatcaggccagcaatgccttaaaattcgtgctgtgcttttcagaagaatgtcagaaacaaagcctagaccacatcaattgagaaaaataccagatgaatcaaatgcttgataaactaatgacaaggaataaataaagcaagcttccttcaaatcaaagaaaatggaacaaaacaagtaccaactaatattaatgtgtcattaccagcaaacagaggactagaccttaaatgctacaattgttactaaagcgataaaataaaactgcagtgct

SEQ ID NO: 7921 - DNA, 946 bp, Zea mays
  Intron number 1 from transcript GRMZM2G326259_T01 (locus G RMZM2G326259) derived from phytozome v7.0 (chr-ID 6; pos 1 30335240 to 130336185 reverse strand)
cccaaaggtgacccactgggatgggatgtcgtcgtcgcccacaagtcaggtaaggtcttctacactggttcttgctcgtggtggtcgtcgctggcgccttcctcaccttttctgtggattttttgtaggtcttaacaatcgggcgatgcctgcccatccatcctctccccagtgtagtcccaacagtaaaaggggacaacaccatcccttctgtgtatggaccgtattgtatgtttgattgaaatgtagccccccaaaatagtgttacttggataaattttctacctttagtattcaaaagggtgtcgattgccaagtattcaactctatttttttctgttatcaattatgttctcattgtactgtatatattcaagaagttgttggttttaatcatgtaatatccaaaatttagattttcaaaaaatcacatcatataaatcattccagtattatagccaaagctcatactgactgaacattctttatccgcacatgtctactctagcttgcagtgaaagagtcgtagacgattaattctttcaaagcaccacgggagatgcttctgtgcatcatgagctactgtcaaatcatagataacttgcttctgaacattcttaatagagggatggatggaatcacatgcatataagagaaacattcttcttattcttgatttagatggtacttgtacatcaattggagatggaatccttatgcctgttgtatctgttactcatcgtcacttttttatgatgctaaccattacattgttttttactaaatctgattgttttaggatgtcacttatggttttgtggtttctgtagttctatatgcattaggtggcactagggttcagattcagaatatgagtactggtatgtattttccattttatattttttcagtattgccactatatctgcaacctactcaatcataa

SEQ ID NO: 7922 - DNA, 550 bp, Zea mays
  Intron number 1 from transcript GRMZM2G148461_T01 (locus G RMZM2G148461) derived from phytozome v7.0 (chr-ID 6; pos 1 06068731 to 106069280 reverse strand)
cccttggtggttgtttgtaaaaccctgcgtcgttgtgtgggagaacttttaggttcacttgggatataatcatgtgatcatgtcagtcgcttgatgtcaatcttgtttgccagtggccacacaagctctatgatctatgatagatagaaaataatacagggatggccacgcagctcttgcacccccatcatgcacagatgacaaggatggaagaatttatacccatctcttgatgatgtccgggagaaaaccaatgcatagcatggaaggaagattctccttctgacacagatgtttcagcaatgcagtcccatgcttctctatttgattggtcagaatgttgctaaaagagttatgggtcccaggatgcgatgcctgaatgaatggtggttaacagagtagaaataaacaagacatgtgatcggctgcagttctttccacgtatgttctgtttaagatggcatttttgttttgtcagccgttctagaatagtgttcaatgcaatgcaaacaagaaaccgaggagctcaccgaatttcttgggctggagt

SEQ ID NO: 7923 - DNA, 675 bp, Zea mays
  Intron number 2 from transcript GRMZM2G174585_T01 (locus G RMZM2G174585) derived from phytozome v7.0 (chr-ID 6; pos 1 54651818 to 154652492 reverse strand)
tgacagaattgtacgatcagcacttctattttatttgttcatcatattttgtttttttctatccatttgtcttggttaccatgttgctcttgttgaataaaaatcaacagtcactattattatcaaaggtagtttttacggtcaaatgccaacttcatccgactccgcaagggaatttttttcctgcatttacacataaatccaactgtaacatgaactgccttggttgacaattgtccaatcataaaaacatgaaacatcagtcctgtgagttgtatcagactaagtttacaaatcctagcaccattgctctctggcttcttttctaaggcatttgttttgcttgaaatattattggttttgtaaagtttgtttattttattacatcagcacgatatggaatataacaacccagtaactcattaaggccttgtttggttattttaattccatgtgaattggagtggattgggtgggattgagacgtattttgacttgttatgcatttaaaacgacttaatcccacccaatccacatggtttagcatcaaaacaaacaagccctaagtcgtttctgtgtaagttaatgaatggtttattcccatagctgttcctaataccatttttttatctctatacaggcagttatttaagaggaatctctcaggaactctgg

SEQ ID NO: 7924 - DNA, 750 bp, Zea mays
  Intron number 1 from transcript GRMZM2G406643_T01 (locus G RMZM2G406643) derived from phytozome v7.0 (chr-ID 7; pos 1 50271104 to 150271853)
cgccaacgacaaggcgaagatacaggacaaggaaggtagtactaactagcagcagccaccctgttcctctcctatccgctgttccgaagtcgaaagcttgatccttttcagcgtctcctatctgctgcttcaaagtcgaaagcttgctcctttctatggtctctgtaggcagttacttgaacatcgatgtgcatgtcagcgtttggttgggttgatctgtctctctctctctctctggtgttctgtttgtgtgagtgtgactaactgactacgcgggttgcaactgcaacctcccccacttactgcttgaaaatttgttcatttttcatgtgtttattacttgcccttgcacgcgttggaactttacatgttctgggtttattgatgatggttgatcgcgtcatcgatattgccatgttcgatcctgatggttttgggttaaaactgagtacttcgacgtcccatctggttccaaaaccaagactttctttttgatccggtcaagcacagagcttggtttcgtacttgttttattacttcactaatctttgtgcttcttggggttagtagtcggggactcgggggtggcatggtcggattcttggcaactccataactcatttgaactgatgggattcctatctcccagctcggattaatctatgtagcgtattaaccggccatgaaaatagttgtttaaccaatttatttgcaggcatcccgccggaccagcagcggctcattttcgcc

SEQ ID NO: 7925 - DNA, 776 bp, Zea mays
  Intron number 4 from transcript GRMZM5G818058_T01 (locus G RMZM5G818058) derived from phytozome v7.0 (chr-ID 7; pos 1 45180098 to 145180873)
gtgtccttgagattgttggaattgggtatacaggggtaagttctcaagcattcctactcgcatagactctgttctgtggtattgacgaacttgtgaaatgtgttgatgatgcagtggttcacataccgtaacctcgtcttccagccagacaggtgaggaacactgttcttgcgatccccttttattgtgttacagtttttttattctgtacgcccttgtctttcttattccgacaaatatcatattgttcctttctcccccccccccccccccccccctgtaacttaaaaataatcgcaagtcatgacccgatatcagatagcttatcttctgaatcagtaaacttttcagttatgcaagacatgtcttgtcttgcttttggcagatatgatctttgatgactcttttgatgctgatatggctttacgttatgtcatcagtcgtggcacgaaaagatgtaatgatttatgcttcagtctctactgaaaataacatcttcagggacatgttgcttttttagagatgatcttgtactgattattttgttacgaacttctctctaaccaaatcatcttcacaacacaaagacagaaaactcttctcctgtgtatctagtagtagaaaaaaatactatcgatactatgcttgcataaattaaagagtaagaactggctatagtttggtagatttccatttatattcttatcaagttctgtgcactgatggattacatactcgcagggaggctctgatcggcaaaatcaagagcacttaca

SEQ ID NO: 7926 - DNA, 884 bp, Zea mays
  Intron number 2 from transcript GRMZM2G343917_T01 (locus G RMZM2G343917) derived from phytozome v7.0 (chr-ID 9; pos 9 3368930 to 93369813)
aagaagaactgaggagattattgacgccagaaagtgtgagtttctgcaaattattattgccctcatgttaatctcaatcaattgtttcttgttgacatgttttttccacgaaaggatggcaaaagcgttgctacaagttttatcagaagaagaaacagaaagaagtattggtccagttcttttagggaaaccaggcccaaaaacccaacaacatctcccccaaacacaactactaaaacaacagaagttctccaaggacaaactcaacaccactagccgctcagaaaaacaaacaatgagccaactaaaatgaaatggccaaaccactaaacaactcatactcctgctaaccaactaagcaactatcacaactaagaaccaaacatctaccaagactaaatggcaccaactttgacaacaactatcatgcttcaaaggtcttgcatgctgtcgctccaaaccttttcaacgctcctttcactaaaaacctgtcaagtcttttgtcaatcgccaatacaacaacagaactggatgacaagctttatcttttgaagaaatgctttattttgcacgtcgtggaaatgcgagtgcttattacgctgtgctggcttatatatggaccacaagcgctggttattatgccatacccacatttccaaatctataggatgaaatgtctttaaaaattgggtcatcagagtaagttgactgagaatatatttttcttatagaaagttctattgaaagcaccaatacctaaataatgaggtttattctttgaaggttgccttaccttcttgacttggtgtttaataacagttctcttttcaatccgaaaatatgacgacgactcaactaaaatatcattatccaggtttgctgtt

SEQ ID NO: 7927 - DNA, 877 bp, Zea mays
  Intron number 1 from transcript GRMZM2G500451_T01 (locus G RMZM2G500451) derived from phytozome v7.0 (chr-ID 6; pos 1 32078284 to 132079160)
ctcaccctccctatatcccactcgacggcgactgggcgacaactagggctggaaacgagccgagccgagccaggctcggtgaggctcggtggaatagcgagccgagccaggctcggctcggtcacttcgcgagctcgatgatgaggctcggctcggctcgatataggctcgtgagccggctcggctcggctcgcgagcctgtacactcaagtactcaacaacattaattacggtcattagctcaaatttgaagcacaatatgttccatataataaaaaattattccccggtcactctcggtagcttcaggtttctgaaaaactttatgctatggtggggttgaacctgtttagatttgtgtttcgctagtttgatctatgtgatctgtgtcatggttatgcagctgtgctggttctggactgcttttggcagtttggttcatgcaggtttatttctgtcttagctgatagtagtgtttcttgtcggctgttaatctgtggttggtccttggccattgtaagaacatatgtatctttctatttcgtaatgaaatagggggttatcccctttaaaaaaaatataataaaaaattatgtccctgcactctagttccttgtgagttatgaccaaaacaacacactggtcactggatctagatgactggacactaataaacaaactgacaactgacaagtgatagctgtaatagtttggaccgagcctcgagccggctcggctcggctcgttagtgtaacgagtcatggaattaggctcggctcgggctcgtttaggctcgcgagcctcaccgagccgagcctgatcgagcccgagccggctcgcgagcctcgagctttttttccagccctagcgacaaccg

SEQ ID NO: 7928 - DNA, 652 bp, Zea mays
  Intron number 2 from transcript AC203054.4_FGT001 (locus A C203054.4_FG001) derived from phytozome v7.0 (chr-ID 7; po s 17772025 to 17772676 reverse strand)
gctcattctcagaggcgtcaaacctgttatatcaggtaaagattttagataaagttgtttgctgtgttcacatgtgtggtatcctcagacttgtaaaaagcacaggaaaacttagaagctttaccctcacatttcttcgggatagcattgcttgtgcatgatctgatagatttgagtaatctggttgttctattggttttgcactatcattcttaacagacattcctcactgaaggaattatgtgtatggcctcataaaattggcacctcccaggtaaaaatgcttggtgtatttggatcaatgtttgattccatgttttatttgtcctccaccgactttgtttgctgcagacgacatagaagggaagtgtaccaaagaaggacacgctggataatgtctcactacaagaataccgaaacttcctgtatacaaatgctgacactctcagttgtaccgtgtaccttaggatttatttaagaaacaagaaatctaaaagtttcttgtgttgggagaggactgatgggctacattggggataaggttaatcagggtgagcaaatgaactgtgagccttatgttgttgtaatttgttagtctatttgattttaataagtggtcatgattgtgttgtagggcaagttttacttgata

SEQ ID NO: 7929 - DNA, 989 bp, Zea mays
  Intron number 1 from transcript GRMZM2G114337_T01 (locus G RMZM2G114337) derived from phytozome v7.0 (chr-ID 6; pos 8 7398993 to 87399981)
tccggattgactcggatcgacctctcctctcgtgggtaagcgactcgagctttgcctcagttggaggttggagttcgctgctcgccttgtccttggcgaccttcctgtcccgtctgcgctgcgagcgttaaaattcgatttttttttctaacccggttacctgtggactcttgagctgcgtggtgtcctagttatggagtcgagaatccatctaaaatcttgcctagggtcttcagcgcctcaagcaaggttgcggccatgccattttggagtccatctggcgatattagctggcaaggtttagggagggttttgtgctgtgctgtggaaaatttgatgagcggctgcgtggacatgtgacaagtacgtggaaatagacagtgaagagaatttagcttaaaattggtacaggccatgaaccagggagcataagggaaaaaaagagagataaggcagacagagcttgtatttcgtattatccctaataacttgagttcatttatgggtagaaactggcaagttccaggtaaaaagtcaactgtcctgctttattttgtaacctagaacgacttgtagaatctcctacttgttaactagagcgttggtttgattaaaatgtgtagttgtttttcatttttgggtaacaagtatatatatagtttttccccattttttttatttgtaagcacctccatcaatatttatttttactttgtatatgttttaatattctgtcctttagtatgcacatgtagttttaaactttggattcaacctagtgcaatatcaagcagtttctgaactgttgtttgtcttcgaaatagtttaatcttctatatatacatgtctttttgttatacaatatggattgttggtcaagacacaaaaaaatggtacttttggctgaaagcctgaaggttaaactaaaatttcctttttccctgtgttgtccaggtttttggattttgatcagttatatcagaggagtg

SEQ ID NO: 7930 - DNA, 797 bp, Zea mays
  Intron number 2 from transcript GRMZM2G374044_T02 (locus G RMZM2G374044) derived from phytozome v7.0 (chr-ID 3; pos 1 78723168 to 178723964)
gtgggagttgcttactagggaagagccatactctggtatgcgtgctgctgaaattattggtaatgtccaaagttccctatatgtacaattctatgccttgatctgttatgacactttccaccatgttctgaccttaccttttgatatatcttagttagaataagttgtggacttaagaactgtgaacagagaaagtttatcttctagaatttacttgtttggatttggatgcagctttgaaagaacaaataaggctgagctaatagaaaagaaggttgtatgtttagtggacatataaatgggtcagttgtaaatccccaaatatcttgagtaatgaaggtgggacatataattaaatagcggacttcaatacaaaaccagattatgtagttggcgccgtagcttgaatcggattatttgcagctgcaataatgatgaaggttgaaggatataacaatctaggtgtatggtgtaattatgtgattgcacttgcagaatgtttttcttttttggattttcctttgatagcatgactttttctccctttgcatagtaacattggacaaaccaatgacaaattggtagatgtggatttgcccgacattgtgatgcactgctgcatcatattcaataacagatgtactacagtatacagataggggatttatgttgatttttgaatctttagtcataaatatatctcgcctaggcttgttgttattatgtcacagcagtgatctgattacaatgccttttttctagggggcattgtaaacgattccctacgtcctcaaatt

SEQ ID NO: 7931 - DNA, 1014 bp, Zea mays
  Intron number 1 from transcript AC187475.4_FGT002 (locus A C187475.4_FG002) derived from phytozome v7.0 (chr-ID 6; po s 111199635 to 111200648 reverse strand)
gcggcacaacagaaggtgacgcgcacacgatgtggagggcacggtgtgctcgcgtcgtctctccctcgtccgaggggaaagttgtctggtctccggtgtcgagacatagattacttgggttattggtcgggttgggggagagctagcccggaagagtgtcttccaaaccggccaagaaactttcatgagctgacatccacatgggatttctccacgggaaaaggctggatttatcccggtattgagcttctcaaacaagtcttaagtatataatcggaagaaatatatccaccatgcctttttttaatcctatccatgatgcctgccttggtacgggaacttgctggatgcccgttaagtacaaactggacaattgatgaactgcaagtgcggctaaacatgtgcctcaaaccatgagaaaactacgagattcgtatgtcattcatggaagtgagaagcagaaacaagaacttagaatgtgcctttgttcttgagctctacacgggtgtaggcatagggcataatgaaccaaatcaaactactctatcctatatggaaactactccgtcccaccatactcacgaaccaaacactatttaaaaataacttagaaaaatcagcttcctgttcgattcctgacagtgagaaactaaaataatcaaagaaaatctgattcctagtatattgatattatcttgtcaattgttattgtctaaaatggtagctgtggtgcctaaattgatttagagcatgcatatttttttgatcttaacttctaacctcttcgttgctggcatggaggtggtactgtactgtagccgcaggatttaagagcatggatttaatccatctgaattaataagagctgaattaatgtaaacgaacaatgcatagtaatgaaacacgaagccgatgctgcgatcctgagcagaatgaccaagacatcgtgctagttccagggctataaactagcgctcatgaactcaggtagtcactagtcaggtcgctcagaag

SEQ ID NO: 7932 - DNA, 984 bp, Zea mays
  Intron number 1 from transcript GRMZM2G390876_T01 (locus G RMZM2G390876) derived from phytozome v7.0 (chr-ID 7; pos 2 6858784 to 26859767)
aggcgccaaggccttcttcgggaccttcgccggcggtgagcaccgactaggtctgctaatgcctttttcttcccttgctgctgtgcgaaaccgagcacccaaaccctaggatatttggcactcggattttatctaacttcggttttgggacatggtgggcttctttggatcgatcattaaccatggatattggggaaatgtgtttatttcctcctcaatcctctccaatccccatggggaatgtgtgtatctaaaggagtccataatgacagagaattgaaaatatgtgagacttagaaagaggccctgcttgtgtcatgcctactagcctcgttgttttttcctccaaaatgttccgtatgtaccgtgtacatgtttatacacatgccatttattgagtctgttcctgcttgacgaggtggtagcttgtgaaattggggccgaaagctgcttcttgctaggatatgcgtgtagttcctttttgggtttgcgatcgtgtagttttttacttattgtgttctacagattcctattaggtcccatgtgagcctttgctgtgatgttctgtcattattctttcttccgaatgagattgcatctcaccaatctccacaccatgactccatgagataatcacgttattgggtgttttgtgcatctgtggaaaattgaattccttgaatgttcttctttgttgggagtaggagtacaaatttctgcttactaattctatgaaattctgctgtttcagctgttaaattagagtattgcaggtcgacttagttggcatcttgcataatacagcattatccgttaagatttttatgttaggtgatatattgtgtcagtctgacttcattgtgtgtttgataaatcaaaaagggtcttcttgtgttctgcgtttagccctgaataatattattaatatttgtattattaactctaccatttcaattaaaaaacacaggagtatattctgtgcca

SEQ ID NO: 7933 - DNA, 943 bp, Zea mays
  Intron number 1 from transcript GRMZM2G321276_T01 (locus G RMZM2G321276) derived from phytozome v7.0 (chr-ID 3; pos 1 86839203 to 186840145 reverse strand)
gccttctctggtgcagctgaacaaggtactatttgcagcaatccctcgaacgtattagcccctcaaatgtattagcttttgcttgtataataattattcttaaatcaagctcatatcaaaagaaaggaggcacgtgctggccgtaatacaggaaggctcaacagatcttgttcatgttcttgtggaaccaattttgtccattgcatggtcattgttcttcaatctccagctacaccgatgtagctaataatatttatcttctcatgcctgaataagtgaatgctatatcattttaaatcctaactgatgcctctatcaacaaaaatggaagggtcttaattactagcccattttatttgctaggagtatggaatgtttacttgatctacaattatttcttgtttaaaagggagcattattttttgtgctcagtgttttatatcaacttaaaacatatttctctctcctgtagaaattagttgtttcggtgccatgtaaatctgaaacgtttgttctctttttacgcaaatgtaatctgctaaggaagtaaggagtactttacctcccacatgtgaagatgtatcttatcccacattttgctgctcaaaactgtaggtgtcctcaatggcaatcttaacatgctggtatgcctttatcgtcactttttcctttttatctagctttggtcaatagctatggtaattacaaatttggatatttaagaatccttttatctcatcaagatatgtttgattcaacaagttttctatgctacgtgggttcattgatttagggacatcaataatacattatactaccctagctcagacataatagtaggtcaactcatatatgacaaatgataaaatttaatattggttgacataagattggaattttttggatagtcatcggaactataggaagctcaaagggggtgtgg

SEQ ID NO: 7934 - DNA, 1037 bp, Zea mays
  Intron number 1 from transcript GRMZM5G836879_T02 (locus G RMZM5G836879) derived from phytozome v7.0 (chr-ID 4; pos 3 2222372 to 32223408)
tatcaagagcttttggtgatcaccagtttaagaaggtttgttgatgcgtaccattgtttgcttaatcatagatgttatctattgcccatcactgtttgatttgaaatattcttgtttccttacatttacatgcaattttcttcataaagcggacattcagatcgaaagcattaagtaatattgaaacttggttatttgcctatgactattctgaatctgattggcagagttcatgtgcattaagtaatctgattggcatgccaggcacgatgtagtgaatgagcactttttaattgttgttccttgttgtgaagtaactatgagtgtttgtcccatgagttcaattccaatattctttcttaaggtaattgcttacaatttttaattacattttggtattcttatcagccatcctgattgcaagctggttgttagccatgatgattatagcttaacttccaagctgccaagggagagaacttctgttgtaacggtactaagaaacccaattgatcgtgtattagcacatatgagttcttagttgaagttgtagctagattccttgtgcacccaaacttaacttctgtgaagttaatgagtacccgtgtgttaacaaattgttgtgttgtccgaactttagatatctggccttggaagtacttggttccatgtatgagggaagatctgtttgccagggtacgccttttacttcagtttagcctttggtttcaatttgcactttatagaattatactggcagaaaataatagttctctttttcatagcaatttcccagtacatattgtcctgtcaaactgaccaatttatatgttcactattcagtgattttgttgcaaatctataccagtactgtgttatgcctcatgtgtatttatacgttataatgttatacattctcgcacaagcagaactattgtaaacatctgcctgccgctgattttcttagccagctttaaaaaatccggtttactaattttttatgtgtactcatgttaccttggtagattactgggtta

SEQ ID NO: 7935 - DNA, 989 bp, Zea mays
  Intron number 4 from transcript GRMZM2G123652_T01 (locus G RMZM2G123652) derived from phytozome v7.0 (chr-ID 2; pos 1 47306828 to 147307816 reverse strand)
tactactgctggcatctatccaggagttagcagtaatttgtgcatcatctttctgttagactttagaactcaattttccttgagttttcttgttctttttaatgaactccgcaactacatttttctgacaataattttgataaatcatatggcactccacaatagttttcaaatggatgcacatgatgcgaaggtaagccagcatcaagagttgaaacgaggaaatttgtgtgaacaccaaataagtctgtcatgtatagtaagaccaaagttaaaacacataaagaaatataatctagcaaagataatgtctattggcaaatgaaatactctgtctgtacttaagtgaataacaatgacatagcagaataacttcagttattgtctctggtggtcttgtgaggaaatgcttggactctctcattatcctgggagcatggatgatctggaagcatagaaacagagtggtgtttaatggtgtttcacccaatctcactcttcacacaatgacactaattactagccccaaactgacatagcatatgaggaaagagagaaatggcaagttgcaggagcaagggtttatcctttctggctgctcctagccctaatggttagggtctgtggtttggggggtcgttattcttgtggtcccttatggatcttttcgtgtatgcctgtttctggcctccgtaaggagtgcgtgtacccggggtcctttcttgccccctgtatcctttctctgcttaatataatggggcgcagctctcctgcgcttttcgagaaaaaaacaatgacatagcagagtttcgaagaaacatcgcgtactgctgtttccatcacattatgttggtaaaatctgcaggaagtataatattaaaaaagtatttttatgcacaccctattagtatgactcttgaagtcgaagagatttttatcttgatctttgagtgcttatttgtgtattttattcttctctggtgacagtg

SEQ ID NO: 7936 - DNA, 265 bp, Zea mays
  Intron number 5 from transcript GRMZM2G125935_T03 (locus G RMZM2G125935) derived from phytozome v7.0 (chr-ID 2; pos 2 03301120 to 203301384 reverse strand)
caaccgaaagtaaaatacctatacatattcgaaaggttagcagcaggattttctgtttttagtgcttatttgattatggttgatctatgttgctgagacaagcgtttagaatggttattcggtctcaagtgacagaaaatttgacagttgtttatatcatagaactgccactggttcttgcatttcttcttttttattgttgcctactgttcttaatttctttaatgtagccaaaggcagaacaactggagcagatatcgcagag

SEQ ID NO: 7937 - DNA, 631 bp, Zea mays
  Intron number 3 from transcript GRMZM2G065480_T02 (locus G RMZM2G065480) derived from phytozome v7.0 (chr-ID 2; pos 4 2065006 to 42065636 reverse strand)
gggcttggaacacattctgatattgtacaaactgcctagaaatttgcactttgcttctccattttcttttgaatggacctccaataaattattaatctccacactagctgaatgcagcaactataaagttcaagctatatgggcgtgtttggatggcagcctcccatgcaactgcctggcaggcaaacgatcctagccacaggcataggaaatcgaacgctcggcattgttgcctgggccagacaagaaagtgacgccaccatccaaacaaaccctttttctttgttggccaagtgtatattgattgttccactgatcttctctttattgatattgtgacctgagataaatggagatgcttgaactttcctcggggttattagtttcatatccttgtttttgttctttagcacgtatcaccttatatcagttccttagcattgttgcttagtggtcagttgatccagcataacacttacatttttcgtttgatgctgtctaatgccaaggatattgtcccaaataaagtatttattttctgttgctcgagaagagaagttttctttcttttaaattatttatagatcacattacctgtgcatgcatttgtcctttcatggttgcaaagtct

SEQ ID NO: 7938 - DNA, 476 bp, Zea mays
  Intron number 5 from transcript GRMZM2G145775_T02 (locus G RMZM2G145775) derived from phytozome v7.0 (chr-ID 2; pos 2 118807 to 2119282 reverse strand)
aaagagaaggtgacaggatcaaactaagattgttgattcataatagttcatttaccttattgctcttatcataaaacttgaatgatattttcccatggagtcctcattatgtctattgtccataggatatgcagcaaatataaatatcatatacatataacaaaatgtccgttagtttgtacttgcaccttttagttttttttttaaaaaaatggtacaaattgaaagttctagtggcactcagcatatcagttctgctcatcacacagaatattcagttatattttgacagatgaaagaatatagttcctcttgcccatagttaggccatatgtgtttctctttatcacctggtatctggtaatgcttggatgttctgttgtgttttaatctatctgcttctttcgtcttcacttgactgaaaacaatgtatgttttcaggtgctcttttgcagctctgaagttggtcgaacttc

SEQ ID NO: 7939 - DNA, 859 bp, Zea mays
  Intron number 2 from transcript GRMZM2G356404_T01 (locus G RMZM2G356404) derived from phytozome v7.0 (chr-ID 8; pos 7 868702 to 7869560 reverse strand)
tcattcaacgtattcgccgaagagaactttacaaggtagtatgatgctcatatacaattgctgttttgtcatgccatttcgcatgcttagtatgcataggatattctgttttttaacacagttgtcccatgccatgaattcatgtgaattaatttactcttctcaatcttatacatcaaaatcctgtaacctattatatcacagcttcatgagagtatgcttgtgttgtgtagatatagtaattctggcttgtttgaacaaaccaaaatttcttccaaatacaggttacatgtcctaaagagtaacctattttatcagatgctctatactcaggaggaaatgttgtttggtcgttggagatgtgtgtataataatgcctatatgaaaaaagaaaaagaaaacagctgaagtaaccttgttatgcatcttgtaggatgcagtacagctattccactcttactagaatttatgcttgatctatgtttctgttcaatagatgcataatgtagcatcagtaatgtaatggtgtacttataagctgtttggtttgaggaatgagctagttcatcatcttctcactcttcattttttttgtttggtttgtggaatggattgaatagatccatcatcacctcattccttatagttatttagttagtactaatatgaggaatggagtcaacctaccaaatttgaggaatggacccatgatgcatcaccacattttggatggggtgattcctccaaccaaacacccccttattgcttaagttactcttcctttttgtgaaagtattgaactgttctgtttctttgagttccagttttgcaaccagtattctgttccaaaggacaaact

SEQ ID NO: 7940 - DNA, 1060 bp, Zea mays
  Intron number 1 from transcript GRMZM2G351990_T01 (locus G RMZM2G351990) derived from phytozome v7.0 (chr-ID 8; pos 1 41650295 to 141651354 reverse strand)
ggacgaccctcgccgcctcgctgctcgtcgcgcaggtagtctgctacttcttacacggtcgtcgccgatgttgggctcttcgatggtgctgccatcgacggtgcagactctctgcacagccacgccgatgagctctcctctgtcgtcgtggacatgcttcacgatccccttgccatatgattcacggttcctcgcctcgcgactgcaacaagtcgtggtggtggctggtgtgctctaggtgctcgacgaaaggtgtgtttgtagttcggcactctttaccaatggaaagagagagaagtaaacaatatgcatgcgaagtcaaaaaaaagtgaaatcgaaattcttttctctgtttatttgaaaattgtagaaaacgggcataatctttgtacatttattcatgcggacacaaaaaaagaatagtatatttaaaagctaggtctacgaaacttgttcacaaatttaagtttaactaatatgtatactatatttttacataatatttagacgtttacaactttttattgcaaaatatttatttcatcaatttttaatggcgtattttcaatacaagtgcaaaattaaaaaacaatgaataaatatgatatttatgtattcagttaacactgtagaaatagatgaccgaatttagaggacgttgctcgaggagaagatatagaggacagaaatttttagagtgtgctgtaaaggataatgaatatttttttaggagatgaaatttagggaacgttgctgaagatagactaagtgtgtttggatggagggacgaggaaggacgaagagagatgggatgaaatcattttaacttgacccgcgtttgatttagaaatctagagtcagggtcaagaaatattcttagaaaatggtggatgatgtcatctctcaaaaaacaaggaacgaggtcagtccaggattaatcctgaccaatctctcgttcacaccgaaccaaacactaagtgattgacattcagatccacgccaacagctggtaatcattttctcaggtcgcgcagcaaagtagcaaactcctgcgacccta

SEQ ID NO: 7941 - DNA, 948 bp, Zea mays
  Intron number 1 from transcript GRMZM2G089741_T01 (locus G RMZM2G089741) derived from phytozome v7.0 (chr-ID 8; pos 1 00632037 to 100632984 reverse strand)
tagcagctaggcacacggcgaccaagcgtctagtggtatgtactgtgtgctttcgacgtttcttgtttgctccattctaaatttgctctggcagacagtagatgttcgagacaatctgagtaacttcctttctgttccttgaaatcgttccattagttcttttggtggccttggtgaatgataacgagcaatcggttctatagtaggtaaattctatttttgcttcagttaggtgggtggttaaaggttcgtggagatagttgataaaggataaagtgaattagttgatttgtaagttatagaagggctttagggtgtgtttggtttaacttttgactttggcttttgcccccctaaaagccaaaagccaaccaaagggctggatccaggaagcagctttttctaaaagccgactttcttgtagtgcaaatctgaaagcacctctggacctgcttttagtggcttttcggatggaactatgaaaacatatatcgaaggatttttaacgacttttagtggtttctactaaacggtttttagctttttaacagcttacagcctacagcagctttttccacagctcacagcccacaacaacttttttcacagccacagcccaaccaaacagacccttagaatggtcatgtgatggaacattagagaaaatatctggtaatcagcaatggaaagaaaatggcaaagtaattgatataaatgttcaagcacttgttcatccttctgttgaaaaaaatgctaatgggagttttattacacacagtggatgccccacacaattgctagcagtctcttatgctcatttgataggtttggagtacaattcatgtatcacgtctttcgatatacatagcagataaaatggcctctagttttgttactcttccagcttttcaatgtttatttctacttattttgtggtttattaacagg

SEQ ID NO: 7942 - DNA, 565 bp, Zea mays
  Intron number 1 from transcript GRMZM2G365761_T03 (locus G RMZM2G365761) derived from phytozome v7.0 (chr-ID 2; pos 1 07851511 to 107852075)
gcccaagaagagaccaggtgcaacgacaactcaatgtaagaattgttggattttgtctcccctccaaattcagtgtttcatgagattttgtcccttttcctttaattttcctagatcacaaagaagatccgaaaggcgagaggatttcatttcccggatcgacttacttctaccctccggttgtttgtggacagtattttggtgctggttttgttatcatgtgttgtgtttgttttattttaacatcactccagatttgatgaatcttagctcggcttctgcacgatgctaaccctaggctcgtcaggtttttttaagaaggaagccccaattcctgtgctagatccaccatgccattcaatgttgcagatcatgacgaatcttgtgattggtttgtgtcaaagcaatggatacacatatattcgcattgcatcatttctatggtttgttgtctcatttgatcgattgacgacagtgattatacattaccagttcttttgatgtatcctatgatggaaagggaaaattaatggttgaatttcttaatatgagtaggaggtgaagg

SEQ ID NO: 7943 - DNA, 972 bp, Zea mays
  Intron number 1 from transcript GRMZM2G426862_T01 (locus G RMZM2G426862) derived from phytozome v7.0 (chr-ID 8; pos 1 49205170 to 149206141 reverse strand)
cctacacaaacaatcacaacgttgttactggttctcaactccactttctgaaatcggaagtcatgttaatcaaatatctggttatgccttggtttaaaaaaaacatttggtttcatccgtcaactaaagtaagagactgtgttacatattgggcatcatccatttcatttatcaggaatcaaaattttatcatagaaatccttgtgcagtatgtatcctgcacctgatttatatttgtaatgcagtttatcaatatcaatgttgttgaacagctttgcattctcgtaggcatgttcttaggtttttacacagaacaagcaagcatatagttctacttccacatagtattaccaagtagcaaccaaatacataaatagcaaaagctaaatatgtagaaaagataaaatgtcttataatttgaaggggagggagtacttgctctctctctctctcgttttccactcagaccccgtttggatccttggaatttaattacattctaataattgttaatttggtatagatcaattaagccaatatagttttatacagaatatatttgttggctatatgggagagatatttatatgctatattgttactatagaagagcgagacaaagagcgtgttataagttgcagagtagaaacatagacttatgatatataaaatcaatctccactcgtcatcctatgaatttaggataagcttatatctaaatggaaagtgatggattatcaaattccaagccaaatctctactattctatatgagtctaacgagggcgtccaccatgcccccgccccgactgtcgagtcctgcaatttcagccgtgtaggtcctgccgcgtctcgcgatcccagctaccccaccaagcctgtcctgggtttctgccgccggctgccatcacgcgatggatcccctctccctcctgcagctccctcgtgcctcgcgcccaccgctgcccctggc

SEQ ID NO: 7944 - DNA, 497 bp, Zea mays
  Intron number 2 from transcript AC165178.2_FGT001 (locus A C165178.2_FG001) derived from phytozome v7.0 (chr-ID 2; po s 181404599 to 181405095)
gcaggcgaagaccttgtcctagaacgaaaagcttggttagcaacaatttcaaaagctaatgttcaattttttcttctatccaaagtactaatctgatagatgaggctttgttttagaaacagcagcaacagaattgatggcgacattgatacacaccttgcatatgcacgatgttcgaacaagcattaaaggtagagaaaacaatttcgtggacagaaaacaaacttgtttaaaaagtcataagttttacatctagtgtgggggggtaactacaaaaatcgatggtcgcctatcatccagccttttgccctgccctatgccttcagttcagtgagcctttacttcagttcaaaaaaatgaaaaaaactattaagtccaggattttagtaagttttacatctagtggggggtaactactaagcctttagttcagttcagtactcaaaaaaactgtttgaacagccaaccttcaatcagcaacaagataagcatttctt

SEQ ID NO: 7945 - DNA, 831 bp, Zea mays
  Intron number 2 from transcript AC194942.3_FGT001 (locus A C194942.3_FG001) derived from phytozome v7.0 (chr-ID 8; po s 105209871 to 105210701)
cctcagtcagctacactcaagggtcgttaactgtagtgtgttctcttttaaataactttagtgtgtcatcttctactgaattattaggcaacttagcgcttatgagaatctcagtcacaatagtgatttaaactatgtgaatgataactggtttattttgaatctcttctgcaacttttgcaaatcatttacatctgggtgcttcaaacatcaaagtccataccagaatttcatcaagaatgaaaagatacatgactctgttgaaaccaaataggctttctaaatattgaaaaatggttaaatacaatttcaataatcaccaccaataactgtataaccaaccacgtgaattgaagcatatgacttattagaaagcaacacatgctcgaaatggaatttataagaaaggctatacaagttagtttggcttgcaaacaacaaaagaaaatttgtcaaattaattggcttgcctgtatagctagaacattttatactttatatagtggataattattgcatcaataaatacatgtttaccaaccttaagagcgtcatagcatcttgcaattggattggcagctgcaagaaatgaagtccctaaaatgagtattattgtaatggcagctttggcaatagatattgtctgctgctccatggcctcaggaatcgcaactctggaattgcataagaaaacagagactgggttaatgaggtttcgacagagcatagcaagaaagaagatttactatgtctattctagtttcaccaaacatataaactgacgccatgtctttaggtcgcatcttatcaaattcatcgatacaaaccact

SEQ ID NO: 7946 - DNA, 869 bp, Zea mays
  Intron number 1 from transcript GRMZM2G419439_T01 (locus G RMZM2G419439) derived from phytozome v7.0 (chr-ID 9; pos 1 25678490 to 125679358 reverse strand)
tgtctagtggagttgaggcttggggaacaccggcggtggagtgagggataaggaggtggttgccgcatgcgggttaatttcttgctggagttccatgctggcttcagcaaaaccctagcctgctgcggcagggtgaaggcgcatgggatggcagtggcattggggcagtaccgcagtagagctcgggaagaagcagtttgctcaaagctgaataggaccctggccattcaatctccatccagtggccagaacatggggtgctggaagagatttttttaccagaataatattgtatagacagatcctttgatttactagtgttgacgagttacaggtgaagttcattttaggctctcacaatgagatgtaactggatttttagcatctgtttatgacaattacagttttggatagataacttggcagctagattagccttttggttttgtgttgggtgtgggtgggtggtaatggaggatcatggtaggctctgccaaaaggttttaactgtatatttagtaggcttgcaggcagggcgggttttttatgggaacccgcatatccaccccacaaaatcatgctttgtggcagatgcagaccagctgcagcagtttttcggcatcatgtctgttgtttcattaagcccatcggtacccttttgtttctacttatgacaaatacatgacacagctttcgtcatgttcaacagatacacaacctcacatctcttctacacaatatgtcaattcatctaaaatggccaatacaaccattccattgatgaatgacactattggcgaaagttcctttttttttccttatatgaattcttgcaaaaatcaagctttattattttgattccgtgtgga

SEQ ID NO: 7947 - DNA, 962 bp, Zea mays
  Intron number 1 from transcript GRMZM5G879240_T01 (locus G RMZM5G879240) derived from phytozome v7.0 (chr-ID 8; pos 1 69502059 to 169503020 reverse strand)
acctcggcgagctcggcctactccagttcaaggacgtgagtgcccctccctctctctcgccgctccctgctacctcaccgcctctggccttctcgcccggatctacgtgaatccagcctcgagtcgtggtctctctcccccggccccgctcgcgcgcgtcacgctctgcgctctgctggatctagctgtaggccgtggtaggattggagaccggctgttttgatctccgctgtcgttcgatcacggtttggcgcgcgtttcacgtctgagctggctgggcggccgcgctgatcgattggcgtgggagcttggtttagatcagacccagcagcctcattgaggcctcaggtttaatgtaggagagcaggaggggttttcatgacaagcgtgaaattggatcgccgtgctctagtttcgcttgatcatattcaccgtatccatctgtgttgaccttaagccagtgtaagcaaagaattcccactgtctacttttgacaagctgcgcggacaaattactatagggtgaaggtacaccctttgttacttataccattacacatagtcttctgcttttaagcaaaagtagcaagtcagactgataaattggttcaatcaatgaaaaaagtgacagtgttttgtgattaggtgtttaaaccctggcatgtcattttcattttactctcttagttttatatgctttttatataccgactcattatcattaggtttgattattctgaggaatcacatgttattgtcagtttgttgtattgttgtttgaaggtgaattggtaaggatggttggtttcaaatcatattgtttttccccacgtgatgtttgattaaatatctgtgtgggtgtgttgggggggggatacgtcgaatttaaggatatatgtttctctttgtgttgactatcatagtgttaaccatttcatctcttttcttatcttgttcagttga

SEQ ID NO: 7948 - DNA, 552 bp, Zea mays
  Intron number 2 from transcript GRMZM2G360389_T01 (locus G RMZM2G360389) derived from phytozome v7.0 (chr-ID 4; pos 1 41523425 to 141523976)
gcagtgccaagaaagagttgactgaagaggcagattcccttgaggagagaaccactggtaaccaattgcaaaccagtcgtgcagagactacaataactggtgaaaacagttgtactttacttgaaagtcaagacccttgcacctctgagaccccaacagtcatgtgtcctaaagttttagggtccaaccgtcacaatggtaatgtgtccctataagattactctcatatctgttttatgaacagtgcagccgggtatccgattttcaagactttagtgcttttctttttggactcccacaattattcacatgtcttttgcactacaaagaatatagatcatcatgtctatctggaagtatgggtattagtgttttttctttcttaaatataggttgttttaagtgcagcaaaaaatatttgaattcgactactacaattacttcatactttatattattattttatgaagttattttggttttaaaaacagatgttgttttgtgttttcactaaacagtctttaccccaaacaggcatcaaaagacagtacc

SEQ ID NO: 7949 - DNA, 618 bp, Zea mays
  Intron number 1 from transcript GRMZM2G004040_T01 (locus G RMZM2G004040) derived from phytozome v7.0 (chr-ID 8; pos 1 44491757 to 144492374 reverse strand)
cagagcgcgctcctgcacgagctcaacaagttaaggtgcgttgttttactttgacaattgggcgaatgtggttccggctgagtggatttgccgtggttgtttatacggtttgacttacctaaggaacaattgtggcaaggtttcttgagaaatttgtgggtatgaattcccaagtttcgcgatattgagtggattctgcgccctaggtataccgtataccctctatgctgatttgcctcacaaagttgaaaataagcaatatggtgagtgcttgatgattcatatactgttggatcattggtaggagaaagcacaaatttggatgttcttgaacgttcataaattcgtccaatttgtcttatggttggtgtcctagtactgcatcatcattagtagtggtcgtattgttgacataagcatgggagtcctttttccgtgccatcttttgatgcaatttgaaataaatatgacaatgaagaaagttgcttcttttgttggttttgttgtttggactttgtactgaccattgcatcaaatcttcgaattagaaactgaagaatggtttcacctgtttgaatttcctgttttggtgtgcaccaaaaatatgcagccctgaag

SEQ ID NO: 7950 - DNA, 661 bp, Zea mays
  Intron number 2 from transcript GRMZM5G816457_T01 (locus G RMZM5G816457) derived from phytozome v7.0 (chr-ID 2; pos 3 8762110 to 38762770)
tgctggagtcaccagtcttcgtttctaattccgtatgtgctcttctctaggttatgatagggtgtggacgcgttaccagaatcagtattgctttcgtctatggatgctaaactgacagttcaagaatgcttgctttaataagcttttgacctctccaggggagttcgtgaaagctctacttcagttccatgatgatcagttctgccttgttttgtaccatccagtctcttctttccaaacaggcttctgtttgttttctcaaaagcagaaaaatagtatcgtaccattcaaatatttcaaagttttcttgaaagcaagaatatgatgatcaatctctgttctttccatagttatgtggcaatgtatgccccacacttcaggtccaaacttcccccttatgtactacttggaactccaatataatagctgttaatgttgtcaaagctgcataggaatttcatgtgtttgctctcttcatattcatatctgtattttgaatcatcatgttatttcatatgtaaattaactaaggaggtatcaactaggacaattattttaatgaactccgatactgaagctatttcgtacctgacagcaatgttttttgtttccttgcaattcttcagggccaggcctcgccaaccacggggacgctattcat

SEQ ID NO: 7951 - DNA, 816 bp, Zea mays
  Intron number 1 from transcript GRMZM2G058276_T01 (locus G RMZM2G058276) derived from phytozome v7.0 (chr-ID 8; pos 6 290113 to 6290928 reverse strand)
acgccgtcgaggagaagggcgaccgcgccagagtaagaccgccttctgtctgacccgagcggtttctttgttaggttatgcttcgttgttccgttctgcggcgcttccccagcttgagtgatggtgtgatccgtgggaattatcaaaccagaaaccttagtagtgttggtgcttagtcttcctaggatattttggttgctgttctcttcgggttctttgctggcgcattcactattcttatgcggttagcgggttagtttcaggggaacgtatctagtgctcaaaggggtacggtgctcatatgcacattttaaatctggtgcatccatttcgcatctaacagcagcaccaattttgtgaagcacccctcccaccttcctcccctagtgggaggggttcttcgtaaaattagctggtgccgttgaatacaagatggatgcaccagatttaaaatgtgcacatgagcaccatacccctttgagcaccagatacgttccctagtttcagcgtgtattctgtaaatggccatagttccgttcttgcctgctacacatttgggaacttttaacggtttagtttttttctttcttttgaattattggatgatgtttttttactgaatagaaatttaggtgaaccgcaaaggaatgcactgatatggtttacactttagctcgtaaaacgaacataatgtgtctgtgctgggggtgagtttccacaacgagtgacacttccatctgtggaccttttcgtttttctgaaacggaggcaggatttgctaacgccatatccttgcaggcatcgtttgttggggcc

SEQ ID NO: 7952 - DNA, 854 bp, Zea mays
  Intron number 3 from transcript GRMZM2G413652_T05 (locus G RMZM2G413652) derived from phytozome v7.0 (chr-ID 8; pos 7 0526958 to 70527811)
caaagctgatttgctactctgtgaatctggaggaggtatatttttttacttgatccaaaataaatgtaggtcatttctattgttatgcatgttagaatctacgccggagagacaaccctgcaggttgccggcgagctcctacctcccaggtaagtttctccaggtatgagaaacctcactggtactcacacgcacgcgaacactttagagagaaacacagcagatttggtggcgtcctattgacgccttttcttagcctctaaggccatatatttatagactatcataaggaaacaaactagctattacaagggaataatccagactgctatcagtcctgatcttgctgattggatccgtcaatataagactgatccactaccatacttgctatttcctaaaacagaataagtaaactagcaccaatcaaggattactttcctaacaatgcatatatccgtatcaacctacagaatgtttttactggatctaaactcaatctaggtcattcctattgtcattgatatatctgtgcaaagtgcaaacctacatacccatctaaacattatttcagagtaatagtttctacatggatcatgttgcttctatggctgtctcatgtttgatactggacattagaatatgctcctttcaagttcttgcgtaaaagaaaattttgcattctgattctactgttttttttggagcatcatgttagctgaaacctcaggtgtcctgaatatgtcaagcatccctctggttctgaaaaatttcaacaatccagcattaaagagtgccatttgtgccttttccatgcagataacttggcagctaacttcagcagagaattagca

SEQ ID NO: 7953 - DNA, 967 bp, Zea mays
  Intron number 1 from transcript GRMZM2G422367_T01 (locus G RMZM2G422367) derived from phytozome v7.0 (chr-ID 2; pos 8 5087454 to 85088420)
agtagagtttgtagacttaagaatggtttatttatgaactacctatgcattttttctgcaaattctaatttcatttgatcatgaagataagttgttttccttaatttctacttctaatgctattgttcatatctgcttcaaaatttcatgaagcgtaaaaaatgttctattgtttgtattttatttgttgcacttttgcttccacatcataaaacataggaacaatactaaccattatagatctctgtttatttgtattgtcccttatacatattaatgcatatacacattgttacttttctgttattccaatccctcctcgacatatacatacaacaaatctggtttgtttcttactaatatcgcatgttcactcattgtttggactgcctggtgttttggaagactgtattctttctttgttgctctaaatcagctttaactcttagtttcatttgttcccaggaggattatgttgaatatggatgcaaggcaaaactgcagagaagctctgctgctgggcagtcgtgcttgtgtggccttattataaataaagttgcttctgcagtttagtgatgggattggcttcatagcttaattttacataattgaactataggatcttatcttattgctttgtgttttgggacaatgggactgatataacttttagatcttgtgatcgcactgaaatatagtgctgcagtgatgccactctgaaaattagtaagcgctcctctttaaccgtgctttccttgtgatcattcttctgaaaattgcaggatagcatactcatacagtaatactactgcatgtcgatcttaacaaatttcattcaagaaccaggccatgctgatgttcaaaagagttgtcagcagttcatgacatctggtaattattatatcttcttttttagagggccactgtggtctgcttagcagtaggtaattttgcttatctattaccg

SEQ ID NO: 7954 - DNA, 472 bp, Zea mays
  Intron number 3 from transcript GRMZM2G432525_T01 (locus G RMZM2G432525) derived from phytozome v7.0 (chr-ID 2; pos 6 0308563 to 60309034 reverse strand)
ccaggaagtacactgtagatttttttgctccagatcacatcttgattaccatctgctttaacccattttttcacatttgtgtttattctatttatttctatataagttattgcaatcaagcagctggcgcttatatatctaacttccattgggttcttctgtttttctccatgacatattttaggctttcgattacgtacatggaaacatgttctccacaataaatggaatttatgtttctttctttgtttgccaagctgtagcactacttattttccctttttgctgaagtaatcagcattgttaataaaacgtttggaccactagcttggctgactttaatgaaatattcaaatgttcaaaaacttatagctcacatgttctccctttttcgtgacttatgcttaagtctattgtctgtatattattctgtgcagggcgaatcacatactaccgaacagacctcctggtg

SEQ ID NO: 7955 - DNA, 599 bp, Zea mays
  Intron number 2 from transcript GRMZM2G131554_T01 (locus G RMZM2G131554) derived from phytozome v7.0 (chr-ID 2; pos 2 15520713 to 215521311 reverse strand)
gctgaacagcacgctctcaggtttcgcctctctctcctgaatctggatgctctgctgttcttactgcgtgccttttagcacgtggatctgtcttcgttttgtaaacgggaaaacacgcggaactgtctttgttctgtatgcatagcatagctttattttgttagcatgtatcttctttgcatgggggaattattttgtctaggcgctagtactaatatttatttgctttgtttatgccatgatgaagtacctgaagttttcgttcgattattacaattccattttgagtttacctgggaatttctctaatgatcatttacccgaaaagtgtcttgacaatccacagggttagtttaaggtcatcagaatcgttttagcatgctgtaggtatctttaatctagattgctcatttgcacttgacattacttcacaactgaatctattgctcacgtgcacttgactttacatggccacatgggaatttataaccttgttgtagttatctctaggacctttgggctctgatggatgaaagtgatgaaactaccactgcttactgacgagaggttattgtgctgcttgtcggtctcagagctgg

SEQ ID NO: 7956 - DNA, 851 bp, Zea mays
  Intron number 4 from transcript GRMZM2G178247_T01 (locus G RMZM2G178247) derived from phytozome v7.0 (chr-ID 9; pos 1 47493185 to 147494035 reverse strand)
cagattgggggtcccactgtaacaacatttttacggtatgtcttctccatttttaactgtgcttagaacgagcatagcatttgacataacttccctttgtatcttaccatacaatgtttccaagtctcttgctggtcattctggttgaccggcttggacaattaatcgcaattaatcatgattagtcggaccacttggacaattaatcgtgattggttcaaaccgacttggattattaatcatgattaatcgaaggacttgaaaacattgataccatataggaattatgccttactggacttagaaaagtgcagattaatattagattactgtctgttttaggcaattcatagcttcatgtcgtggaggcaatgtaagtagtactttggagcatgtgcatttacttctcttattgttttttttcccgataatctgttttttattcaaaattcagagtacaagcagagaaaaacttgagttcgtgtgcagctaccttgcggatttgagcttgctggattatgactgcataagctacctaccctcagtagttgctgctgcctgcttgtttgtagctagattcacaatccacccaaagactcgtccttgggtaaagacaacatggcttttattgccaactgcaccctcccttcccgaaaagtaccattctagtaaatatgagtctagataaacgattaaccagattcttagctagaatgggacattattttgggatagagggtgtatctaaggtgtagggttttctgatatcagtgtgtatagttctcttttctgactttattgtttacaattttgcagaacttgacacttgaacaaaacacggggtataaagt

SEQ ID NO: 7957 - DNA, 950 bp, Zea mays
  Intron number 6 from transcript GRMZM2G013450_T03 (locus G RMZM2G013450) derived from phytozome v7.0 (chr-ID 8; pos 1 29135656 to 129136605 reverse strand)
caggtaaattaaactaggttattttttcttcaagaagataaccagtagagttcattaaagaagagaatctacatacaaggtgttgagttcttctgtctgaaaaattgctgccactgacccagtcagggaaagcctatattagtgatactgttgtatcccactccattgtactcatacaatgttgtgattttgttgcttctgatatcccttgtgatgagcctatctattgtttagatatgaaattgtatgagcgtccaggcaaaagatcttacattccattgtcttaaaatcttcgtatattggaaacttgtatgggtgaggaaaaatcagggaactgaaatggtcttctctattaggcagccataggaatattagtaaagctttttatgctgtacatttattactgagccttgataaggtgaccttacaatattgttaacatgttaatatactttagttcatttttctatgaggctccaatccttaaactgcagtgcttatgtgttatgactaaatggttatttgttttgttcttcccaaagcattttcacacctcctagttcctatgttttttaaagtttattattgacttgagtacttgactatgaaatagtctagcctaccccaacttgcttgggactaaaaggctttgttgttgttgttgttgattgacttgactatgaactataactaatacattcgctatgacttgggtccaattttcctgcagccacaatatgcaaatgttgatttaaagtcattttgtttgtatattagctgaactccaagtggcctgcttttacccatcctactgactatagagtggctaaatttgactgcaataatgcaatatgcttcaatactactcataataaaagtgcagcaaattagtaattatcaatgaccatctttcagacacatactcaagcgaaaagaaaaatattggagtc

SEQ ID NO: 7958 - DNA, 449 bp, Zea mays
  Intron number 3 from transcript GRMZM2G398642_T01 (locus G RMZM2G398642) derived from phytozome v7.0 (chr-ID 9; pos 1 6102869 to 16103317 reverse strand)
taataacatctaagcctttgtaagtttgaatattcatgtgtgacttaatcaactacttatagcttttattaggctgtatattgctcagtcctgtaagtttggtgttacacattgcacatttgctttaaaccaatggcctttctattaataagaaaaactaggaaaaagtagttgtgattctgataattttgaacggccatacttgggataaagtttgaatgttttctcttttcttaccaaagttctaacatagcattttcacatttcttccatggtatacagtttgctgcaggaatccacaaactgagtcttttcttatgcttctggaactcccatcctcgtaggcgtccacattcgaggatggtgcacgattctaatgccttgtctgttctaatgccttgtctgttctgaatcttctgatgccttgcctgttaggagtgctttgtcta

SEQ ID NO: 7959 - DNA, 850 bp, Zea mays
  Intron number 1 from transcript GRMZM2G385507_T01 (locus G RMZM2G385507) derived from phytozome v7.0 (chr-ID 8; pos 1 8872795 to 18873644)
acaaacaaggctcacaaaagtgttactggaaaaaggttagcttcatgccaagcaatctacctagactgttattcccgtaccatctcatcacttttgcatgcatgccatgggaccaaacttttcatagggctcggacatcaccttccaacaaggttgccaagaaactttttagagatgaagacacaggagatgacgatgttgctggttctggagacgttgatgctgagtagcggtatgtccaaatctgccctacaacttcataacatatatgcttccaggtgttccaattgcatgtaatataaggcagttgatactacgcaaatcaaaagcccaatgatcagtaataactacttttagctaactaaaacactgtgatgcataggaacgacattcaaagcaagctgacaggtcatcagatatctcaaacaagcattctaaagctaacaacaggtccatatgtggttgattgaactaatatataaataaaagagaaaatggtgtaaccttctaccgatataggtgaaaatagaaattagcaagttttcggaaaagaggtcaataggctaaaacatcagcaagtcaaaaaaacgatagtcaagtggtttcgaatggattaccttcatagacctcttcagtcgagatctacgggaaaaaagtagacattatatttgagatgcaatgtttgccaaaacttgttaattgattgatacccttttttagttgcagtgcttttggacatgagcgccaccagctatggagacccgcttttgggaactgaagatcgcttttgggaactagcccagttcatctaggttactcttagaacttgcccccctgctgtgcagggagt

SEQ ID NO: 7960 - DNA, 544 bp, Zea mays
  Intron number 1 from transcript GRMZM2G420865_T03 (locus G RMZM2G420865) derived from phytozome v7.0 (chr-ID 2; pos 1 93048462 to 193049005)
gttgttaggatacgacgagcacgtgagtcaaatcaagaagctgttcttcttgcactctgtttgaagactttcaagcgaagtgttatcatttttaggtttgtgttctttataacttggcaactttttgatctgaagtttaggggttcttcactggggtacattaaacattaaccgctctactccttgttgtgttagccttgaatatctaagaaccatgttgaactagtgtctaatgtctatgtctagtattgtggctgaaaagataatgtgatgaacacattcatgcaaggttgtcattagtccattgaggggtttgatgcaagtgtacgtatatcacaattccatttctataccgtacatcgattcaacaccttcatgcaatgttatcagtacatcacaattccattgaggggttttatgtcatggttgtatttttataccacacatcactacatcagttcaagcactcttgtgtgctttttgttacccctgatttttgtattatgcagtgggacaaagcaatctgcacacaggttaaaaataa

SEQ ID NO: 7961 - DNA, 978 bp, Zea mays
  Intron number 2 from transcript GRMZM2G069603_T01 (locus G RMZM2G069603) derived from phytozome v7.0 (chr-ID 4; pos 2 39073884 to 239074861 reverse strand)
aggccaagttcaagcagataaccgaggcctacgaggcaagtgaatctagcagacgagctttccttcccgttatgatgtatttaggaatccacatgatcacatatttttggaagaaaaggatagccatgaaccgtttggtttaatttggttggtgataccaatacatgaaccgtttggtttaatttggttggtgattccaatacatggtcgtgtggaaagttcttagtcgttataaataagtgaagttatgtttcctctaattgtatcctcaaactgtcttaaattcatgtttaccattttcagtgttcatctaggatctacaaagtgcaacgtacgagttcatgtgtttatttaacccccaagctagagtattcatcatctgtatgaattgattactgagaaacattaggaaaaaaagtatacaattttaacacaagctgctagtgaagctctatggcaaaagaaccatgattgtgattatgtagttgtacttataagttttaaaactgccgtactgtcctggcatcttggaagtattattccttttaattagtttgatttgcattggtttcaattgctgaagttaggacttctttgttaccataagatagaactgttgtgagttaaaaatgtttctctcatggtctgcatctagcttcagcatttactatggtgattgaataatgtaatataaaatcagcacgattactgcatattatttaagactttaaatgcaatgcaagatggaggtaagtcacgatgttttccttctcttctgatcatcgctttagcatggacttgtactcatcgtatttattttactttcagtctgtagtgctgaaaaatcattgcatacaatcttccaggagtgtgaatgcaaaagttcagttctaggggctgtgttgattatttgctctttgctgatcaactctagatggttagtgcaggtactaagtgatccagagaagcgtgcaattt

SEQ ID NO: 7962 - DNA, 873 bp, Zea mays
  Intron number 2 from transcript GRMZM2G433731_T01 (locus G RMZM2G433731) derived from phytozome v7.0 (chr-ID 2; pos 2 25860205 to 225861077 reverse strand)
tttgtgagatcgatctatctattatagccataaaggtaggattctaacaccaatgaataccgactcttatctaataaagatcaatctatctattaacaaacatccttgcctaatagatatcggtgtatttatcctagccatataggaaggattctagcactagccttttttgtttctgctgagttcagattcatagtagacttagggtcctcgtccttcactaagttgtggatttctgatcttcaataactacatctaaataaggccgaaatatgcatatcatgttcttagttgtcatatgtcttctttgatggtgagaacgtggccacataagcgctgacaaataacttttaggataagactcttaattgttgacttcaaagagacatgttcttggtaacctccgatgtgttaagaactttctacttactaatagcactatatactaccattgattacttttttttttgaattgtcgtattttactcgagtaatttttattgtttgtttgaataaacagtaattatttttgctctagggaagagtccaaacctcaaggccttaattactgagaacttttttcttaaatcaacttgtgcaagggtttaacactgctcatctcagcacctagaacgccattttttaactgttagcagtctatcacctgatcgcataacattaaacatatacaagtgatactcagccccttgctctgtttttggaccggtcgcttgcctgagacatagaaaaggaaatttcctcgctctctatcacacatgaacaattttaatacgaaagtaattcaaacgatctcatttggtaattgtttttgaacattgtagagaaggtctatttacgcggagaacacgtttg

SEQ ID NO: 7963 - DNA, 1061 bp, Zea mays
  Intron number 1 from transcript GRMZM2G106344_T01 (locus G RMZM2G106344) derived from phytozome v7.0 (chr-ID 8; pos 1 71711263 to 171712323 reverse strand)
ccacggcctcgctcgtcgctccctccggggacgaggtaagaaccaagtctcttccagcttcagctcgtcttcattccttctgcatctgcttcggtggccactctactccgatcctctgtacgttctctgctagtagggatttggctcttgggtagatacagtaaggttcatcactcatctgctagctccttcagttttttttttgtttttaatttcgtacgtttgatctaaaacacacctaattaattaaactatctcaggaaggtttgcttcatatatactgatagaaaggatttggcacatgcaagagtgaagatgagcttaataggggatcgatatataaaacacgcagataaacatgctaataggctaacgacatccatattttgtgtgtcatgcaagtatatatataaacaacgctggctagttaatctaggatattgctttcgagggcttcaaatttgaaggtaaacactgtttaagaaagtttgttcatgcatcctaggctagactcctagtggtcgagctttagatgattataaagcctaaaagcagctacaagtttcgggccttcttttttagaaaaaaaaaattaatagcaagcaactcttcatacttctacggacaatccggtaccagttaaatcgatcatattttttttttatctctcgcctaacaacaacatgacacgtgctcatgtcgcgacctcactgaaacttccacgtatacgtcctagctccttttgtagctcgtacgtgaaatcgaatcagaatatatgcagcattatttgtgctgtacttttgcttttggaacgtactgttcagttcatattccgtccctgaccctagctacgtacgacaagaatcagaatcgcacggtgaagtgcagattgagagtttactatattttcacatgttttctactgtatatggatgtagtaatttttaatcgtaacccatggtccttccagtcattctttataagcatcttcttctcgagatccatcctcaccgaacatcctggcaggttcagtttcgggagatcgacggcaagatcatcgg

SEQ ID NO: 7964 - DNA, 903 bp, Zea mays
  Intron number 1 from transcript GRMZM2G122123_T01 (locus G RMZM2G122123) derived from phytozome v7.0 (chr-ID 2; pos 9 3811755 to 93812657)
cgaggccgttgaagggccaagggggtatcgaggtagtggacatgttcggcgacaagaagcagtcgggatccaaccctccctcgcactgctgcaattagtagtagcagctagccagttgcatgaatgacgcttataaaagacttctttgttcaactgatcaaagctaaccacacaggttgcagatcagggcgtatgtagaatattttggagctaggcgccttggccatgaaaaggaacatgtataattgtgctgcaggggcatgcaaggacatgccctgtgattgaattcgttcttttgttttaactattacgggtcatattatacataccattcggtaatcttttgtctcatgaccatgtcgaataattatttcctgtcagctcgacaaataaagtttcgtaatgaaaaatcctgttcttgtgcccggcttgtattgtaatcctgcggtgcaattctcggcgcccttagattcagaaaaagaaaactccgttccccgtacactttatacctctctgttcacagaagcagggtacattctcagtgccatcacaaaacagagtaatatttgtatcaatttttgtcacacaatcagatcacattttttctttggtttcattgccattctgttgctcgcacaatccagaacagccttaagcgataataaagagcaaaatgacaacggaaatctttgccggcaacaaaatctggacccacaaagtcagacccagctggttggtgctggctctgccaaacccaaatctggatggagatggagccgtcgcgtctgaaaaaaatcgctagtggtaggtgtaagctgtaaaggggcaagccctgaaacgccggtcggtcggtcggtcggtcctgcaggcggctgcgtcggtgactggtggcgacgaagatcg

SEQ ID NO: 7965 - DNA, 345 bp, Zea mays
  Intron number 3 from transcript GRMZM2G119745_T01 (locus G RMZM2G119745) derived from phytozome v7.0 (chr-ID 2; pos 2 13393911 to 213394255)
aaacgagtcaccaaccaactgttgatattataaaggtgaggtcaaaatctagagctcagtctactagacttggtagttggtaatgtttgcatagaacatagtgattattttgtaagaatcgcctctacttgctagacatggcaataactttccatagtggattcaccattcatgtatctatgtagtcatacgcttttcacacctgtcattcaacttagaatcattgagattataaactaactaccattcagtttttcttctgcccccccccccccccccccccaatgcttgctattagattaatatgaaacttcacaattctttgattgtccgtacagatccgtt

SEQ ID NO: 7966 - DNA, 627 bp, Zea mays
  Intron number 1 from transcript GRMZM2G081486_T02 (locus G RMZM2G081486) derived from phytozome v7.0 (chr-ID 8; pos 9 0263872 to 90264498 reverse strand)
cagcagcagcaggcaaggaaggcccagcgctgctggtccacggatctgcatcgccagttcgtagccgccttgaatcagctcggtggcccccagggtgagccttgctcttcagatgcaaattttctcgccgattttgggccaccagcatgttcttatctagtttcttgccatatctgttgccacgccaaagcaaatcagtgagctgatgaaggtgaacggcctgacaaacgacaaatggttatcatctaataacaaatgttctcatatgttcctagcaattcaataagtaagagcttgaattaccgcacctagttattgccttcagatatttgatgccacattagaaggaatttaggaaaataaacagggatttgtcatagttggcattgattgaagcgtgggaatctgacttgacgcgagccactggaaaagaaagaacaaattacaatagggactgtggccattcctaaggggcagtacttagatagatgtctccatgttttttgtcctgtggtagcattttcctatatagaagcacactcgagctctatccgtttgatgttgcattctattcattcttctcaatcactgttatcatttttcggtcttgcaaataggcttctacag

SEQ ID NO: 7967 - DNA, 769 bp, Zea mays; identical to SEQ ID NO: 6553
  Intron number 1 from transcript GRMZM2G151193_T01 (locus G RMZM2G151193) derived from phytozome v7.0 (chr-ID 8; pos 8 4358755 to 84359523 reverse strand)

SEQ ID NO: 7968 - DNA, 961 bp, Zea mays
  Intron number 1 from transcript GRMZM2G160556_T02 (locus G RMZM2G160556) derived from phytozome v7.0 (chr-ID 8; pos 9 8400264 to 98401224)
ctgccgatcctccgggcccacgagcatctcccacggtaccgatttccgaaccccccgtccgatgaaactgattcgctctgcttcgacctgtatcgggccctcaagctttgtagcgcgtggaatcgcccgtgggttctattatagcgttgaatcgcttgttggctctagcatcttgacgcgtcacgcagatgatgtttgaccgctgatcaccatgataacttgtgaatttccttttagatattgctgccaagggacagtgcaagcgcacaacggttttgtagtttgagctggggagagtagttattttttcagcttatggccataatgaatcatggtttttgaacaaaaaaccatgatgaatcatggttgccagttgaggggcatggttaatctatgaacctctgaacgctcgttgttacttgttagctgctgaatcctgaatggttcaaatgcctcattttattcacttagcttgtaatacttgaaacaagccagcgaccatctagttttgtctctgaaaatgatccatgtggatcatgtaatccatgttatctagggtgttatacacagtgatggagcaaagccccaggctgcctgggattttatcctagtctaaggcagtttaaccgagagcaatagaacccactaaaaaaatgtagagatgtctaaggttttcaaaggatttaagactgcctagcactagataagcctttgaggcatatccatttctggctccaccctggttataaagtatatccaagttttatttaacagtcagttgtacaaggtaaaaaatatactagatgggaattgctttgacctttaaattagatgtttcatctatttgtcgtttgttatattttttcttctcgttctacctttcatgtatatacctgtgtatagaaggctctgtcacatcatcatttaccatgctagtttctgtcctatcaatcttgcaggt

SEQ ID NO: 7969 - DNA, 531 bp, Zea mays
  Intron number 2 from transcript GRMZM2G131301_T01 (locus G RMZM2G131301) derived from phytozome v7.0 (chr-ID 8; pos 1 45835515 to 145836045)
ctggaggtactgtgtttcagattcactgcttggagcgatcagcatatttatcagtgttatgagctctgtgctgtgacaagcccacctctcattggtacaattgttacctatacatttttctctacaagctccagatataagtaatcaaatcatagatgatataatcattggataaattgtatattcttgtactgtattcccttagttccgaattatagttcactttggttttgtcccaagtcaaacttcttaaattttgagcaattttatagaaattcacaccaatatctgcatcatgaagtttatttcattaaattctccatgaaactaacatttgaagaacatttatttgaaccttgagatgttgacacattttttgaaaaacaaggtcaaagttagagaggtttgactcaggacaagctgaactgcactataattcgaaacagaagcatgttacctgtttgctttcttcggtactctttacctatatgtttttacaattgcaggtcaagcttctatctgagctaaaaa

SEQ ID NO: 7970 - DNA, 648 bp, Zea mays
  Intron number 1 from transcript GRMZM2G703281_T01 (locus G RMZM2G703281) derived from phytozome v7.0 (chr-ID 2; pos 1 84890839 to 184891486)
cccgccgggcaggtgctgctgaaaacagagagaacgtgagtctggatctcactttgtagactgagaaatgggtgttatcattatagcgggtaattcgtgcacactgagaaagctattattctctagctcttgaatttgtttaggcagcggcattttccgttgagagattcatttgttggattttgtctaattcttggctttcaatttctttgtgaaaaatgtgagacaaatgggagaaaagaaaaacttgggaccgatcgagcgtgcaaaaggactgctgccatcttttccttcaccacttgaaggatttatgttggtgcagcataatctggtcccaagttaaaatacaagaggagggattgcgtggcgagccagctacaaaaatttagcaactcaaaatagagatgaaacccaatagaaaatcgttgggcgtaaactcttaacgatgcgccatatcagaacccggttatggtgttaaatggggaagggctgggacaccacccccttggtgacgcgtcatgtcatgatctggatgcggtgtcaagtgagcaaggatcgggtcgctgcttcctttccgattgtccctcctcttaccctcccaccaaagttttagttgatcgcctggtttgccttttgtagcgtcttttc

SEQ ID NO: 7971 - DNA, 807 bp, Zea mays
  Intron number 1 from transcript GRMZM2G122983_T01 (locus G RMZM2G122983) derived from phytozome v7.0 (chr-ID 4; pos 1 31771906 to 131772712 reverse strand)
cgcagcgccgcaagctcgcccagtttcaacagcaggtctgcctccccctcccctcgcctccccttccgtggcacccttccctgccgtgagctacggatggtccgtcatcctcgcttgtgtcgaattccggccgtcctctgtcgcgccgtgggatcgtgtcagattcggtgtccgtctcgcgtcgtcgcgcgggagctgctgtaggtggcaattgggatctggggttggatagagcggcgtcgatcgatgaatcggagtaacttgcgagtttctagttttccagggaattatcgtgtcttgatcggttggtttcgcatagggtgccctgattggagtcgtgtcacagcaccgatccaggtcgatatatatgcctcgtgatcgggagtgaagaaaaattctctccttgtaatattccatgctatagtccagccaatcaacgttataactgctaattttgttcgtacagacatcaatacatcagtttctggagcgcatttcaagactcgtttttgctttcgccacaccttacagtgtattacaataattggtgttggatttgtgaaatttgcttgctagtacagacagtttaacttgatgtacttggatgttatagttcatcttttgattctagcttaatacaacatgttgtcatcaggtgctgactatcctgattagatggtcatgatcctcagttcatcacatttaatcattgcaatatcacctctgctaaaaatataggagtgtatttatgtatgcttctcttcccttccagcttgagaaggtaatcgaagcagaaaaggaagctgc

SEQ ID NO: 7972 - DNA, 712 bp, Zea mays
  Intron number 2 from transcript GRMZM2G154221_T01 (locus G RMZM2G154221) derived from phytozome v7.0 (chr-ID 8; pos 2 6095244 to 26095955 reverse strand)
aaggattctcaggtgagtttgcttgctattgccttcagcccttcattattttattgagcttgtgttatttttttttctttgtcatctatattgagttgcatgcactgaccaattcaacccaaaaacttaacacgctctcacgtcgagactctcttaggctttatacatggagctgatgaagagaggtggataattcacttattctaacaatctacaataaacatgaatacatgatgactgattgatttatacagtgcaaaagtgggcattttttccttcagcagactgctagtgttagtgatatgctatatgcaatgtatattgcatgttacacaattaattttatagttttttaatgggacatcctgtagctaataatcaaattttatacttaaatataaagaaaatgttgttcgctgaagataatacatgctttatactatgaatatatgtattttacagttgtggtattgataatgaaattatatcatcttgcttaaatgattcatcctttcttgccaaggcctctgttttcccctttcaaatgattgattccctttgtaatgctagggtccagtttttatttctggctgatgttgctttcgatactaccaattgcccacttttttgtcttcgtcaggcagttgaattatgttacttaaagacttgttctacaggatattcagagcacaacagagttgcagtcatcagc

SEQ ID NO: 7973 - DNA, 981 bp, Zea mays
  Intron number 1 from transcript GRMZM2G170101_T02 (locus G RMZM2G170101) derived from phytozome v7.0 (chr-ID 2; pos 3 0876831 to 30877811 reverse strand)
tcgaggaccgtctgctcactagtcactacgtctacgtacgtgcgggcgtgtgcgttggttgatggcaatggtctcgctcgcgtcagagctgggccgcgccgcgccgcgccacggcgtccctgggtttttgtttgccgcggttcggtggtccagcggaatcccgcgcattcaatgcaaggatcggagggcatgtcgacggccgctgattggccgggatcggtcgatccacttcagctcggcgcgatctcatgagtagcgactgtgcgagtgatgcgacacgcctcgtgtgtgccggggcggggcggggaccggcgcggcggcgctggtggtggcggactggcgggcgccgccgcgatcctcttcgaacggctgcggtcgtgcacatgcggtgtcggctcggccccgtcctcggacgccgagatgtggtcacgctttccttgtattttttttgtcctccactcctagtcctagctagtcctgggatctgcgctgcgcatggtctggtctggtctggtcccgtgcgggactctgcatgtgcacagtgacctcctgttggccttgacagctgccaaagtagagcatcgcttgtgtttgtgtggtgtggagtgtggactgtagcgattcgctaggaggatttacttcatcttcttggacacaactggctaggacgacctctattttcatcctttgaattttgacttctcttctattacagtcattattaccgttttcgccttgtcgttactccctccgtttctttttatttgtcgcactatccagcgacaaataaaaagaaacggagggagtactttagaagttacccttttgatcacatgaggaacgtcgtctgagtgttttttaccgagcatgctcaaatgtaacttcatattctcttctcaaacttaatcatcatcatgtaactaattaattcttcatattttgctaggcattgaagctagaggattcatctttgggccagcc

SEQ ID NO: 7974 - DNA, 509 bp, Zea mays
  Intron number 2 from transcript GRMZM2G311390_T01 (locus G RMZM2G311390) derived from phytozome v7.0 (chr-ID 2; pos 2 30014385 to 230014893 reverse strand)
tatttttcacattctcagttatataatagtttcaggttaatagcggattatcattttctaatttcagaacaaagcagtttgatgaatttacctcaaggctgctagaaattcatgataagatgatgtctataaatacgaaagaggtgagtaaactgtttcttatcggcctctgtgtctcagttttgacctttagtaaatgcttctttcaaactttctcttgtttttagccagccactaatatgtgcttgatacacttttaggatatacacttaggattgcaccggtctgactatatgctggattcttaaaccaattcactacttcaaattgagctcaacactatcccatcatcctttcctggccttggctcctttgtcagtgaacttcaaaggtcaatttaatatccattctatggcagaattttcatgttttcatgttttctttcaaattttctcttattttttcaattgttgtatggcgtcattatgaaatgtttcaggttgtacaaa

SEQ ID NO: 7975 - DNA, 685 bp, Zea mays
  Intron number 1 from transcript GRMZM2G410925_T01 (locus G RMZM2G410925) derived from phytozome v7.0 (chr-ID 2; pos 1 74673521 to 174674205)
aaacattcaaggtctgcttttatttatacatgtcatatgtatggtctacacttgcccttttcatactcttgagtgtcagccacaaggtacatggtaactgtaatttattcatatttaattatggttgttagtcatacaattaccatctattaaaaatacatcactattttgttcatgattccaccagaaatggagattatactcttaccgctatagttgttattagttgaatccaggatgaaacattgaaactaaatggaaaatttgtagaattaatcaacaaagagtagatgccttagatgacatgtaatataagctgtaaaggtgcttttggcttcgttttgcactacctgtgtacaaccatgaacacatcgaagtccaccactttgagtttcatttaacatttcaggggaccgtgatttaatcttatcctttggatgtttagttttgatatttgttgcatcaagaacattcatatctgatgatatcatgtgaaataaatgtgtcgattattatatcactggttggaacatgtcgctctttttggtttgatggactaaagtagcttccatgtattttagaagaaaaaaacatgataagtttagtaatccaattgatcataattgttttcatgcctgattttcttgtagacagtggagaacacaaatccttttctccgcacgag

SEQ ID NO: 7976 - DNA, 862 bp, Zea mays
  Intron number 1 from transcript GRMZM2G012405_T01 (locus G RMZM2G012405) derived from phytozome v7.0 (chr-ID 8; pos 1 50726122 to 150726983)
tctcgtcggcgttcccaatccatccaaatttcgcggtacatgcatggacacctttcccttagcttggaaagattactagctagtagctctttagcaaggaattgaattggtctgtcaggaagttcagacatgcatatatatatctagcctctacacatgagagaggggtaatccaaatggaagctttaatttctttgattcagcgtgggtatgggtttgcccatatagcacaggccagtgacacatacatgtgaagataacagcagttagtcttttattttctgaacacagcagttagtctaccagattcagttgagttgcgtatatatgtgctttctagctaagttggctggactggacagagctctaaatctcttctttctttgcgattcgttatttgttgcaatttttcttgtttgtgggtttccttcgacatatatatagctccatcgtcatgtggtttctttgatcgtgtggttcttcccaatcgatctagcaacacagctattttcattgtaaaattaaaattcgttttagttaattaataggttcatatacaacacttaatgtatatgtttcctatatatatatatatatatatatatatatatatatatatatatatatatataggtttatcttcatacatttgaatgtggatataaaagccaaaagctaaaacgactattattttggaacgaagggagtataaattaatgtgcagcaaactcctatataaaagcgcagtgtatatatatcatcttcttttgtgcttaatttccgtccgaatgcaatatgaactattgtgacaccaagaagatgtgtagagttcttacaccatttctctggcttcatcatgtag

SEQ ID NO: 7977 - DNA, 725 bp, Zea mays
  Intron number 1 from transcript GRMZM2G177659_T04 (locus G RMZM2G177659) derived from phytozome v7.0 (chr-ID 9; pos 9 7539602 to 97540326 reverse strand)
ggacagaccgacagaggaaggtgaattgtgggaaagtgcgtgctctcggctcttttcccgtcttccttgccttgtggttttgttttggaagagaggattcttgcttgggtaggattgggtaatttgagagttcatttctcgggattttgtggctgtacgaggcttttctgaggccaatttaagtagatgaaagttgttcatttgagtttgagttgttgagttatgtgctatctgcaatgttgtattgtttcatagagtagttgtttgttgatgtgaattgtgttggaaaaatgaattttgggcgtgctttagccgacctacttaactagtatctacaccaagacgatcctgtacccttaagatttgttattaggccctttgctttggctgtcctcttacttttgtttcaggaagtttttttgtgtgcatactgtttgactatgaatggaagacgtgttatcggattgttttgttcatataatggatctatatatttcattgctttaaggcactgttcatacataattacatgtatgagaaggtttgttctgagtaaacaatatatagaaatggaaatcaaaatagagagtgcataactcaaggcaacctagatctcatcatagtaatattctagtaagaaaacaattgtaactggctattcaaatcagtgatttattgcaccaagtttctgacttaaaaattttcacatccaggaggacagaaaa

SEQ ID NO: 7978 - DNA, 903 bp, Zea mays
  Intron number 2 from transcript GRMZM2G429762_T01 (locus G RMZM2G429762) derived from phytozome v7.0 (chr-ID 2; pos 1 0422448 to 10423350 reverse strand)
gccaggaaaaaggggggtacgagctccgttttatagtccgcaaaggcagagttcctcgtcaactgcagcgtgtgatgggtagggaggatgtaacaactcatggcggtatcggcgtttgagtttgccagccattgtggcgcatggatttatggaggttctgttgagctgaccatggagcacggatggcggaagtttgttggggaagagaaaaactcggctgacaaatcggctccacaagtcaaccacccacaacaacccgcacagccagcgaagaggctgacacagagggcccacgtgtcggtgacccaagcacggatcgcgggccacgcaggtgtggggtgaggtgggccgatgtagtggattcggcccaaacgacgatttcttttattttctgtttttcaattccttttctttatttcattttattttcaagtttcaatttcaatttttttcaaacaaattcaattctgagttttgacaaacaaaataatcctagcatgacgcaataatattttatgtgtatttattcctctcttaatttgatcatgtatttattttcatttatgatattcaataagcgagaaattcacatcattgtataatccaataggtattattatggtgaaataattcacacctattgattcaaaaggaacatgtcttcaacacttagacacatactaaaaataactttaatatttttttcttgattaactaaagtcctatagatccttaccattattcttatgaaataaagaactagctaaaattccttaaagcattattcagggtttacagggtatgggttaaagagttataaattgtttgcagatgtaattaatttgtgaacatttgcatgttaaagttttaagcttctccattgcctttataggaatctcattg

SEQ ID NO: 7979 - DNA, 348 bp, Zea mays
  Intron number 1 from transcript GRMZM2G122839_T01 (locus G RMZM2G122839) derived from phytozome v7.0 (chr-ID 4; pos 1 65664792 to 165665139 reverse strand)
ggagtgtcgcattgcgcctgaaaggtaagcagttattcaagttatgaatgcattgatcaccagtgtcatgtgcctttctttgttgaggattaatttttcttaagtaaaccatataattcaacatgactgcctaatttttgtttcctgaacaatgtaactgcctgatataactgaagacagcctacctaggctgagaagcagaataaaagaagatttgggatttgattattttgtaccgctttcatttcctatcctttggggcataatattagaacaaagaatatgattcccttataaccaactcaaactacagggaagacaccactggactggatcaccagattacca

SEQ ID NO: 7980 - DNA, 881 bp, Zea mays
  Intron number 1 from transcript GRMZM2G008859_T01 (locus G RMZM2G008859) derived from phytozome v7.0 (chr-ID 4; pos 2 34571441 to 234572321 reverse strand)
ccgaggaggaggtggagcgggtcaagctcgagcaggtgctttggtagttcctttccttcctttgacctattggttcgaagccccccctggtcatgctctgtgtgggtggagtagggtttatgtgatagcttgaatgaggaattttgtggtccggtgttctctgacaaccttggtaacattttgaggtttttttttccattaagaaatctagttagctgtggactacgtagatggtttcttgttgaaatgctcttgggcaggattggttttgtggcactgcctacgatgtgtgttatgtcgcttaggaattgtaacagcctagggagaaggaacgcaaacaaatttgtcgggagctagctaaggctagatctttgttgctagttgatcatccttcattctccactgtagcatcaacttgttgtcagatagttgatagacaagagtaacgattactcttgttcatcagcgattttgaaactatgcgtaatttctgactgacattttcgttgaacatttaccactttccaattttaaaagcatcaacgaaggcatgcttgcagtttagttccatgtgcttattaggatttcttagttcatgcctactaggcacttaggttctttattaatacaagaggcatggaaaaatagttttaactcatatgccatttaattgaggtatacaaattatggaagttttagtacatgagctggttaatctccactcttgttttttgtttgaaatcatgtttcttattcacatggtatcattgtaaaattgattatgtgtttcttgcttggctctaaatggtctcgcatacatacagggattctgaaatatcgttttccccctctttcttctgtattggctaaatggacaggtt

SEQ ID NO: 7981 - DNA, 1038 bp, Zea mays
  Intron number 1 from transcript GRMZM2G026568_T01 (locus G RMZM2G026568) derived from phytozome v7.0 (chr-ID 2; pos 1 21798162 to 121799199 reverse strand)
tctgtgggcagtgggctgcatcgtccaatcgaccggtgagtggcctataacgagttcgttgtgctctcggcttcatatttccatcaaccaacatcagaaatcgtgtgtgttgcaccgagattggtcctctctagtcctggctaccaccgtggtggctttgtgcgccgccgaatagatgaccaggggaggaagaaaggggtgagtccgttggatttcgatccagcgactaatattagatcgggttcaaattagatgtggttcgttcgatctaaatggacgggcgggattttaagtagcataccccttcgcttgattaaatcatagccgtcgaagttcgatctggcggccgcgaggtgaattgcgcgcgttaaaccgagacccttggattcagatccgatggtttagatcgcattccggatcggctgattgcggatctaatcctagcggccagatgttgatcgtgcggccaggaacgcagaataccccttcgccgtgcctatttgataaagagtccctggacttcttagtaataaacccgcggtccacagtggctgtgcgctgagtctagtaattcttgcgtagagacccctatatttatctgtttttgtgcgcgcagtccaaacagagattaaatcaggaaattaatttaagaaatgaatttttaatatgaaaacaattccagaacttgtaaaattcatataaaatttattttaactcatttttaacccattccagttcctataatttggtaatattattgtttatcacctagtgccactgttttagcatgaaaactatattaaatttgatcacctagttattcttgtaccaaacacataaaatcttcaaaaaatcgtaacttctccgttttgattccgatttgttccgttccagttgcgttagtctcatagaaacgcgtagatcattattattcactatattcttatgtttggtgtaatgttaattttatctataccatgtttgtttgtattgctacgaatagcagtgaggtcacgagaatctgaagatcatcctggt

SEQ ID NO: 7982 - DNA, 1002 bp, Zea mays
  Intron number 1 from transcript GRMZM2G397901_T01 (locus G RMZM2G397901) derived from phytozome v7.0 (chr-ID 2; pos 1 31999491 to 132000492 reverse strand)
gatcacgccccagccgcgtccgccctggactaccatggacggcgctgtgccacatttggaattaataaactagccactattgatgatacctatatcaaacatcttggaattaatattttatctacatttaatactgtggtttctgctctttcattctgttatatggctgcgacgtctatgagatcctgatatccatgaccatgagtaacaccatcaattacatgatatgtcaaattaattcactatttactcccattttgattttttcactctaaacatatttttgaatgaggccaaagagagtgctgatgtcatcattattgatgacagcttctcctctattgttgtcactgttgcaagatggggtcgatcagtatacatcaacattcagaagtttgtgcagtttcagctcactgtcaatgcggtacatctggtatcctgtattagtttatggtttgaaaatcctcatagtacttgagcgtattttgaatgcccttttgtttatttcataaacctacatctcatcgtttgtattcatgctgattcagggagtgctcctcttaccactgtgcaattgctctgggtcaacctgatcatggatacactgggtgcactggcgttggctagagaatccgtccccaaccccaaacgatgaactgatgaagagaacacctgttggaaggaaagggaacttcatcagtaacattacatggagaaacaccctgggacaggacttctaccatttcctcgaaacatcccatgtatattggatcggattgaaaaaattaacttgcatctattttcataataataaaactacgaattgtatgtataagtatattaataccattcaaactagggccattccgagttatggtgttagattttaattcaaaaaaatctggccttgccaatattctgtttgtattcagaacatcatgcttactaattcctcttcaaacttcagaaatttacagacagaagcttcagcagtttgtagct

SEQ ID NO: 7983 - DNA, 713 bp, Zea mays
  Intron number 1 from transcript GRMZM2G045944_T02 (locus G RMZM2G045944) derived from phytozome v7.0 (chr-ID 4; pos 8 0167043 to 80167755)
atcggcctctgcgaggggatcgtcactttcactaggttgccttcgctctcactcatttttattgtgcagttggtcgcaatttgaaggtcttgatctgctcgtgctcctcgccaacaacagcagcagcatcttctgcgtttaggaaaagaattgcacccagctttctagagggctacaacagcatctaagcttatagcatcacttcagtatttcaaatccgtagattgctcgagtatgcaagtttgggtgaatcgattttgttgcatgtgatccagcttaggttttttcaagcaagaacaattctggacttgattagtttttttggcagcgggccaatggcgttggttcctaagttcacctgtatgacagtggcagatctagaaacatctagccttttaatagtaataacatttgtaattttgtatagtggtttattttcacatagtgttcacagttcacatattcatgtagatctctagacaactgcaaatactaatggatgattactcagactgacatgggggttaacatcagtaattggggcccttcataagcaacatctcttttgtggtcacattatgacttccgtttgctctttgatagtgtattctccccaaattgccatccaagtatttcctgactctatacttttgataattcatttattgcctaatattgctgggttccacatcttatttctcaatgttagttat

SEQ ID NO: 7984 - DNA, 1025 bp, Zea mays
  Intron number 1 from transcript GRMZM2G044096_T01 (locus G RMZM2G044096) derived from phytozome v7.0 (chr-ID 2; pos 1 775901 to 1776925)
ggagtcttcttcctgttgcaggtaattttcatttgcactcttatggcatgggccaatgcaatttggaaactgaggccaaatgaacacccctttgaataccatataactgatttagacatttagtggatagatagtctggagcgggttaatggctgacgtattagaacccgtgtcctattttccgttacccatgccgcaagcggtgtttgacatgcgcctaataaatctgctgaagttgatactcgcaatttggcatgtttggtaacaatgtttctcaacaaccatggtttcacaatactatattttgcaattgtcatgacaataccatagttttggtcagctccaagaatactatctattgtgtggatacaacattgtaaaccaaggtattaagtaaaaactagctatgccatgaaaattttggtttggagtggagtttctaatagtcatacagttacacccgtgctattgtccatgtaacattgattagaaattagaatagtcaaaatcgacttaaatgggtgaggtcaaattaaatgcaacataattatagttgcttaagtctgagagtctgagcttgctgcagcatgcatcagaaattactgatttgggaaaatgcatactgataccaaaatacctgacaacattatcagatactgctgcattgtatgcacactttagatattgctgttgtttatctgtgtttcatttaccatgtacaactcttgatcctgtatctggttatgaagctaaaatgggtaatacatgactatttttcaaagctcttatgatcccatccatctcagtagtgttgtgatgtttattgtctatctttattcaacactagcaaaagtgtagtgccatcctgaactgtttatgctaaatttgcttcctattatctgtctagtactctagttgaaggtcttcatgtaatttgtttggacaatcatggatacataagagctaaaagaaacccttttctgttatcaggttttcttcttcttggactgggtgaaatatctgct

SEQ ID NO: 7985 - DNA, 579 bp, Zea mays
  Intron number 4 from transcript GRMZM5G866082_T01 (locus G RMZM5G866082) derived from phytozome v7.0 (chr-ID 4; pos 1 93611048 to 193611626)
actctccagacaaagcttgcaatcttgccaaggaggtaggtgtacatttatctttctatttgctgtactgggtttctgagttataactatcttcggtgttgttagtttgaatctgggctgaaagaaaaggtgcaaattacatatggattggtctttgaaaactcaagcacagtgattttaccattttcaccgtagatattgtttgatccttctattgcttgttcatcagaacaactggatcactctgctggtctggtcctatgtgattgattactcatatggactttagtttcagtaggattgcaggtttctcttgtttcagtttcactgttggacagcttgtctcttgtggcgtaattgcattgtttggtatgatgtgcatctcttcatgcttttgtgtgatgtacaccactcgaaccgaactaggtagcagcagaaaaccttgctagcagaagcagtagtaattcatcgccatattctagacaacacgaatgcatgatgcatacaatcagaggagctgttttttttttttgcacatgtgagtcttattcctgatcaactattatttgcaggcgtttg

SEQ ID NO: 7986 - DNA, 712 bp, Zea mays
  Intron number 2 from transcript GRMZM5G847520_T01 (locus G RMZM5G847520) derived from phytozome v7.0 (chr-ID 9; pos 3 5458664 to 35459375)
gagcgaggccggcgagctccgacagttcgggcgtggtgcgaggcaaagagggagtgggagagaaatgggggagaggcagtgggtagtttccttcttcctagtggttatggctgcgtgcttattcgttgcggaataaacaaagggcacaggccatggccgcgtgggctcgggctgctgctggagccggcagcggcgcgcagcgcgtgcgggcaagcgaggcggccgcgctcgagctgggccgcggggaggattaggaagggttggtttcttttattttctttttctttgctctcgttttctatcttctattttatgttattttcttttgaattcaacttcaaacataaatttgcggactaagtgaatgcacaactagaataaattcacatacaaaaagaaaagatgatccagcatgtcgtgcaacaatcatgacccttttaggattttattttattccattttgacacttacatatagagcaaaattcttccccatagtttagaaaaagaaaagtaaagcaaggaaaagaaagggtaacacctgaatttgatagatattagagagaaaattttataccccaaattcagggtgttacaacggccgtgtgcgtcgaggctccagcttctccacaattgagtcgtggccgacctgagcctttggcttaaccaacttagaatgacccaaaacatttgcaggaaaaacagattcgtcc

SEQ ID NO: 7987 - DNA, 710 bp, Zea mays
  Intron number 2 from transcript GRMZM2G079510_T01 (locus G RMZM2G079510) derived from phytozome v7.0 (chr-ID 2; pos 1 41323038 to 141323747 reverse strand)
ccttcagaggcttggtaatattttagttttgatatctgcactctgccgcaaacactactgctgaattttgtgatgttgcaatttcctcttttattttgttttttagggtcatgcaaaaaaagccaaactcaaaagtctactaaaggccataaattgagcaatgttgctgcttcaagaaacaaattatcagcttattctcatccaacctttgatgggatttggtttagcattaaggaattctcaaaatcaaaatagcaagtacttgtcacgatctctactgtgtttctttgaggtattcacttttctatttgaaaaacatcactaatcgagtttatttttcttagtttcaagtgctagatgatgcaaggctttcagccagaagtgtagttgttctatgaaatctttgccaaaaggttaatttcattctaccttgcatgctacctgtttagcatgatcgttagtttatttgctaacaaaaaactttgccgaatggatgacttccttttgagaagactgaactgaataattatgtcaaagttgtttcagtagtttggcctaatcagtattgatctatggtgtatagtctataggttgtactatatggttgatttttctgatttcgggcttggttagtctaatgttcttaattatggatgctgatcatttgaagttcatgcaggaagacttgccgttctgaaggcccttacttc

SEQ ID NO: 7988 - DNA, 522 bp, Zea mays
  Intron number 1 from transcript GRMZM5G858094_T01 (locus G RMZM5G858094) derived from phytozome v7.0 (chr-ID 2; pos 8 2394723 to 82395244)
ccaaaaagcacagccagtctgttcgtcaaggtactgtgaatatcttttgatacaagctaaaattttgctacagaatatatattaaagagttctttcttggctggtgttgtttatttgttttaacatgcgaaagggcctctagttgagttggttaggtggcctgagtaccactccttaaggtcttgagtttgattttccgtcggagcgaattttaggctagggttacccccccacccccacccgaatctgcacagtccggtcgtggtcgtcctcatataggctacgatgtcattgtgtatcggcgggccaggggtttaagagttttcttgacctttgttagaagatcttaataatacaatgtccaagggctgtcttaccctgtaggtcgagtttttagttgttttaacatggtaatgtttgaagcctcattctaggtaccaatatagatatgctcactgctcagtttcaaatgtttgtctgcatgtaggtcttgctggcattatcgacctcccaagtgaggca

SEQ ID NO: 7989 - DNA, 551 bp, Zea mays
  Intron number 2 from transcript GRMZM5G858094_T01 (locus G RMZM5G858094) derived from phytozome v7.0 (chr-ID 2; pos 8 2395233 to 82395783)
ccaagtgaggcaccttccgaagtggatatttcacagtaaggactacaatattttgcgtacgtttgttttggaaaaagaaaatattctcagcttatttatactagcttcgctaatactgaaatgctgtcttaatgtcctggtgctgtatgctcaatctttcatagtaaatgctgcaaaatatgtgatgtaactgttgcaacacagccagggacctgttatttagagcatggtgaatgctctggttcagttatatgatgtagttatagctcatgttgaagaattagttgcagtgtttgctggacaatggtcacttattataaatcatatctgcatacacatttgtgacttctgttgctgtaaatgcctgcattttttgagaaaaatttaaatgcttggcctaaattggacatatatgatagacacaaagctgatttgaactttgtttatttttgacatccatgcatattgtcagtgttgtgaaaacaatactaatcttttttttttgtctttttccagtggatctgaggatcctagggggccaacagattctt

SEQ ID NO: 7990 - DNA, 804 bp, Zea mays
  Intron number 2 from transcript GRMZM2G176977_T04 (locus G RMZM2G176977) derived from phytozome v7.0 (chr-ID 2; pos 1 71066852 to 171067655)
ccggattgccaggtgcttgtttcgtttcgggctgtgtaggtgctcggatgctgatttttttcttctttcttttgtgatgaattgtactgggccgatgaaaccgtatcggattgggttctctgacgaggaaatacataactaataaatacacatacactgagctgaggttgaccttgcacattcctgttgatagagtttatattgctgtcagcaggttcagattagtttgtgttgtgctagtaactaatgcagagcacagcgagtagcaattaaaactgtgagttgcagaggagagtgggtgtattggttgctcaatcaatctatgttggagccagtaaacattcttctctccctcctgcactggctctagatttgttccttccatctctttcttaactcttgcctgacatgattttacttcattcacgagttgaaactttaatcagtataaggcagaagccaaaatgatcatgctagctaaggaacaactgctctaaatgaaattactgtttacatggcattagcatcagtatgttcaatccaatatgattgttgctttctggaaattcggctatgatatacatcactccgattgtctttatagaaggattgttctgtttctgttaaattgtttggaagcaattagttattttggaagtctaattgatggatggatatctttgacatattgttattctcgtgataattttgagtctcttggagacaagtggtatctgtgattctagacaattcattatatttattttgactacatagctcatcgctacaggtcagtattcaaaa

SEQ ID NO: 7991 - DNA, 949 bp, Zea mays
  Intron number 1 from transcript GRMZM2G075092_T01 (locus G RMZM2G075092) derived from phytozome v7.0 (chr-ID 8; pos 1 49151468 to 149152416 reverse strand)
gccaagaactccggcgttgaatcccgggcgcacaagtatgtttcgtcagctctttgtatagatttgcagtgagttggtgcagttgtagcatgaccatttgattgtagttttgggttggattggttaacctatagcgtgaccttgatttaggagtccgatgccctagactagatagttattatgagagctttggtaaaaggtgcggaacaaatagctcctttcacgataaaaacatatctctcctctatattttttactttcgaaccaccaaaaagaatatttgattgcattttacaagtgttgcttaccaaagatttttttatgtgccatatgtagtaaactaagaaaataaagtatttcttcatatcagtattatatgtcaccttgtaaacttgtctactccaataggaggatggtcgaggactaattgactctgatcaccatgcagcctgatgatttcagggaatgtaattcacattgtttattcaatcagagtgaacactttttaagcgttttctaagcaacaaccaactcaaaagaaaacaacggagctattgtcaatgcttatcccaaaccacagtccagtttttctctggcagtttagaatttacactaacaagagatagaatgaaatatattatcttgtatagaaaaagaaatctgatgttgttctcttcctccgtgcagttaactgctaccctggccacaattttctgttacttcgcagtttatttccattcaacatgagtcatgttgttttttactcttcatacagcgtttcgagttgccatggtttcaatgcaactgtcttgtgctttcagcctcacgtagccataagtccttttttcatgcttttgagttgtgagtattgaccagaactaaatgcctcctctgtcattgcactttgggcacagggataagctggagcttaaagccgtgaaagacggtt

SEQ ID NO: 7992 - DNA, 827 bp, Zea mays
  Intron number 1 from transcript GRMZM2G031328_T03 (locus G RMZM2G031328) derived from phytozome v7.0 (chr-ID 8; pos 5 6992139 to 56992965)
agcacagaactgattcaagaagctattgacagttggtgaggatggggaaaaatgtttatctttttttcgttaatttaccaatgatcctagtatccctactgaaaatttggtataacgtgggccaaacaaacatttcttttggtttcaagtcatgtattttgactaccttttatgatgttctgataagctctcgtttttgtaatgcacagagtagagagagtaaatgtaagattaggttgactgtaagattattttgactaccatgttacattcttctttgatcatttttgtttgaatgtaggcaaaggtgaaatgcttgtctggtttgctgtccaccagaattgtgctgaaccttagttcataatgatagtgccatttgtattgcatatgctttcacacactttcacttcatagcaatgccatttaacacaactgatgtcgtatagctgagccatcctacaaatttatttatctttatgcacattgggtatgcttgcttcaacacagaagaatctgcctggcttaggcaagtgctccctgattttggatgcttgggaggttttaaagtcgagcgactagtaatgactagtcgagaagtagatgcagaggtgatagtcaatatgagcgacttgactttctctactagtcgctcgactcgtcgactagtcacaactagtcgtagcatttgagttaggcgactagtcacaacacagaagaatctctgcagtaatccaagtttatcttactattttaacttatttgcattgcatttcttcgggtctacacatacaggtatcagtcttgcttgcttggatcttttcaaactg

SEQ ID NO: 7993 - DNA, 623 bp, Zea mays
  Intron number 2 from transcript GRMZM2G153582_T01 (locus G RMZM2G153582) derived from phytozome v7.0 (chr-ID 8; pos 8 0438879 to 80439501)
aagaaggccattgaggaggagaggtttgaggtattgtactcatgccttgtcgttgttccaagcaattcaattacttttatatagtttctttagcatggttggatgatgaatgactgatggattattccaacctccaaccattcttattgatgctagctaactgagaccgactttgtgaagactatgtgtgtagcaagtctttatgatgatgactgacttgatcatatgttgattgaactaccaacattggatgcatgcttccttttcaccaattgctggcactaaaaattcagaggaagtcttagggacacaaggcattttaatattttttttgagcgaggcatgtgcttttaccttctcatatctgttgcattctcattctcatggccagaatggcatttccactattccagcctcatggttgggactttgaactttcaattgtaccgcttgccatgtagtgcaattttgctttgcagtcatatcagacatgttttttctgtttaggttgctactataataattttggactgatacatatttgaaaggggatgctggaactttttcccattgtctgaaaacgctctcaccatgtttatttttcatgcattcatccttccagg

SEQ ID NO: 7994 - DNA, 826 bp, Zea mays
  Intron number 2 from transcript GRMZM2G118205_T01 (locus G RMZM2G118205) derived from phytozome v7.0 (chr-ID 4; pos 3 5761469 to 35762294 reverse strand)
tctttgccatcgccagttgcaatagtgtaagcaaccgacttctccctacctcttgtttgctatccttttatcctattgaggtttggggagttctatatggtgaacgaaaatggaagttatgattttggtgggattggatcttggtttataactagaaaaggatttgagtataggttatgatgtgtggctttatggtagggaaacttaatatcttttcctattttgttttttggcatcacgagtaatggtttgggaaataaaagggaaaatgatttaaaattatttctcaatagagcatgcccttttacatagggacattttagtcattttacacacactttagtcattttacacaccgtaattatgtcacaatcaaagaatcattccttggttcaattgaatgagatgattcaactagttcacatctctatacctaacaatatagtttttcataactagaattcttaaaaagaattaatatgaacctaaatattatttcactttcttgccccttataatataatacatttgtcactcccattttggcaagggtggtgggtattttgggggatggaatgttactatttttaatttgattagaagctataagctttggctatatttttattaggaatttgatgttcattttcaatatattgtgatctattttcttaaaatgtgaatttgttgtgtattttgatgaagagtgtttataagatatgatttttaaattctcttacgacgaaacaatattatgctactttcatctattcatcttgaggaatcacctacctcacttcttgatcttgcaggtgataatttaccg

SEQ ID NO: 7995 - DNA, 696 bp, Zea mays
  Intron number 2 from transcript GRMZM2G110283_T01 (locus G RMZM2G110283) derived from phytozome v7.0 (chr-ID 9; pos 2 302712 to 2303407)
acttggctgatattgagtatgccttctgtacacttctacagtttgattgtatcgttctaaacataaattaacttaccataaatgcactatatgcttctgtgccactgattaattatttttgttgctaattctacccagattggtataaatagtcattgtaattcacagaaaagcataggaggtaggtagttgtctcaaattctgaggttgctttggatgtaattatggaagaccaacaatgtatgaccaagctaactatttacatatgatacaccttagttaactaaagaacaacattaggacttcgttaactaaaatcgccatgaatcattagatcatcacattgataattatgtataccataaagtttagcggcctttgcaacagtgtcgcactgcaagtctgcaacatgttttttattcagaaaaccctggatgtagtagttcacatatgtaaaatcttctctcagtcagtgcaaactatagtttcacgaagcgattacttaagaacacacatcaatgtttgagatgttgcaatagctaggtagtgacttgtgatgttcgtctttgagtttgcattatttgagcttatgattagttggatataactcgatctggtatcaagtttttgttggttggcaacataatccatgcctttttttttgtctttgatatgtaggtacaggccaagctttac

SEQ ID NO: 7996 - DNA, 665 bp, Zea mays
  Intron number 2 from transcript GRMZM2G000601_T02 (locus G RMZM2G000601) derived from phytozome v7.0 (chr-ID 2; pos 1 72706181 to 172706845)
cgtttaagcctccaaaagtgaacttccaaacaaaagtgagctggtcttattaatttgatttccttcgcttttgatattcctttattctgcaaaagtatttgaacctctattatgttgccaatagccatggttacggatgaccttttttttggcatactaggcaataggagtgatctgaagttcgtaatgaaaaggcccccattccaaaatcataccaaaattgttaaaacttgttctctgttatgcaaaataaaacatgctcaggttcttctctacatcaatcaccattttattttcaaaacttttgtttttcttcctgatgtgaagtaaatagttaagatcatgctgaatccctaagtacttgttcctcgtaataaacccatttcacttgcttcagcagtttcatagagttatttttcttcctgaaatttggttctagtgatgcttgaaaggcaatggataagttgtcatggggcagagctcaaacatgagtacttgctagcatcctgaagttcagacatgaaagtgtcagtcagtcagtctgttagcaattgctcaaagtctggttctgtcaaaccatttatccttcttgcaactaattcagctgaccgtctcactgaaaacgtacaggtttatcacccgaacatcaactctaacgggagcat

SEQ ID NO: 7997 - DNA, 685 bp, Zea mays
  Intron number 1 from transcript GRMZM2G095593_T01 (locus G RMZM2G095593) derived from phytozome v7.0 (chr-ID 2; pos 2 18116792 to 218117476 reverse strand)
cacaataaggtttgtttctacttgccagggacccgcgctactacccggagcggatctagcatcctcgatctaaatatctccctccgatctagtcgttggatgtgtagaccctactaatgaaggatgttcagtaatctctgtgctttgttgttcggctggatatttcattcacacataaaccagacaaattcacgaaagttagatttatttatcagcatactatggccctggggattagtggtctgtaccgtattgttcgtcaaaggtgatttggaggaactaagggttaactaggatatcatgattgttcagattcatgtcttccctgtagtcgttggtgtggtggactggtggttgtctacttactcctgcaacactgacatggttgtgtcagttactctaataatgattttatcttaggattgatattgtgtgcgatgtctgactgctctacagaaggccatattgcttttcatgttcacaattatatatgtattcattttaatgtcctttgtaggcattccctaccctacatactctgttgggctcaataatcttttgttgcattgcacatgcattagtggaccgtttacaactggtaggggatagcaagccagcttgttttctcactcaaacagtcaaatgtttactcttcaggttctttctgtagttggtatattgcaag

SEQ ID NO: 7998 - DNA, 979 bp, Zea mays
  Intron number 1 from transcript GRMZM2G154463_T01 (locus G RMZM2G154463) derived from phytozome v7.0 (chr-ID 8; pos 1 13349010 to 113349988 reverse strand)
gcaaacagattggtccgaggtgaatgcctgtaaatttcaattctaggttgctggcgtaattctgaatgtgttgcccaaatgcaccagtctggtacatcttttattttttaacctttcactgttttttgggtataaaattatttgcaaattgggtttgtatttcaaaagcccaataatttgagctcgtatgcatgctgatgctgttattgatagtatataaatgggggttctcagtgtggtaacattggttctgtttgctctcattcaagttcgaatagcatcaacataatgccactacaacattatattattatataaaactaggagattttaaatggtacagaggttagttttgtttatatacttcgcagaatttgctcttgaaaatgtcttttcctttgaagttctaatagatttagtatttccgggaattaacagaaatgtgacatttggaggatgatttccttgtaacacattttatttgttcctacaacttgcatttgtcattctttaatagcaacttaaaactagctgatattatattcttcgaaatttgaatgataactttgctcttgtcatgattattcccttgaaattgtaattgttcttacagttttgctagaaatataacaatgactaaaatttggcacgtgaataaaattgcatacgaatcttgttatctctatcagtgtactatatacatagttcaaatgttaaacaaaaaaggagaaaccttcttgtactgtattcgaagtcaagttacccacttcatacttgcagtgcgggatgttactattgttctccatatatgttaatatactcaatcggcgaaccaaaattataggtacatataacatatttacccttttcctttgggaagtaaagtagattgtcctttatcattgcgtagaattacatgttgctattactgaaatttgtaaaccttttttttgtgtcagcaataattgatagtagagtc

SEQ ID NO: 7999 - DNA, 761 bp, Zea mays
  Intron number 2 from transcript GRMZM2G026311_T03 (locus G RMZM2G026311) derived from phytozome v7.0 (chr-ID 2; pos 2 20895322 to 220896082 reverse strand)
ggtcacagctcgaggaattcgctcgcaagcataaggtgatccactctcctatatctagttgaatgtccaaagaagaaagaaagcctaatgacacttaattgttatatgcttaaaatagcaagttatccgctggcttcttggatgatgatatagattgggattacccatcttttatgtaattaagtgtaagatcaatgctaaacctcatggcctgcctgggattgggagaatccatgagcttttgtaaactctctgttttagactcatctgctaaatgaatgagcagctctcctgccaatattcattcaaaaaacattatttatgcttgcatgtattatctgcttccttaactataaattaaatggttgtccttagaaaatatgtagatgctcagctactgctattatattaaacattacccttttagatccaatgccaagtgttaacagaaacaatacataactgaaagatgaagcaatcaaatatgacaacccatagattttaagtgttagtttgctaataagtcatggagtaacttatatataatatcaattcagtcaacaatccacattctcacagaaaaggtcaatggaaagaagaaccctgaagaaataagtagtttcctttgatatggccttattaagtcaccgaaaagcgcaaagattaaatggcagtgcgctctgattctgtttggtaatgttacatgttcatattgtgctattgcagagtgacatccgtaaaaacccagtattcagacagca

SEQ ID NO: 8000 - DNA, 996 bp, Zea mays
  Intron number 1 from transcript GRMZM2G562083_T01 (locus G RMZM2G562083) derived from phytozome v7.0 (chr-ID 2; pos 9 5369231 to 95370226)
ggtaccaggaggatcctcagattctcgtgacctcgctgctattcataacaataccacaaacagggtatagacaaaattaaaatcacaccaaacattagaacaaactgcataataacaatctacacgttgctatgagatcgtgggtttgagaaccactaaatttggagctacggttataaagttatgattttctgaagctttacgtgtttaatatagaatagaataagtgcataatttgaatctatgtttcataacaaactaaggttacaagatgataaacaatattattatgaagttaatgcaactagaatggataaatttggagttaaaacgaattaactatgaattaaacaagtttctagcattatttttatactaaaaacccatattctatattaatttccttcctttattcaatgtatggactggggacataatttctttgaactacagggtgctctgtataaattctagggtctgctttataattcttttacacgtataaggacggcgggttgttaaccgggaagcctagggagttttatgataatctgctatgatagtatcacatgcatcgccctcgagccctcggatcaaacgtcaacggtcaggatcaaattacataaccagcgaaccggtacgtaatccagggtcatcgaatcttgatccaacggatcacaatggatcccgaactacatgagcacccaacaacccgatcaaatatctacggcgacgagaatcctggccaaaatgttattttatcccctaatcaggatcatccattgctggatccacgaccgcacgccccttcctcatcctgccatggccagaacagtggtgccgccgccccatacagcggcgagttcgctggactgccaccctgttgcagcagtaggtcataactcgtgtgcgaactcaagaaaaacaaagatgagatctttgtaagcttaatagaagagaccatactgacggtaagaagaccgaagcgagttgttc

SEQ ID NO: 8001 - DNA, 610 bp, Zea mays
  Intron number 1 from transcript GRMZM2G087870_T01 (locus G RMZM2G087870) derived from phytozome v7.0 (chr-ID 2; pos 2 01258056 to 201258665)
cgccaacatcaaggccgtggtccaagacagggaaggtaactagcagcagcagcccctcacttatccgcgtctcctatccactgcttcaaagtcgaaagcttgctcctttttctgtggtctcgatgtgttcttgtatccagttacttgatcatgcatcgatgtgcgcgtcagcatgcatgtaattgggttgatcgcgccttcctcccatctctcttcggtgttccatgcgtgtgaaattgatgtgccatccatatcgccgagtccgatcctgatggctttgggttctaagacagcactttgatgtttccatctggtttgattaaactaaaaaaccaaaactttctttttgatccggttaagcacagggtttggttatacgtacttgctttattactttactactaatctttgtgcttcttgagattggggttaaaagccggggatggcatgatggattcttggcaactccacagctcatttgaactgatcagaccccctgtttcccaactcggattttaatctatgtagcgaactaaccggccatgaaaactgttgcttaaccaatttattttcaggcatcccgctggactggcagcggctcatcttcgca

SEQ ID NO: 8002 - DNA, 761 bp, Zea mays
  Intron number 2 from transcript GRMZM2G003963_T02 (locus G RMZM2G003963) derived from phytozome v7.0 (chr-ID 8; pos 1 69088422 to 169089182 reverse strand)
caaccttttccctcgcttctgctttgccagtagctgtaagatctgcttcctatgaccttttgttctaggcgtctagcagcgactaatgtcatcagttcattgttccttgacaatacgtgcttttgtgcaggctcaaggaggcaagggtccaatttttgaggaagggtcaggctttgagtctgcattcaagcttttccatggccgagatggaatagttcccctttcagaaagatcatatgtatctgatgaaaaccacaatgagagcattgatgtcaggactgaacctgctctgccgtttaatccattggctgctagagcagccacaataagtctatcagcatttggaccatttggttttggctttttcaacggcaagggcaaaaggcagaacaagaaacccaacaatctagatcagtcccaccagaagcccaagacaccagatcagtcttccatgaaagtgtgtcccgacactgcttttcttcattatatgtctcattccatttgcatctgccgatactttatgaccatgttatttgattcttgccatcctattatcaacccaagtttcaatgtgtaatgttaattattttacattccatccaactcagaacattgctagctatccattacattgctatatccaaaggcgagtgttgttgatcagaaaaccatagctatctcattctgcttgctttaacttattgactcagtgttctcttccatggttttttcccagcaaaaaggagtcaacccaccatcac

SEQ ID NO: 8003 - DNA, 510 bp, Zea mays; identical to SEQ ID NO: 5977
  Intron number 1 from transcript GRMZM2G167725_T05 (locus G RMZM2G167725) derived from phytozome v7.0 (chr-ID 8; pos 1 74341426 to 174341935)

SEQ ID NO: 8004 - DNA, 838 bp, Zea mays
  Intron number 2 from transcript GRMZM2G167725_T05 (locus G RMZM2G167725) derived from phytozome v7.0 (chr-ID 8; pos 1 74342000 to 174342837)
ggacggcacctgccaaagatacaccgtttctactggtacacattttattttttatggtgagaattaattttgtagcttgcgcaaaaccaaaggttgagtgatttgtcaaggcagaaatcagtataatgataggtgtgcttgagcttttaatagctggtttatttgaacttttatctttttatgatcatgatatattgagacataaatatattacatgtacctttgcagtttttcagttggagaaaacatttaagacaacattttcatcgtttgttctccatatggggcttgtttcacgccacttgaaggaagaagggaatggtggtgttaagttcggacaatacatctacacatcttggagcatcggcatcaatgttctcaatcttctcaaatttcaaattatactggtcattactttgaccattagaataaaatccctataaaacgtggccatgcaatcactggttgtaaactgatgggcagaatgttgtaggatggattggctcaagaactaatatagcttacttatgacaatgtagtaattcatgaagttattgttccttatgttcatggagtttgttctgctaggtttttatgcttttaatttctatttccttaacgaaacctcaggcaccttaaagacagcttggatgattggtttcatgaacagctagagaacttggatgatgattatcttgtgtttgattgccctaatatattctcaaatcatcttttcatgctttagttgtttcttaatagttgcacagtttcatctcactcatattcttgccacttacatgtatgtgacaaaacagacaatccgtcttttttattgctt

SEQ ID NO: 8005 - DNA, 710 bp, Zea mays
  Intron number 2 from transcript GRMZM2G074735_T01 (locus G RMZM2G074735) derived from phytozome v7.0 (chr-ID 8; pos 1 45163333 to 145164042)
tctctattgaagaccctgccgttcctattagactggtacgccttcgcttccacctttccttcccgaactctacaagtattctgagcaaacgagtaacagaggaaataatttactgctagctagtagtaccaatctattactcgtcttccttgatatgtgcaggtgtagctgttagttgttatatgtacaatcaattgaacgaaacattcgtgagccatatatgtttcgtactacagtttttttaaaaaagattaaagttgttctgtacggtgagaaaatcacgtctctcctgatgtaatattagtgattatatatgctaactcagcatgcggtcactaccgaatgacttccatattatggaaattaactttgtctattcttacatgcacacttgtaatttgcctatgccagccaatacagttcagattaagccatatttacggtgttttaagcttttacgttgcacgcatcagtttcgtgagcctgcctgtggttttgatatttgagttgagtcccaagaactttcctagctcaaaaacactgattccaagtcctttcagaagactattttatagcctagcgattacacacccgtgacttcattttccaactctcttaaagagacagacgctcatgctgagtattgacaagtaataactctttctcatttttattttttcaggaagtatttgacaaggacactttcgttg

SEQ ID NO: 8006 - DNA, 976 bp, Zea mays
  Intron number 1 from transcript GRMZM2G367582_T01 (locus G RMZM2G367582) derived from phytozome v7.0 (chr-ID 4; pos 1 0212399 to 10213374)
gaaagtgaggtatttgtttgttcccacttttgcttcttgcttcgattacgatgttgcattgtatggaattttggcgacatgcatccaaaagcactattagtttgccatatctcactttgtctaaccttccatgtagaatacaagtttcaattgaatgtctgtttgtgtagccaagtgtgttccctgtgtgaaatgtagctagactcatttgccatttgatatttgtgtgattgagtggtctgacaattaagaaatcaaacaattcagtagccttgtttacttcttttgagtgtgcctctccttctctttcggtggcctagaacttcagcagagaagaagttagattgtggtgtttgggcaggagctgctaagctctaggctttagtgagtggggtgggtggtttttggtcgtgaaggagggatggtttaactctctcctttctagaggtcgatcctgtttgtctcaggcgcggattcgtctttgttttctcaactcctttctcccaaggttggggattgaagtgggtttcttgtaagggattcttttcccctgtttttttcctcttttataaaatgatgtgcagctctcctacgtgttcgagaaaaaggtactttgtatgatacatgatagtagtttcttgtggccaaccctaagccctaaaattattaccgtatgtgctgattggccagccctaagctgctgagagtttcgcttgagtgttcacatgagttgagcacggtttacaatcagtcatcccgacacgctcaagtacgtcaagcgttttgttggagaatggtatataaacaatgttgagcaatgccatcaagtaggcatatttaattgttttactaagtcgttttctggaaccactttaagcaggcgcttgcagagcaccaccatggaaggttgcttgatgtgataatattttgctattcatttctgtttcagtgctcactttgctacagtgctttgcat

SEQ ID NO: 8007 - DNA, 579 bp, Zea mays
  Intron number 3 from transcript GRMZM2G015730_T03 (locus G RMZM2G015730) derived from phytozome v7.0 (chr-ID 9; pos 1 38147388 to 138147966 reverse strand)
caggttagtttttaacttgaatatgtgatcattgtacagttgaattcaatgagtgcatgcctccctttgtgattatcctttgtatcttcaccgacaaaacatgtgtgtttttttggtcgaatggatgaccccctatgttcatgtgctaagatgttaattaaaacttcttattagcatagataattcagtgccgctaaaagttgtgtattttgattgttgcatatgaactggtatgcgcacattgtgctcatagaattcatctacttaagggaaaaattagattcgtaccatcaaaagaaccaatatttagatatataccatcaaaagaattcatttcagatatataccatcaaaagggtgagatagtatagaaatctaccattctgtttaaccctgtcagcttaatcgttagttctatttgaccagctgctgcgcctgctacaactacggattggattctggatggcattgctgccgctgaatgtgatccaattttccctttctaaaaccccaatccaatcttctactgatcgagccacaaacgagacaggaataaggctgacgccggcgcagtagcgg

SEQ ID NO: 8008 - DNA, 607 bp, Zea mays
  Intron number 2 from transcript AC197924.3_FGT004 (locus A C197924.3_FG004) derived from phytozome v7.0 (chr-ID 8; po s 35139220 to 35139826)
cgaaatcctggaggtcgttcatttgtggaggtattccgtgttgtttgatttaacttgcttaatgtaggtcataacttataatgtttgacattgttggttgtagaaaagaaacctttggtgaatcactgaagaataatcaatttcaaaaccattgaatagtacatgcgaaatttgcttgcaagaatgaaatagagctttgacaaaactgaaccaacacaatctagcctaatcaatggcatattcaaaagtgtatgagagtgtttcctgccatgccaacgcgcatgggtgggaaaatttggtggccaaatcgacggccaatgcagcgaccaaatttgggcacaaaaatgtaattggcgtgggagtactggcaggcgaatcctagacttgactgaaataagtggcagatgctcgaccaaagcccaaactctggcatagccgatagcaaccacgtcataaagttgtcccaaaaagcaagattaacaagcgtgtctgcccaaataactctaccacctacacctaaagtctaatgagatttcaacatatatataaccaaaaccagtggcaagttataggatttgctgtcgtggatcggcaacatatttcgaac

SEQ ID NO: 8009 - DNA, 777 bp, Zea mays
  Intron number 3 from transcript GRMZM2G132854_T01 (locus G RMZM2G132854) derived from phytozome v7.0 (chr-ID 4; pos 2 36558900 to 236559676 reverse strand)
agcacaaccgaaataaggcttctgagctcagacaggtaactgcttccaccaactcttggaaaacctgcctgcggtggccctcgttgagtcctgcctcttccaaatgtttcttcacaatttgtttgatcccttaaagtaattttagttcaaaattgaatagaaatagatcctgatccttaaattttatagtgtaaagtttagagcccattaccacccctacatatagatagattagtagagctactggatgctaactgaaatccatcggtaagatgttttgaggtttgctttaataccatctgctgattatataatttatgacagctgttagattagatccaatagcatcttggccagttgagtattgcttcattatatgatttgtgaaatatagcaattctatcgtcttaaagaatactacctccattttttctttatttgacccttaatagttcagatttgcactatcaaacgtcaaataaaaaaatcggagggagtatttacgaaagatgtgatgtctgttgtttcatccactgccactgtgctgttcacacttcaaacgagaataattgcaataaacacattatttgagctataataaatttactgctcatttgtattccactgagttcctcttacttttagctagatattgctgtgcttagacctggtattgccattttgcttcctctgcacctttttgttgacgcagctgcccttttcttcccccctttgctcgaaggtcatagcagcaacagtcgctggtgatcctgagaa

SEQ ID NO: 8010 - DNA, 980 bp, Zea mays
  Intron number 1 from transcript GRMZM2G094396_T01 (locus G RMZM2G094396) derived from phytozome v7.0 (chr-ID 9; pos 1 21218967 to 121219946)
tcgcatccaacctcgcagagctcgacaccaccaaggtctctgctcacgtttctctctatttgcatccgtcggttcgtgcctctagccgggtagaggctgctaggtccgaaattggggtagggattgtgtttgggaaaggttgggggcgctttctgtggttcgggttgggggacggagcttcaccgtcggctattggcgcttggatgtccgacgggaggtgggtaaccccccgtgcgtgcgtgacgttgaagaagaaggggctgtttgtgtgaaaaagagaagtccagggggtttttgttgaaaagagttttagagttttcttttatttcagaatttgtactagaattagaagtgtcgtagaaaattatagaaaaatgctaaaaatacgaaaccagttttgttgagttcacaagaatgagtacttattgataaaaatattggttagataaaaactatgatttttatgtgtcgtttttcttttaagataggttattaatgcttatttaattttctgtaatacatatatctctcctaaaatcctgaaaatttttgtgggtagtatttagatttagactagcttacagaaaaagtttgattcaaattggagtatgttaagtcagataactaatttaagcctattaaaaatgccttttaagaaaatatttaagtaattaagaaaaattgaataatagtttaaattgtttgcagtgttgagtgaagtccatggaccactaacacccagattggtccatggcgtgtgtaattattttcaaggattttgcgtccttcgcttagcaactagaaattttggcggtagcatagtggaattgtaccgtgtagggatagtatgcttggggttttatcattttaaattctttatattgcatatgtgtccatgtcatcatcacatcatgatcatggcaagcatctttactttacgtatagatcacgttactggtggatcaatcgcttggtgaaac

SEQ ID NO: 8011 - DNA, 823 bp, Zea mays
  Intron number 1 from transcript AC208976.3_FGT003 (locus A C208976.3_FG003) derived from phytozome v7.0 (chr-ID 8; po s 129166653 to 129167475 reverse strand)
ccaacatattctcactgaaaactctgatagtgaaggtacaagttcatgtctctttcatctctactaaattgcaaagtggcattttggtgttacacattttatgagtatgatacatggctctgtgcttaatatgaagtaatgaattgtttgatcgaattatcggtctgtcatttgagagtcgcactattttttggaaaaaaataaagtagcactatagcagagatattttgtagcctacttggacaacagttttcagattcaggcatggttctgtttttcttagacttcattgagttgttcaggtgcaattgaagatcattttagagacggtttacataatttgaagtctaaaccatgagcatgattgcttcagtgcttctagacatgctaggaaattgtggcgtagtattgactattgagttatttatagaagagctggaataccacattctgtgaatgcatccatatctgtctattcttggaatactttggtctttcaacttggacccaccctggctgatatgcccaagtttttttgaaataaacaggggtggcgcccacctttgattgattaatcgggagcattcgagcagaatgctaaacgaggaacaaatagtcagaagttacacgcgcacaccatcgtgtgatagatatgcctaagttcatatatgaaacatttttaataaaaaattgtaaactccaattgtgcccagcgttcattactatagtttatgatagttttcaaaggaaaatagtgaagttgtgatatgatagcttaattctagagtacttctgatgcattcaggtaaggtgtatttggaac

SEQ ID NO: 8012 - DNA, 752 bp, Zea mays
  Intron number 1 from transcript GRMZM2G090747_T01 (locus G RMZM2G090747) derived from phytozome v7.0 (chr-ID 8; pos 1 71533926 to 171534677)
caagtgaggttcctcgtcctttcgtctagctaactaactaatcattcaattgtgatatttcttaattgaattcaaaccggactctgtttttatttgtggatctcctcggttacatcgaattcagagcactgcccttatcttcttcggtcttgtacctcaatattcagttgcaactttagttattcgctttaaatttcattaaaaccatttcagttttgttgtcaaagacaactcacacgttaatgtaattgtcttcattcggtgcctactagttgagagttgtaatttcaacaatgattcttgataacctctgcatagtgctgtagaatcatcttgacatctacaaacagctatattcattttatggttagacttcacatgatattcacgataagtttcttcaacaatttgagaaagaaaaatgattaaaccaattgtttgtccagtcgtcctgcgtttaggtccatttaagttatttattacagtattacttgagcagtcctgtgagccaactgatagttcttcaccagacgctgccttaatcatattctagtttgctgttcttgcatacaaaagattgtagtgttttcgtacatatttatccataatatcaaatcagatacatatatatgctcaatgcttcctcctaatctccaagtatttgttgtcccctctttgattttgtatgatttattatggactattggtataatgcagctggagttccatcagagaatattctttatcttggc

SEQ ID NO: 8013 - DNA, 478 bp, Zea mays
  Intron number 1 from transcript GRMZM2G096193_T01 (locus G RMZM2G096193) derived from phytozome v7.0 (chr-ID 8; pos 1 62664000 to 162664477 reverse strand)
acgctgtagatcttctcgtagccattgtcacctggtgagatgccatgagaaacactcattgtcagtctccggagcgctgctgcgcatccgagtatgacttttggagcattaagggtctgtttgattcgtgactaacagcgtcacactttacctaaagttagtcgtttgaattgaaaaactaaccttaggcaaaaaaaaaagttagacgaaatgtggcaagttagacagtgaaccaaacaaacctaacttcgtcatcttctccttgcaggccatggatttcaacgacttcaaggttagccagccagaaagacagtggcggaggacacatataatttgaggcatgacagattctttgtacataactatatgcacaaatccatatatgtatatatttgttctagctcacaacaaacatttaaagtattttgcagcaaacaaatgtaaataaggacattgaaagatacctcaataaaagaag

SEQ ID NO: 8014 - DNA, 664 bp, Zea mays
  Intron number 1 from transcript GRMZM2G087479_T01 (locus G RMZM2G087479) derived from phytozome v7.0 (chr-ID 2; pos 2 06220074 to 206220737 reverse strand)
gccggaggcctcatcgcggacagatacggcaggaggtagcacaaaaatctgaacctgcgttgtttctcaggcgtccccgtctgcaggattgctctttcctcttttccttgtatagttttccttttccgcgttccaacacaattccttccgagcgtttaagaaatttggtgcaggcatgattttccatttccggttgctgttctcttctgttgaaattgtaccaattcatttagtttgaatccttcttttggtgagcgtgtatatttactacacccagtaacaaggacttttaactgaacccttccaatgagtaatttggactctggagccatttaataaagggtagaacctttggactggaccctcataattagtagtattttggaaccatttgataaatttcgtgcagattatcgcagaaatgaacatgacattttaactgaattcaacctagctacttagttacctgaacaataatgtatcttatttgttactagctgcgttctcgaatatttgtcacctcctagtttatttttaaactaaaacgcgacaaataaaaaaaaaaggacagagtatttgtttacccaagacgacgctacaacttataattcgatgtgtgctatttccaggaccggtttccttttcactgcagtggtcactgccg

SEQ ID NO: 8015 - DNA, 1006 bp, Zea mays
  Intron number 1 from transcript GRMZM2G491551_T01 (locus G RMZM2G491551) derived from phytozome v7.0 (chr-ID 9; pos 7 2601678 to 72602683 reverse strand)
cgaatcccgccgaggtaagtggtcacccctaacacccctcctccgctgccgcaacagtaggtagtgctagggtagtggccacgcttgcagcctccatctactactattgcaccccggtcgcctccttcttcaagcactatagagccgtctacctcgaccatgcgccctatagccccgtcacttccatcacccatagtgtcgaccgctccaccaccgcaaacgccagttccgccatcgccgccgcatgacaacaacatcatgctttggagcaccatcatattcgggtacctcatccatcccccatagcttgtttccccgctctcgccttggagttcggtaatcacattccttttcttggttttgattgaggggctccggatcttggggaggcagacaggttcatttcactcatttgttcttttttatccagcaatcaaagaggaaatgaattaccagttgaccactcagtctatttgcatgtgttgcagattcaataaggaagcacacacaatcctaggcattgttggactcctcccttgtgcactttatacttcggtgccttgctggttctcacacgttgatattgattgactgacacttgctaatattctttcacagtgcaggcttgatactagcttcttggtttctttcattagggtaaacatatttttactactttcgtgtttcctgttcttcccatttatcatgatgatttgtggccatccgtttaatccctttttgctactactcgtaggattgagaatgttgaagttatgtgcctaggaatcgtctgagtgacagtttttatgattattttgtcgttatttacagccaatggtaatatcctactacaaatcacccctagcaatgtgcgacctttagcctttatgaagtgctcgagataggtaagcaattcctcaggtcgtcattcatttggttcaaaaagaaaatgcacttaagacgcatgagcaagtgatagatattctctagattgttgcttgtaaag

SEQ ID NO: 8016 - DNA, 880 bp, Zea mays
  Intron number 1 from transcript GRMZM2G455330_T01 (locus G RMZM2G455330) derived from phytozome v7.0 (chr-ID 2; pos 1 88109829 to 188110708 reverse strand)
gcccccacggaaattcagtgtacctacgccccacggtcagtcaatcacatgccactgtttcttgtcgaagtggtcacacagcctgattggacggatgtacgtcgatgacgccgccctaaccaactagatacaataattttgagcgtatgagtggatacaggttaatagtactaaaataacttattttacatccatccacgcaggttgtgactctcatatatatactaggtctatgcccgtgcgttactacgggtgcattaaaatgcataacaatgttagcgccaatgtaccattatataggaactaatccttagttcaacgcacactttgtgtgctagagttgttgatgaccataatttccatctcccaacaaatttcatggaacaacaatattggatttgtcatcactaataatttccggaaatctcaagtgtaagaaaactaacatataatatatatagtacaatgcatgtacattgtgacgatacacaaataataacgaacaatatatattttttgccaaccatcaatacagaaccaaactcaaaactatcacttccatctgcttctctgtcaaccatgtccatgatatcatcaacaacttgttcaccatatgagaatatgaaaaggaatttgaacatgtattcctaaaacaaaaaaataagcatttcgccaagtgacaaaagaagaaagtctacaaagcctgcaagattggttgatccagtggaaacattaggtccaagcagagatatacagagaaactctacttgatgatacccacaggcccagttgttcctggcaccaccaccatgctcagcaacaaatatgttctcgtggttgtacaggttcctgtactcgctgttctggattccattgatca

SEQ ID NO: 8017 - DNA, 917 bp, Zea mays
  Intron number 2 from transcript GRMZM2G115721_T01 (locus G RMZM2G115721) derived from phytozome v7.0 (chr-ID 9; pos 5 5511967 to 55512883 reverse strand)
ctacacccatcctgagaggctgccaggtgatcgaattgattaatttagctagcagcacagtttccattccatggattattgatctcgatcactagtacgtatacatatgtggtgatgccaatttcttctaagaggggcattcttgttttgctcccatatacctcattattcttgttgaaaaatatttttttctcttcctttcttgggatacaatggttttgttctttaattctttctacgttttctctttaagctcatttcactttaaagtagtttcagttttttctatctttaattttgtttttacgtatttcactctttgctatttctgcattatatatatatatatatatatatatatatatatatatatatatatatatatatatataaaatattaaatggtacttgatcgatacgcgatacacgtataattctcattcatcatgtacgcacgtatatataatacctatttattgtgcacattattaagaatggtgtagctttgcacattgacgcgcgcacactataaagaaaaagatcgatatattgcgcgtagaaatcttctgctactgaatctgcatgtaggacattaatgcttttgttgcagcacatcactctctccttcccctctgcagaatgaaacgtgacatggggatctgcccctatcttccaaagttaggttttgtcatcctctctaggttgttataccctccaacagccaaatggctagctgcttgcatcaccagcccacacccttgtcccaaagtgaaacaaccaaacagacatgtcgctggccggccagctatatgtgacactgcatgcaggtatatgcatgcatgcatgcacgctgacatctccatggccatgcatgcattgcaggtttgacgaaggacggcctgagcaggcacttcttc

SEQ ID NO: 8018 - DNA, 976 bp, Zea mays
  Intron number 4 from transcript GRMZM5G848608_T01 (locus G RMZM5G848608) derived from phytozome v7.0 (chr-ID 2; pos 1 93494535 to 193495510)
agtatcgaacatttcggaaggataaagatataaatgtaagtatccagcacatcgccagcctttcgcacatgtagtgcattctgtatgaccaacttattcccaatccgtgtattcttgtgtattatagaatttccacaagttgtttggtagaaattcgtagactatcataatatgtcaaatagagtaggtggtcatacttctttttcaaactaatatccaactgagcaaaagacatcaatcctgctccttttttaataatgttgtattttagtactggtgatttttgtcattgaaattctcaggttttcaagttgtcattgaaattttcaaatattaagtgacatctttcaatactggtgattttagtggtactagggcacaatgtagagctgccaattactgtggatttaccagctttataaccccggtgtcccattctgccgttgtctatgcgttatgtattctaaaaaggttgtctgctatgatttatgaaataattcaggtagtatgcttaggattggtaatttgggttcctgcttccttgtgtatatcaagctttggaggcgtcatcttatgaagatagtttctttacaaactttaagggactttacaggtcaaggtggcatgtatgtcaccatcctgtatgcacctgacaactaggaaagaatcagtacgtaccacctagtggtagccaccctcctatcaaatttcaaaattggttggcctatgccatacgcactccaaatggatttattcaaaggaagcatatgtactggtcagtggtcatcctccaggcatatttttattgtgggttaaccttccatctcaccttataaaaaaacccttccacctcttatgctaccaggttaacagaaaccagttctactattcctttatgtgatcagcaagctgaatgactttgttttcttttactccatattctgtgttaaactgttgcttttctgcagctgggcca

SEQ ID NO: 8019 - DNA, 405 bp, Zea mays
  Intron number 1 from transcript AC187285.5_FGT004 (locus A C187285.5_FG004) derived from phytozome v7.0 (chr-ID 8; po s 107001517 to 107001921)
gaagaagggtatgtttatgcagccatcctccttgatattggtattgttgtccttattatgttgggttccacataaatcctagaatagtagagttatgtatcctttgtaattcaacctttcatgcaggatcactcaatgaatcagcatttgttcacacgaatctcttccttaactgcaccacttcccacatttgaaacttttttgatctttgaagaccattatattaattcttatattcaccaatgaagatgatccttttggtactattacaagagcagcaacaataataatcaatggcacctaaacattttcttatcctttaggttcctatatttcatatttactaatcattcatatttttatctttaaggttgaggctgagagaacttaccatcagagagttct

SEQ ID NO: 8020 - DNA, 797 bp, Zea mays
  Intron number 2 from transcript AC187285.5_FGT004 (locus A C187285.5_FG004) derived from phytozome v7.0 (chr-ID 8; po s 107001912 to 107002708)
agagagttcttgagatacttgaccaattggaagaagtatgtatgctcataactttgctatttgagcatatttatatattgggatgcttgttggaactaattttttgtgctccgaacttctgaaaatcttttgtgtatctatttgatgattatgttctaattaagaaatggtgtctgagcaccaaaaaatgaaagcacccccaactccagcaactgaaaattgatatcaaggtctttctgtttgatcctattcattgagaatatgatgtacccattcacatttttttactttcccttatatttttctagctttcaacagggtccgtgtgaaaccaacccactatcaatttttgttgtctgctactgcttaagttgtctccctaaaatgaaagaagtatcgacattgacttataatgcatgaaagggtaaaaagaaaattgaacaaatcctggctgtagcacacattcacgccaaaggccttaaactgcttcagattttagcccatttcccagtgtacaaatggtgttgttgatcctgaagtaaaattgatggtcttttcatgctgtttttcttcacaaattctggacagtaggtatgattcatttttatcactgtaatataaaagaattattatcctttcagtgtgcaaaatcatgtcctcctattgatagaagcatttattcagatttggcttacattgattgatgaatatgatttatatgaagttcctgacatatatctgcttcatggtatatgtaagtgaaatacagtagccattttcctattttaggtattcac

SEQ ID NO: 8021 - DNA, 816 bp, Zea mays
  Intron number 2 from transcript GRMZM2G320941_T01 (locus G RMZM2G320941) derived from phytozome v7.0 (chr-ID 2; pos 6 0255810 to 60256625)
aaaacatccaagaaattagtaagtgtgtgctttcttgctaaatgaattccaattcatatatttgttttcatccctctctagattatgtgattactcccttctacaaaattgttaagccggtgcgctttatctttgatagagtgacatcaactatgacaacaatagatattatgatgagatgtgtaaaacttggtgcatgattttcggtgaacaaacctcttgactcagctaccatttgccacttatggcaacttgaccttagggatcgaaatatagagattattaggaatttgctttgaggttagaatttttcacaattggtaaataacttatattttagaatcaaataagtctctagcacttctatctttaccttggattaaaagagatagattatttatgagaaggacttgagtcatcatagttcacaaaattacaaacaaacactaaaaattcacataaacaacccaccaaacccatagtcatagttggtagaaatggaagaccttgctaactagccaacaactatggcgccacatcggtttggttatccatgcttgcatgatagaagtattctatttgctcacaatttttttacatttcctcggttttgtttattttcttactttccttaaatggtctacagtgttgttgttccataacttattgttaccaacatgtagtgcctttacagtatttaaagttatgtcaaattagaaaaatgacctttcagtttttatgtgtcaagtaagagaatgaattacattatatttcatctatcgtgttctatatatgcaggccctggagctaatacag

SEQ ID NO: 8022 - DNA, 742 bp, Zea mays
  Intron number 1 from transcript GRMZM2G053239_T02 (locus G RMZM2G053239) derived from phytozome v7.0 (chr-ID 2; pos 2 29570217 to 229570958)
ccgaccacgccgacggccgctcctcccagccccaggttcgtaccgaccgctcgcttggaggcgcgcgatccgttggagttcgagctaaatgtgggctctagagggatagatccgatgcgtcgggtcgatttgttccgttgcggcgttatggttgcggtattactgggtgcagcggtcattgtcgctaatgctaaccttagcccgtgatttatttctcctggtacttgtttcctcaccaataatcaatgcaaataaataaaagtaaaaaccgggcggtcaagtgatggttctgtctgtgcgacttactgcgggataaggcttgttggtccatgtagtgagttattagatgcccaatccttatggtaggagatcttctgtttctgccagtctcaaattcttgatgtacgacttttactctcattataatttataattttgtgtcatcttattctgcatgtttatgtttcatagtttgtgttgtgcagattggcatacaaagtaagccgcattttggcacttgattgctggctggctggttaagacttcttttggctaagtgctaggcgcattttctttttgacttatagttggatttgtttttgccgcttgtggactgatggagctggcctttgccaacctttgtacctgcttagtaccatggtttacagttattacagtttttgctgtttgcgttcataattacagtcatctgacttattgaactatttcttcttttcctagc

SEQ ID NO: 8023 - DNA, 960 bp, Zea mays
  Intron number 1 from transcript GRMZM2G301399_T01 (locus G RMZM2G301399) derived from phytozome v7.0 (chr-ID 2; pos 2 24851607 to 224852566)
atttgtcccaagaaattctgggccttgcatttcaggtgtgcatgcccaacttgttgctgcttgttatcattattgatcatgagttttgcttatgcatgttagtgtgttcttgcttaaaaatgcagatatgtcatatgtacaaactatttattctttatcttccatgtattaaattgtgttgtattgttatcctatactctatatagcattgaaattcgtttcattttgggtttggtactagggaatgccttaggatttgcactggaggaagccctgtttgtttcagtcggataatagtgcttttagcttttataatccctagatgaaacaaacagccagcttccgaccgtagattccagaatacaggaattttactggattgtagcacacctgacctgattgtccgttccactccccttcctgtgctaccacctcactttctgcagccaacaccaataaaatttcttatcggccatgttgtctgagctcatgtactgccttcagcggtccagccccacccatcatgctggtgcacttgctgccacctaccaccactgcccacagggggactttgcgaaaacccaagacaaccttaactcaccaagttgtggctggctgttgtgttcaagttcaactaatgcgttctgtggcgatgggacaacattattgtgataatttagagtgtttactttctcataaaaactagtatgcgcatgaaaaaaaatctatgcctctatgtcctggattgatcttgtttagtgtttacttccaacaaaacaaaaagaatcaacctcatgctgctgtaatttttcctctcgggcaaccaaatcaaatagcactttttaagagagatttttcttaagatattttatgtgttttcaaaatgcaatgttttctgctaacctttctggatgcttttttccagtaccgtgcagattttcctagtgatctacagaaaca

SEQ ID NO: 8024 - DNA, 1023 bp, Zea mays
  Intron number 3 from transcript GRMZM2G096647_T08 (locus G RMZM2G096647) derived from phytozome v7.0 (chr-ID 8; pos 2 3804267 to 23805289 reverse strand)
tctgtcaaaggagctttcttcagttcaggtactgctctgctttattagccatccagccgatggatattttctatatgtgtaccgcccctgcactttcaaacacttatgttcaatgtttacaatcacattttttcttctcatagatttactatgtggttgtggtcttagtttggcttgtaggttaatttgtatactcatgtcattttagtttttctatgttgattcagtatgtcttaatttagttaatttcaattcttgatgctaataatatggatagattgtgacactactttctggcttgagcagaaatgggtttgttgcatatagcagaatatagttgtcgtaactggcaacaatgacccctctatggatgatctgaaaactattccgtggtcatgtagttaaatatagctgaatatacattactatgttttattaatcttatttggtttttctctcaaaagaacacacctctccatctttcagtgcttggtggatcaccgtctaaacgatccaccaccagaaccgccctaccccaagatagctatgtgcaggttcaactactcatttagatattggtacagcctgtaatagactttggtacaataggatttggttttgctattcacttagtttttagttccaaacaaccaacaaattgcatgtcctttaggaaaaatatcacatgaatatcagtaatataacactgataataaaaaatgcttcgattctatatatttttcatgttataaggttgaaaacattctgtctcacggatcagaatgtgtacaaggcgacatactgtgtttacaaatatatttaaccataataaaaacatatttggaaactgaatatcatttaagtccaaaaatgtttttgctgactgttcattaagctagagtaaagagtaaacttagcatttcttttctatatctctctttcgtgctcatgccgccgcagtctcctccatcccacctttcctacgcaggcagctccatctcagtcgttgtacccattcaacgc

SEQ ID NO: 8025 - DNA, 858 bp, Zea mays
  Intron number 6 from transcript GRMZM2G060213_T01 (locus G RMZM2G060213) derived from phytozome v7.0 (chr-ID 8; pos 1 22414528 to 122415385 reverse strand)
aaggtagggaatatataatttgatatgttatagcttggttttatttccactttttgctcatcttagtaggtgtctactttcttggccctagaacctcggatcaattatgttaggacaattttcttgctagtttctcatgcttacttgcaggtaaatcttttgaactcgtctggattggtttaatgaacaagttaataattgcgtttactactactctcatcacatgcacaaatattggataggggtttcatttccagtcagaacaccctagcatgtgatattttctgagatatgttctgtttatacaaacagatatttgagcatgcaattagtatgttctctgcactatcttggtaggttggtcaacagtttgcttgttttcatcgcatggtattgactacttgctatattctttataagcacatagccttgcttgattctgttatattttgagaaatgaaatcactattgcatagaatcatttatttggagcgaagtacacttccgagttccgacccttaaacttgtctggctgtgtcaacacggtccataaacttttaaagtatgcctcttaaaagatcaatatttgttcgggtctctatcaggtcctaacgggttgttatggcccacatgttagtcgtcgaggaaggagatagaagggtgggtgggatccaacagacaacggcaactgatatgtgggacacaacaatccgttaggacgtaatagagacccgaacaaagattgggtccttaaaagacatactttaaaagtttatggaccgtgttgacacaggcagacaagttgaaggaccagaagtgcattttactcattttttttgtgatgctcgttttcgtagg

SEQ ID NO: 8026 - DNA, 1005 bp, Zea mays
  Intron number 2 from transcript GRMZM2G048047_T01 (locus G RMZM2G048047) derived from phytozome v7.0 (chr-ID 2; pos 3 7240893 to 37241897)
gaagcttctcaaaccgtcattcgtgtccttggtaacttaatttgacgtaacctcccaactcaatttttggcaactactatttgcttctgctcagtgcttgtgtcttagattattgcactgacgtaattggaaaatgagtaatctgccaggaagcaacatattgtgttttactgaagtacagttagtcctgctgtcgcacaactttgatctgatgtttgaaagcataaagtatgttttgcaaccatgggagaggtccaactgatattgcatctggatcttttatgaaacatgatagcacttagcaacactaggcagaagatgcacttttgaaatgtagtgttgcaccgttgctgtcgcaatcgtttgttacacatatgttctctatatattgtcagatatccatatctcttaatggtcgtacctaccaatttgattctgataaaaatcaatcaatctattagttacagaacaagcagagaactcactgtacacggtctcttcttgtactgaactggtattcagcttcattcaaagagttctggtaaagtataaactatgctagaacttttgagctccttaattttcatgtagtatttttgttacttgatttttcgcctatcttgcaatagcaactttaacactgaaaaagattgcttatggccactggcaagtatgaattgatcaaattttcaaaacatatcattttgctgatttgatgaagcacgattcttacattatttgtatctaatttgttacattcactgtttacagcttctcttgtaacattggatataatgacgctgctacatgactattattttgacatcataacctacatataaagattagagactaatctgtttttttttctgaactaaggtgttaacacatttccaaatatcgaacatctatcttttagtatgcaagcattttagtttctcagaggtatactgttccccatctctgtattttatttcatccactgcccttgctaatttgtaggaa

SEQ ID NO: 8027 - DNA, 649 bp, Zea mays
  Intron number 2 from transcript GRMZM2G142544_T01 (locus G RMZM2G142544) derived from phytozome v7.0 (chr-ID 2; pos 1 64891860 to 164892508 reverse strand)
tgcgggacgagaaaggtaatgctatttatccttatatttgagttacttcagattaataggcctcatcagattatgcagtgcttatttgtggttatatggtaaaagaatcctaataatcagatagttagaggcttcatgctaagtaggaggctaaactgctaagaccagtaaatatgcatgtggcccttcatgcaaatgaaaaaaagaaatgatctacaccttatttttagcaaaaaaatagtaggggaaaaccccaagtggttaatatttgttttaataaagaaaagcaaaaaaaaaggtctttgtgagaaataaaagaagggctaaatgaaggctaagaaggcccaggtctgtccacgagagaggaaagaggaaaagtcaggcaacatgaacaactaaaaaagttatctgagtttgtttaaaagaaatggtctgagccaagaagaaaatggcaattagacattcctctttgatacactatttgaatcacatctgcaattttaatctacattagcagtaccataaattgaaattaatattgcaactgcctcctaaaacgaaggataaatatagttgtttaattgcagggaacacgcatgccttgtaaacaagtatgtgttattgcaggttagtgcacattaccttacac

SEQ ID NO: 8028 - DNA, 700 bp, Zea mays
  Intron number 2 from transcript GRMZM2G109472_T03 (locus G RMZM2G109472) derived from phytozome v7.0 (chr-ID 8; pos 1 58121436 to 158122135 reverse strand)
tgctcatattcctattttgctgccccttgtaaattgtaagcctgcattcttcgctttggataaacctagatcctaacgtgtatctcgttgcaattataccccccccccccaatggatatagttcgcagtctcattaatgaataaagcacttcagagtttcaaggcttagtagcattatctggatactttgttctctgttttaatagtgaaactgtagtccttcccttttcttttaaatcttatttttgttagcgtaactaacaccccttgaacaccatgaaaaatattggtactaattataaacaaaaactagatcaaccagtaaggatgaactaggcggttctctatgtatagcaaataagattcaaaatccgtcttgatcgagactcaaacatgagtgatctaggcctaggcgtgaatccacacaccagctatgctaggcttagtttttatcgttaacaatgtgtaaatttattttattttggtatatgtggttagtaaatcaagaaaataataatcgccttgactaagctggcctgacctattgtcgctacatgaaaactagtaaaagttgttgcacatacgccgtctttttgtcatattgagtcaatccgtgtgtactcgaaaatactactgaaactatgtgtgtccatggtttttaacaggtccctttaagacagctgagaggttagatcatctt

SEQ ID NO: 8029 - DNA, 685 bp, Zea mays
  Intron number 1 from transcript GRMZM2G110929_T01 (locus G RMZM2G110929) derived from phytozome v7.0 (chr-ID 9; pos 6 733108 to 6733792)
gagttactacaaggtaagggttactcccttcttagcatctagttatccctatcaaaatcaatcttcgttttgcacctcagtttatcatatttggactgaattgatttctatagttcatcattgttagttttacatagatttataaatttgacttactacatgaggataggtaaacctttttagggtcactggtaaaaatgtcattggatttgaggatgagaatggtgatgctcttcagtcccattctgttctgaaaaaatgtatattaaattctaaacaaaaaaggtgacaactgcagtctggttagtttggaagccttgcacatttgtgataaattttagtttgaatcataaaagaagtggcactggtaaatacaagttgattttatggtcacgaagtcacaaggcttatgttaccatctctctaatgaggacatggtcatggtgctttccctatacatggacgaaaccaggttgcattctgaagcactgactgtcacttaagaagatgcatgctaatttgtcaacacctaacttggatcttttgttccagttgttgcttgatccgttttgatgttcaattcccagtaggacttcaattaaacagatgtctgttcattaaaaatgttttcttcgctttccaaaaaacaggtggtcattcctcttcaccagctaagagcagctaa

SEQ ID NO: 8030 - DNA, 615 bp, Zea mays
  Intron number 2 from transcript GRMZM2G360097_T01 (locus G RMZM2G360097) derived from phytozome v7.0 (chr-ID 2; pos 5 7397950 to 57398564)
atcctgctgttcctcggtaactccactttattcccagccctttagagatgatatgaccatcttcgttcggccattttcccagcactggtctataccgcaggtcgatgcataaacaactgccttagaaaaacatagttttgaaggataaaactgaagattaggaatgacaacttaaacagtcatcatagctaacaactgaagatgtaactgtgttgatccaaactgttttacatctgattaaatctacagaaaaaatattcttcttctttggacgagagagagtgtattttgtagtcactctaagcttacaactgtcttcgatccatcacattgaattgtcgttgaagattctgccaggataaacagtggccctgcctttttaactataataataatgtcggttggtacatttgactcttgtgccttgtcccctgccgacgctgcagtgctttgctagattagtaaagattactcttaccaccagatgtggagcctaaccggttggtagggataccaatggtgctcctctgttagtccatcatgcacctgaattctataacagtatatgaatgtcttttaatctgcaggtcattaggtagagtaggagttgggcat

SEQ ID NO: 8031 - DNA, 334 bp, Zea mays
  Intron number 3 from transcript GRMZM5G877500_T01 (locus G RMZM5G877500) derived from phytozome v7.0 (chr-ID 9; pos 2 2679818 to 22680151 reverse strand)
gaatcggagggctacctggtggcaaggttagctactaagggccacatgttacattcttctgtaaatggtacaactattgtcgagcttttgcatttgtaaggaaagcattgattgatctgaatttgatgctacaccacaaaatatcctacaaatggtcatccctaactagcaaacaatgaagtaatacttggcatgtgtttatcaaattaatttccatcttctggggcattgcctgttttctagtctaatagcatttgtttttagcattaattagctcttacaattgttatgttctacaggtcaagctgtctggctccatcagcagtcagtactt

SEQ ID NO: 8032 - DNA, 839 bp, Zea mays
  Intron number 2 from transcript GRMZM2G011071_T03 (locus G RMZM2G011071) derived from phytozome v7.0 (chr-ID 9; pos 1 38708520 to 138709358)
gcggggagcggcggctgtgaccgtgattcagagaggtacgttcgcgtgcagatcaactcagtgccaattggtagtgaactttcttgttggtaaaaaagagagagagagacttgcttagtttaagtatttgttttggttttcatcatcgtagttgctggatttttagcttccttgttactactgtctttgtccagaggaactgccttcttccagacttgcattcctcctcttaaatgtctgttttttttttttttgagctcctggatggtagctctccaatggacatctttcaccatgtttggtacagaggaaacagttagtgcttccctttgccttagaacagaatgattgccttttagtgtagcacatagcatgcatgcctgcattggatgggggaggtggacggacattgtacagcaccggtggatcgaactggtattaaatacagtttaattataaaaaataacatggatgtgacgggctccaatttagcccactcagaccaaacacggccttagggcctgtttggatgagctcctgagcgctccggctcttggccgaccggcacccaacagcccatttgcgttggtttctgggtatccggctccgtcggttcgtaattcacgctctcacagcgaagggctctctctcaggagccgtgggaaggtggctccgtggtcagagtccgagcagcataaaaagccggagccggagcatttgggagccttcccaaagaggcccttagtattttcttttggttcccagttcccacgcgttctactgtctgcagcctgcatatatgactcgtgcgatgtgttcttgtggcaggcaacacctcg

SEQ ID NO: 8033 - DNA, 1041 bp, Zea mays
  Intron number 3 from transcript GRMZM2G103245_T01 (locus G RMZM2G103245) derived from phytozome v7.0 (chr-ID 4; pos 7 7393824 to 77394864)
ctgattctgattttgagtctgccctgctagaacaagtaagaatcataaccttcattccattttgttcctgcatgcagacccatgatgttgtattgtctaatccagtgtgcaattcatcatgtttcttatatcttgatgattctgattttgattttaagtctaccctgcgagaataagtaagaatcataaccttaatttcattttgttcctgcatgcagacccatcacccatgatgttgtattgtctaatccattgtgcaattcatcatatttcttatatctctattctactactttaatgctatgtttagcatgtgtaatatttcccaatcatggttcagctagaatctgttgcagtcgaatatgagggcaacagttattgtatattagaatatgaccttccatctatgcataaagcatggctgccagctggttgagttgataagtctgattatatctgataattggtaatttatcaggcgataaatttaaatttatggatgaaatttgactgaaaatggggaaaacatgagtttgaccatttttttcaaatcaagtatgatatattggtatgtttatagtttataggacctcatcgatatcaccaacactttgcaacgtactgctgagattctggtagaactaacaccacataatctaagctgaatataaagatatgtagctctcttgtgtgtccgataaaagtatgtatttcttcaatttgaattgtcaaactttcatgttatacctaaggcctaagcataaaactatattcccaaaaaatctcgaaagtgcgctggacctacatttgttcttcattttgaattatggcattcttaatacttctcttaccctttaatagtgtcatgtagcagttgataatcaaatgtgtgttcaccgtgaacttacttttccaaaaataacgatgcatattgtactatcaattttctgatggagcttggttgacctgctgacttcatgattctgtgggtgatgggaattctaagaaaaatcattcaccagacgttaagaaaaggagaaa

SEQ ID NO: 8034 - DNA, 408 bp, Zea mays
  Intron number 1 from transcript GRMZM2G023351_T01 (locus G RMZM2G023351) derived from phytozome v7.0 (chr-ID 2; pos 1 11361848 to 111362255 reverse strand)
tggttctcggattcgactcgctggatccgtacctggtgagttcttgatgcatgcggtttcatttggaaccattaattagcgcactggcacatttcttggagatctatgcgggagtcgagttaggagtccgaagggagatattttgttgtttttcgacttttgaaagtcaacttgtgcatcctagcgctcatatttttgttagcttgtgtaaatgcctctgcatgtgtgctatgatcctgtttttttggcccgtaggttactcagttattatagtttgagttctgtaatactccgtattatagtactagaagaagatgaggtagtattttaaaatattttttcctgcgaaagtgtagccaaatttactgatccatagaaacttagaatactgttattaactacagtatt

SEQ ID NO: 8035 - DNA, 916 bp, Zea mays
  Intron number 2 from transcript GRMZM2G050193_T03 (locus G RMZM2G050193) derived from phytozome v7.0 (chr-ID 2; pos 1 96333660 to 196334575 reverse strand)
tcaaggtgtgtacattccttttgctcttctgcctttcttactgtatatgtttatcttggctgctgtataatgaatagttggattgttgacaactgttttttctaatatgtttccgattatttttgagtggcctgtagacaatttgagatcctgaagtaaagacaacacaaacgatatctggccattgttgaatacatttacttttttctgttgtgtatcacattattattacagtctgatcagcatccttgacataagccacaagtattatgttgtttagttgcgatgtatgatacagacctctacatatgcattagagtgatatagacctctacatatcacattattattacagtctgatcagcatctttgcacagtgtttagtttagagtgtttccgttatattttgcagtttgttttgtgtaatgcttgcaaggatttgagtcaagtggttttaatatgctgaatgcaatatgccatctttttttttccaattgcctccataatatatggatttatgggatgattttatttctccctacttttctgtcaggatgtcaaggttcgcccgcttgtagaatatgattcaaaatccttggagggcatccttcctgaaattcctttatgggtcaagaatcctgactatgatagagtatgctccttcgttgaactagcaggaaactatgttaatcttattagtgcttttagattctcattttcttccttgtctctagattgattggctgaataggttcttggagttgatgtggccttatcttaacaaggtactcttatcttgtcatttgctctgagaacactagatcattatctccggttgacactgaattttccatgctttgtgttttgtttttgccttgtaggctatctgcagaactgcacaggatatcgcgaagcc

SEQ ID NO: 8036 - DNA, 390 bp, Zea mays
  Intron number 1 from transcript GRMZM2G075563_T01 (locus G RMZM2G075563) derived from phytozome v7.0 (chr-ID 9; pos 1 53415868 to 153416257 reverse strand)
gcgacgggccttacgcaagggccaaacacttccaggtaaaagcatccatctctttccattcttgcatgggcaatgcttatatatggagaaatttgagttggttcccacgattattactgatccgatttttattctggtgattagtttactgtcacacaaaatgacatatataccttgcgatctataatagggccttttacattacctgctgggtaaagtttagcaatatctaaacataacctacatcgagatacaatgcatagcaaaaagaagaagaaaaaacaaataaaacaatcgctgttaacatctagtccattactaatcgacatgatcttaatttattcgaacaattaagctggtggagaaggacctggacgcgtcgatcgcgtg

SEQ ID NO: 8037 - DNA, 679 bp, Zea mays
  Intron number 2 from transcript GRMZM2G058862_T02 (locus G RMZM2G058862) derived from phytozome v7.0 (chr-ID 2; pos 1 88460884 to 188461562)
gaggtgttgtgtctattgcgttggcttacaataaggtaaatcttgtgattggtctatctggtttgagctttggtctggaattgtgttactgcttttgtttcatctatccattccaaaacataggacattttttgttgtcgtaagtcaaaattctctaactttgacaaattttatagaaaatataccaacatcaacaaccttcatttcttaatcttatatagatgttgcagtgttttcattctcaactaaatgtcacgattagccatgtagtctctttaattgtttttaaaattgaaactgcaaaattcaaccttgcaagtcttcttaatgttataaccatagatttaaaacctaatcagtgagttaacttgtcttcaaacaggtgattcaaagaaacaatgttgaagatcgggataggctactttcttttgagaagatgtttatcggtaaaatctctttacctagcaataaaaatctggatctcttgcaacatgataaacattagagtaaagatagtcaattgaccaccctttaggtagttgtaacaagctattccgaattctgttgtaattcctctttgtgattcagttctgtgttgaacatttccatttggatattgataactgaaacaactgtaaaatttgatactctgttattctttatctcccagtcgggtcag

SEQ ID NO: 8038 - DNA, 622 bp, Zea mays
  Intron number 1 from transcript GRMZM2G008783_T01 (locus G RMZM2G008783) derived from phytozome v7.0 (chr-ID 2; pos 2 7532867 to 27533488)
gaagggaaggtaatgcagttgtgtctctacgagaaagaaggcagcaagagcagcaatagaaccgatgagtaagctgcaagcacgctgattcaaaagtgtctacagactctgaaaacagaattacgtaccaatgtcttgtaatatgagttcctaggtattgcatgttagtcaatctgatctaccaaagattttggagtgtaggattcggtctatgggccatcatttgttcacgacaattggtgacccagttgagaaagccatatttgtaaagccacataagctaatttgtattctaatatgttggtcgagccatattttctaacttaatcttaggcatggcgatagcctagataactctgtttctccccaaaaaagtacagttccaagaaattgatgtgcgacataatgacagctaaggaagcgccacaggaccacacccaatctgaaaagtctacttgaattatttgagtgtgtcatatcttatctctgtttttcttttcattcccttgttctttttccaagaataccatgaatgagataatatacatggaggtgtatcagaagcagaccctatttcttttgttaatgcaggtgtaaatcagggccctcacaggaaaggcac

SEQ ID NO: 8039 - DNA, 928 bp, Zea mays
  Intron number 1 from transcript GRMZM2G002531_T01 (locus G RMZM2G002531) derived from phytozome v7.0 (chr-ID 4; pos 2 13684888 to 213685815)
cagctcgaggcccacttcaatcgactccccatcaggtgagccactcgcagacttgctcgtctcgtctccgccttcccctctagtgccccagcccgcggaagcagttgcctgcgcctttcggtggaatgattcgggggttggaaaggtttctcaatggttggcggaatcggtggtgtttgtggtcgtattaacgaaatccgcatcagttggtatgcttaggaactcatgacggcgttgaactttactgtatttatgccagtgggatatcacttggtctaaagaccttgttcagctctgctcggtggacttagaacgggcggtttacagattaaactaagagcgagcatttgtttatttgactttgaatgggtgtgctccatttctcctagagacgtgctcttcaagtgtttggtagtatgtctgccatgactgtagtcttgtaatttgatctctggatttggactaactgactgcactgttctggtctgagttgtgggatcagcagtgccattttgtctattcgacactaatgggtgtgctccacgctcccactctcagggctagtttgagagccagaaaaccgaagaggattggaggggttagaatctcctttgtattcaataagaaaaggattctagcccctacaataacattcggttttgaggggttagaatctcctttgtattcaataagaaaaggattctagcccctacaataacattcggttttgtggctctcaaattagcctttaggaagaatattttcttccttggaagcccttcttgttacatctgttattttagacattatagtcttgaaagttaatgtttaaattcgactcagccgggtcatctattatttcattggtgcctccaatattttatttaatgttattcttctacttcaataccgtgtagctacaagctgg

SEQ ID NO: 8040 - DNA, 564 bp, Zea mays
  Intron number 2 from transcript GRMZM2G121427_T01 (locus G RMZM2G121427) derived from phytozome v7.0 (chr-ID 2; pos 2 01754556 to 201755119)
ctgaaaagtatgttttcccctgttggtacattatacttaggtgcagtggatttttgtatgcttctgctccacaaactgagttgccacatattaagaaagtcactgatgtacagcacttttaagctatgaagaaaatatgaacttatacgatgaaatagagcctgtgaaaaaaaatcatgttcaatgtaaattccatgttatcaagatttacttagattattttcagctgtggcaacaagcaattaatagtcctagatgcataaatgatcatgatcacttttaagctttatcaaattatttataatatataactccaatttgatatctggcaaagtcaaaatatatacaattattaatcagtatatcgcactatctaatgttatggtcttgtttcatctttatgctctgttttaataccttgctctttcttacagtttatcaagcatactaactgttgcagatacttgaaggcctggatatgtagacatttatttaataaattttagttcccctttataaccatttgaaggctaggacgcacatctgaattcataatctacggac

SEQ ID NO: 8041 - DNA, 571 bp, Zea mays
  Intron number 1 from transcript GRMZM2G442548_T01 (locus G RMZM2G442548) derived from phytozome v7.0 (chr-ID 2; pos 2 21838884 to 221839454 reverse strand)
cttcggtaatttatctattctactttggtgcgcaaagttaatgaagctacacccacttaatttctgcaaacgctgcccctgatactactattgcctatttacatactaatctagctactttttagcttcaaatattcaaaattgcaaaaaagccaacaaggggattgaatataacgtggtataagcacaattcttgataataaaaaaaatctttggtggattagcagctattatgtgtctgttcccttgtgtggttaacattagatgttttcagtgctttccagtattgctaaatattactatatgcctttcattgacaaactgacagcatcagatagaatgcaagagtgggttatggagcatctccctccttccatatgcttccacaatgtacatcatcatcggtccttctatcagaaacagttcgatactcatagtctaccgctaagcactctgtaattcgattgtagtttggtagtgtgttgttaagtcttggttgtaagttgcattttttttaaaaaaaatcttcttctccacctacttttgttgaattttcagagcgagcaagtaa

SEQ ID NO: 8042 - DNA, 859 bp, Zea mays
  Intron number 1 from transcript GRMZM5G836325_T01 (locus G RMZM5G836325) derived from phytozome v7.0 (chr-ID 8; pos 1 39725326 to 139726184)
gcttgggaacggtgcgccgcagtcttccttctcatgtaccggtgtttgtaaccgttgctgtggtttctgttggccatgttctgtccgtcttggagagtcagagctgtgtgttgaggtcgtcaacgatgacttaggatggatactgtgtgtgagaggttgttgttgtctggattgtttgtgtgccctatattgtgttgtccagtctacgtttctctttttaatacaatcggcaagctttgtttggtttttttttaatgcggtggacatgccattttatatttttatgggttaccatactgatgttggttttttttctatggccatccctatcgtacgtgctcagattcccaccccttcttctgagaaaacgtgctcggatctttaattggctgcgttcgctgctgcacatagtttctaacatctgtttgtctcatatggatcaaaacattatatatatatagtttttatcggagtttaaatttttaatattcgatcgtttcaaaatccatatactggaaattggatttctaatacatacatgagatagatactagtatctgaatgattgatgtccgattgtaagattagaagaagaaaaatggaccagtgggtggacggcggcagtagctacaacagcaggcgtaggtgtgtcgacaggcacccagcgtttgcattccatcgaccacctgtttggtggctcggctcgtgtttatctgaaatcctatcacccctgcacgtggcactaccgtacaagcaaaaccaaacttgtctctcacttcgttacagaaaagcacatcaccatggcagtatagtaggttgccacgaattgggcttaccttcaatttaattaaatatacag

SEQ ID NO: 8043 - DNA, 842 bp, Zea mays
  Intron number 2 from transcript GRMZM2G172330_T01 (locus G RMZM2G172330) derived from phytozome v7.0 (chr-ID 2; pos 2 19805635 to 219806476 reverse strand)
gggcaaagactattaagggagcaaaaggagcaaaggcatgttttcactctacaattttgatacatatcagttaatattttgtataaaatgtgtagtcaataacctttctattttcttatcgatcaactttgctttcttgttctccagtgtcttgtaacctcatatgcatcatgtgttttagtcttagtttctgatcacaagatattaccatacttataggagtgtgaattgtgtatattggactgtaaaacataattactaccgagacattatgtctagtttgagtagtttcttatcccgtcatgtcataccctgccctgcagtcctgcactacacacatgctatcagccaccttttctttaattgatgaccatgttatgctttatgtagctaattagttgaatatacctgtgttatcaaaacaagaagctaccatgttgcctttataaggagtagatatgtctgacaagcattaggtatattattattgtacatgctacagttttttttggggcacgtttggttcccagagcagccttgctttgcatagcttgcagacaccaaaaaacttgcctgccctggcgagctgatctagctcgcttgtgatatgaaggaaaaatgactaaaaaacttgccaacacaaactcccatgcacttagcaaaccatacaaacgtctactgtcacttgaggtcctcgccaggcaaggagaaacgagccttgctgacggaaccaagcatgcccttacattcctcagctttgcttagatgagtggtctggttcgctgaactttcacatttattttgtcatttaggtatcattgtttgagaaatcagtttcaaag

SEQ ID NO: 8044 - DNA, 992 bp, Zea mays
  Intron number 1 from transcript GRMZM2G114017_T06 (locus G RMZM2G114017) derived from phytozome v7.0 (chr-ID 2; pos 1 5930865 to 15931856)
ggacaagctctttgctgcctcgtcagctgcttctcgtgagtactccttttttctttcattcttgccttcgcatccaccacccgcgccttgctgtagcttagtcgtacggcatagtttgctgtatgaacaccagaagaagaaggtcgtgaacagcaacacgtacaccttcacggccaccatcttccatatatgctggtttgagtggaaaggatgattaatttggacggttgctatgctagcttgggactgagagatgaatgtcgaatgcttgctactgatggaattaactagtttgatatttgtagcaaggccgaggagctagcaatgtaagtagggtagaacgttgagctacctgtgaagttctagtctgaatctcaagaacttcttttgcctttgtttgcaggcttgtagtatgtgaatatcttatttgacaaagtaattctctgaacttttttactgcataaggcctgaattttgactaggacgtattttttttatttttagttggaccactttttatatttaggcctgaacaaagtatttatctggatcttatatggttagttcattcatttatttagtgttgctgtactgtccctacatgtttccttaatatgggattctacatactcagccatgtacacacttgtcatatttctcaaacatgttcttttgttttagggatactaacaaatgggttctataattgagttgataaggaaacatttgaagcaggtagttatatataagcactcaatttctacaacattttttacttgcttcaatctgctatttcagttttttttgctagtaaaatctgctatttagttacctctattatttaattgcttaaatctgctatttcaattttgtttctagtaaaatctgccgctatttgagttcagctatttatgtttacataagcaagtgcttcataaacatctaaatccacacctttgttccagttcagtaatgtcttctctttattacag

SEQ ID NO: 8045 - DNA, 637 bp, Zea mays
  Intron number 1 from transcript GRMZM2G345042_T01 (locus G RMZM2G345042) derived from phytozome v7.0 (chr-ID 9; pos 1 45694682 to 145695318 reverse strand)
gagccaaggccctgtctttcttccaggtagaagagttgctggcttaaaacagctccgttggtcatgtttttctgtgttagccggtgatcattagttagtttctattgtgggtgtgtggtgtaatggggttctcgcccccctttcttctcttattaattcaaagatgcgcaactctcttgcgtattccagaacaaaatagctacatgtgattgaccgactgtccacacccttttgtgtgcccactcaaacctcaaatgccaactttagttgattcacttttcctagtaagaaatatctatagtgttttcatggataacattgatataagaaatatattgaagttgtttgtggttcttttttgcattgcttacatttgtttatgttatggtcacacgtagtatgtgcaacataagaaaaaaaaggattgtggtgttcctgtttcagtattctaaaatcaattaacattttcgaccaatccttgtcaattggttttcaaactttgtgtgtctttccttttggatacatattgtatacttgccactatactaataatagtaatgttaagaagaccattgtatacatgtttatcaatgttttaaaacatcaatttgacaatctatgatgaaatccttttaga

SEQ ID NO: 8046 - DNA, 975 bp, Zea mays
  Intron number 7 from transcript GRMZM2G019100_T01 (locus G RMZM2G019100) derived from phytozome v7.0 (chr-ID 8; pos 1 4117662 to 14118636)
atgccatcccagatgggacaagataagtaagcagtcttatatagtttgcccactcgagttttgtatatcttgacataaatgaattatgcaaatgttgctagagttcttttaggttgaagcttttgcttagttcagtgttgctatcggaaagctaaaattattttcttgccacctcctctgcattgttttactgcttcagctcatggtgcttctaatcgagtactatagaaagcatctctcttgataaatcgttgtgtgcaaatatatggttcttatataatccatcatcagagtatgaggcgtgctttattctgtgtgcttcccacaaaaaagagtagcctattataaactttgtattagagcacatgacgttctaagttttgaccacatttctctgctattataatgcagccataaagattcaatttttatgttgggcaccataaagatgtttggcaccattcttcccaaacatttatctactattataatgcgtgctttattcaatttttaggattgttaggagtgaagtcttagtctcaagatagcatattgctgtttgcctatattatttagtgtcgattataattagtattgttgtttagtgcttggttcatactacatctaggcagtgttctaaaagtttgggaggaatggaataggataacggtcggctaacatacatcttttcttcagcagccgtggtaatgaatttgaatactgtagttactataatgaatgttttttaacttctctactcttctttactaatcttttagaacagtgtccttttctattatttttattacttcactgtgttgattgtcttggtgtttatactcttcttcagttgttctctgtgccaactgtggtcttgtacgagccttctctttggtagcctaataggattttgtgtcttttgtttatctttggtatttaatcttatactaaattggctcgtttgattttcaggga

SEQ ID NO: 8047 - DNA, 568 bp, Zea mays
  Intron number 1 from transcript GRMZM2G015037_T01 (locus G RMZM2G015037) derived from phytozome v7.0 (chr-ID 8; pos 2 4475450 to 24476017 reverse strand)
ggttccttgctctggagtggcgtctgcattatccacggcttgggggcaagccgtattttaagcggtggggaatgttagcacactgttatgtggggcctttgataggtggcaaatgaacatgtttggctataaaaggagaccggttcaagctattgaggggcatcaaagaatcaatttagaaactgaagtctttatttcccattactctcatatgcttcctctcctctctcatgttagttcttctatctttatagtatcttctgctgtactctgatttgctagaataatatacagagtgttcctctagctgtgcatccccatctctcgtctccctcccttcttcatgctcttcctgctactaattctagaagcctctagcgagtgctaacattcagtttaacccggcctccactcctctcctctggcccgtggcctgggtcagtgtccatccctccctgtccctgcccaccacttcgtctgctctccatccctcatccgtccccatgccgcgcccgccgccgcctacttcttctccacttttttgactgtttttcctgccatcctagct

SEQ ID NO: 8048 - DNA, 818 bp, Zea mays
  Intron number 2 from transcript GRMZM2G098988_T01 (locus G RMZM2G098988) derived from phytozome v7.0 (chr-ID 9; pos 7 7700681 to 77701498)
aagtggcgccgtcgccttctacgcaactttgccaggtcagcgcagcctcacgtcgtcgtcgacgattcaggtctccttccttccgttgcattgttcaaaattctcttagagcttttcttttccccttggcattgccgcgcagctgctgtaaactgtaagcatcgcaccgtcacctgttcattcctacgtgggtgagcaacttggtgcagtctgttatgctacgactaacgtagaactgtagatcggaaagcgatcggggtccactacgtggcggctctcgacgtcaacggcgagggatagggcagcgtgtttgacgaaatgctttgcgcagtcaaaagatggccaccacctcgctactctgtttttagttgtacatcctcctctgttctgcgacatcctcgcgcttctaatggacttcccataggatgataagctagtttatgagtcggcaagcgcatccaaaaaaaataaaaacaaaaactcgcaaccatacgttgtcgccacctttaaccggcattgctgttcacgaattggtagacacttgtgctcgctttagcttttcgctctaatatcgtcgtgcactttgctatgtacaacttgccaaattgctctagcagtctagcctctttgtgctgtgctctcttctcaccttccattaaactgatccttaatgactcgagttcgcaacacacagcactgtagaacaagtttgtccgaaaataaaccgtaaccgataactactattctcactccaatttgttttccgttgattacttgttgcaggcccgaatacttccgccagctgctgaagcccgttg

SEQ ID NO: 8049 - DNA, 598 bp, Zea mays
  Intron number 2 from transcript GRMZM2G013712_T01 (locus G RMZM2G013712) derived from phytozome v7.0 (chr-ID 8; pos 1 46114421 to 146115018)
tcaggaggttgctggtgtgcatactacagatcgaggtaaatggtgtatgctctttagttctattcatctcccacattttaaagctctgagttttgactgggtgggttctatttgctgcaaatggagtgcggacctgcagtggcactggctgcttcagggcatcaggcagcatggtggaattgttgtggcctttttcatgccttcactgatttagggggataggtgaaggtaagatggttttctacttctatatatcatgattgtgttttctgtaatactctgtttattttgaatgacataatttattatttctaagcacactgtaattattgacataatgacgaaactgtgctatcaaggttagcacctttggaagctctaacacattttattgttggtttgatttttgttgtcagcatactcttcctatgttccaatttttccttatagcttccaaattctaaagtcattttctttaacaaattgattctattgtgaactcgttttcttgtaagtctgtaagtctctaacatgctagtatcaatatctttctcttgttttaggaagttgccaggcagctttgtttggagcattggtt

SEQ ID NO: 8050 - DNA, 1009 bp, Zea mays
  Intron number 1 from transcript AC201828.3_FGT007 (locus A C201828.3_FG007) derived from phytozome v7.0 (chr-ID 2; po s 151454181 to 151455189)
ctcatcttcctcaacacttcgcctacgcccaccaggtgagcatcgctgacatagcctctatcacttccttatctagatagtttgttttgtatagttttgtcaaatatttagaattaactccagtgaaatgtaaagactgattaactcttgctctatcaaacccaacgccagagtctgaatgtactatattgaacaagcatatacatggagtcagatagagtttcatgcttagtttcatctttctgcatgccaaatttatttcgaatgcctcagtctgagaatacagtgcctgctgaagtatgaaaaattgtttgtgatatcaaaacagtttcagctatttgcgaactttatcttgaactataacaggcaatcagtgcgtaaattttcctagggtttttgactaggggtggtgatctcaggagcggtccgggtgttagatgatatggtccttgctactggtaaacacgatctgctagatttcgagaggatcattcatttccagatatgctttactgttgtacagttactatttatgcgtctttttttggggtcactggtttgtggattggacagctgaagaactagctgaatatatttcaacaaaggtagctgcccatgtctcggcaaaagcttatgatctcgctattttgttgttttaagttacattttactagaattttagccacttaggggtaccatgcagccaaattgagtaattctccaagcattttgagaagtatggggcaatagctgattttgtaattatgtaggacaagcatactaatatgcctcacggatttaaattttttacattttttgatctgtctgttatagacaaggttttggaggaagatcacgttatggatggcagaatagtagggctttaatttagatcgatcgtaacatggtacctaagtttctagctccacaatgcaatttagttgacatttagcttctttcgagccctctcaacttatttatgtaggttggggtcaagaggacagtctcg

SEQ ID NO: 8051 - DNA, 944 bp, Zea mays
  Intron number 3 from transcript AC202998.3_FGT006 (locus A C202998.3_FG006) derived from phytozome v7.0 (chr-ID 8; po s 115339409 to 115340352 reverse strand)
cagatcttttgagcatagaccaacttcttgaagtatgggaaatctattattcctttcttttccttggtttatctgtcctaaggtaccaccatgttgagatggcctcgtcacagcggagttccttatgttttacttcactgatttctcctgttccaaattcttaaagatatcctgtttcctaggctatacttgattacctagcttagaagaaggacattgacacaacaaggatagttatcttgggatgatctttaggaggtgctgctggacaagtgtgatctgtgttttttatctgtgctgcaggaagagtattcataactgtcatgtgtcattggtttgctctatttgtttgtgttatatctaaatatataatattattcaactagattccaaagcctaaaagaatagctatgatgatttggtggttttttagactgagattttcaactgttgttgacatgagtgccttaatacctatcaaagattccatgcttttgctataaacagatgttgcaaatatgttgtttgatcatgctattggatgttgctttcaccaaatactctctttgcaaaacattgctttagcctaattaagggctttaaatatttgatcttttgggttcaacctaggtgctttgtgaagctaacattgattatatgagtttgaagctaagccaaatgttagatctcatataattcatactttgaattttatcagtctttttaggtgccggtgtctttcatcccataataaaaacaaaaagggtgtatttgtcatgaaaacaagctttaatgaactctgtagctttcgttcaaatagtttagttctcttccattttgtagaagcatattttcctagaaaaaaatgctacatgtttacccacacttatgctatttctcttatactcctaatctctgtggtatttctacagccgtggactaca

SEQ ID NO: 8052 - DNA, 562 bp, Zea mays
  Intron number 2 from transcript GRMZM2G334857_T01 (locus G RMZM2G334857) derived from phytozome v7.0 (chr-ID 8; pos 4 868210 to 4868771)
ttgacaagtcgcagcgctccaaggtcctcaacgaggtgagccctctcattccccgcgtgcatcgtgaatcaccgtgtttgaatcgctacatctttggtttttgtggtcgcagggtgttaattttttttcgatggctcgatgtatcttattcagctatatggatcgattatgtgttgctgtccaatccttaaattgctaacaattaggcttattgattttatatttccagtggctaattactgataagatgcccatgggagacatgttacagtaatacagtcttcgtttggcttatggttatgctgtgttgtgtggtatagaacatacctttttctttgttgtgaagaagaataatgttttgctcggcaagccccttcactgtgaaggttacaaatattgtgagatgttgctgtctaggagatcaatttgtcatgcttcagttttagatcgagcaatctcatttctgggaggatgattgtacaactatgcttgcacttgtttagctgcctctttctgttccttcatactaatgttgcttttgaacttatctttgcaggttcga

SEQ ID NO: 8053 - DNA, 951 bp, Zea mays
  Intron number 1 from transcript GRMZM2G143244_T01 (locus G RMZM2G143244) derived from phytozome v7.0 (chr-ID 9; pos 1 54087096 to 154088046)
gaagcctccgagggcgacgctgatccgctctacaggtacgagatcctccctccctggctccctcctccgctgcttggcctcgctctcgctcccgctcccacgggtggctggtgctttgtgtcgtcgtagtcccatctgctctgaaatggggcactttggctctgaggtggggggcgtggggccactacgatcgtggccctgtgacgccaggcgcgatgttgtaatgaaacctagcactagcagactacgttcgtccgattatgcgcgaccttcgaagtttgcttagctttttagttgcacggtaccaagcagagcctctctggagcatggcattccagtgctgtcagtttcggccggtgtctggctaagcctcttttgtatagatgtatcctgcttgtattttcactcaaaaaaatctcttctccgtcaatactcaatacatgctgggcagagtcctgccagcggttttggtatataaaaaaaatgctaaggtgttgtctgtcttcgcctcttggctttggctatatgtcattgtgggtgtgagtcctgtcctcatgtcctggttacgttacatgattcacagttcggtcccaataccaaaaactgtttgttgtagtcttatcctcgatcaaatctgttccagatctcccacgggggcagaaaacaggtagcttcactgccatcccagttctagtccggactcttaaatcaaattctataccgcatcattgaatccatcagataatagcaatgacagacttcaaaaagaggactgggtcaccatgtctccgtaccgatggttaagcccttcttttgtagatctagtaacagtgaagccctgtgatgactcgctaattattgttccagcacataataatttggtctagcttgatgaccatcaaccgccactaacccatgttcccgttgctttaccagagcctgtgtggaagg

SEQ ID NO: 8054 - DNA, 654 bp, Zea mays
  Intron number 5 from transcript GRMZM2G460900_T01 (locus G RMZM2G460900) derived from phytozome v7.0 (chr-ID 2; pos 1 08366133 to 108366786 reverse strand)
tgttccgtttcctcaggtgaaaactctctacttttccatacttctatcagttcttttttgcatttggatgtttcttcccatgtttgcggtggatggtaaaggatacttatcttataaagttcatagttggatgtcaaatttcaacatatgatactatgcacttttagtgccatatttttttcatccatccttccattttgatgtggtaaaaaatctaaatgttgtgtagtagatattgtcttaccctgtatgtctgagtttttttggatacatcagttgtcaatccaagttgtacacgagttaatggtatgctaggttttggttgatgggatgatagaagaatgttgccgtactaagagatcttgttgttggtaaatgcacttgtaatgagggcaattcttccttataccgcgatacttcatgtaccatgataggatggagaattggatgttctatctagaagtttatatgtcaccatctgattttgtccatgttttttacagtaaatacagcagggaggcccccaagaatttttgtccatactgagtattgccacagatggttttgtatctctggaagtattatttattattgcatatttgtacttgcctttcttcaggttcttgacagctcacaaaagctattgcctccaga

SEQ ID NO: 8055 - DNA, 445 bp, Zea mays
  Intron number 1 from transcript GRMZM2G078030_T01 (locus G RMZM2G078030) derived from phytozome v7.0 (chr-ID 2; pos 1 83130425 to 183130869 reverse strand)
tagttgacaagacccatctatcatcttataacagagtatgatggcattaccgaattcaaaaggtcagattagttaatgtagtttactgctgtatatataacattgatgatgatattttgcaacatctcagatcttatacagcttattcttttcctgtcttcttttgacataaggagcatttcattttgatagtgtaaatcgaaatactgtcaagacagctgttaacgagcttttcaagaacaaatcaaactactcaacaattcatgacaattgtttatatgcaatacatcaaacttacaagtagtaaaaaaagacaattactactgaaagtgattaatcttttggaatttccaataaagacagttggtgcgtaaaatatggatgaaataatgctgcagtaagaaactataaatatgtgcagatcaaattctagagaacttatacc

SEQ ID NO: 8056 - DNA, 753 bp, Zea mays
  Intron number 3 from transcript GRMZM2G399598_T01 (locus G RMZM2G399598) derived from phytozome v7.0 (chr-ID 2; pos 2 18653275 to 218654027 reverse strand)
ggaacaaccattttagcagtaaattgcattgacgattcccctactaattttgaacacaattaaaggaaagctaaattggtaaaaaacttgtttccttggtttatagatatttagccattttcatgtcatgatggaaatggaaataaaaattctctttaattaaaccaaatctactgtgagtgtggtcgttatgttctcaaattctcctaaggaagaaacatgacaagttcagaaccacagatttctctacttgattatctgaaaaagcacagaatccccactacacacaaccaatgaaacttgctttgtaatcacccaactgaacatcacgtaatgatccagatctgcagtgtctaatcttactgaagaaactggagataggaaagtaggaacattcaatcaagtcaattcttctaaagaactttttcttcacctaagccatgtcaccctataactttaatcacaatccatactacaattgagtgaattcttcttagagataaaagatcttacgatcttgccaaaacagtaaagaattttaggtaccaacgacctgggatggtccagacagaggtcagttttgctttattttaattttatttttagtgatatacctacttttgtttgctcctgttgggttccatctctattctactgcctactctaaatccaacaatctataacctgataacatgatgctcctttgcttgtttagcagatttcgcttcattcaagattttcttttctttggct

SEQ ID NO: 8057 - DNA, 827 bp, Zea mays
  Intron number 4 from transcript GRMZM2G107718_T01 (locus G RMZM2G107718) derived from phytozome v7.0 (chr-ID 8; pos 5 3451057 to 53451883 reverse strand)
gcgagagcggtgatcgcctcacccgcgccgccaaggtatatatgcccattccccagaatacttctctgtaggttctacctgttgtttctttcaattcattccgcgctcgtgtgacctagagcaaatgtgtttgagtcgcatctagttgtgctccactagtgcacttccatttttgatgagaattagttctgcactgcagcctaatctcagctcctcaagccgtccaatctcctgtgttgttgacaccacttaaattgtgccatccaaatgctaagtagtaatatgattgttttcaacatcagctgtggttagttattgttcccataatttcaattagagactgatcaatggtcccaattttgcttttatttcttagctgtgtgaatagctcgaatatggtattgctttggatttggcagtagccagcaaggttgttcaggcttgagtaggtcgatgaagtggttttgcagaagttttaagtccccattttctgaccaaaacggaactgatggtggggccagtccgatccccttatcaaagccagtagtcacatagcagcagtagaccattcaagtgctcaggtgtctttctctttgtggcttacaggctatcatcagcacagcaccttactcatctcctatcttctgttttaaactatattatgtaaacagtgcaagcgatgagtgaagggtgactaataggcttctttaatcagcactgcagtatcttttgttgaattaacctatactcacttcattttatttatataatacagtccatttagcaaattttgtttgatgtgcagtgacacgaccttgacagtcaag

SEQ ID NO: 8058 - DNA, 976 bp, Zea mays
  Intron number 2 from transcript GRMZM2G093557_T02 (locus G RMZM2G093557) derived from phytozome v7.0 (chr-ID 2; pos 3 6593110 to 36594085 reverse strand)
aggatcgacgaggagatccggaagctcgacgagaagtgagtagatctctcctctccacttgtgacctttctcatgatcggtcaataggctggctgactggctcctagtgttgtatgctgcgagtgctggtgcatttagctctgtgaccgcgccgttcctaattcgctcggttcagtgataatttagccttgaacatcactgggtttgttaggcgctattactgtctttgggttgggtttgatttgctcgtagttgttccagttgtcttgaacgttgtgattagtacctcttgcacaggctggaatataatttgttttcttaaaaaatgtgttttgaaccttatgatctaactgaattgagtttgtttattagtttagccatagcaattagtctaactgaattgggtgtcgttgcactatttggccttgggggattctaatctctatgggtctccctctttatttattttcttctgcgtggttcgaaaaaaaattgtgcttgttcagaacattaccaatgcttgtatgtcatcatcaagtacgtggcattttgtacttgatagagtagtgtccatccatcatctagatgggacatggaaggggatgattaatttttgtgcttgattgggtagtgacatccatccatctagatgggagagggtgatcaatgattgtagatagagagaactcatgttcgcacatgcaaccatctagatcacaaggaatggtggataattgtaaataaataaatagagttcttttttgttcacaaacaaaatcaaacgctatactctcaagtaaggctgacattttgttcaagtaaaacaaaaaatgaaatcatggtacctagattctgaagttcatatcctctcttttggtgcatctgaaattctgtgtaccattatatgcctgagtgtcagtatttagtcagtagtaacttctattggttgacttttcttgtttatcaaggattgctg

SEQ ID NO: 8059 - DNA, 640 bp, Zea mays
  Intron number 2 from transcript GRMZM2G011178_T01 (locus G RMZM2G011178) derived from phytozome v7.0 (chr-ID 4; pos 5 6583081 to 56583720)
gatcccaatcatatattgcaaaagcttatttactggtaagaaaatcatcattggttactgaactgcatagttgacaaatctttgattgtttaatgctaccagtaaattcagttttaacatctctatttactcataaagttgtcccctaatttattagtaagaaaatgatcattggatgtcagagctgtttcctaggccttcagagaagtttgactagctttcagtcaatatatccacaattctatgttgtaaattatagaccattttgataacggtacaaaatatgtcttctagtttatttattggagtttgcttcctcttttcattgtggctgcattgcaactactactgctgggaaagcagcccaatgccaagatgtagagaaagcagcctgctgccatctctgtcttttatctttctagatgatgaattagcactgctcatatctactagaaatattatttcattcaacccatttagtattgtccatatctaaaatgtattgtaaatcttttaacaaatgttcaatcttcaatatatgtcatattgaaatttataaatccgacttgtacattatgtgtcaaggtctctattctcaccagattcattttctcactttagaaacaagagaaatataagg

SEQ ID NO: 8060 - DNA, 868 bp, Zea mays
  Intron number 1 from transcript GRMZM2G418689_T01 (locus G RMZM2G418689) derived from phytozome v7.0 (chr-ID 8; pos 1 64575230 to 164576097)
gcgtggcaagttcaggctcggattcttccgcccaggtaactctggcgcccataattaacttcgtgtctcgcggtactcttctttccgtatgtacgatagctgtgtcatttaaaatcgtttttttttttgctatagatgagaaatgtgtcggtaggtgtatacgtgtagtacactgaacaaacaaaccagtagctaatgatcatactttgcttgatgctcttagactgtctacggtagatcgtgtaaattagaggatttcaattataaatagatgatactgtttgcttgcagaataaagtttggaacagagaataaaatataagagctgctatcaacgtgataatgtaaacttttctaaaccctcgtcgttcgcacttccagaaatattagcctattaccagtacgggtaagagaaaaaatccaaggctggaaaatgttgacagacagctagcgtgaagacttcacaatcaactgaaagcatctctctctctctctctctctctctctcttaatttttctagaagcgcatctgtccgtgttcatattttcaatattttaaagggagttgctaaattgtagtcctctggtttttgttttattttcaagcactaaacaatatttatctaatacaaatccaacgatcagaacttatagtgaatctcactgctgaacacttttggctcttgcctcaatcaaatatgcaactaccgtaccgtacatctgaccgacaactgtcatcacatataaaatatcttttttttgaaaataaaaaaaataaaaatggtggatcatcgttcgattcatcatgcaatgcaactcttgttgtgtgcaaggtgcaacagacaactcgagccagcgctggtacctg

SEQ ID NO: 8061 - DNA, 984 bp, Zea mays
  Intron number 1 from transcript GRMZM2G162374_T01 (locus G RMZM2G162374) derived from phytozome v7.0 (chr-ID 2; pos 1 70456221 to 170457204)
cacaggtgagccattggaacttctgtttgattttttttctctcgctacaattgtttttgaagatgatctgagaagattttgggatcatagccctgatttcgaattcctttgtcagaatgtttcctggtagagtcagttagcgaagtccgactgatttctggtagacaccatgaaatctaaattcaaatatttccaaaaaaaatacgacttctgtctagaactgcctgtaattttttctttcaagagccagacgaaaaggtacggggttctaccttttgatggcctaggtttagtttggccatcatttatgtatgaaatatattaccaacagtacatgagtaatcttgcataaaaaacacgtacatgtaaataaatcattgaggtccactgtgtgttgagtttgaagcgatttagaccgtaagaggaaacggtacaaatactaaaagttttgtcaaaaacccactccacctgcagcttctttaggttgtggctgcggctacagttgcaaaaaaaaaaaaaaaacaaaaaaaaacaacagcaactaacatgtactgttagtaggtcgttattgtgacagctctgtcaggaaatatgattagaaatctgagccccaggccccagctgggatttctggttggtggtcaagtagcttgttcctagcggcctttttaaatgtcaagagatcgcgtccttgcatcaagtctgtccctactcacatgtgaaaactatcgagaaaagtggaatttatttcgggatttttatttttttatttttggtgagtgaacctccagtagatttaatagctcagaaatagcaactggtgcaacttctggattgctgctgctcatcacatgtcacagtttgccgctttatgcaacagtaaaaatatcattagaaccttaacaagtacctttgcaacaaatccttttactgacggctctctttgaatcttcgtttgaatttcacttttcccggcattggtag

SEQ ID NO: 8062 - DNA, 628 bp, Zea mays
  Intron number 1 from transcript GRMZM2G104047_T01 (locus G RMZM2G104047) derived from phytozome v7.0 (chr-ID 8; pos 1 47771924 to 147772551 reverse strand)
tcagtgagtagcccattttctacatgttctcaacaataccaatagcattcctgctctatgtacgattatacgtcatgttcctactgcaatgtgttacagttttcttatcctgatttcatttagagttttgcatgatgctatcattattttaaatagttctagcatatattaataaatgtgctggaaatggttgtaacctgtggagttcatagttttcctacttttgcgttgttttctatcacactgaacgatttaatatccatgtttccctttgctacattaaactctgttatgcttattatatatagcttacagcatggtatcttgttgcaaatttatatgaaaattgaaaccatatttcttgttctgatctattgccttgatagtcctggcctcctgggcctatctcagtgaagcagatggatagtatacttgaaagagctattttgctctatgccgaactgtttttacctatgtacttgttttacctgaacactacttatttgagttttattatatgtttttgggttgttttcttttcttttcttttcttttgctgatattgccttctaaactactactttttgaggcagaaatttcagcgaaagagaagtacaataatcctgat

SEQ ID NO: 8063 - DNA, 388 bp, Zea mays
  Intron number 2 from transcript GRMZM5G804718_T02 (locus G RMZM5G804718) derived from phytozome v7.0 (chr-ID 2; pos 1 40843997 to 140844384 reverse strand)
ggttcgtttgtagggctccaagcagttccaacgtaagagcatctctaataatgtctcaaactggtgcttcaaattaaaatatagagttttacataggaaaaactactccaacattgtatcattccataaaatttggtcaaaaaattatgaggcactctcaagtgcctcaaatatactatatcatagtgggctgttatatagtttaggtttgaggttttactgttggagcggaatgttttgttggtgccctaaattatataaaacatttgtgtgcttggaacaaactgtggtaatttccatttctcctctcaaaccagtcaatatttacattttctgtcgtggaagataatattgtagttctgacatactgtaattttcttagttgaca

SEQ ID NO: 8064 - DNA, 636 bp, Zea mays
  Intron number 1 from transcript GRMZM5G804718_T02 (locus G RMZM5G804718) derived from phytozome v7.0 (chr-ID 2; pos 1 40844337 to 140844972 reverse strand)
ccaccggcatcaggagtaggactgattaaattgtgtattttcgctactgctaacacgctattgttcttggaactgcaaattatttgtcgagaacctatatcttttgtgactaattttttttgagtaaccttacatcagggcctcggtatcgaccggttagtaatgcttttgacgaactcttctagcataagggacgttattgcctttcctgtcttgaagattcagcaatagatccccttcattctgtgaagagacgtggctgctgaagaaaacaccagcagccttccttttgcgcttggttcagtacagcaggttttatatctgctgacctttttatagctcatagatgtggctatttattatttgatgatgtaattgaggtgtactatagttcagagtccaagtcgatattaaaaactttatagatgttttaataataatggaatccactttttgcaattaatgtgctgcaaaacagctatctccactggatactctgattcttcagtgacatggttgccttgaactaccatttaagagattctttggtctatggactgttgtgttgcttaatgctttgtttttatgggttcgtttgtagggctccaagcagttccaacgtaagagcatctctaa

SEQ ID NO: 8065 - DNA, 744 bp, Zea mays
  Intron number 2 from transcript GRMZM2G703324_T01 (locus G RMZM2G703324) derived from phytozome v7.0 (chr-ID 2; pos 1 99447966 to 199448709 reverse strand)
tcactcctcgcctctttatcccttctgcttccgaggtgagttttcgatagtatacacttttaaacaataattcatctactactccatatcccatatacttttggacgggttttaggtcactcgtgggttttcttcgtctactttttaaaagaataattcaggtactactataaaacacatcaacaattatcctgtgtcagacacaaatcataagtatgtttccctcccctttcctcgcctaacaaaccacacaagataaaacttatcccttctactttcgggtgggtttcgggtcactcgttgttttacttagtgtacatctttaaacaataatttatctataagcaattaagtatcaatatgtagatatatctacggattttaaacattctcacgttgagcagcaataaaatatttcattaatcattagtgaagttgcttgttcaaactattgtatcttaatcatttttcacagaataaagaacaaaccatattttggttcgggtacgggtcacccgcatattgaaatagaaactcacacccgtgaaactttgacttagggtgtgggttacaccctcggtcaaaatcttcatctgtatctacatccatcgggtcggtatctattgggtttcgagttcacgagttaaattgtcgtccctaatatcaactctactattgtccacaccttctcgtaacaaatttgtaatgtcccttgcgaggataaattcccaaacaaagacgagg

SEQ ID NO: 8066 - DNA, 946 bp, Zea mays
  Intron number 7 from transcript GRMZM2G008623_T02 (locus G RMZM2G008623) derived from phytozome v7.0 (chr-ID 2; pos 2 13846246 to 213847191)
gctgcattagggaaggggagacaggctgcaaaaacgtaagcttacttttttttatttgttcttaatgctctctttgtttcttgttcttctgtcgcgaatgcttaaaacataatcaaataaacatttattgcttattgtaagagtgtacaatatattccttccaatcacaaataagtgatgttggcatggtcttaataagccaaaacactggagactggactagtactttttgttccaaaatatttatagaaaatagcaaaagtatacttttacggaactagatttcaacacaaatctacacacatctttttcaaatacccatactccatataaaaattaacgtacagccaaagtttagactgattgacttgggacaatctaaaaatgacacatacctgtgacttgagggattagcttgctgagacagaaagcaaaagagaaagtattgtcgttcaatagtatggattatttgatagctacaatattctttgttggatgtcaaaaaaatttaagccaatgttagcatattgtatgaaatagtgactataccattgcattgtggaataatctttgtgcatatgtttcgtgcttccttttgtgttcattgattagagttaatcattaaaatataggcaaggttcatttatataattggagttcacattttatatgttctcagttttcatgtatatccctcccttcatttccaatgaaatattggcttctaatataatccgatggagttcactatcggctttagcttttgtgttccgtaatcttgttaacaagaatgcttctgcaattactgtcaaatcaccactggatgttcttaattctgtgtgaacttctttaatcttatagatggacctcaaaatgattctgaacccaactatttgaatgtggtcatgcagtgagatagaaaagttgaaactttcagagcttacgt

SEQ ID NO: 8067 - DNA, 712 bp, Zea mays
  Intron number 1 from transcript GRMZM2G162310_T01 (locus G RMZM2G162310) derived from phytozome v7.0 (chr-ID 2; pos 1 2890604 to 12891315)
caagtattgggagacaagtaatattactcttgcaggtgcatgcttcttagagcctcgatacaagatgaaggtagttgaattttattatagtgagatgttagatgattatggatttgatgatatgtatgaattcaaaaagttttagagaagatttatgattcttattccgacatctatgcttcactggatactagcaatgtgcaacaacctacagatagaactagcagaagtactagagcttctcattactatgtggacttaaatgaggagccaaggagaaaaagattaaattcatttttgagggacaatgaatctgaccaagtgaagtctgatctagataactataccagtgagccattattgaagtggaaagatggtgaatcttttgacattttaagttggcggaaagcacgctgtggaaaatatcctatccttgctcgagttgcaagggatgttttggctattcctgctacaacagtagcatctgagtcagcattctcttctggaggaagagttgttcataaatatcgtagttccttggatcctcaagttgtcgaggcacttatttgctctaatgattggataagagcgtctaggataggtcattgccacttctatacttctcagtattgtgtatctgttaaactgaaagcccattcaatggatgaatcactagtaattttttgtgtttatttatttatttcagatcgaa

SEQ ID NO: 8068 - DNA, 1001 bp, Zea mays
  Intron number 4 from transcript GRMZM5G880317_T01 (locus G RMZM5G880317) derived from phytozome v7.0 (chr-ID 4; pos 1 9844329 to 19845329 reverse strand)
gtagcccattgctgagaccactgttgaaattgaaggtgcgtctcttgttttttagttttttggttgttgcgattgtgggaatcctcttctttgtgccactggctgactagaaaagttgatgatgttatcaatgtgaggtaattcagctacttattttattcattcttctgcttaattttaattcatgagagatggtttaaaggggctgccataatgtgagcattttatcttcctttttaaattctagcggacaccagaagttgagtagcttgctcgattcttgattcatcagtagcctgtttggcatcatgagagagtattagctcatcagtaagcctccatcttctattctattcaagtgagattaagactatatggaagggctgggatagaagagttcctagaaatattttggcatcctatcagtattatcaattactttctcatgtttgcacaggcctagtgtctttgacatcgtacttcaccataaaattcaagataactcttgtacaaagattgcaaccatacaactttagcctactttaactgttatattaagacagcatcattctgtatcattaaaaagtatacaagtctcttcagagatgtcttctaagctcttcagcaagttatgcgtcaaagaagaaatatgataggaattttgagtctcttttctttgttccgcaatttgtactctgatcgttgaagcatagtctaagtactatgggtgtgttgtaattggctatactcattcacttgtgaatgttgaggccaagatattatagtcactatgggtctgttgtaattggctatactgcattagtaatataattctcattttagccacccaacttggaaccgaacaagctctatataatacttttattgaactttcagtttgtattttctgttgggagtttatagacctgttgatatagtaattgacaaattattgaaatatgttgtagggaagaggtgctggaagcaaggatcagagtgct

SEQ ID NO: 8069 - DNA, 1015 bp, Zea mays
  Intron number 3 from transcript GRMZM5G847530_T01 (locus G RMZM5G847530) derived from phytozome v7.0 (chr-ID 9; pos 2 6593607 to 26594621 reverse strand)
acgtgggttttgcggttgccactgcccttattcaggtataagttttttttttcttctagaacactcgcttatgtcttcatatgtgcaaccatcttgttcaaatagtgttgaaagcctcgaaacatggttaggggaattcatctgaatagcctggagtgtatactatactatcccgcatcagccaatgttctttcctaacatgattccgcctggagtgtatactatactatccatgtggatttctagatttcggttttggctaaacctaacatgggacacgccaaaacacacggccttgtcgtttgattgtgatatagcagtgggtaggtaggcagtcatcagctacatgcacaagaaatattatgagaaggctgctctgctaaagccatcaactgatatgttgtgtatgtaattctaagttgtggattgcaaacggtcaaacttgcatatttctgctctgcctaactgttggcaaccttactgcctgggtgctgtagtgatgtgccttcagttgaacttttgcaaaattctgtatgctcttcagtgtttgactggaaagatgaacttatcgtccttattttcttatgctcttgctttgtcaactgtacattcttattcagtttgcaactcttctcagtcactggttacaacacagcagtcaacttgcaaatctcagctttatctagccgttggcaacctgattgcgtggatgttgtggcaccgttcttaccactgtaacttttgcaaaccgtatgttcttcagtggctgattggatatatcaacttgttagctgtcattttctcaaaaaaaatcaaagaattcgttgtccccaatcatggttcttaggtttgaggacaagctatctttgcgcacttgtgttgtcaactgaacattattatttgagttgtttctgcaacatatctagtaatcgcccttggatgctagtagaaacgaaacaccttcagagatttactggtatgctatttattgtggaaaataaaacaggttgcttac

SEQ ID NO: 8070 - DNA, 682 bp, Zea mays
  Intron number 2 from transcript GRMZM2G117900_T02 (locus G RMZM2G117900) derived from phytozome v7.0 (chr-ID 2; pos 2 05770716 to 205771397)
tgaagttatctcacgccaagcaacaatcaatattggtatggatgcaatctgtttaccatggttgtatggttctcggatttgatgtcagcacacctgatctattgatttattttgtttcttttaagttttcttatgcacaaaaactattttgatctctagaataatgatccagccattcgtcactagcattaagctctttgtgtgtggcaccatgcaatcctacatttcatgcagccctgtacctcatgactaataattcttgagtttcatgtctatgctattacttattttctgatacttaaaatgttggacccatcctcttccttctggatgcatctgcttaagctttttctcccgaactgaaatctcatgtgtcatgttcacctaatattgcgatgaaactttgttatttgttgttgtcccacatcactacttttactggtaagatatgtggttactttttatatgatgatttgtgtctaatagaaatgtacatggtgcattctataatgcatataaatacaaaaaaacctgtgattttatgaacaatcagtcacttttgtttgtaaagcttattatggatttggaaatggcctgtatatgtattcaaattatgcgaaatgagaactcctgcgatagcataatatttttttttctacaaatatctcaggtaccattggcc

SEQ ID NO: 8071 - DNA, 862 bp, Zea mays
  Intron number 2 from transcript GRMZM2G121783_T01 (locus G RMZM2G121783) derived from phytozome v7.0 (chr-ID 8; pos 1 71205240 to 171206101)
caaacacaccaatagagcttggtcttggtcttcaggtaacccaacgtccccggaccgttttctctccccttttgtcatttatttcaacattttcatttaagtatctgcaaagcatgttcccgtattttacatagttagccttttgaagttctattttctatggcaattagccataaccataaatcagaaaaggaaattgatacataactaacctttttgaatatttgttttctatagcagttagctagaatcgtaaatcagaaaaggaagtgaagtgcacagcttgactcttacatgttgaaaacaacacagtcgataatacaggtccttttgactcatcatgagaatgccattgttgactcctataatatgtgtggctgtaatgactaatgagggaataaagtttggaggatgaactgtgaagactaaactgcattgagtgtatttgtggcactaaagtgctgtctgaatgactggcaatatctttctaagtgttttatgacttgtgacgggatacagtgaaatttagccagaagccttggtttagtgcatttgaaaaaaatgctaggttagatttgaatgtaatgatacacaaatagtttatttggatcatcacacattgctgtagtgtgcatcttactcgtaaagctgcttccaggcttaatcacatactacttttcagttgtaacaaacatgagttcaggtttatcggtattctgtattccattcatgacatagaaaagagaaacctgcctggcttccattacatttacaatactagaagtcagattcagacagaccatcatggtgcttttgtttccctgcagctgtgctttttgcacccgtcaaaacataagtttga

SEQ ID NO: 8072 - DNA, 534 bp, Zea mays
  Intron number 1 from transcript GRMZM2G180372_T01 (locus G RMZM2G180372) derived from phytozome v7.0 (chr-ID 8; pos 1 61789794 to 161790327 reverse strand)
gcgggcagagttgaaccccaagagcccggattctggtacgcgtgatggatgggtgtttgtttttttggtctttttctgaagtgatgttccgattttatcttctataatcagttactgttgtttattgaagatctttggaggtaaagattccgtaaagagcagatgagcagtcagttctttacgttaaaaggaaaccttttggtttgtttattcatatactgggctcttgatttcaggatttggcaacgaaatcattgcattaatcgcttctggcgatcagttagttttgtaggggcgcggatgatcttgaacggaaaatgcttactgattttggtttcttgtaatggaaaaggagtttttttgtccaaaaatcaattgctacctcttgaattatcaacctgccaagtagtaaataatcgttctgtgtttctgtttttccttacttctttgattagtctcttagctgaaattcgtcaaacgcgtatacaaaaattactactattttatatggaatttaatttccaggtagcaagg

SEQ ID NO: 8073 - DNA, 807 bp, Zea mays
  Intron number 3 from transcript GRMZM2G165836_T02 (locus G RMZM2G165836) derived from phytozome v7.0 (chr-ID 2; pos 3 8560577 to 38561383)
gcacgacagggttcggcgccgagtcggagagggaggtgccgacgggaccggaccccatccaccaccacgcccgggggccaaggcggcagtcgccttgatcgtcatgcgcgcgcgacacggcggcggtggatcctcgcttcctggaagtttgtggtcttgatcaggcgggcgtgaaccggattccacgatgatcctgctctttctttgttcttaaatgtatctgccatgcacctttggttctaattccattgttgtagtagggaagcagcatccacctatcaactatcatcaaaacccccctatgttttggcgtgccaattagagaaagggaattacagcgcgattcatataataagtgtgtacaatgaattccacgtatgagttgttctttccctcgtaattttgtcatcttgttttgttgctggttcattctttgattgatgttctgtctgtggttgctggctggtttggtttataaatgatcggcttgccattgaacgtctttgcattaatgcctgattgttcaagttcatattgtgggatgggaagcaagaacttccgtgttttttttttctgctaatcccggaagaaagcaactttgttcggttcgttgttttggcagagaaagaagtacgctgtagtgaggactaactactgtatggggcctgcgcgccgcttgtcttaaagctaaaaggggttatttttatataaaaattacgaacaggatcgagttcatgtctctttatctctggactgcttagcttgatttgcttttatttgcatcattatcagttcttcttgcccaag

SEQ ID NO: 8074 - DNA, 759 bp, Zea mays
  Intron number 2 from transcript GRMZM2G134687_T01 (locus G RMZM2G134687) derived from phytozome v7.0 (chr-ID 8; pos 1 03368142 to 103368900 reverse strand)
caccacctaccgacgccgatcctttcattcccaaggtgaggtcagttttaatttgcgtgtggactgtggagttcttgcctgtttcgtcgtcgcttccaattcaaaaaaaatgttttttttcgaaattggtgtgtggttaatacttaacactaatcatttgacctgctttttcgttcggtgcttttactttggtcgcatgatttgtatctatatgcaagatgcggatgcctatttttcctttttcttttcagatctacacgagctagggttcgctttttggcacacatttgcgcaccaccggacatgtacaaaaagccaaactccagaattcctctccttgctagatataccatgttctccatcgtccggattctgcaagatctttgcagccctcggccatcagtcatcaagctaaagtgatcaacttcctttttgctaaacaatcactcagatctgaactttaatttattaagcacttgatcgctcgtacctacaccaaccaattaatattgaacttcttcgttatcgcgcgccgtctcttctcttaatttctgactctttgctgtcaatatatgaactcgatcgtctccttgaatgttcggtatgtgctgatttcttcggtttcctagagtacatttctttccatttatctttccaagaagaagtgcatgcatggatactgaccatttatttttctggcggtgcgtgataactgatgatacagtccgagatctctctctgccgcgtctacaagcgctc

SEQ ID NO: 8075 - DNA, 407 bp, Zea mays
  Intron number 3 from transcript GRMZM2G305864_T02 (locus G RMZM2G305864) derived from phytozome v7.0 (chr-ID 2; pos 1 90845450 to 190845856 reverse strand)
tggcctgggccaattcctagaggttctgctaggaggtgagttcggtaacataatattgttgtgtcctcttctaaattttggtgttgaaaacagtcaaactactgccaaatgctgctctctagtttccatgagttcctgaagtaatgatccttgttttattagattacatgtcctttgaatttactttaggaaatttcaatttgaagtggagtaatcacaataaactgacatattctcctgttcagaaaaaagtgaaagaaaacaaagaagtggcttgtgcaatacatgctcactagatcagaattcagaactgtaggccgttctcttaagatattatctagctctagtgtcttgaacatctcatgaaagttgtttcttgggttcttttaggagatttcaagcactgt

SEQ ID NO: 8076 - DNA, 927 bp, Zea mays
  Intron number 2 from transcript GRMZM2G091143_T02 (locus G RMZM2G091143) derived from phytozome v7.0 (chr-ID 4; pos 1 76466233 to 176467159)
tcgggcttgctgaacgtatgtacttgcacaagtatacttgccattgggttttcttgccaccattatgtattcatgttgaaaggcaggcctggtgtagtggtgagagctgtatcactgagtcactaggtcatgtgtttgaagcagcctccgcatttgtgggggaaggattgcttcgatttacccctttttcagaccccactcatgcgggaccctccagcacttggtctgcccattatgtatttatattctttccatttgtttaccacattgggtctagaatggatgtttttctttggtgaaagataaatttctacaactttagtcgtcagcagacaaatctttttagagatttcatgcaagagttatatgaatggaatcatcatcaaaactacattgccagttgtcacaacaatatttgtaatgttcgatatatgttacttatattaggtgaagtcaaatttgggcactgttagacagccatatttttaatgtttgatatactccctatgtctttttgcctgttatggcattgtactgtggtccacttcggacctttctctctttcaatataatgatgcacagttctcctgcgcgttcgagaaaaaaaatgtttgatatacggtacttgtattaggtggcagtaaagtttgtgcactgagactgtaccaacagttaaatcagggaagatgtattgttttgttgtgatctggtaggtcatttgcttgtttgtacactccttttttttgtggacaacaaatgagtattacatcttgaactctttgatgactatctcctactcaaacgtctttaggggcctgcttatctcaatatggtttgcagtcttaactcaatattatgtttattttttactaactcattttttccttggcagtcaaaccttaatagttcggcatcaaatctttcaga

SEQ ID NO: 8077 - DNA, 1020 bp, Zea mays
  Intron number 1 from transcript GRMZM2G133854_T01 (locus G RMZM2G133854) derived from phytozome v7.0 (chr-ID 2; pos 2 2631715 to 22632734 reverse strand)
cagttaaagagactaaaaaagtatttcgctcagaggtagctctttaaggtttcagttttttgtccacctgtctctttacttgcatttccatatttgatttgaaacaatgtctatttagattccacctaatcttgcccactgtatgcatgggctagtccaacttctcataagaacctggcgtatatcatataaaaaactagaccaacttatgaggaactaggtggcatttcataagaagaaaataggcacccaaactcacctcgacgaaaacttgaacctgggaggcatacatccacatccttgtccaactgaggtagctcagctttctggcttataccatatcaggcaactgacatgtcacatctcccattagttttgaattttgatgttaagtttgtcttttggaaaaagaaagacttgatctatcagaagggtctttgcgcgcttagtatttgcacatattcttgctaaaaatgagctgttattcatgtccatcagtagttatagaatgcatactggctaaacatttttgccacaaaaactcagagctgtacattgtagcattccaacaattttgcccctcttcaagtgaacactggtgatggagtgtgataggtgcattgtttttacatttttgggtgccgaataaattttgtctctcttggaactaaaaggctttgttattgttgttatttcaaaactataaagaagtaatgtgtcttttccggcatcttaaacaacctgtgcatccttcttgttgcatgataggaaaagcctgtttttacttccccaacaaaatctcacttcatataacatttgagaataattccaaagcataactctgcattggtttcactgttctgattaacaatccaagagcttggttgggtttatttcctgcttagttctaacaactggcttttgtatgccaaatgaaggtagcaagttgtatgagagaagttagtttttgcaatttgcattgaacattacaataatgttgttacttttgacatgttaagg

SEQ ID NO: 8078 - DNA, 831 bp, Zea mays
  Intron number 1 from transcript GRMZM5G806108_T01 (locus G RMZM5G806108) derived from phytozome v7.0 (chr-ID 2; pos 5 1283998 to 51284828 reverse strand)
ctgcttttgttgcacttgtgagtcaagggaatatatctaccgttgatacagctggttgcttttttagtgttcaggggcttagtgctcttcaaggtttgcatatttgataaatcaatttgcctcccttttctgtagaatggctagtgtcattaaaaaattgtggtaaaaaattcttttagattctgtaacctctctctctctctgatatatgacttctcttttaattaagtggatcatataatgtaacctttaacacataaagtgtggcacctcatttcccccatcacttgatgctagtaaattgaacaaatgcaaaatgattgttgtggatatttcttctggctcaaacaaacttatcataccaaatgattgctctgaattctatgaagcaagtttatccatgatagtttcctgtatacatattcaacattaggtatgcgtcttaatctaaagattcataataagcatatattagtatcaatgttaatttagctcttattgtaatagttaagcatgagcatactgcttttttataatctttgtgtacgttttcatagcaaaaaatatctatttctatatattagttggtaagatgaaactattcctttacatctgcttttgttatgcaaaactgtagctgtattttataataactgttgatttgcttccttaacgagttaggtacttaggtgtactaaagtgtgttctcccataagtatttgtttgttgtagttctgtagtctgtaccttgaccttgtacatgatatggacttccatctttgaatttataatgcagtgaacatatctggaccagctccaactggacttgtt

SEQ ID NO: 8079 - DNA, 958 bp, Zea mays
  Intron number 1 from transcript GRMZM2G047588_T02 (locus G RMZM2G047588) derived from phytozome v7.0 (chr-ID 8; pos 1 34065200 to 134066157)
aagattgcgctcggagcagctaaaggcctcgcgtatctccacagcgacgaggctaaagtcatctaccgtgacttcaagacatctaatgtccttctagatgcggtttgtagtattcactagtcttgttctttggaacagacagtagtagtagtagtagctcccttgtttttggttgagctcatcatagaggtggatgtttttttttctgcagaacttcaatgcaaagctctctgatttcgggctggcgaaggatggtccgaccggcgacaagagccatgtctccactagggtgatggggactcacgggtatgcagctccagaataccttgcgacaggtactggcgtggtggtggttctagattccaaataatcactagccatgaatcacactcaaattgttgcaattacattgctgaaatctgaccaaatctatctcaagcatgcatgattagattttagcaaatgtttcattcacactatgttcgctgttctcatactgcttgccattcttaggagtcattttgaacctaacaagtgccattttcccctcgcgaaggtcatctgaccaccaagagcgacgtgtacagctttggggtggtgctcctagagatgctgtcagggcggcgggcgctggacaagaaccgcccgaacggggagcacaacctggtggagtgggctaggccatacctgagaagcaagcggcgcatatttcgcatcctggacccacggctgggcgggcagtactcccttgccagggcgcagaaggctgcggcgctcgccctgcaatgcctctcggtggagtccaggcacaggcccagcatggacgaggtggtcacagcgttagagcagctccaggacaccaaagaaggaggtaaccatcacctacagaagaggccaggcagccggagcttggataacaatggcggcaaagcggcagggaaggggaagcctgctcctc

SEQ ID NO: 8080 - DNA, 510 bp, Zea mays
  Intron number 3 from transcript GRMZM2G031837_T01 (locus G RMZM2G031837) derived from phytozome v7.0 (chr-ID 2; pos 1 89220199 to 189220708)
ctgaggttcgattacagaggagtaggggagggggagccctcattcaagcaattattatacatttgttgtttcaatatgcaagtccatcattcgatttaatctcgagatttcagtacatcatttgttgtttttcagtacatcattttattatacatctcagtacatcattcgattaatctcgagattttaatatacaggtccatcattcaagcatcatttgttctataaatcaaatttggtgcttttcttttgtagtttttttacattttatatataggtttaacttagaccgttaggtcttcataaaatctaatggtgaatatttttctccttttctcgattaatcttgagatttcagtaccctctccgcgcaagtggatgcttcttttgactatgttgtattaatataaatagatacattcctcgtttgccattaatgacttcatcctgtgcgttctctcgatgataaacgcaggtttcttaaagcaaggaagttcgattccgacaagg

SEQ ID NO: 8081 - DNA, 643 bp, Zea mays
  Intron number 1 from transcript GRMZM2G081940_T01 (locus G RMZM2G081940) derived from phytozome v7.0 (chr-ID 2; pos 5 2677811 to 52678453)
tgtcgcaggtgagctcctgttccgtttgtgtgccgatgccgttatgttttataagcggttgatgatttcgtggacgaactataggcgctcggattggattctgtgtgtaggcattgcttgtttcatgcagagaacactgcatgttctgattgcttctcatgctgctgtacttttactgctttggagctgggagacaaaatggttgtgcataattagaagaggaatacatgggagtttgtactgaagctatcctccttttctgcacggatttcgtatgtactaaggcatgacatggctctgaggctttgctccaccctagaatctatactccaaaactttaaggtgtagcagagtctattgttttctcatatcggataaatatcttcaaactctatatctaggtgcttctccaaaaacttatactgcacctcttaaaactgcatgaaagagttgcatgaagttggggtgtttggctggttctggctagctcctcctcctccttggagttttgctctagagccatgcaaaacaccccatcattccgcgttgatgcatatctagagtttgagtgtgaatgtatccaacggctgtaattaatacaaataatgacatgattatttgtcttgattttgttgcaggaatc

SEQ ID NO: 8082 - DNA, 655 bp, Zea mays
  Intron number 2 from transcript GRMZM2G340143_T01 (locus G RMZM2G340143) derived from phytozome v7.0 (chr-ID 9; pos 9 0960205 to 90960859)
gacagtacgaggcacgccacccagcccgcagagaggtaaatattatttcactactattttattccttagttttgctgtggaaatatccaactctgcgttcgtccgaaatatcggcagcgccatttgtgggcacctggatactagacaaagttatatggatccttcacaggcatgggctaggaagggcatcagtttgtcccatgctcccatggttggaataaataaatactagtaccacctataaacgaatggggataacattttctttgtttaaagttcaacatatttttctttgttacctgatgtaagtgcatttgttcattgattggaaacaaaaaaatacaatgtgttacttcttcagtcacgcactaaaattgttattatgcaaagctggaaactggtagctttaagtatggaaccaattccattccttccggtgatgaaaaaacgagcttttctttcatttgttctcttgttattatttctcctgtcattactttcgccaccagatttttggttttagattcgtagctttcgcagctcagtactcagtatttctttccatttcggcagttgaaaccttatcagactagatctgtgatggctttccttatcattgtacagggtcatctgcacaccaacagggtctgcgaca

SEQ ID NO: 8083 - DNA, 741 bp, Zea mays
  Intron number 1 from transcript GRMZM2G027535_T01 (locus G RMZM2G027535) derived from phytozome v7.0 (chr-ID 8; pos 1 72978935 to 172979675 reverse strand)
accgacacgcaggtaagagccagtgtcatcagattggaacgcttgaactgtttattttgttgctttaattcatagatggtggaacctattgttttggtgcgattgtgtgctcattttgttgcagtagactagtactgggtaagggaagaatttgagggttgactttacttgcttattaagcttgtttgtctacaatacggtattctcttgctactgaaattacggtttctagagtgtaactaaatggattaattatatacatgccactcaacttttgcaaaattagatagcaagttcattttgatgtcattgagtggcatccaaatgaaccaactacctaatattgcaaaagttgagtggcatatttctgatgaacacccctaaatggatctattcatcttaatttagcatctggactcaagtcattattagccatcattgttcatgttgaaattgagtagattttgcatatatttacaaagatttctggggaagtgttgtttgcaactggttgtaaccatacttttgctcaaacttgcaagtgggtcagagttgtttttggagttgacaactataggttcaacatctgtgagtcgaatgagttggcacaattttgcatgtcattccttcatgtatcatgtatgatgcatgtccaatattctttagcataccacgctgattttctcagtttcttacctacatttgatatgcttctatgttttttagattttgaactatcag

SEQ ID NO: 8084 - DNA, 609 bp, Zea mays
  Intron number 2 from transcript GRMZM2G053952_T01 (locus G RMZM2G053952) derived from phytozome v7.0 (chr-ID 8; pos 1 28203809 to 128204417 reverse strand)
gctggtgcgcgtgcgacatgatgcgcggaaggaagacacgcgggctcgctggcgggatttccggcgacgatggctggcgcgcgtgcggcatgatgcggggaaggaagacgcgcgcgggggcacggatgctggtggacgccctcgctccacccttagtagtagagataagcatgttctttacagatttttaattattattctctgtatcatatggtttacatggggttgctttacgcaccccctgagattaacagtggaagtaacttttttgaagacgcaagtcttaagagtactattgaagaaaaggaagaaatagaggtttaaagagatatgcaagttatgaagagtttcaagtgtatctctaaacacttatgactgcaaggtcagcagcttagtgcctgctttacctttgagattgatttgtgtatcgactgaaattgatttgtttgtatcaccattcttggaaggaagagttcgcaacatcttgatttgattgtctctacagaggtcttctccttaatggttctgaagcattgttgcttttagtgaaatactaatttgctttctgttttagggaacctagaggatttgggttcatccaatactttg

SEQ ID NO: 8085 - DNA, 1004 bp, Zea mays
  Intron number 1 from transcript GRMZM2G059026_T01 (locus G RMZM2G059026) derived from phytozome v7.0 (chr-ID 4; pos 1 6234564 to 16235567 reverse strand)
tcgacctcccgctcctcccgttccagcctgcggaggtaaagatattttcggatacgatacttgtccggttgtttagatttcagtcaaaacccaaacctttagtctgcggttgccgactttgatgtacattattcagagaagtggatggtctattccatcgagtgcaatcagtatcagttggtccctgaaaaatgaaccacagaaccaaccatttctgcgatggtgaaccagaattttgcattggctgcaccgcgggatgtgtttcttttgcaatgctgaatggagatgctacagtaaggtttataaaacaaaggaattgcattaaacattacagtctgaacccttaaaggcaggtgagacagggagcaagacagcaaacagctagcgacgaagggataggattacataacagaagaacaacgcctgcagacgcaacgaaaaactgacaaagtttgctctatagcccagagttgatgttcttcagcgctaaggcagacgacagtagcatctgtttccaaatcttttctgaattcaagcattttaggtaccgtttggttcacatatttgtaacgtaatgagtaagtgataacgataaatcatgtttgttttagttcaaccgtaatcagataccatactaaaaattgataccggactattcaaacttgttaccgccagtaatcgagtgtaaaccattaccattaccctttacgttacatttcgtgaaccaaacagcaccttagtatttccagatattgatgttggtgactacttttttatcttattttatctagcagtatcatatggattttctaaattgctataagttccttcaatcagttgttttcattattttttgtttttgaaacggtgcaagagagttgcatgtcatttcattagtcgaattaatcagcagtttgaattatcagtaaagtctgttgggattcagctaatataatgaaaatgttataggtgttgataccatctgaatcgaagactctacactt

SEQ ID NO: 8086 - DNA, 931 bp, Zea mays
  Intron number 1 from transcript GRMZM2G058522_T06 (locus G RMZM2G058522) derived from phytozome v7.0 (chr-ID 9; pos 1 29276667 to 129277597 reverse strand)
gattaagcgctttgagcgcgctagatacgtgtcatgttagtgcctactgcctttgtttagtgctgttgcttgttctgggattgggatgaatggtcgtgtgtatattacctaccttggattcctttatgctactcgtcgtggactggtggtgtgtgctgttcgtacgtagactgttgtggaagtgttagctatagatttttgtgtgtgtgctttctgttgtgtttagctttgatgaaacggatcaccactaagccttcagttttacccctggccaagaatacctgatgaaagaatgatatttcaaaggtcgtactggtatcactattcgtgccaagaaaaagtgtggctaaatcatgcagtttaacttctagaagttcagatgtcatagcatcatgatgtttgggtacccgtgtcctgttatggtttgtgtaggatgacttggactagcaaggggaccagtctaaatcacctctaccttcatgattaattttttgaagttcacttttgagaatctgagttgtgtgtattatttgtacccaattgtgtggtgtgattctcctagagttgtgttgttcatgtggcaaagttcatgcattttgttttttattatcttgaataagtgtacaggtctgtgtggtctctagtatgtggagaactggaaagagccacttgcaacatagtgatagtgtctcatatttcttcgtggttcacttttgatgtcttgatgtcacaaatgaaggcatagctcatatcttttgattaaaatatttcatcttccacttacgatgagattatgtagatgctctatatatctaggggttaacgtccaatatgtactgaaatatctcactgcttgcctgtagtttgtgttactttaacccgtactgaaatgcccagtgacttgtggagttgtttgcagatcacataaaca

SEQ ID NO: 8087 - DNA, 819 bp, Zea mays
  Intron number 2 from transcript GRMZM5G864266_T01 (locus G RMZM5G864266) derived from phytozome v7.0 (chr-ID 2; pos 2 34008986 to 234009804)
gaaggtctggttggcccatctcgtttagcgactagttcagtttgcccatgacattattgcgtatggcctgtcaactaggttgttgatgttctgtgccttgtggtgtgtagatactcagaccagctgcctagataggctgcattttgctgtctcctatttgctacgactttttatctgattgctgttcatgtgtggtgtttctgctaccctgtacactgattattttttaatcttttctgcaaatggcgtccttgtaagtgatgtggccagagttgtcactgtacaataaacatcatgattgtttatttccttgttctacgatttggtattgctattctgtatggatttacaatgtcttatgtagtctgtccattttgttatgcattcattgatatcttagatattgtgtatgtaggtgttactagattattattgtactattcccgaggtgttaagctgggttaaagctggatagagtgtgtgtactcacacatttgatgtctttatgttgatggaagcttttttaattgccatacagcaattgcaggattgaccgtagttgtgtttgttttcatatgcaaaaccacattggcatgagaactctgagcgtgggggtgcattttgcagtaggttagagttgtttctgcttgttctgacaaaacgattttgagcctttatgcaccataaacttggactcctttaattgttttctttgctgcttttgttttgtgatattgcatttgacttcatcagctatttatggtttcttctttcattgttccagttgtgcctgctgagccagctgctaccgtggagaac

SEQ ID NO: 8088 - DNA, 800 bp, Zea mays
  Intron number 2 from transcript GRMZM2G176977_T02 (locus G RMZM2G176977) derived from phytozome v7.0 (chr-ID 2; pos 1 71066856 to 171067655)
attgccaggtgcttgtttcgtttcgggctgtgtaggtgctcggatgctgatttttttcttctttcttttgtgatgaattgtactgggccgatgaaaccgtatcggattgggttctctgacgaggaaatacataactaataaatacacatacactgagctgaggttgaccttgcacattcctgttgatagagtttatattgctgtcagcaggttcagattagtttgtgttgtgctagtaactaatgcagagcacagcgagtagcaattaaaactgtgagttgcagaggagagtgggtgtattggttgctcaatcaatctatgttggagccagtaaacattcttctctccctcctgcactggctctagatttgttccttccatctctttcttaactcttgcctgacatgattttacttcattcacgagttgaaactttaatcagtataaggcagaagccaaaatgatcatgctagctaaggaacaactgctctaaatgaaattactgtttacatggcattagcatcagtatgttcaatccaatatgattgttgctttctggaaattcggctatgatatacatcactccgattgtctttatagaaggattgttctgtttctgttaaattgtttggaagcaattagttattttggaagtctaattgatggatggatatctttgacatattgttattctcgtgataattttgagtctcttggagacaagtggtatctgtgattctagacaattcattatatttattttgactacatagctcatcgctacaggtcagtattcaaaa

SEQ ID NO: 8089 - DNA, 972 bp, Zea mays
  Intron number 1 from transcript GRMZM2G111511_T02 (locus G RMZM2G111511) derived from phytozome v7.0 (chr-ID 8; pos 1 72462867 to 172463838 reverse strand)
gccccaacggctgcggcaagtccacgctgctcaaggttcttcctctgaactaggagtaggtcgagaaggcaacatctcgtgtttttcactcccacttcattcgtgcaggcctgagaattgaaattggaactgaatttatgagactggtgattgccttaagagattggtttagcacatctgttatcttcattcaatagtaaaacgtggaatgcaccctgtttccgccaattttgaaacgtagaaaatagttttctgctgtgtagtggctaattcacttggtagatatgaggtagactggcagatactgtcaattatgtctgacattgtttggttttttttcgattggaaatgtaagtaggatgcggtatggatagaatcaagatccagcccatcaacctcgtgagtcgcgagtacagttttttggggagaatgggtagttgaacttcatgaaaatgttcagacaagtcgttgtaccgttttggggacccaaaattctcaggaaaggtttcgataacttgtgaatgtgcatatcattttctatagaaagtccacattaaaagccaataagaaaatctaataaaacctttgttacagatgtcacaaatgtcaattctgcatctcttttgaggtatggtgcatcatcacaaagcaataaagggttgagtcctggagtacaaatggcagtacacagagttaatttgcacccattgtttttggaccagaatatagtttctgttaattataaaaaagatctagtggctgttacattcatgtggaagaaacaaacatgaattggttttatctacttatgcttgtaaagttgttagctacatgcattgtgctcatttctgattactaggtaacaaaactttgagaatttatttgtccatttcttatcactgtcactgggaataaatgtcaacgccgtgttttttaggttttagcaggttttcagaatccaacggccggtac

SEQ ID NO: 8090 - DNA, 819 bp, Zea mays
  Intron number 1 from transcript GRMZM2G016705_T01 (locus G RMZM2G016705) derived from phytozome v7.0 (chr-ID 2; pos 1 4526622 to 14527440)
ccgttggctcggtaaggactcgattatttggttagtgccaccattaggtgttattattgtggtggtgggggtcctatagttctatgagcaactaagtggcagactgatcttaatttggacggacaatttgttgaattgattagtacacagtgccacagtgatagtacgaacctagtgcctatatagataggatgaagacacaatgtacaatgcatttgtgaatgtgatttggcatcccctgtttctatgtccgtgatcctcagcgaaccttcaatttttttcagcacatcaggggttgaaaggtgtagcccttcttctttctgaacatctgccctgccatttgtaagttttattagggttgatggcccaatatggtctggtatctatcatctatggatatggacacagatagctacaatgttcctcatatttagattcgaatatggatagtgtcaactgcgtcgaataggataagaatggatatcaacattataatgcgatttgagtatttatatacggatacagtattggatattgaatatacagactcggatacggacggatctgaacttctctaatagatttgaactcggttacggttggaaaatatccgtacaatttgcatccctaattttaaacaatacatgcattttgtttatttgttattctgtgccttcctcttcttcttctagcatagaccaattaccatttctgctttaacatgttcatccttgagtaccagtaccatgttgtgtactttatcttactttctattttcatacagatccagaaaaacattggcccaaattttgttgctgg

SEQ ID NO: 8091 - DNA, 1035 bp, Zea mays
  Intron number 3 from transcript GRMZM2G348866_T01 (locus G RMZM2G348866) derived from phytozome v7.0 (chr-ID 2; pos 1 43048264 to 143049298 reverse strand)
aaccggcgcaacactggtacggacgacttcctggcttgcgtcttgggtcgttggtttgtttttatgatgacccacctgtggtgcctactgcctaggagctgtaccaacggtagcaattgcgatgtaaaaataattccttttagttcttgttaaatggagatcaccttgtgatatctaaaggttaactagtgcactgcaatgcctaggtcgctgataaatttaggtaacacttgtgtgccctgggttactgtcaaggcgacatctatctattgatctattctcaattgatagtgaatcattgtagcctgggtaaccatatattgctgcctgctgcttcatctcgattaggtatctcaataatttttgcataagtactggtgtctattatcgtgcattcattcatttgttcattcatttgaataccaatgacagtgtcatgctctgccctggttgcgtcatgtggatcagacgttctaatagcatttgaggttgactttcgaagagcatattgcttggcatgagacctgcactattgttccccagtctttgatgcttcgagtgaccagccaaccgatgggtttttgtagcgtcatgtctttgggtcaaagctgaaaaggcgatgactagatacagagtactagagtctcagtatttccaaataccatattggattagtaggttcatatgaggtctaattggaataatactgtataaaaagaggcatttcttttcaaagatagttgtggaaactgtagagaatttatggaaattttagcagaactccagcttttcttatgaacctacttggggaatatgatgggtgggccttggtctaaattaggacttacactgaaggcacaattatattttccaagactccaaggcatgtgaaataagttgatggaactttagtacctttaagtttataatatgtgcacaaaattagatgcttcatgtggtgaatccttcacgaggggtccgatgatgttgttctcaacagataatctggtggaggatctcttaagtgattttgaa

SEQ ID NO: 8092 - DNA, 935 bp, Zea mays
  Intron number 4 from transcript GRMZM2G159777_T02 (locus G RMZM2G159777) derived from phytozome v7.0 (chr-ID 9; pos 1 43799339 to 143800273)
agcaggctgttgacatcattaagaggtatgcacatttcagcatttcagcatttcagcatattgaatcatatccatacttgcctgaaagtgaggcaatctgttatagattttatagcatgtaatatagggctttatgtggcacttgctggacctagtttaaggaagaattgtttcatatgatctggttgcttcagttggatatatagtggatttaacatggtctttgggtagcacatgtagataacattgttttcacatgaaatactacatggcagatccttgaatgctatgaaaaatatgtgtgctggaataaccccttgtgacatacatattcttactattactctctacaaccatgacaacactatggtatactattaatgtttctttccataatagtctagtgaagcactctgtgaccttgactatattttatcagttgcttgttctgaaagagaacaaacctcttgcaacttcaagagcttaagcaatagatactttaaaaaagtacagctatttgggtagagactttatatgcagagtggctgtgttatcttgaacgatgtagtccatattcagccctaacagcattatcttctctttatttatatatgtaccaaaacctcaaacaaaaataaccattttttggacaaagaaatcaccaagcacatgaaagtgtggaattagagcatctcgaggtgttcagttgaagttgtgttagaatatgaggatatttgattaaactggcctactgaaatgtgtggtttgttctcaccgacatttacccttggatccaaatggcaaatgcaaatgaaacattgtgtgacaagtgcaaatgagtgaaatagcaactcctgtagtcccttttagattcatatacatgtaccttacatgttatctattatattgcagatttcttctgggcaagactattg

SEQ ID NO: 8093 - DNA, 928 bp, Zea mays
  Intron number 2 from transcript GRMZM2G041356_T02 (locus G RMZM2G041356) derived from phytozome v7.0 (chr-ID 2; pos 4 2422630 to 42423557 reverse strand)
tcgtgcttggctacgacaccattggaggatacgtggtaagctccagcatcacactgctcccgttcttactgacacagccgttattggttttatgtttttgcttatctctgcaacagttttacgaactactgttgtctgcataacgtcgtagtgagccttggacatgcattcattcctcatttccatcttccggatttgcgccatcctttttcagttttgcaaatagtgtatatgcaaggagaagatatatatttatttaattacttggccgtccagtatccggcaaaaaagccacgctgctgctaaccagtcaatcattcataaggccatggctatcagaaagaaacacagccacacggacctatgccgtcgctgtcagtttgagctcagttttctacacggggaggtcccagccagagaaaacaacccccacacacacacaaattttttttttttttttgagatgtgttcgccacgtctcaaccttgtaaagcacagcgggatagaatagaaaagaaaaaggaactctgagaaacgattaggccattagctggatgcagtttcatttctttatgctgggcgccggcagtggccatgttacgcgagagatagcaactagcaagtattatatgaactgtgggaagcagacagcctccaccacgtgatctcctgatctctgcccaagactaattaactaactctagagccaacagggtaaaagttcaaatgcaatctctctctctctctctctctctctctctagcttcatccaaaaaagcatctttgccaaccttttacaattcggttcaataattgcattctcagtgtgctatatagacctatagtacattcagtttctgttctccatatggataagcaactaaacctcctagctcgcttcactcttcagagtggtaaaagctacttc

SEQ ID NO: 8094 - DNA, 1001 bp, Zea mays
  Intron number 2 from transcript GRMZM2G588715_T01 (locus G RMZM2G588715) derived from phytozome v7.0 (chr-ID 8; pos 1 72513968 to 172514968 reverse strand)
atctgctgcaattggtatattgctcttttcttaaaaaatctctaatctaatgtgcagatacctcatgtgactttaattcagtgtttccctatcagttatctaagcatatcagaagattggtacgaatgaactgttattcataatcaattaactaataaatgaagtgttcttcatagttcatatcattgtccttgatagtgttttttgcaagttgagtgcactgcatgagaatcatcaacatgttcttagcttttttgaccttttatatcgcccgacacttcaatggtagaccactatagtagtcttcttatcttatttaagcatccataaagcaggacctagctaggtacatatatttatagtgctcagttttatgggagatctgaaaacttttgtagccatcaacttgttgtccagaaaccatgtaataaggggattaggggaaccctgtgaatagctatgagataacagcaaatcttcctgctttgtgtgtccacctttgcttccatctcagctggtttggttcagaagattcttcttctactggtgatctttttatcatctatgtgttcttgtctaaaattatcacttcttcactgccttgtgcccttgtctgaaactatcccttttgtatgtcaaggtgactttgtttggttatgaggaaagaacattcatttccttccttatgatctggtgagcgttgctgcgatgttaggacactgcagtcatagtagcagagaattctatcactcgagtgttggcagatggggaaagatatatatctatcgatcgttttgtaaatatgttgctgtagaaaagagtgttaaatttatttatatatttatttttttgaaatgtcatcagccttatcctttataagcagcagtaagatctatttattgttccttatttatcttttggtcgttttgcttacatatagcagtaatttggctatcttataagcagcagtaagcttataatcatcgccttttggttcagac

SEQ ID NO: 8095 - DNA, 737 bp, Zea mays
  Intron number 2 from transcript GRMZM2G703303_T02 (locus G RMZM2G703303) derived from phytozome v7.0 (chr-ID 2; pos 1 93317040 to 193317776)
ccgaggccatcgagctcaaccccggcaactacactgtgagaattcccttcatccttttttcttggcatacttcaattttttatggggttatttgaaacttaaagtttctatgaacaagtgagaatgatttttaaggtaaaatatactacttttactatggaggttcagccatttcgttccaatttgacttgaaaccaactaaccaagtgttagtggtgagcttcaatgactacaatggagacaatttgttatccactactcgtcttagtcagttatgagtatgcaacactgctacagaaagtagaaaaaacagcggaggtggagccagttttagaaagttggaattttccatgtaaactacctagtctagcctgtagcctgttgcagttttagaaagattgtcctctcatgttaatgctgcctctcattcaatcataaagaatactttatcatcctccatgatttttatagaaggtaaaggcatactgcttgggcataattttcttcttgtaatgcttcatgcagtatgctacataattcttgaacagcactgatgttatgtagtatcagagaattacttattatgctattaccagcttattaccatgttgttttactttgtatcatgtatttgtttttagatcagtcaattcttttgatggtaacttttttgacaatacagaataattatctatttgataggtctggcatttccggcgccttattctggagtcact

SEQ ID NO: 8096 - DNA, 950 bp, Zea mays
  Intron number 5 from transcript GRMZM2G306741_T01 (locus G RMZM2G306741) derived from phytozome v7.0 (chr-ID 2; pos 2 7588106 to 27589055)
aggtgccagtgggtaggggtaagcagtctctagcccgtacatgctgctgtacaatgatatttattctttaaataaggatccattttgtcccatttctgactacaaggatactatccgcttaagatgcataatacggaagaacactgaatgtatgcaacttgtgcaaaaatgttcatgaatatcaaccacttccttgtgtatagatttacatagttccttttgttccttgatctgttttcctacttgccatgccaaaacttatcttacatctgaaagttgatctgaatataggattccattaaccatgtgtgcatatactaatactagcatgaatgatagacgaacttgttttcaatctatatttacaaaataggacttgagcatttggaccatgatcatagtgagacctgagttggcaatcgctgtaccattttggtctattattgtatcgctttttatttgtattctgaagaaaagggaagggatatcaaaagacaacatgaccttatttcatgacaaagcacacttatctctctattggcagtattccagcttttttgttctatatgtttgttagctgcaacaggtctactgctaaaataaactgaccatcacttacatattccttttgattgctatggacactaatattcaaattcaactaaggtatgaatgtgtgataactatttcatttgatgtatatgatgaactaaatttgttttatatttggaacttccatcataaatatagctagctgaataacaaatatatttttccatttccattttaaaaacagataatttctgcaccaatccgtctctacttgaatgagcattttctgtccaacttaactgttctgctcattttatttagtattagtattaatattaccaacaatttggatatatcttgtagaagaaagtaaatacaagacgaaggaaaccccaaga

SEQ ID NO: 8097 - DNA, 993 bp, Zea mays
  Intron number 3 from transcript GRMZM2G177760_T01 (locus G RMZM2G177760) derived from phytozome v7.0 (chr-ID 8; pos 6 2890639 to 62891631 reverse strand)
ttgccatctcagtccacaccaagcctggttctaaggtcgccaccatcacaggtcgttctgcccttttcagattctcggttgctgccgctgtctctctactcagacgctaaccttgaagcattttgtatattaatccatttcctttttgtgctatggtagaataagctgtttgcatcagttgcttggcatgggtgaatctacctgtttacgttttgaagtgctgaggaaaccacagaacatgttgatggaatggaatacattgctaagagtagctagctgagtctacacggagtgtggcactgtaaaatggtgccacaagttaagaaccaactgaattcatgcaattaataataacaaagtcacatgcacatggtattgctgtcaagaacccctggtgttcaatcgaaacaaagtatagtttggagaaataattcctgcaatacgtggatcatcagttaagcaagtttacctagagtccgaaaagcgttgcttgttgcatcttacatattataaccgtataattgatgtcatttttaccttgttttttatccttatccctggtttagcagtaacctcttggttgtttcatactttcagcgctcatttgcaaatgccaagttatctcaaaaacaacaaatataatggttatcttttcttagttgtcgcactttgaattgatagttaatgatacactgatgtggacttcatacctgcatgtgagttaaagagcgcattagaattgaagggccatagtaatagcacctctcaggtcattctcaacgtcttcagttgtagcacaaaccccagttctaaaccatttaccacgcaattgcaagaacaatataaatttgtgcatttgtttcaaattcagctggctgaaacatgactgaaaagggttagctgctcctttccgctcatgtgcttcgttctccagaaacaaaatattccaactactttatgcactcagcactcctattgacttaacctacgcag

SEQ ID NO: 8098 - DNA, 892 bp, Zea mays
  Intron number 1 from transcript GRMZM2G029027_T03 (locus G RMZM2G029027) derived from phytozome v7.0 (chr-ID 8; pos 1 25593844 to 125594735 reverse strand)
ccgtctcccgctcctcttccgcgccccgcgctccggtgagttcgcttccctctctccttcctcctcgagccctcttctcggaccgcctcagctcgccgcggagaaacagccgagaggattttaggttcggtctcggactctcggtgtgagtgggacgcgcggttttgggggtttaggggttggtagtccgggtggggcattagattctagtttgagagttcaaaaaccggaggggactagaggggctaaaatcgcctgcataagaaggggattttagccaatcccgtttttgactcccaaactagatggtgtctgcgtttccgtggtttccccgtggattttggagggggctcggggttcggatgttgggtaaggctgggtttatagatttgctctgtactggggctcaccctctccaatcccgttcgcatcagcggggattagtgtagcgtcaggactcacgtgcgcttcttctagatgaataaattgctttaaattgttttaaattgttaacaaacattgctttaaattgttaacaactggtgaaggcactagatttggattgcatcagctgattgggatcgtctgtcaggaaccttgaacttgtcatgctttgggttcggttactcatgctcattttattgcttaattaatttggacttggtttttttttgaacggcgtcggttaattgtgccatttgatttcgtaatctgcttcaaatgaacagtgtgggcacatttggattgttagtggattgggataggagtgtcacacttttatgcttccttttcagttcattgaagactcgctgcattggttaattgtttgatttggactgttttctcgttctggctagtcaggtcactgtagacccgcttcttcctccaggct

SEQ ID NO: 8099 - DNA, 655 bp, Zea mays
  Intron number 1 from transcript GRMZM2G150004_T01 (locus G RMZM2G150004) derived from phytozome v7.0 (chr-ID 2; pos 1 639351 to 1640005)
atcggcgccctcctcccgtcttcccacgcttgcgggtatgcttgtgctaatcgtagcgtaccagcggtttctttctgtgtagatagttcccgcaacagtggcagctttgtattatcttttccgtggttcggctcagcgaaatggatgaagatttgatttgtctgatccagccacttatgatgtataattcgatcttcaagcatcacagaagctagaagccattgatgcaattggccatggctaagccgtagcatagccttctttgaatttgaccacatgagtttagtttaattccagttcagttcaggaacgacgtaacacggatggtggtttcaaaaaccattttcttcttcagcataaagcacaaattggaagatgaattagtcaaccgtgtgcttggttttgctctcgatgaatcccaaattttgtcattcttctccattcagatccttgtgtaaccctactggtgtagtccaatccatgatccaattagtgcctaatgcgactccacttataaatgctgcattaagaatgtcctctggttatttattatgtgatgctaaactgcaaattaccaaatcaaggtgtggatctgtctgtttacctttctgctgttatttgctctgcaggcactaactcagagtagtgtcgctca

SEQ ID NO: 8100 - DNA, 929 bp, Zea mays
  Intron number 3 from transcript GRMZM2G083841_T01 (locus G RMZM2G083841) derived from phytozome v7.0 (chr-ID 9; pos 6 1297224 to 61298152)
aggctctgcagagagaggtacgtacatattacatttgacaccagggaatgcaagaactttatcaagagacattcattctttgatagagatagaatagaacacatgcacagtacacgtggactcatgagcttgcaagatatcgagcatgacacgtgtaagttagtgcgccagagaaatcttcaatttatttatatgtcaagtcaggtcaggttctctcattaaaacacatataaatatatattcattattaccaagctaaggtaataaacaaccgaacttttccactctttaaactgtcttcgcaaactccaaagtagaaactaacctaatcaggaaagagctagactgcacctttatgttgtaacaatgcaatgggaggactgctacatgtataaccatatgaggccgacttgactcaagattcaatgttgaagaccacttgatgaaaactacactgaattatttatatgctattctccagctgtgctcaaagcattttccttacttaaaaaagatcattttgtacaaagatctcttactcatatagagccatctgagtagaacatcggtaccacagatgcattaatggtttagttgtaatcaagttgttgtactcagcattatattttcctaacaagtagggcacccaatttctccttgacgaggaatcaaatctagatagccttaactccacactatcaattagctagcctatgctcaagttcctattgttacaaattccagacgagtcataatttcatcactaagcactcggtaaagagcgtgtctccggtagtgcatatatatgatgcagaccacctgagaagtttactgctttaagccaccaaaatggtacttttgttgtttgggttgtttagttctaattccttttcttgggtgttcacagatccaagcagccttcagaaccg

SEQ ID NO: 8101 - DNA, 725 bp, Zea mays
  Intron number 2 from transcript GRMZM2G090872_T03 (locus G RMZM2G090872) derived from phytozome v7.0 (chr-ID 2; pos 1 1821281 to 11822005 reverse strand)
tgcgcgtggccgcgcttaagtacgaccctgccaaggtgggtgggttcgctgctgtgtgaatccatgcgctctggtttcgagtcttcaaggtttgctgggtggaatttgtgatctaagtctaacggtgtggttcttggttttttttgggggggcaggtggcgccgcagaacgaccgggttctcgtccgtcttgagcagatccctgaggtctctccgctatcaatcgtgtctccactccaatacgcatggattgagacggatacgagtgtagccgtataaagcctaagtgctgtagttactctgactttgagagcaactacgaccacttgggttttgaaatgtcttatggaatctgagtttatttatatagcagtataattgattcactcaagctaacactcccccaactataattacagtattctgtttactgcaccgattagagatattgcagtactatcaataagtgtggttagtttgacatgttagcagggctctgtaattttaaaattttagaatcaactgttgcacccgtccttttctatacctgaattactgtacaatcctgtttcctgtgaaactgtattacaggaatgcacatgtgtctgctgaagtttttagaagttgatagtttgatataattgattgttctgagttctgagtttctgacaaaactgttttattcatgcagaaatctgctggcggtgtattgctaccaaaatctgc

SEQ ID NO: 8102 - DNA, 512 bp, Zea mays
  Intron number 1 from transcript AC186893.4_FGT004 (locus A C186893.4_FG004) derived from phytozome v7.0 (chr-ID 8; po s 104112331 to 104112842)
gaggtagtatattttagtaaataattgggaaccacaaataataaacatgccttcactaagaagattactggaaaaagaaatagtctaacactagtttattgtggactaaacagaggccatttgtgcttcttggttgttagaatcacatagaagtgcataaacaaggactaaacagaggccatttgtggaataacctctgcctcttcctggctaattcccctttccattcaaaaatcagtcaattttgggatattaccagagataacattaatattttcctgggtgatgttttcgatcctttgatctgaaattgtctgcatctcatcaggaaaaaggatggtattatcgacattagtaactgagaatgatgccaacaattgaacaagaattggcattaacaaagttatactatacactttgaaaaccgtgactgatttttgtgcctgttatgtatttgttaatgttccttgaccctttggatttttaggtgttctctcaggataagtcaatat

SEQ ID NO: 8103 - DNA, 791 bp, Zea mays
  Intron number 2 from transcript GRMZM2G062412_T04 (locus G RMZM2G062412) derived from phytozome v7.0 (chr-ID 2; pos 2 6891667 to 26892457 reverse strand)
caaccgccgttcgtgcgctagagttcctcgctcaggtgaatcgggcggctggtcttcttgttccaacttgaatcgttccatctgggtcgctgtctggatcggtctcgatttgctctgtaataattccgcaaaaattggagctcagatttcccgatttggtttatttcttgttacctgctgctggttgtagttgtagatgctaatcctgtttcatcttcctcgatctgtagcaagtttcaatctttgagacgtgatgagatgcactcgtaagagtactcccgtcttcctggagctggcgttacctttagcccgtcgtgcaagaatttgccgatctcgggctcttggtttcctactttgaagggcttataaatatatttcgtctggccgtgaaactttagccaatcgatggagctgtagtggtcaatatgatacagatttctagttcttctcgggaaactttaagtgctcttggtatttttattgacctaattattaattgcagtgtagtagtatgtactagcagcggcatttcttttcactactaagtaccctttccatgtcattttcttgattaccttttaacttttatgatggtagattctatgtctcatgctcccaccccatgttttaacttgtttgcttacttttgccattcccttgttgatggcacatgattgctgcttgtttcctcacaaggccggtaatatgttactattaggatatgtcatatgtactctatcattctttaatgattctttggtctgctgcatctgtaggctcataacttcttt

SEQ ID NO: 8104 - DNA, 801 bp, Zea mays
  Intron number 2 from transcript GRMZM2G179504_T01 (locus G RMZM2G179504) derived from phytozome v7.0 (chr-ID 8; pos 2 520588 to 2521388 reverse strand)
ggtttcaggtaaggctcctgcttatgtccctgtcgagaagttccatttatacgcgtttgctcataaaatagcctggtcaattttctttggtgacaagtgcagcagattgggatcgccattttgtttttgcctgcttagaatacgcgcctgcgccctgactgaattgctcctttttttttttgcattccctgatatttgtagtttactaactcagaaagtcaggccttccatagttgcgcatgattgtataagatttaccgtgctcaaagccatatccatccaaattttgtgtgaatcatactaaatttgctctaaccctggcaattacctgtatattgattcaattcatagagtgaaatttaataaataaaaaatcctcgaacggtaagacaaccctcgtgcattttgctaagaagacgcccttaatttgaatagtgtcatacttctcaatagtttcagtgttagtcacatctgtatagacttgttttggccacttgatgcctctccaccttataccagacaaatctttagagtgaatccacatggcacaatgtcttcattgcgttattgtattctgatagggacatggagtacttcagcatgtagtccctctctgttgtctattgtgaaagattgcagaaagcgattatggatgtttttcttgcacatagctactgagattaatacagtagataacattcttcctaagtcatccccatatattttattctgaaactaaattctatttatacctatcgttcacataagtaataactgtgctccttctgattgaaattagca

SEQ ID NO: 8105 - DNA, 468 bp, Zea mays
  Intron number 2 from transcript GRMZM2G451729_T01 (locus G RMZM2G451729) derived from phytozome v7.0 (chr-ID 2; pos 2 26411072 to 226411539)
ttaataacacaaaacatctccgttaagccctcgaggtatccgatgtgccacaggatcccacactggataggtctggtgccttgtactggccaatgaccttgggagaagcaggatgttggcctacagcaagcagaccatggccatcaagtgcagcaccgacagcacctcgtaccaggcatctgacatggccgtctcctgagattgaaaagctcccagtccagcgacgactccttctccagcttcttcttcatgccgccatttgcctcaggccgccacgccatggccgccatttgggatctagtgcagaaacagtcatgctaacctttgatagtagaacagagcaccactaaaatgcttcagtggatccaagagtgggagagcctctaatggtcgacaagctgggaaattattcaaaaaatcaaatttacattagaggaagcataagaaaagcaagaccaccacctgttc

SEQ ID NO: 8106 - DNA, 400 bp, Zea mays
  Intron number 2 from transcript AC197565.3_FGT006 (locus A C197565.3_FG006) derived from phytozome v7.0 (chr-ID 2; po s 228939740 to 228940139)
cggaacaacaagtaatccgaatactggaactggtaaaaactcaaaactgtccaagtacacttcagagggttgcactctctgaggacaagttttcttcattaaagagacgaatgcaaacaagagaataaagtcacctgaatgccacagcacccatcacttcaccgttttagatgcaatgagcactctcctgtggacttgatcgccaaaaggcataagatgctgccaacttgtaatcgcgtcggatgcaagagcaccgtttgttttttcccttcccaacaggtaatgttcggtaatctgcaatcatccgtttcctgacatgacagcaccagccaactagtaagctcgcgacaagatttcaaagtcactgtcagaaacgcctttttttttctttgtacagcaa

SEQ ID NO: 8107 - DNA, 821 bp, Zea mays
  Intron number 1 from transcript GRMZM2G097929_T01 (locus G RMZM2G097929) derived from phytozome v7.0 (chr-ID 8; pos 1 33782494 to 133783314)
gattatttgaagcagtgtctctgttctgtagatactttgcttctttgaaaatacctgccatcaattgttttactaaagtttagagtgtaataataaggcaaatgagcaaccttgatagaattcatatgccatcagtagttttaccatttaagctacactattttaaaatatatttttgctatggtaagtactcttatgtgtcctgctttactgttcatccattctcaagtatactctttgatcttttgatatgtgtgcaggcccaaaacatctgcaatttattttttgataagtcctccaagatttggttagttgcttcatgctttctctttttctctcttaatacttagctcaattttgttcatactggtatgtttgatctgtgatatactgctatgagcaaccttaattttgtattgccttacaaatgatttttagctgtcgcttgccaagtataggtcgtattgtgggtagtcacaccaaaactaaaactaatggcaattggtttgcaataggcagtgctctttctgttagctctggatgtcacggcaatgaacaaacacgttgagtatgatagtgatgctaaaattattgcaatcgattgaagccctaccatgtggcaaccattgatccatgcccaaaatgtgcctgccactggtgttcttatcccaacactcgatcaacatgcaagtagaaatgaagcctagagccaaatgatgcgagaggaggtacattacttgatggattgttttagcattatgattatgacatgctttgttctcttctcttgatgatgattatatttgcacctaaaatgcagt

SEQ ID NO: 8108 - DNA, 772 bp, Zea mays
  Intron number 1 from transcript GRMZM2G034069_T01 (locus G RMZM2G034069) derived from phytozome v7.0 (chr-ID 9; pos 9 9437594 to 99438365)
ccaatacaaggtccgcggcaccgtgcgcgaccctggtaaggctcgcagacctcccactcatagatccatcgcgcccctggtttcttggctgtgcggcggcgattgttgtgtacactgtgcgtagatagaaatagactttttcttgcaatgattaggtgcggatagatagacgtggaatgtggaaccgcatttgtcttggaagtcgaaagaagctccagattcttgtataaaaaagggtactacggtcccttcccttgtgggaataaatatattgtcctgagcagtccttaagctgcaaggtctaacctaagtacttaatgttataagataattgatacatgagtaacttggtgtcatattaaaatgctagtaggaaccgttcatacggtagttatggagaaataactgacgaagaaaaagaataacttccgtttggtgaaaatattgtataacataatgcacatagtttcatacctgaaaatgagatacagaccgagagttctgaattcagaaaatttctagagtaatatacatggtttatatcaagtaaacaccagggatagctacacttctttgcattgaaaaaaagttaaacattcaaaatgaaaggtgaacaaacagagaaaaaaataaaggaaaataacactcgtagctggctcaagaaaattcatggcctgataaaacaaaaactgaatgagtattctttttctgttagaacttcattgcatatatgatgagatatatcttgtttttgctttaggtgctagcaaga

SEQ ID NO: 8109 - DNA, 494 bp, Zea mays
  Intron number 2 from transcript GRMZM2G051491_T01 (locus G RMZM2G051491) derived from phytozome v7.0 (chr-ID 2; pos 1 51607673 to 151608166 reverse strand)
aagataagaaagatgtaatgttttgaagagtttgtttgtcctctttataaagcatagatctcctggcaaatgataaaaaaaatataagccatagactacacatcaaacaaacatatacatacagtgcaaacattaaggtttttattatagaaaaggaaatgtaataactcatatgagcatgggtccacctagttgcagtagctactaaaatgtgtttgatcaaaagtagggtaatacggtggataatgtcaactaggaacctagttacctaaaagactgactcactgttagcatagtcaaatgcatagtagacaagaaagagaaagttgacggaattttagaagaactctgaaacgactatatgaacttaccttaggtcgtggtgaattcactgcaactaatcttctgttacaatacaatgtatgattattacatacttcttatattaacatgtaacaggggttaccaactttgcctgagaacgagattgagtt

SEQ ID NO: 8110 - DNA, 864 bp, Zea mays; identical to SEQ ID NO: 6074
  Intron number 1 from transcript GRMZM2G177617_T02 (locus G RMZM2G177617) derived from phytozome v7.0 (chr-ID 8; pos 6 4393544 to 64394407)

SEQ ID NO: 8111 - DNA, 905 bp, Zea mays
  Intron number 2 from transcript GRMZM2G359542_T01 (locus G RMZM2G359542) derived from phytozome v7.0 (chr-ID 2; pos 2 8344772 to 28345676)
cacttgagcacgagtatttcaaggaccttgaggtacagtgacctgctaaatgtgcttggtgttgctttggcatttgtaattgtatgagctgagtcgctcattcctttttatgggcgtctgtactctctgcatttttgtcgttcaactggatattttgaacctggtgtgttttgagatgtattaaggaatatcaaatagattaccgccttggtctctatttactgaaagtaaatatcctccatgtttatttcctccgaagcatccatggtttccttctcttttgtgtgcatcacgtaatgccgatataaggtagtgtttgtttcgggagccggttggaatgggccggttgggatggagtggctgtgtctaggagattttagggagtcgaatgattcctcatttgaacataatttttcttttttagtctttctatatgaaactaatccaaataacgacaaaaatatcctccatgttcagaactctatttgtacttatgtttgcataggctaccatgctctaatttcacacgagtttttgagatacttcttggcacttgtatttttttgtcattgaagcccatatgctctgctttataaaggtatatgttgatagatgccttattttcatttttatttatattaataccctatattgtttttttgttttgaggaatgaagtgcataggaattttgtagtgtgggcgatgatgcttatcttattctgtgggatgctcaaactggcattgactcaattaattcgatgcttgtcttattctgtgaattttaatatattttatcataatatgttcttccgtagcaacgcacaagcatttacctatattgtaatatttttcatatgtctgtgtataatcaaactctttgatgccaatgtcatgcagattgacg

SEQ ID NO: 8112 - DNA, 763 bp, Zea mays
  Intron number 1 from transcript GRMZM2G163546_T01 (locus G RMZM2G163546) derived from phytozome v7.0 (chr-ID 8; pos 1 24622230 to 124622992)
gaccgtccgcccctgtgcagagagcaccgccgctggttctcttgagtaattggcgcctccaaaaaggcgtcaacaggttcatgcatgctctatattttttttagagaaaagggtctccccctctttattcagagaataaaatgatccgtagccatttttgcttctatattatttttactgtttgtttgtttgaaactgccttttcaataactttatcatatttgcattttagttaactgaatctgaatatggtgaaccccaaataaatgtttgatctagtgctgattactccgtttggttgaataactagttgaatcatgaatttatcttttcaactccgaaattgtcttcagaaacatctgatatatacagttatacacacaaagcaaatggctcaatttttctattttccagacagtgccccccccttgtgtattgtacatacaactgtcctttcctttgatgctactgtcagttaacgtaaaactctttaggtgtttgtggatcagagtctgttccagaagcacaccatggatcccgtaaatcttataccacctgcgttcaatattgtttgacatttcagacacccaaattggcctgcgattagttatattttttgctgtaagaatgccaagcggtaaatggctggagtgaagtcatactatcagttgtatttttgctgtaaataaaaaaatgtcaattgatgatgaccggacggaatactacctagtcacctttcatctccagttcatcaacatttatc

SEQ ID NO: 8113 - DNA, 943 bp, Zea mays
  Intron number 1 from transcript GRMZM2G131667_T04 (locus G RMZM2G131667) derived from phytozome v7.0 (chr-ID 9; pos 1 12882443 to 112883385)
gaaaccagtaagcctccccgcagcgatcgaaaccgggccgtgttgcccccatatcgaggaggtggttttggatccatttcgatatagggttaggccaattcgtgttagatttgggcaaaaggcggcgccttggtagttttggtttcggctcggctcctgttgcgactgattcgcgatccgatctgattgactgtttgttggtcctggcgattgcggaatcgtgtggtcttagttttcgttgcaaggcagaggcgaagtgaagtattcacacttcaatggccacgtacctcgcctttcgacagttgccagcttcctacctctagcgattgtctgacggagaggacaaggaatctcactgctacacatctgagattatgatttaagtaggacagtcagtttaatcctaaggcattcagattctttgggaagttgggaggttaaacaggatgagctttcgtgttctgactgtgacgcactgatgtttcttattcatactccaggattcagacttttaattgagatcctttcaaccgtgtagtccacattaatttgtatggcttgtaaggcatcattgttctagcatacatgtttttaactcattgggtcaatttttttgtaactttagcccattgtttgtgacctggaagaaggctgccaatggttcagaaccacgcctccggggatgcataggaactctggagtcccgtcagattgtcagcggctttagggactacgccctaactaggtgactattgtttcagtattgaaattatgtctgatccaatgctgaaatatctggtcggtactcaaaatgttgatgggcttatgctgtaataagtagaaaagcaatcgtgcactttgtattggataatgtttagatatacggtaatcttgatatcctcttgcagtgcgctgagggaccgacgctttcccccaatacaat

SEQ ID NO: 8114 - DNA, 942 bp, Zea mays
  Intron number 5 from transcript GRMZM5G877941_T02 (locus G RMZM5G877941) derived from phytozome v7.0 (chr-ID 2; pos 2 34094195 to 234095136)
aaggtacaaattaagcaatagggcgtgcttggttccttacctccactcgccatagctcgccacagcccagcatgcctagcgtttgtttgctttataacccaatttacggcgtgctgaactttgctgaggcgttgctagctcatttcggagccacggctcgccaaaagtttggtgcagtttttgctcgccatacttgtagcgaaggcacagctgcggctaaggcaaatagtggcaggagccaaacagacgcataatctagagcatatagctatagctaggtgttaatgatgttacgaaaacgaattatttgtgaatgagttagaactgtattctaatgcttaagaagcaattgaatattcgagctttgacctgtctacttcgtttcttttgttcaaatgtgtggtgtggttcatcatggcgtaaattctctacagaaaataaaatccctgaatgttgaggatatggacgtagttgttgaacctggagttggatggatagagctgaacgaatacctgaagccctatggcctattttttcctcttgatccaggaaaggtccttgttctttgttcataataaagcctttcaaaatatccatttatcttttcaaggcaccctgttatgaacttttaaatgtaattactcaatgtgcaattgcatctaatttaacttggttgcagttggtaagtcattgttccctattgcatctaatttactcttgatcgaagtatttgtagaatctagtcatagtcagtaactccattttcacttgcttcgatggtttcaaacgtatgccattatcattctctggaaacatcaatagagccttcatcatatttagaagatggtcatgttaaattctgcatgtttatggaagccaaacactcatgctttagctgaaaaaacaatttgatttgcagggcctggggccaccattggagga

SEQ ID NO: 8115 - DNA, 568 bp, Zea mays
  Intron number 1 from transcript GRMZM2G051355_T03 (locus G RMZM2G051355) derived from phytozome v7.0 (chr-ID 2; pos 4 4855045 to 44855612)
aaccggcaccaggtcaaaaaacgacgactgggcaggtttctccatgatcccatttgataggttgtactaccttttagtctgatgcagaattctagctacgctaggtgcacaactgaggagacctgctgttgtattcctaccaatatatgcgccgggacgagcctgtttctggttgttcttgtttctttgaacataatgtgctttactgaagcacacgaactggctgtcgaaccaatagagctcaccttgtcgataatttccacccgtggttattcatatgtagcttggtgggtagatttagagtccataatagatctaggaaaataaaaaaaacatttgaaggcataaaatgtcatttaaaatgttgttcaattattgaaccattgtgatgtttccttctattttctgtgttgtgattttgtcaccaaatttgctagctttgatccacatcacgattcatacacgttttgtgctatccttggtccatcttctataaccagggtactttgattctgttggatttatgtaaagtttggtttttaatgaggctgtttcatgtaggcaccgt

SEQ ID NO: 8116 - DNA, 475 bp, Zea mays
  Intron number 3 from transcript GRMZM2G434252_T04 (locus G RMZM2G434252) derived from phytozome v7.0 (chr-ID 8; pos 3 2602803 to 32603277 reverse strand)
caatccaccaccagaaccgccctaccccaagataggtatgtgcaggttcaactactcatttagatattggtacaacctgtaatagactttggtacaataggatttggttctgctattcactttgtttttagttccaaacaaccaaaaaattgcatgtcctttagaaaaaatatcacaggaatatcagtaatataacactgataataaaaatgcttcgattctatatatttttcatgttataaggttgaaaacattctgtctcacggatcaaaatgggtacaaggggacgtactgcatttacaaatatatttaaccataataaaacatctttggaaaatgaatatcatttaagtccaaaaatgtttttgttgaatgttcattaagctagagtgaagagtaaacttagcatttcttttctatatctctccctcgtgctcatgtagccgtagtctcctccatccaacatttcctacgc

SEQ ID NO: 8117 - DNA, 983 bp, Zea mays
  Intron number 2 from transcript GRMZM2G094050_T02 (locus G RMZM2G094050) derived from phytozome v7.0 (chr-ID 8; pos 1 0123203 to 10124185 reverse strand)
atctttctccagacttcgcaattttggacgacgaggtaaggaagtgtataatcgtgcatactcggtgtttgtttcttggtggcgactgcaattagctttagtttctcttagtgttagggtctgtttggataccaaggctaattgctagctagctaaaatttagctctagtacatccaacatgagagctaatagttgagatattttttagccaagtcttcaactagttattagctaacgacctagccaaccataactaattgagctaatttttagccctaactagtatctcaaacaggcctttaaccttcatgcttgtgcggtgtggttttataaacatgtaaccacagcttggttccaatcttgtattactgtcatttcgaaatataagatgttggtaattaaattgattggaactatgtgtctcttttgctgcacccagattcataaccataatcatgtttaaacacgtgctgtatgaagagtcatctttcatttatcaagggcaactgattttggtctaccatatcgtcctcgcataagtaatttttaggatattgcttataattgtgatacctttgagatcccttttgttaacatagttttatgagcttaaaatcttagaagccatctagctttgaacatgattgattggccactcttcttagaaagttgtcttgaacaaaaaatgaactgcgtgggtattatatgagaatactttggttacatttgaggcttaaactagctcaaagcgcctccaagtaatttgatgccagggattaattcaccacatttgttatgcctgtacatggaagtttattgtagaaggctttcaatctatctgattagatttacatctctactattgtgctatataatttcacaagttcaaaaaactaacagtgtttttatctctcttctatgagatgcacttccttgcatcatttcatgtccctacaggttttgtgttatctggtttgtcggg

SEQ ID NO: 8118 - DNA, 742 bp, Zea mays
  Intron number 2 from transcript GRMZM2G122039_T02 (locus G RMZM2G122039) derived from phytozome v7.0 (chr-ID 4; pos 2 14214557 to 214215298 reverse strand)
atactggtattagtcatgtttttttttgtctgtgtgatcaactgatcatgtgcaacctatttgccatgtgaaaatatgaaatttagccaatgcatggtttcacttcccaaagatgtgcgagcagtattgcagtaacattgctttgccttatattatgcttattcttagtggcaaataccaagaactaacatcgtcaagtgataccccctattgtcctcagtcatgccattctgagagttgtgcgcagaatctttagctgtagtcatgcatacatcatactagtgatttactgatcaggtcaaaagtgatgaaacaatgagatgctctgaatgtcaacttttgattacctgttcaaccaatgtaatatttacttgtttagcctgtacactgatcgaaacattataggttcctatgtggtcctgttttggacatgcatattatttgggtgcttgccaaactcctataggtttctcataagctgtggaggtttggaattacataaatcttcattgcaattccctatatatgatgttgtagacccataataatcttctataaactaggaagactctgagccggaggttaggtcatgacctaatctcctataaattgaattttaatagtagccttcttatagttttgttttaccctagggtgctaatagtattccattttttaatatgcatgcctggcacatgagtatttttgttcaaactttaacggtggctgtctgttatcagaa

SEQ ID NO: 8119 - DNA, 963 bp, Zea mays
  Intron number 1 from transcript GRMZM2G138303_T01 (locus G RMZM2G138303) derived from phytozome v7.0 (chr-ID 2; pos 1 56523225 to 156524187 reverse strand)
gggcaatacaaactggaaagcgcatccataatcaggtgagttgcttcctcatacatagcctttgattataaagttccttggccaattgcatatttcttggggtcaaattcaccatgccaacatctgaagatcagtctatgtgtttttgctgtataaagggagccatctataactgttagaatagtcttacatcagttgtcgagggcctctatgctagttcattcctgcaggagtgccatcacctcatgaaccatgtgagatggcattatagcaccaaaagtacctacatgcatcatccagtgattttttaagttgttgttggcgactgttcatgatgatgaaataatgttttagcatacaggcatttctgtgccttatgtgttaagtttggcctaataaatggacctgcatgctttgaagaaaaaaatgctgtgaacatagaaacatcacaatcacccattcacccttttcttttcgaggactaaagtatatagtaaccttttttctcatctgttgctttgcttttggagatctgtggtagtgtggtataggtcagatttgtccacaagcaaaattttgagttatgattatgatataaatgccatacttgacagtgagcatttatacttccatagattttatgtggatcaaaatcgcatttgagaattctgtgtgagttgtcttgtcagtaggtatcatttatttgtctttatggatccagtgatctacattatcattgatcaagataagaatcgaaatgttaggtcatctacattagtttattcccaagcttaagcagcttctctttggcagcattggatgagatacacatcaaattaattactcatctgtctcgcaatttccatgttctcgaattatatatgatggtgctatgccattctttctatttaattttaatgcgattaaattttcctcttattatatatttgaaaggtggtaaga

SEQ ID NO: 8120 - DNA, 962 bp, Zea mays
  Intron number 4 from transcript GRMZM2G370521_T01 (locus G RMZM2G370521) derived from phytozome v7.0 (chr-ID 8; pos 1 34016582 to 134017543)
tgattattttcaggatctgtgtgttactgctgcacaccatcctctacggcctcgggtcacgcggtcggcctgggcgcgtcggcgtcggtgtgcgctgggcgcgtgcggcagcgcggcctgggcggctcggccgcggggcaggggctgctgcgcggggtgcggggctcgcctgcgcgctagagagagaggtgagagggaggagagagataggagagagatgagaggagagagttagggagggagaaggaagcacaggcggcggctggcttcagctgggagagagcagcgcgcggctagggttagtggtagttgggccctggtgggccggttttagattagggtttagtttttttgtttttttcgaaatacatttttagatagctcaaaaaatcataaaaattcaccaaaattatttataaataaaatacttgttttagactaataattattatactacttaattattatattaattactaggatttcttttttaaaagaattactacaaaacattcgatactcaatcatgcgcatacaaagaaaaatgattaaaatgaaaataaataattaaacacttaaaacaaaattattatcttaattaccataataactaaatttattatttttagttgatggcttttatggtgttacacttttcagattgttaaagagtgcattcattgcaccatagatgtactcagtgattggactactgctggatagaactttcacttttgacctgtgaccctgcatataataacagcgaggcacctcaatcattgagcatagttaacaaatcctaacataccttgggcagtgtaacagtgctgctgtgcagagcaaatttttaagtgaacaaatagatactggcgtatcttcctctaagataaatgtcaagcctggttctctatcgactatgcttttgtttttgttgcatttttcagtcatcgagcctaaaaaaa

SEQ ID NO: 8121 - DNA, 842 bp, Zea mays
  Intron number 2 from transcript GRMZM2G009214_T01 (locus G RMZM2G009214) derived from phytozome v7.0 (chr-ID 4; pos 4 1893304 to 41894145 reverse strand)
aaggatccaggtaaaagatgtaactgactatggatcaatgttcttaaggcagtaaggcgaggcgttggaccaccgccttaacgcataggcgagcaaggcaactagaattattcgagcgcctggtcatctaggcgatgccttaaaaacactgctatggatgttctcctatatgcttggctgtagcttctcacatgcagttggttgtaatgtggattgtgatgtgtgtacatagtcttttttgtgtgcatgtgattatgcatgtatctagtctgatgctacaaaattatccatgtttgtctcgggtacttcttagttatcagggtccacctgttgctattctagtgttatagattgtgtggccaacatggggccttgttagcattttaaactgtggtcccaactcctgtaaagtggcttaatgaatacaagtgttctgtggtagttgcatgtctcatttggtatgcccacaattatcgctagtattctttctgaaaccgttttctttcttttaaaatgaaaccgtagcatcagacacatcactcaaaacggcaagaaaaacacaatcaaccactgttgtcatcttccgcctagtgtttcccagataccggaatcctaaattttttgcttactctggtgcccatgtaccacgacagttcaagtgatttctgtatctcattgaagtagccaatttctcttctgtgtgtactattgcttaatggttttgacattgtcattttactgctgtttgctgtgccaatgatttctgaaatatttaaataatgctttcttcatacttaagcaagtctgatggttttggaaaaacctttgtagagtcactgaac

SEQ ID NO: 8122 - DNA, 824 bp, Zea mays
  Intron number 2 from transcript GRMZM2G579432_T02 (locus G RMZM2G579432) derived from phytozome v7.0 (chr-ID 2; pos 1 76443298 to 176444121)
actccttgacgatctacaaggtgcggtagctaggctcgctctctcgcttgacttgtgttcgtggaaatgcttctgtcacggtatactgtaagaactgtgcagtactgccaagggagatgtgataaataaataaatggaaaattctatatgcatttacttattttctctgccgaagataccaagttcaaatttcatatatatgtacaagattgaaaaaatatcattcgacaaatcaataggcgaacgagaaagaagacaaacacaaattattgcaaagtttatctcttttacttattagtattacaaagttttgagttgcatgtttcaaagttgtgctactgctgcccaatggaagtcatatcatacataaaaaatcatgttttgatgcccagattaactgttaattgcatgctcaagatatggttgcatttgaccatgttaccttgctgtgaaaacttcatttagccactagttatttggcacatctgagaagcggcaacagtgacttcaaccgctttatcaatcttttcttaccatatgctgctgagagagaatgatgcaagtaacaggtgctggaaaacacaggtaccagaggtggaagatgattgtagttggctagttgcttatctgatagttttagacacttagacataatattgtgaattttgtttctgcttcatctgaaggaggctctgggcccatgcctgcatacaccactggtcattgataatttggtatctccttgtgatggtgttaaactaagccaattttccttcccaatcttatcagggcagagtgagtacatctgacgtgtttggtgtcaa

SEQ ID NO: 8123 - DNA, 1022 bp, Zea mays; identical to SEQ ID NO: 5822
  Intron number 3 from transcript GRMZM2G074665_T01 (locus G RMZM2G074665) derived from phytozome v7.0 (chr-ID 8; pos 1 45151324 to 145152345)

SEQ ID NO: 8124 - DNA, 594 bp, Zea mays
  Intron number 4 from transcript GRMZM5G883149_T04 (locus G RMZM5G883149) derived from phytozome v7.0 (chr-ID 8; pos 1 16860997 to 116861590 reverse strand)
gagggtaaagccttttcttactacgtacatgatattaagggcttcttttcttgttctctttattgtgtacatttattatcctttgatctgaaatcacctgactcatctgggccatggcaatagagctctattagggcctctatttgtaatggttgtattcaccggattcaaaggtttagtctggtgttctgcttctgtacctcaagcccaagcatgcctaaccttttaatggggttacacaatttgatgtgtgaaacaatggcttagtttgctaaagacatcagcaaaataaacagcccattcctttttttttgaaatggaacaaaactgattatccacatgaagaattgtatctatttgattttgagtttgagatcttgaacgactgcaggtaccacaactatgcactcgcctcaatgtgtctttgataacccattgatgtctaaactctgaaatgtggaagtgataggatcaagcatagagatgaatagaatcgcacattgtaagcagcatgtaattgtttggtgcattaaacataattttctgaatgattacacaggattgtacttgaaacagaaggaagagagatagctg

SEQ ID NO: 8125 - DNA, 530 bp, Zea mays
  Intron number 2 from transcript GRMZM2G025356_T01 (locus G RMZM2G025356) derived from phytozome v7.0 (chr-ID 4; pos 2 39732641 to 239733170 reverse strand)
cccccattcatgtagacacatttactactcttctttcgtgtatttgctgatcaccttcaatattcactgattttcgcatgaaattagtcttgcatacggacttaatttctcatagatgcacatatattttacgttatgcatctaattgattacttcacaggatatggaaagtggttttttacaattaattttgtgtgcaattttttcttctgataaaggactgaacatgttactctttaccaataccttttttgccatcttgttaagtgcactgttgaattttctgctattcatacaaattttctgtgaaaaataatcattttggttcttactgtttttttagtttgattttttttgtgtactcgtgtaaattgtttatattgttttgttttattattttttggaagaattttctctttgttgatattgaatttcattcatttctattattggcctcatatatcatattttatgtttctcttgtatctttaaaagactcaaggtttccaatactcgggtgcatttgctgc

SEQ ID NO: 8126 - DNA, 602 bp, Zea mays
  Intron number 1 from transcript GRMZM2G019051_T01 (locus G RMZM2G019051) derived from phytozome v7.0 (chr-ID 9; pos 1 06855525 to 106856126)
ttcctttttacagactacaacttctatcggactaggtacaactaacaaatcttctgccaatgcatataacatatgtttattgcttccagcacacatcacttgccatgtcacaactccaactatattcactgcaacttttccatatttttcagcaatttgcataacagtacattgcattgcagttaaatgaatcttccatattcaaatttagagaaccttgccacttaggtctgcacacaaaattttatcaacaatatgatttgtacataaagagaaaaagttccctgctgtaaacgcacaacaaatcttccaagaactgaatattgcctcatatcatcatcaatatctacagttgtagaatgtctattttgcatgctctgtataattatatatgtacatatgtttaggccttcaaaaacaactcaactccatatgctactgcagatgctgaaacagaccaactagccttgcacaacttaactaacactgttttatatgagctttactatttcagaactattgtaagatttatgtaaatacataaattaggacatgctgacatgttattgcaggtggtcaaggctcaggattcagagcagaag

SEQ ID NO: 8127 - DNA, 435 bp, Zea mays
  Intron number 3 from transcript GRMZM2G037614_T01 (locus G RMZM2G037614) derived from phytozome v7.0 (chr-ID 2; pos 2 33747350 to 233747784)
gtattgctggatttgccatcggcctagcagcggtgagtttgagttacatgagatgtttcactcttgcacgtaatgatttcatggaaacaaggaaacaatttgaggaatactcctgaattgatttttcttttttgtaaatttaaagcacaacctgtaacacggaagaaagcgcggctgcttattttctaacaggagatcattcattcattccttcgatcgttcgttctagtttgctatggcactctagtcagacctgaaccgactttattgttgctttaacatacaacgcccccaaatgattagtttgcttctaagttctagcatatatgtatcagtatacaaacaaatagaaatgaaaccatccaaaacgaacttaaattcttttgcctcgttcacgcagggcaatcgagctatcgcagaaatccagtttgcgga

SEQ ID NO: 8128 - DNA, 1062 bp, Zea mays
  Intron number 1 from transcript GRMZM2G589579_T01 (locus G RMZM2G589579) derived from phytozome v7.0 (chr-ID 8; pos 2 511692 to 2512753)
gagcagttctcgccttctcggggaggtcgccagcggtaacggaaaaaccctcgtcccctccccccctcctctcacccggtccctgctggtcgaaatctagggttttggcggggtttggatcgcctgttctttgaccggaggttgttcgtgccggtgccgcgcggacttaaggagggtttctgcggtcagtcctgctgcgccctcgtgtggtctgttctacgtacgtttctttgtttttttttcttcttcttgttttaagatcgctgcattctggtctccgtttacagggtggtgtctttgtggatggattctgtttgcgttgggtttttttttcctgtatttgtttcggttgttttccatcaaacaggtcgagtcttttcctttggttaattgatggtatgcctccgtggcgcgcatgtgacaacttttgggggtttttcttctgttgattctatttgtgacttctccgattttcatctcttttttttgggtacgtggagggttttgttgctttcctgcttgcaatggcaaaggtcggacttgtcctctttcttcgtcgtgcatttgttcttgtcacgcgcaaaactgttcatttctctgcataaagggcagtttttgaataatactcattcggtgtttgataaatgtgcatctctggaaggttcattgttgaggatattagtgcagtgccttgttctggaatctggaaggttcgtccaataaggatttcagtgcggcgttgttaatttggggtacgcgctgcaattttctttttttttttcttttggtttctttggagtcatggaaatcccgctatcgctttccaaaggaaaaaatgttctttctttttcttgcctttcttcctggatttgttcccctttccaaatcttttgcgtctttgtggtatatatatagatgtataatgacatgactattattgtaatttatttgcattctcctatgtttatagtcgttttattgtcatatgatgatatggtatagttcgttttcatttgttgacgtgcagggttgggcagaggctttgcagcttttgggtcagac

SEQ ID NO: 8129 - DNA, 898 bp, Zea mays
  Intron number 1 from transcript GRMZM2G179444_T01 (locus G RMZM2G179444) derived from phytozome v7.0 (chr-ID 8; pos 1 21179446 to 121180343 reverse strand)
tccgcaaggtccgcgcctcccccttcctctcccgcccgcatcgcttgcgcctagatcccgctgctcggtttcacgcgatctatagtgggcgtgggctgcacgcctgcacggcaccgtgtatgggtcgtcggcttctggcgtgctcggatcgagctaaattgctgtcagatttggttacctgcgggttctaggcatgggatttgggtgatgttggcggttactgtcatggatctcttaagatctagccagcattggtggtcaggtgggggtggcttggtgcattggttttggagatttgcggggtggtgttttgattgcaatgttgtgatttgactacctcgattctcgagagttattggggtctttggttcgcgctgccatgtaattagttgaattagtgaaagatgtgcataagtttaccattttgtagaagctagattcattttttgagcttggtattgatcgatcatggccattttcaggtgagttttactacactaataatgtgtgtgatttaggtggggcaagtgcgtggaccagcagagtgctttgtgttgcattttgtttgtagaagtattaacattgtttttctttgcataatcaaagagaatgaagtcccatagtgcacatacaacgccagaggttggcagtggttgcaacgccgaaagcagaagttgttggctaactggccattgaatactttgtagtacaaccattgatcaacctgttagtagagccttggcttaccaagttcatgtgttgtgatcctcttttccttagtttcaatataatgcagacatgctggttagatttgttctgctactgtcacccacatcttgtttgcaccatttgcatccgtccagtgatccctatgttgttcgtgtatcttgtgtaggac

SEQ ID NO: 8130 - DNA, 1014 bp, Zea mays
  Intron number 3 from transcript GRMZM5G866678_T03 (locus G RMZM5G866678) derived from phytozome v7.0 (chr-ID 2; pos 6 362438 to 6363451 reverse strand)
cgggaccaagctttgccttgttgctcaggtgagtgtcgtcgatgtagcaaggctttactagtcgaaacatctttattggtctgttttgtaaggaatccgagtgcttctgtgctcttgcagttctctggattaacattgcaaactgtgtttacatactgatccgtggtactagtatatacagaacgtctgcatgttgacactagtactagtatatactttctgcctcaccctattcagcagtggtcataaaacaaaattaatgcggttctaacctaaggtacatgcgctcgtggcaaagctaagcatcgaggagaggataatctttgtgcttgtttgcttgactcctgaatgtggacctcaaccccaaaggttatatgcggattgattcaacctgtttactatatatccatgttgggaatagttctacattgtgtataggcaagtatgatttatatggttgagggtgcaattactaatgggctagcattttgggggagtgttggtcgaacggacctaaagcccgctgctacgcgttcgggcgcgtgtgacatggcccgatagcctagatgtgtgtgcggacaacctggcgaccgtgccatgtgtcggcggtccggttccaacaatccagacctttacatgatcttaagtcagtatgtcttttctgttttttgctaaggcatcttaagtcgaatgggccttctacgatccttccagaagaacagaatgataaaaataaaattcctgagatcaacagtggcgattttgatctagatgccttagccgaagcactcgaacaatcggcaacattagcatctaattcaaagaagaagaataaatcgaagcatgctaatgctcctgtaaaacgtcctgtactgaaggcgcaagcatgtgatcttagcataccaggtgtgcacaagtttaaaagaactcgttaccatgcatgcaaaatctgaatatctgattgttttgatctgataaaatcctgttgcagttctttcttgttttacatatatt

SEQ ID NO: 8131 - DNA, 584 bp, Zea mays
  Intron number 2 from transcript AC210605.3_FGT003 (locus A C210605.3_FG003) derived from phytozome v7.0 (chr-ID 2; po s 104734984 to 104735567)
ttttgcagacagagacagcaaggagggtggaggaagtaagccagctaatccaaaagctggttaaagaagtcttcaatcgctcttttgggtgggtctgcaatggataggcgtatcagtgatgtgtaaatcgctagataaatatggtgatgtttcgttctgctgctatgaagcatactcttgtagtggtcgatcagatgtatgatcacctatctagtactagtagctcctttgatactcaactgaactgctattgtcccatcagtcttgtcgtgcttgattagggcagcagagttgagatcaggttaaaaggagttgcttcatgcgctgcttaagacacatcgtttctgatgaactttatcctatttcataatgaaataggggggaaacccctccgttaaaaaaatcagaaaaatgtttaatttttaccctattccctataggctgaatttaccagtaacatttatagcattcaaggccacatcactggctttaatggttcatcgaaaacatacaaaataagaaatatgatatggacagtaacattgtggcaataatggatcaaaccagttagccatcaaaagcca

SEQ ID NO: 8132 - DNA, 656 bp, Zea mays
  Intron number 1 from transcript GRMZM2G071669_T01 (locus G RMZM2G071669) derived from phytozome v7.0 (chr-ID 2; pos 1 20695861 to 120696516)
ggtacgtatcaaacaagaaactttaaggcaattgtcaaagataattaattttgtattccactttttttgatgattactgatgctgccatttgttgtttgtattttttttaggtacaaggttttcaaaaatccgagcattagtgatgtcctgtgcacaacaacatcagaggctcttgcaatggggaaattcgtgatctgcgcagaacatccatcaaatgagtttttacgcagtttatcagggacgtagcagtgagttggtgagctctcttggctcatagaagccctactttttctgattttcttcgagcacaggctgaaatgtcaactattgggccaaaggttatagagaaatcatagatttgatgtctaaacataaaagcgacttagaaggattcaagttagatgtatacggaagtggtgaggactctcaagaagttcaatccactgccaggaggttagatttgagtctcaagtttttttcaagggaagggattatgctgataattcactccatgggtacgtatcaaacaagaaactttaaggcaattgtcaaagaaaattaattttgtattccacttttttgttgattactgatgctgccatttgttgtttgtattttttcaggtacaaggttttcaaaaatccgagcattagtg

SEQ ID NO: 8133 - DNA, 467 bp, Zea mays
  Intron number 3 from transcript GRMZM2G033243_T02 (locus G RMZM2G033243) derived from phytozome v7.0 (chr-ID 9; pos 1 10316247 to 110316713)
gcaagggtatgaactgttccttccatatgtttttagcatagatttaaacagtaatcttgacttccatagccctttcctaagtgttgtaattgttgtccacgcctatattcgcagatacattgctcttcatattatttaattttcagcatcgttttcctcactattgggaattatattataattatgtagcagtcttgtttcgagctctgctgtgcagaaattgatatatgaaaacaacactggaattcaacatgttgagttattgattgtgcgtagcagtgtatctatacagtttatagcaatgaaagggggaggctataataaaaataatgtcaagttccgagcagtttatcaacattttcctgccccacatccttttcttacttccctaacacaacttttaggatacaaccttttgtatttaggggtgacattgatgtgaatgtcccccgtttgattgtcacagg

SEQ ID NO: 8134 - DNA, 908 bp, Zea mays
  Intron number 1 from transcript GRMZM2G333591_T01 (locus G RMZM2G333591) derived from phytozome v7.0 (chr-ID 2; pos 2 23324568 to 223325475)
ctaacaccaccacctctgtcgtgcttcaggtaatgttcgcctggctggtagctaccatgctactcttgatttacttctgttgttctataaacagttccaccattgttgttggttgtgttaggtacaatgtagctaggtgcattatatagtaaatcatatatagtactacttttggcgaaccgatggaaaaccagtggacatatttttactcttattagagccaattatatcaattgcactggaaatgccataaacaaagtaaaatgcacctcttagttctcttattttaaccttaataactacctttctcagtgcatctccaagggtgcagacttgatgtgcttatgtgcactaatgaacaacttatagtattgatggtaggtacaataattactaggataggatgcccacttccaaaactcttatgttggctatcgctgtttctaaatctttacttaaaacaatagatatatggaaagcgttacaacatttctgtttttgaattgttcaattcatccagtaaagctagaatattttgtgattgcttcttaacttctttactgtaatttatctcatttacactcaaccgcacaattttaactttctgttttcacgatctatcatgtgcgtttagaacctttcagtggaatgatttgcttgtataacagagatagaagagaaaaactgtcagaagacttctactttcacatacttccaacagatatgcaggatgtaagctctcagcgccagttgttttcttcttcttgttttatatctgcatatatagaatattgtagcatgttaacaatgttaagtttacactaatcaaatttctattcttactgatcatttaacttcctctgggcttaataggctcagggttctttggatcgtcgaggtgttttttc

SEQ ID NO: 8135 - DNA, 669 bp, Zea mays
  Intron number 4 from transcript GRMZM5G859060_T01 (locus G RMZM5G859060) derived from phytozome v7.0 (chr-ID 8; pos 3 3047139 to 33047807 reverse strand)
tactgctggtgtcacaggtttgcccactaatcttgattgcattttgcttcacttatctatggatttatggttctgtactacaattctaaaacttgtttttgagttggatcgtttacctgtattcccccagagtttttttacttaagtatctgggacatgagagaacatagttttgttcacaataatgcaaccattacatctttttatcacaaccttgttatagcagaatatggctaaacgagtgaacaataatatacttcattcgatgctttgttaattgttatagcagtatgcaatacatataaatatagcatactcataattggagtagcaaaccatcttacttattgtttagagtgagaaaactatagacaacagaacattttgtctacaagatgacaatgtgctcgtggttgtgctccttttttgtgctttttagttgaaatctgatgctacttaaatctaactaatttcttagcagacaacttgccttctgttgcactattttctgagcacataattgattgtctctgcctttctgtttctaggtccttaatgctttgttcaacctttgcaaaattaataaaagaagacatgaacaagcaaccgaaaatagaatcatccctcacttgatgaaatttgtcatgtcagactcacctctgcggcagt

SEQ ID NO: 8136 - DNA, 979 bp, Zea mays
  Intron number 5 from transcript GRMZM2G067675_T02 (locus G RMZM2G067675) derived from phytozome v7.0 (chr-ID 8; pos 1 7302812 to 17303790 reverse strand)
gaagtgttgcttctcaattgcggggttagtcgctcttcttgctcttgacttccatgtccatatgctgttgcaagctggaccaattttgaaagtacactggtccagaaaaatgcatttctgtcacaagagggggaaagtggctataaaaaagcaattataaaaatgtccactcagaaaacctttgagtggtaaaacagctatcaaagcctgatgaaaattttgaatttaaaaatgttttaacacttctgcatatctgttaaataagtttcttgtatctaacacaaaatagttaccctatttctggatgcatcatagttgatgtgaaacgtgttggttttcgaacttttgcttagtgcttctgcatagtgcgttgagtagtactaaatttagttttgtgtggtctaggccacatcttatgctttgtacaaacaagcaagctaccatgatttctattggtgtgctgcagctggtcttgcatctactcatcacagacaggcagcttgtctttgccatgttgttgtccttccattgaacgccgttgaattaattatgtcgatcaaattaaaccctactcatgttcctgctgtggagctctgccataacgttgtatgtccatgtggtatattgctttcaagtccagttttggactacccaatctctatctgtcctcaactcaagccatgagctctgccataacgttgtatgtccatgtgatatattgctttcaagtccagttttggactacccaatctctatctgtcctcaactcaagccatgagctctgccataacgttgtatgtccatgtgatatattgctttcaagtccagttttggactacccaatctctatctgtcctcaactcaagccgtgtggtattaggttaattgatagcagcaaagcaccatacaagcctcgcccacgtatgctgtccaccatgtatgcaaattaactctcttccattttatccagaacatatca

SEQ ID NO: 8137 - DNA, 373 bp, Zea mays
  Intron number 3 from transcript GRMZM2G021873_T02 (locus G RMZM2G021873) derived from phytozome v7.0 (chr-ID 2; pos 1 67587978 to 167588350)
gttagtttcattccacttgatttgagaaaggaaagcaggtgatttttcttcttctaatatttcctacagatgcacattcatataccacatttgacctggaagacactgatgcagtagtaatctattacgtgttctcgtgctgttacaaaatcatgtttgatttgaccctagaatctggcaactttatgaaagaccgcaacaggatatatggggggtttgaatgaaaaggaaggggacttggctagtttgaaatgaattccctcaccgattcattcttgctgacatttcttttgccatgatatttgtggatatttatgcaaaatggtgattggttcacatatcccatactggccctgtttctgcagcatacaat

SEQ ID NO: 8138 - DNA, 912 bp, Zea mays
  Intron number 1 from transcript GRMZM2G015368_T01 (locus G RMZM2G015368) derived from phytozome v7.0 (chr-ID 8; pos 1 09500475 to 109501386 reverse strand)
ttcccattttctttgaagtacttgtatacactagagcaaactagttagtccaattatttgtgttgggaaattcaaccaccaaaatcaattagaaaaaaggtgtaagcctaattccctttcaatctccccctttttggtgattgatgccaacacaaaccaaagcaagtatagaagtgcataattgaactagtttgcataatgtaagtgcaaagattacttagaattgaaccaataaatattttcataagatatgcatggattgtttctttatattcttaatattttggaccacgcttgcaccacatgttttgtttttgcaaattcttttgtaaattcttttcaaagtttttttgcaaatagtcaaaggtaaatgaataagattttgagaagcattttcaagattttgaaattttctccccctgtttcaaatgtttttcctttgactaaacaaaactccccctcaataaaatcctcctcttagtgttcaagagggttttaagataccaattttgaaaatactactttctccccctttgaatacaataagatatcaattggaaaaattcatcatttcaagaaccttttcttaacttcaaattttgaaaattggtggtggtgtggtgcggtccttttgctttgggctaatactttctccccctttggcatgaatcgccaaaaacggatacttgagtgagatataagcccttttataactactttctcttcctttggcaaacaaaatatgagtgaagattataccaaagttggagagttgctcggagcgacggcgaaggataagtaatttgatggagtggagtggaagcctttgtcttcgccgaagactcaaattccctttcaatacacctatgacttggtttcgaaatatacttgaaaacacattagtcatagcac

SEQ ID NO: 8139 - DNA, 744 bp, Zea mays
  Intron number 1 from transcript GRMZM5G845736_T01 (locus G RMZM5G845736) derived from phytozome v7.0 (chr-ID 2; pos 2 8725220 to 28725963 reverse strand)
ccttcctcttcggcgccagcacgtcgtcttaccaggtaggcaccgtatggaagccgttgccgagctcaacaagctagctctaaacgcgcgcgtgcatgtagtcagtagtctgctgcatagtttataccctgtttggctgtcttccttctttagatggggaatcagactcatactgaacaggctacgatggcacatatatatacatgcaagctatatatgcttgtttggttggctgacaagagataatatttgacactccctccattctaaattaaaatctgttttaggtttttaaatagattcatacgattgatatatgtgttttatatgtgtctaaatttattatcatttgtttgaatatagaccaaaaactaagaactaaaacgaatattgatttgggatgaggggagtagtatttaacttatatgactacgctctaatagtcccaactttacctttaatatcttaatccactttataaaaaaacactagtatagcttgatatacattaattacacggcaatggtgtccccttttactactcatttactcgatgaaagtgtagctcgatcttcccctaaaccttttttcttccaatttttgttttgatggtctggtcatacctgcagtgtcgaatgatatatatgttagttcaatacttcctctaccgctttccatttgattccttcttatgactaactcaatttaggtcgaaggcgcatacctagacgacagcaagggcct

SEQ ID NO: 8140 - DNA, 685 bp, Zea mays
  Intron number 1 from transcript GRMZM5G842587_T01 (locus G RMZM5G842587) derived from phytozome v7.0 (chr-ID 8; pos 2 427124 to 2427808 reverse strand)
tggcagtccttccacttgaatttccgcagcgcaacctgcacacgattgcaaggatattaagtattaggggctcatatacacaagttcagcttgtatgcctgcattgctgaatgctggatattaggtaacttcacttctttatttgagggtaaagggaaaaatggtgatggaatgaataagaaatatatatatcattaacctattatttgtccatcatgtaatttgtgcctgcatgattgttcgattaacagtttcagtaattcagtagcaatttactactggtggatagattattcgtgctttgaaatttgttactacaaacatttttataagagaaacattcaatttgtctacttcctcccattgctttgtgttcttagctatcccattgcctgcatctactaagtgattatggaaagagtggatgacaggatataacagattcacttgtaatttgtaaatagcccaactttcataacaaagtcaatggtacaccgaagattttatctgacttgtctgccttgcaaaataaaacctaagattttatctgatttgattatttccagtgtcctaattttagtgccaacaatgaatgtttttcatctaacaagctcagcatgactcaaattaaattgtgtttgaacttctaccgtgaactgtagcagcctgcctcgcttgttgacaa

SEQ ID NO: 8141 - DNA, 1037 bp, Zea mays
  Intron number 1 from transcript GRMZM2G416024_T01 (locus G RMZM2G416024) derived from phytozome v7.0 (chr-ID 4; pos 1 77153799 to 177154835 reverse strand)
gctcctacgggtgacacttcggtgggcaaagttttgtatttttggtttcttcatgtacaagttaaatttgaaattcatatttatgatgtaattaactaaatcataacttgtgttagaaaaatatgataataatttttcatcgttattctatatttagttttataccattaaaattattatgttatcgatctctaaaatataaaaataactataaaatcataatatttttataggctaaattatattattagttaatggtcaacaaaatttatactgaaaaatcagtttgtacataaagaaatgaaaaaaagacaaatctcattatgaagtaaattaaaccaactcaaagaagtgttggggtaaaatgaattaaaaatattttaaaaagtaaaatgaacattgtccatatgtgagagaagtaatttggacttttttccattaggaaactgtcctttgccttgtattcttagggcatgtacaacctagacattgctgcacggtactataaatataagacacaactaaaatacaacataatacaatgtcatgtctaaaacatgtgtcttaccatattcattgtatcaatcagagcattcaataaattaaggtgaccaatcagatagtctcctgtctcgaacatagagctaagacaatgtgtcttcgtcaagatacatgtcttgagtttttttttacattcaccccactagacacactttaagacataacttaagacatctattgtaaatgcctttagcgcgcctgagtggatctcaaggtgcgtttgcttgtgcagccgaagcttacaacgatttcattttcgaattaaacattgaagcctgctgtttattcaggacaaatggcgtaacctgatcagagcaacccacatacaccttccggcgcaaaaagatgtaatcacttgccccacttcaagccacatgagcacattatctattcctatcgttaatcctgcatttatttgcttcctgatgtttgattgagcagggtgactttctgcggaagaccaacccttctatcat

SEQ ID NO: 8142 - DNA, 663 bp, Zea mays
  Intron number 1 from transcript GRMZM2G021219_T01 (locus G RMZM2G021219) derived from phytozome v7.0 (chr-ID 2; pos 3 4989082 to 34989744 reverse strand)
ccgagacggattacttcgccgagaaaagaaatctggtgagttggttttgtaggatggcctggctcgggttaggttgttggtatccccgagtagttgtttggtcctcatctgattagctcgcggacggcttcactctcgattctagctctagcgtcaagatttgcagtgctttgatttgtcgaaaaaacttgggatgatggctccattctgcagctggtaatgctcaaatgtggcattccatggtgatgtattattgtacttgggttttactattggattctcctcatctgagtaggaaatcggaacacactactgtgctgttaggaattagttattcacgaattttttcaaatatgtgtgctttgcgatgcaagtgtgcagtttcatacgaacattttcttctgtccgttggttgtggctgatatatatgaggtttgagaaccattttcgattaccaccccaaaagggttttaaggtaaaaattataacatgatggtctataagcatttccttacatgttggcttgaacagaacaggtttgttttttgggaagttacaatagcaatttagattgtgtttgactgccctgcatgatgatgttgcttactttacgtgcattttgagtttttgactaatgatttgttgctatgttcaggaggatct

SEQ ID NO: 8143 - DNA, 493 bp, Zea mays
  Intron number 2 from transcript GRMZM5G892043_T01 (locus G RMZM5G892043) derived from phytozome v7.0 (chr-ID 9; pos 1 21907909 to 121908401)
atcaggttaatgtttgctccatctgtacatcttaatgtatatttgatgttcctttcatgggattaattcactggtatctatttcagtatttgattcataacttctgtgtgctccccttaaaagttgttgtttattaagaagtggaaatacatgataatctgcaaccacaaattgttttgtcgtgtggtatccaaaaagtttacatgtatacatctttttagcattttagtttccatttagtatcttctgctctctattcgaaagaagtgaagttcttccattccccaaacttataaatcatgttttactgttgtgaattgttttgcttagatgtagacaattttgttttctatagaaacatagtttttcaaattgcaccccaaaatatgatagattatatattttggttgtgattaggagtgttgggttgatggctgtccatttttttgttcttttttttcctttttaggacactttggagacaatagttctt

SEQ ID NO: 8144 - DNA, 574 bp, Zea mays
  Intron number 2 from transcript GRMZM2G006790_T03 (locus G RMZM2G006790) derived from phytozome v7.0 (chr-ID 9; pos 1 02786578 to 102787151 reverse strand)
caagactatcttcgaacagtttggtgagttctgcccttctgccagtgctttgaatagtttgaactgatggccactctgcaaatttcctttcatgcttttagtgaaatgcgaatgtgtcttttggcatggcaatttgttgatgaagcttttcttttcaatcatgttttttcgagattcaggaactggacctgatggtttaactaactcatttactgctgttttgttttacatatagttctagttatttgccataaattgtcaaattttcatactttatgccaatgcttgtttattcgttttccctttggttcctgtacttctgttgtttacacctccctctgcttctatttcttcatttatgatcaacatgattttaagtagcgacatcttatcttttttattcactaaaaagaaagcatgtgtgactgtgggaagtaatcaaagtgggaagactgctatgctttgtggaatattcgttgacttgcgctaatggagacaattatttttgacactgtcagttttcatgttctcgttgatgtgtcaagaagtggtgcttttgcagatgaagattcaa

SEQ ID NO: 8145 - DNA, 591 bp, Zea mays
  Intron number 1 from transcript GRMZM2G025966_T01 (locus G RMZM2G025966) derived from phytozome v7.0 (chr-ID 8; pos 1 56119115 to 156119705)
atattgggactcttggaaacttcaagaaagctaacgtacgatctaactcatgcttgccgtattatggattttggcatgtcgtgaagtttgcatctcatataaggcgcatgatcttagtttagggctcctgtcgtagcagcacttgaattcagggtgtctggtctagcacctggttacatgagttattgcaatcctcttcttcacagttaatcatatagccactggaagcatctgacattttgattcacagatctaaactatgatctttaatcatctgctgaattatcctctgtgtcaaggaaaaactaagattactgcatacaatcctgaactcaattcatgtacacggtacaacctagatcagaggcaaattgcacttctatggtagtacggtggtacacatatggatgttatgtcaaaagttgtacataaagtacttaagctgacttaacattttgaatcaaccaaatgttttttactggatttgtggatttgtacattttctattttatttcatgttacattggcatgtcacgacttgcgacatagtacttatcttctcgattgatgattatatagggtactgtaaat

SEQ ID NO: 8146 - DNA, 746 bp, Zea mays
  Intron number 2 from transcript GRMZM2G114220_T01 (locus G RMZM2G114220) derived from phytozome v7.0 (chr-ID 2; pos 1 5988539 to 15989284 reverse strand)
tgagggaagttgaagcaaaagtctaagcaaaagtattcataacgtaccactgcaatgtttacttctttgatttatcacacaactcactgtcatgcatattatctcaaagcattatgttgttggaacggttgtaattttgtacagtttacctagtatatggagcattgggattcctacattctacattgccagatagttcatctactctatgatcaaatttattattaatactggctcctatctggtctgtacatgcacaacaaacatgcttgttcatgctgcttctgtggaaaatgtttgatatttggtagatgctgcttttgatccgtagtctaaaaagcatgtgccttttgaaattcatgtgtacaagtcattactttgtcagaccaaaatattgaaccacttgattagatagccataagctaatacaagaatggtcagccccacaaaatgagcttcatattgaagattacagcacacaaagtttcttatgttgtggtcctgtttcattcttagcccccaaccgctatttttttgcattaaatgttgtagatataaattttcttattatgatatactcgttgaaattcaggcatttgcattgattccaacgatgcaaacattagttacatttcttctccatgcgctgttgccattatatttgacttctctccctcaattctgtaagtggtaatactggtatatgcttaattggcatgatttttccatgtagttttacgggggat

SEQ ID NO: 8147 - DNA, 1062 bp, Zea mays
  Intron number 1 from transcript GRMZM2G114220_T01 (locus G RMZM2G114220) derived from phytozome v7.0 (chr-ID 2; pos 1 5989258 to 15990319 reverse strand)
ggagctgaaatccaagattccaagctcttctgtcagtaaggaaccctaacttgcttggggatggatctgaggggagtttccctctagtcatttgctagtgattccttcgctatcccatccatccatgtttgcggttccgtgcgattagtggtttgctcttccgtgcacgaaagattgatcccggggcccaagtggttgctccacgcacgcaacgccactacgccaggtcatcgtcccagttgtttggcaaacttaagtttggggcgtggccttttgtagtcacgcacctcgcggattgaatcaaacatcacgaactagctatcactgccaaaaaatgcagatattctgaacggcacccgtcatatatgttctggcttgactaggttcggaatttgaatgcagattttctgaacgatacacgtcataactgttctggtgtgactaggtttggatttttgttttatgctattaatttgttccaataatggtggcttcaggtaaacaattagtgtcaaattgtcaatgcatcccagagaggttctaggttttggtgacttgtccactgcattatcccaataccagcatcgctgttgccgttctggttttaacaagaaaatttttgagctagctcatgagttgagttttgtgggagaaaatagtgaaaacggtgatttttgtaccacatctgtgttggttttcctatcaaatttcttctttgcgagaaaaaacagtgattgggtatctggtggtgtgttttagtaattcactattctttacctgcatctcagtttcatttgcatctggaatttgcctactagtgcatacggtgacaacagtaatatatgttctaatgttcatggtcacactgcagtgaagctttcatcatttgtgatttatcatttatgcaacttttgcattgtgtttgattattgatcacggcaccttttcactgtgtatttacatcaatggctgtttcttttcaagtctagcagctgtgctcacgcaacttcgtgttatttgttcatagcaggttgagggaagttgaagcaaaagtctaagcaa

SEQ ID NO: 8148 - DNA, 776 bp, Zea mays
  Intron number 3 from transcript GRMZM2G109425_T02 (locus G RMZM2G109425) derived from phytozome v7.0 (chr-ID 2; pos 2 17633551 to 217634326)
aaggtatgttgttggtttgttctgggaacttgtctaatcttctctgggttggtgtattgatttcattttgtggtttttgaaacttcttttactgtgtttgagatatcatgttggcatttaggaaattaatgtacaaccatatttatacctatataaggtgattttcctagttacactatacaattatgtcaggtgtagctgccatttgttggtaagaatttttacttgatgttaacctttctggatattattttactgtagattgtggtttggagttcctgaattgacgcggcattttgttctaagaacgggtctgcagtttgaatctttatctttatctcatcagatataaaagaaatatcctttctgggtgaagcattgctaatggtttagggatatcacatgatttatgtgatgattcatgacacccaattaatattattttgacgttgtttgaactcagatggcagtcaatttccatgtttaaagttagagagcaacacaaacacaatcttgattaagcattctttttttttcttgtaaacctgaaggtatgctgggaagttcttgtgcagctcattgtgtttagggaacatgagtaatatgtataccaggcttacatggatgttattacattagttagcaaaaaataatattctagaatgccaaggttctactatcttgtactaggagagctgtctttttggatgaagcctttcttgaaataagctattttctataattgtttgtaggaactcatccaagattcttggttg

SEQ ID NO: 8149 - DNA, 703 bp, Zea mays
  Intron number 3 from transcript AC191713.3_FGT001 (locus A C191713.3_FG001) derived from phytozome v7.0 (chr-ID 9; po s 50926160 to 50926862)
cgtcaagaagctgaagcacaggtgatttcgctatgtattacactattgcataatgaccacaggaatggctttagaggcggccagtagccggcacacagctacctggtggatggcgtcttgtgcttcaggtgtctcacggggtgaggaggtgagggagtaggaggggggtacaggagagaaatcctattgggcttgagcctaacagctagcccagtaagtttagtcggccaaaacagctagtcagatgattaattaggttaccaggtttctgatcgctctggtcgagtcggagcgcccagccgagtgttggggaccggcgtccgtccaggacaattaatcagatgactagataacattgcatggtacaccttacgtttctcatagttaactgataaaacatttagaatcaaggcatgctattttaggatatggcatttgagtaatctgactagtgccacatttgatgcatgtgtgtaactttcttttcttttttggtacacttgtgctggaattcaaaactatatgttctgttttcagctgaggttttagtctattctctattgcactgagaccagatgaagtagttgagaacttgagacatgactaaaataatcaattggtgtagcaagtagttatattgataacttattaatcaatatcattttcagattttgttttactcggccggggagggaaagaccgc

SEQ ID NO: 8150 - DNA, 825 bp, Zea mays
  Intron number 1 from transcript GRMZM2G360541_T02 (locus G RMZM2G360541) derived from phytozome v7.0 (chr-ID 9; pos 1 00946774 to 100947598 reverse strand)
ctgtaagtgctaactaattttcataaagacgtctcttcagtgaaatagccaaatgagtgcatacatgattgggttagtttgttcagtttactaaaagcggaatcaaggtaactaaaagggtctctgttcattcaagtgtagggtgttcatctgcttttagttcttcaaaacaaagcggaatcaaggtaactaaaagggtctgttaatctaactgaaattgtgctacgtggtatgactatttttgttttaagttcctatcttttattagaaaactaaatatcttctttttttagttccaacaaatttttgccgactaacaaccatgcagatagcactcctaactataactataattccacctgatcaacaatgtgcccagtcctagcattatgtactgctcataatttgtcacttggtctgtgtttttttgaatgcttactagaccaaggtacttgatgtagtggctcatgaggtttgatcttgagcctggataagcagaccaggttcatcagctcagatttatttttttaagatttaattttttagttgttataatttatggaatctaagtaactagcaaactaattactaaccagtataggaaaatgttgcttgctatcacattggagccagcaattgtattaacactttgggtaggatatgaatattagactgtcatttgtcagaacatcagtaaggcgtgaagaatcagaagaatattcagtcaaagctggtgatgaattaacatgccttattgccatgctacttgaaacactggtcagcgctcgtgcatgtctcaccaactgcgctgcaggtaccgtgtcc

SEQ ID NO: 8151 - DNA, 666 bp, Zea mays
  Intron number 5 from transcript GRMZM2G117755_T01 (locus G RMZM2G117755) derived from phytozome v7.0 (chr-ID 4; pos 7 4459696 to 74460361)
caggcaagttgcacatatttcttgttcatagttgaaacatgaactgcacgtggatttctttgttagaaccacctgttaaattttacaacttgatatttgagcaatgctatatgcatccaacgaaataagtatacatcatctagaaagggggaaatgggatggattttgtgcgtcagtggcatggcaagcaccaagcagggcacaacttgatagttatcatcaagatgtcacctaatgttgtcaagtgtgcagtactgtagtagtattcccatcaatattatgttcattgttcatgaaataaacatggacaccaaaaccatctcccatattgctggttttcttatacctgttaacgttatcacgtcaatgttatttagatgtttttttttgttttctggaatcatttgcacatagtttaatttgtttgttggtgatgaacaaacttgtttatactgatgttttcactgagtacaaactaagtacctttctttttgaagaaatcaatttaagtaacgtctcatctgctttcattttggaagatatattgtacggcattatcttcacgaaacatcgagtacgatgtgtctctgttccagtatttctgaactgttgctgtcggttaatggaacagctgctaggctgaggttggctgccagcgagaaagct

SEQ ID NO: 8152 - DNA, 891 bp, Zea mays
  Intron number 1 from transcript GRMZM2G436187_T01 (locus G RMZM2G436187) derived from phytozome v7.0 (chr-ID 2; pos 4 9294695 to 49295585)
ggcggcggcgcaggtcctcctccatctctatcgtgagttcccctcccctctaccgtaccttggacgatccttacttcctttaccgatgcgtcatcctacaaaactacgaacctactcgagttttgaagaatttaaccctttcggtttccttggctgtccagacctggcttccccctcggcgctggcgtgcagagtttgcactgcagatccgtttcggtgtgggcgtcgagggtgtgtaaggtgagggggttagctcctcgtgtagatagcttgacgagagaagggtgggatgtgactgttgtctctacttctggttcccatgaattgtagttgttactgatgttaataaactagattggggatccggctgcatttgttgttgtctccagatggcgcagatgcataacctacatctttgtgatattttctggtctaccttgttttcatgttgacaatggtctgcattgttcatatttgtgatttgattgccctaactctgtaaatttgggaccagtgtgtctctaacctagcacaaatttgtcttctttgcatagtaaaacagctactagggcatgtttatgttttagtacttgctggctgcatttaatgctttctccaaatgatgcatactcttaacgctaccagtagaattgttgtgtgttcaaggcttttttgaaagatatgaggttttcatcatgcaacagcaaccctgactttgattttatatggcagataccaaatatcatttatctccatgatgtaacgaatatttggcacatccctttgttgcttagagtatgtcatatgaaattacttgtatgcatgattgccaaattctcatttggcattttaacatgagatcttttctctctttataggatcagaaggcca

SEQ ID NO: 8153 - DNA, 738 bp, Zea mays
  Intron number 1 from transcript GRMZM2G126860_T01 (locus G RMZM2G126860) derived from phytozome v7.0 (chr-ID 8; pos 1 3599966 to 13600703 reverse strand)
catattgccggtcaagttcccacagttcttcacgggtgagctacgggttatccttttttttttctttttattctttgatcctgataaaagtttcgtgattgtaatcgttatggtgccttgctatggggtcgcaaaggctttgcagatctttattatatttgttaaattggatggggggtgagctagggttgatacaactatccactgttaggtagcgaataacgaaacatcttttgctgtcgaaagtgattatcgaatatttgattgattgataaccggcgctatgatttttttgttttcatttttacatgatgatttatgttgttgggcgagaccatttctagaggccatatgtttgactacttaggttatttttcggttggtaaacctttcaagagcattgctaactgttaaattacctacacagaatatcgatatcaactgggattaaaacaacaaccccttttcatgttaaaaagtgtgaactgaaagatggttcaattcaaaattcaaaaggatcaaacatgctattttaagaatatatgcacaattgcattcatatgattattctgctagttttgtaccaaagattatgactggctacttgattcaaatctagaatttattgacctggtaaaaatttattttcaattttgaatggtttgtttgccagtatgaactaatgaagaatgctatcccttaggcaagcggaggccttggagggcgtttcttttatat

SEQ ID NO: 8154 - DNA, 1019 bp, Zea mays
  Intron number 3 from transcript GRMZM2G012584_T02 (locus G RMZM2G012584) derived from phytozome v7.0 (chr-ID 8; pos 1 31680022 to 131681040 reverse strand)
cagtcaagatccagaccgccttccgaggttacctggtaatgtgaaaaatcatcacttccgaatccacctgtttgtttctgtgccatttggacgttagataggaacaattgtggcagttggaaattggtttatgtagatggccgcattaccaagcacatggaagtgttcgtttctgatagcttttgattaggtctttgatatttgggggggtaggaggaggtttgattccctccccaacccccctgatttcgtttccacacatcaacatgaccgggcatgcaagcaaatgtctactggtgaccaccctgcatatttgctctttccgtgttctagcttttaggtgtcggcagcttgccaaccttgcaagcgtgagttgtctagttgctgttactgagtggtatctcttagctgaatactttagctatttacatcattgcatgtcgtgctttcatctacctatctttgtgggctaaatgggaatttatggctgaagaagtagattttcttgctttagttgaaccttaggaactgttacttttctggtttaattcctttccttcaactagttcttcactttttaggtctgccctgttgtttatgccaatgtgcatttgtccaaagggcctacagatcattcttgcaaagtgttacagaaatgattcttgaacaactggcggttggtggcaaccacctttcgtcacccattttggtgttcttttcaattattttttgatactgatagcctgtctgccctgctattgagcctgtctgccctgctattgaactatccatatgagatacgctattagtggacgtagtttctgttctttgggaagtaggacttcatgggaattttacttgtttcatagtaaagcggaatcttacttttacactttgccaaaaaaaaaggaaagaaaaaaacaagaatcttacttttacaaaacaatgttatgctgagagtgttcggtcattgtgataacgtaggcaaggagggcactacgagcactgcgaggccttgt

SEQ ID NO: 8155 - DNA, 761 bp, Zea mays
  Intron number 2 from transcript GRMZM2G002807_T01 (locus G RMZM2G002807) derived from phytozome v7.0 (chr-ID 2; pos 1 95923496 to 195924256 reverse strand)
ctttgcagttcttcgtcggaggcaactggaagtgcgtaagtgcttgttctgcctctccagctttacgcgccttggggtctagaactgatgatcctggagatgctatgtaactgtatgatcttttggctgctgccgcattgggcatttcaacgggaacgggacgagattttgtcgtcatccatatatacatcgtggtttactctgtccatggccacttctacaaatagaatcgcttgtctgcttcccagcttggcctgacagccaaagccgttttgtttggtatataaaagtgttttctcccccgaaagggtggtaataaagttgctgttgtatctttcaccttttagaaaacttttagctgagagatgccagggaatgctgccagttcttgcctcctgagtatagagaggccttggtgttttcttgaccctgtttgctaagctttgagaggcctggccgaaggaggcaatgcaaaatgatgcatgttgtgaacttttgagttgtggttgtctattagtaatgggtctgcaagattcatcagccaaaactcaagcttcaactttgtaaattcatttttgggcttcatctttggatcagcgaacatggcttatttgctttgaacaaacatcctatttcatatacggagcttcttcacttcaggagctcttgctagcaacattaagttatgtcccttggtgtatttagttactcatcttagaatttgtggtgttgatgtctgtttcttttccctcttcttcaga

SEQ ID NO: 8156 - DNA, 876 bp, Zea mays
  Intron number 2 from transcript GRMZM2G150367_T01 (locus G RMZM2G150367) derived from phytozome v7.0 (chr-ID 8; pos 1 26699783 to 126700658)
tcccgctcgacctcctcaagttcatcgaccgcaaggtgaggaggcggttctccgtatgttgaaattgtgctgcaaattaggcgttctatgaaatgaaatttacaggtgcaggtttccacggtggaattttgccaaaaaatatatattttggattgaaatcttgtcaacttaactatttctagcagttaaccatctctatattcaatctccactctgtaaatattgtcatctattttgagtgaccgtatgattgaactgccggacacagtttaagggtctggattggataatgttaattgacctgttgctagaaatatgttcttgttgtcacgtgtactggcagtctgaaagggtttagttgcaatgcgttggtatcatggtattattagtttgacaactgaagtagcaaattaggttttttttggaaggcagaagcatcaagcaccactgaaccaaccaaacaaaatgtgtatgaccaagatttgaggtttattgcttaaggattacaagcaccaacttctggcgagttctattaggaactatactatgtttgtttatgtatttgactaatcatcatggtacaattttaactgatgtttcagatacgttcatcagctccttgaatctgcctacccatgtagagctggtcacttactcgtgcccagtatattgttcatttttcacacgcttcttgcaagtcaggccgttatacgttattgtatacgcactacaaactctgaagtcgttgtgttgccattgtcttgcattgttccatcatctgatttgtgccactgagcgaagaaatgatcgacgatttgcacgttctgccccccacttgcaggttggtgagtccgttgaggagatagaccgccgcgt

SEQ ID NO: 8157 - DNA, 521 bp, Zea mays
  Intron number 1 from transcript GRMZM2G116263_T01 (locus G RMZM2G116263) derived from phytozome v7.0 (chr-ID 8; pos 1 6422463 to 16422983)
ctgcctaccaagctgaattctgtataacaccgtagtacaccagtaacagaacagcctttcacgccttggagtacttcgagctccacattggcaccttcagaggctcgtcgtcggtggcactgcccccgttttcggcggcgctcagggaatccaagatcagagggttcgattcaccctcctttgcctgtggtaccgatagcatgcacaccgtcaataaaaatttctagacagatgcttccacgagaatataaatgctgcatatcgagtgaaaagaatctgacagaagattaatcaaacggcgaaaggtttatagatcttaatacgacgacattagctgcattatttgaaactcatgctaagcggataatgttttgtcaccagactggtttcaaacttttcaaagtaattaattatctgctcaaaccaacaaccagaccctatccatgggaatctgtctgctcaaaacacatggtactactacccatgaaactcagctaaccgttgcagaacatacctgcagg

SEQ ID NO: 8158 - DNA, 767 bp, Zea mays
  Intron number 1 from transcript GRMZM2G323672_T02 (locus G RMZM2G323672) derived from phytozome v7.0 (chr-ID 2; pos 3 2636039 to 32636805 reverse strand)
ccgcggttgccgctccacccgcatcggccacggacgtgagcgagggaagtgcagccaccaaatctcgacactaaccctaggtcctacaaaagccctagatcagcaagcctccgccttggcgtgccttcacccgagcacgaccgcgttcaggagacccgcgactgctacaacagctgcgccgccttcctcttcgacagcatgcgtccgggcccgggtccatcatgctcgccacccacagcgtggatttaggtaaccggccgagcaagcagtctatgtattgtcttcatgtccacaattggtatctaatgttttatgtagattgcccacacaagactggaaatatttggacttacaataaaactatcacaactcttttcatttgagaagctatattttcagacattgttagtcaattttttctggtttatgacactagatggacttatctgtgaatataaaaaatataacagaaactttccaattcacgttcacaaattaaaacaaatttactgatgctgaagctgcaagttttttctttgatttttttggcacctgttggatttgggttgcaatatatataaaatgtacttaactgattttttgtgagaaaatcagttgtggggctgtgctacttaaacgcatttaaagttcccttagcataaaataattgacactagctgttggaggtatggtgagaacgtgttagaagttaagaagaatcctaactgggtatgtccagtttgtcgtggcatctgtaattgcagcat

SEQ ID NO: 8159 - DNA, 786 bp, Zea mays
  Intron number 2 from transcript GRMZM2G130010_T01 (locus G RMZM2G130010) derived from phytozome v7.0 (chr-ID 8; pos 8 3245562 to 83246347 reverse strand)
cttcgaaaggtatatttctactttatcctcgtatagttaagagtgcggcaaggatagtagttaaattaaattggggactggttatggagaatgaattaattataaagtgtttggtttgaggaatgagctagtccatcgtcttctcacttctctttttttatttgatttgtggaatgaaataaggaatggagtcattccttatagttagttagtactaatatgagaaataaggtcatcccagcaaatttgaggaatggactcattatacaccacatcattttggattgagtgactcctcaaaccaaacactcccttaaaagttttcattggtgataggattgacatttcacatgatatgatcatcccaagtactgtgatcatttgtggttggcactatacttaggaatagccaactttataaatcacatagtgctacttgctacaggcagtttgttacactcagtataagctttattacaaagactcctatatttctactcgaagttgaggtgttcattattgaaagaactggtagcctgcctgaatcgtcacttctacaaagtaatgttcccaaggaacacccaatcacattcatacacctaacaccttctgtgctcatgaatttttcatgcacacgtttctgtaaaaaaatgcctttgcagtagttgagagaatcacaggtgcatagttgctggtcttaattaggaatttgggatacatatacccacccaatatttatcatctcgttggcatgttcggttttgcattgcacaggagattacgaca

SEQ ID NO: 8160 - DNA, 579 bp, Zea mays
  Intron number 1 from transcript GRMZM2G028660_T01 (locus G RMZM2G028660) derived from phytozome v7.0 (chr-ID 2; pos 8 6780988 to 86781566 reverse strand)
ctgcccctaggtgcgtactgctgctgcttcatatcatctaaatccatttcgattttggttttgcgcaacagttattaggtagtagcagaactcgaacctagttgtcttaggtctcgtctcgtggacaaaaggccaagcaatcaatttgactctggaacatagtaatctgagtttaatgagtgttcataagtggaacatgttataagggggtctaaaatatagttaagccggatggtgaatgacagagcatgttatctatgagtagcatccttgtagtccagtctgtgttgacattccctggtcaaagttgtatctttgtagtcttaagaagttatcgtctttgttgaaacactgtcttctgcaaggatcgacacaatgtttccttttatcaggcaaagcaaccaacatgctcagagattgtacctaacgtttatcattaactaccaaggaataacagaaaaacagagtagataattgatttgctaagctgaagtagcattctatatgcattattcttagtgttcatctatgtaatatttgtcagagagcaagaagataaagagaagcctaagcagctca

SEQ ID NO: 8161 - DNA, 742 bp, Zea mays
  Intron number 1 from transcript GRMZM5G817035_T01 (locus G RMZM5G817035) derived from phytozome v7.0 (chr-ID 9; pos 9 2339697 to 92340438)
tccgccaacgaccgcgtcgccggcaccttcggcgtgtacgtaaaccccaggcccctcgtccctcttctctcttctcgccgctaggggagcgctcagtattctcctaggccctgcgcgataggagcagagctaacttagttctgcttgcagctgtactgcaaaatggaagggaccgtagtcagttctcagatcatctctgcgctgaatgtgatgtatgggtttgatttgagttcgttagtccgaaattgtgaggagagcacgaataatttgccgcttcagagctcgaggtagcatagacaaggtgcatggcaagttccttttgggctctggaggaatcttggccaacaactgttttgctttcccatggtaatcttcaattacaaatggggttcttgaactagctagagagaatttctttagggtatgcacattcttggtttcagccaatatcactgtaggaatttgtgttttgacaaattttgtgaagattgatgttgaactgcttaaacatttcagcaccatatggcattcgaattacttgttttgttaggctgggaaacaagaaaaggccaatagggtaaagcaaatgaatatgtataaaaagtggccttgggctagcccctttctatttaaccttcatacggacattgctttgaaatttgatttttgtttctaactaatgtgttctgctattcttatttgtccagggtctcaaaaggtgttaaagggtttccaggcagct

SEQ ID NO: 8162 - DNA, 975 bp, Zea mays
  Intron number 1 from transcript GRMZM2G159125_T01 (locus G RMZM2G159125) derived from phytozome v7.0 (chr-ID 2; pos 1 82189694 to 182190668 reverse strand)
caggtaaatttggcacagcgcatcttgcaggctggcacgcaggcctagcttctctctgattccctgtagtgagctgtgctttgctttgcggccatggtttgcttgcgagctaatggattggccgtcaaggatgcctctcccttttcgctgttcgtggtcaccaactgccactgactgttggatcatccgtcagactgacgaaacgtgaaacgcattttgcaccgtcgcttggcttaacaaatcatcgtcaaagacactgaaatgactggtctaaatatacatggggattaatgctttaggggatgtttgtttggatcataatctactaaaattatataatcaaacttactttctccatcctgaattaaaattcgttttatcaaacttacttcctccatcccgaattaaaatttgtttgtcttttttaatgaattcataagataattaatgtatgtgttttgtatatgtgtatagattcatcatcatcaatttaaatatagatatataaaacaagtgttacaacgactactaaattaggacagatggagtatttttaaactaaatgttagtttaaattaagttagattatataatctatataaattataatctcaaacaaaccggaccttattgtgcatatttggttatagaaaataaagaaaaaaaaagaaaggaagatttttatagtattccctccatcctaaaattagttgttttagctctaattttttatgtctatattcatatgaataattataagcgtagaacatatattaattattatatgaattcagtaaagaattaaaacaaattttaatttagaacggagggagtactacgtaatctaatgacatgtcgaaaaggaacagacttttgaaagggaacagtgaactggaaaccttgtgttgtgaagatcttgtgcacagtgagtcagtgaccaatggcggcacgtgttctgttgacgacggacaggcc

SEQ ID NO: 8163 - DNA, 1039 bp, Zea mays
  Intron number 1 from transcript GRMZM2G147152_T01 (locus G RMZM2G147152) derived from phytozome v7.0 (chr-ID 2; pos 1 25916135 to 125917173 reverse strand)
gaaaaactggagggaagatcaggtcgatcagatcggttggtttctttggtcgtctgtttcctgtgcttgttctcctacctcgttttatttctgaaggaaattaaactagttgctccactgtataatgtaaggactgtgttggttttgtggccgagatcatatgcatccttgaaccatattattcaggttttgttatctttttcatactctttaattaggacttgttagtttagtaatgaattgaaggattaaatcctttattagtcaaaattaaatagaaagagaattaatctccctcaaaatcacctccaatttccatgggaatgaattttaactcgctcaggtgtcttattttgtggtgcaaagatcatttgatatcatgcgtgtgcgttatttggtgagaaaataattcctttcgagcacatcaagaaagctagctaaattagttttagctcaagcagatggcttgttcattatcttgtgtgggctagctatattggggtttttaattaatttgaggagataacctaaagataaacaaattaaaaaatgtggtggtgagtagttcttcagtttcatatagcaaaactatttgcaagatgaattaagagtaacgttgatgcatgtcacaaatttgatattattcgtttacagatggtctcaaaaagtaactaaaaatcacacatatgttttaattctgttcaattttaagcgtctttattcttcctcacgtatagatcacaattagcctccaatttctgttcttttttccaagctggaacttactcatgctgcacagcaagtgccagtgtcaagggtggatcacctactggaaaactctaatgacatgcttgaaattaaatctgcgagcaaaagtttttctgtgccctccctctttaatttaatctcgcccgtcttaattaacaacgaaactaaatggtcatcaatttcagataacttcttcactcgttgattaaattagtttctaattttgtgttgtcaaggcaagagctgccggctcaggtggttcaaccagctg

SEQ ID NO: 8164 - DNA, 628 bp, Zea mays
  Intron number 2 from transcript GRMZM2G414140_T01 (locus G RMZM2G414140) derived from phytozome v7.0 (chr-ID 2; pos 5 6240744 to 56241371 reverse strand)
taggtggagtatcgtcctctacaccttatagtaaggttagtgtaattgatgttgaatcttatgtataatgcccatttcatcaatctgattacattgcattataatgatacatgaaacagattgtgctttctattttttattaaataagggactgcactatctaatatttaattatcattatcttgcctgacatcacttgttgcttctattttgcaggtgtcaatgtgcataatatttgataattgagaccaataaaatatctaggacagatcaaaatgtgccataagttatggttgtgatatcatacttagatcatcctggcaagtagcctttatctgaatacattatatgctgagctatactaaaatagatcaatctagcaagtagcatgtagccaaatacaatatgtgatgaattgatgtgcttgcacatttgcagtttgaggaggggtcagcccctaatgcatatgtgtttgcattagtggaacaactgtggatattgaaggagagcatcatatgttttaaaacaagtgtctgagttttttctggtggcatgtacaccttgatatgacattttcttgtctaaatcttcagttctgtagcttgtctacagtaagacgagagttcac

SEQ ID NO: 8165 - DNA, 371 bp, Zea mays
  Intron number 3 from transcript GRMZM2G080937_T01 (locus G RMZM2G080937) derived from phytozome v7.0 (chr-ID 8; pos 7 977874 to 7978244)
cgtcaaggttgacaaggcttgctgggaccagcttggtaattatcaactcttcattgattatttttctccgtttcttttgattgcagaattatttgccttctcaagtcacttgttgcgcatgcatcttaaccaaactatctttggcaaatcactaaacttgtgctaacatggtaatgaacctagtaaaaaagcatgcccatgatagttccccttgaccttttgtatttgtaaagacaactatcactagccatagtcaacagctcaaaaccatacattttcatatggaaaaactcttttgatgggatcccattagaactgccgttgggatgaattctaaccatttccatttcaggtaggttggtgggtgggat

SEQ ID NO: 8166 - DNA, 1001 bp, Zea mays
  Intron number 2 from transcript GRMZM5G866910_T01 (locus G RMZM5G866910) derived from phytozome v7.0 (chr-ID 4; pos 2 02442474 to 202443474)
gagtgcaggcaccttcggtcccatccgctgttaaggtacattgattatttttttgttttctacacgtagtgggtcgatagatgcaattcatagattatctattgtgggcgctggaagctaaaagggatatcagtcatcatctgctgatcagcagaagcaataatgaccaagctcttctctggtagcacctccaaaatttttcttctagagatgtattcctcatttcagtcgtttgtgctgactggtatgatctctccatcagctaataactggctaaaattatagcaatgtttaagaaaatgcatacaccattgggtttacagaataacaaaaataaataagggtagaatttaactcgatctgcagaatatattttagtggatgagaaatatatatcagcatatttggctaaacaacacccaatgtggaccatattataattctagtaacttaaaatccttaattactttatttgataaataaagtactttatgcatgctctgctcataaacctagataagattataagcaatgaggacaatcttatacctcccaacttcaacctctctgtatgaaaggattgtggacctcataacttaaagcttgaaaatgaaccaggtgccaggccttagaatattagtagatactactacatcaaaagggggacaaaaggtgtcacagtcttatccataatggcataaataaaatcattcttttattagatgcatgcgtttttttggtggtcctgcactcctgttgtatctctctaaaaacttgaagtgtcataacaagatgcaaaagtactagcagtggcggagcttctcataggacgaaaggagcacgaccacccctaaacatgtgtaaactacatagttgcagtcattttgcttgataaaaactaaaagttagccttgttatttaatgattagcccctactggatttagggtagttgaatgtgtggtaatatttctctctttttccctgatgtgtaggagaacac

SEQ ID NO: 8167 - DNA, 771 bp, Zea mays
  Intron number 1 from transcript GRMZM2G031670_T02 (locus G RMZM2G031670) derived from phytozome v7.0 (chr-ID 2; pos 1 05904949 to 105905719 reverse strand)
aaggtaacaatcaaacaaactttaaattcactatataacttttgaaaatagttatcaagaaatgttttcatctattttatctcatgcaataaacagagcaacctgctgggcatcataatataaggaaaggaaggggcccaaccttgaagaagaacatatattcaaatagtgctgggcctaaaatctccattacccttaatgaatatggccaacctgttggtaggaacaacaaagagtttggtaatttcataggaactttggtgaggaaaaatatcccggtttcttctgaggattggagactagttgattataaaaagaagttcgagttatggacaaaagtgaaggtaatctgatttattgagttaatttgacttagcctattatgagcagatttggtaatcaactacaattttattgaaacaggaatactatgagttggatgaatctggtatagattatgttataacatatgcagcaacaaagtagagagagtttaaggctgacctaaagatgaaatactttgatgaaacattgagttttgaagagcttattgctaaaaaggatgaaagggtgaaagaatctaattgggagtggttgataacttattagatgtctccagaagctgaagtgcgtgctaatttgtttttaattgcttttttgagatataaaccttcattacattgttgtacgaatgaatttgtcttattgttttgactaattattatttatgttttaggttcgtacaaacagaggtaaagataaccgttcaaa

SEQ ID NO: 8168 - DNA, 461 bp, Zea mays
  Intron number 1 from transcript GRMZM5G886863_T01 (locus G RMZM5G886863) derived from phytozome v7.0 (chr-ID 8; pos 1 50808372 to 150808832)
gacctcctcagctcccccatccgcatctcgcgaaggtacgcctacgcgctcgcacaagggggtggtgctggcagctggccgcctggccgtaaccagaccacgctctgcacgacctgtccctagttggtgtggtagctagctagtgtacctcagcatggaattgggagcaggtttctcttccagttccactgcaaaattgagattctaggctcttggtgtggacgtcgatctgcacctacattcgaagcatatttcataggatgtctagagctatctcaaatttattattattttattattatctcagtgtttctagttgagctgagcatcagtgtacattatcaatatctcagtgactcaaaaaggctttgaatttaggggaaaaagtacacaaagaggtcaattatttgttcttttattttgcagagaacagaagctggtgagcgatccagaattcggtc

SEQ ID NO: 8169 - DNA, 631 bp, Zea mays
  Intron number 3 from transcript GRMZM2G426229_T01 (locus G RMZM2G426229) derived from phytozome v7.0 (chr-ID 9; pos 1 26772264 to 126772894)
aaagacatatatctgccaaaggattactacactcggtaaggtaccttgacttaattattgtgagtgggtgtttgcccatggacacctatgtgcaacttggagatctctccctgaactttatagtacactaaagtatatttgctccagaacaggattatgattgttgttgcttgtttttaacatattataagcatgttctttacagatttttaattattattctctgtatcgtatggtttacactgggttgctttacgcaccccctgagattaacagtgaaagtaacttttttgaagacgcaagtcttaagagtactattgaagaaaaggaagaaatagaggtttaaagagatatgcaagttatgaagagtttcaagtgtatctctaaacactgatgactgcaaggtcagcagcttagtgcctgctttacctttgagattgatttgtgtatcgactgaaattgatttgtttgtatcaccattcttggaaggaagagttcgcaacatcttgatttgattgtctctgcaggggtcttctccttaatggttctgaagcattgttgcttttagtgaaacactaatttgctttctgtttcagggaacctagaggatttgggttcatccaatactttg

SEQ ID NO: 8170 - DNA, 946 bp, Zea mays; identical to SEQ ID NO: 4749
  Intron number 1 from transcript GRMZM2G145451_T06 (locus G RMZM2G145451) derived from phytozome v7.0 (chr-ID 9; pos 1 38321398 to 138322343 reverse strand)

SEQ ID NO: 8171 - DNA, 621 bp, Zea mays
  Intron number 1 from transcript GRMZM2G138624_T01 (locus G RMZM2G138624) derived from phytozome v7.0 (chr-ID 4; pos 1 33925118 to 133925738 reverse strand)
gcaacggcttctgcaccgtcggcgccgggaacctcgtgagccgccgcctcctctttacccaccaccgcttctcggttctcgcccctttcttttccccccgtatcgtgattccgttctgttcctcgctcgatcatcataacactagaatcgtttggtttcatgggaaggaagggagtgcagcgattttgtaggaatctgtaacagggacagaagtgatcgctcactggatatatcctcctcggttgtatcgttgtatatttcctttctcttccctcgacctatttttttaatctatttcctggtcagtataaaaaaactctcgaccagtgtttgggtatgcacagtacaactgtacaagtagtagcagacctgaaatttctgccgatcctatgagagtgagaccgttttgttgttatctagtaaaacacatgctgtcatcgttacattagcatgttctcttcgtttgcattgtccttgcaattacgcaagttcctgttcccttttctagttcatgcgccgtgctattagtaggtttgattattgttttatacagagcattttagtcatttatgcttttcattcacaggctcctgttgcaccaaacaagcagatcagtaagat

SEQ ID NO: 8172 - DNA, 705 bp, Zea mays
  Intron number 1 from transcript GRMZM2G559763_T01 (locus G RMZM2G559763) derived from phytozome v7.0 (chr-ID 8; pos 2 7814355 to 27815059)
ggattgacgttcggcaggtgagatcataggtagcgtaccccttcgatccgagaaatgtgtgccctagatctcaaatccagcggtcagtttcacacctcggtttatcatgtaagcgtctgatctgggccgtctgtttagatctgacgattctgattaagcgatacccctttcgcgtacacattttcataagaaccctctgggaattagagaattaacccatggttcatcgttgttgcaaactgagtctggtgaatcttgcgagttagcccctggacttttaagtattattgcgcgcaacccaggaacagaggaatctgtactacttattaaggaggtaagggtagcctgtcgttctgccttttttcatttcctgttttgccctcatccctgttatggctcaaaaaatgaaatctgcaagaattgtgaatcgaactcaagacctgctgctagattagagacaacatatccaccacaccacgtcttattttgatgttatattagaagatataagagttattaagtctataagggtagcctacctctcgctgttctgccaccagccgtggcctccctcccgcgcggcaaaaatatgtggcgagcaggaatcgaactatgaccgattcggtagagaagcacacgcttaaccaagccaactacagttgttttgtgttacatggtggtcgtttattttatttttacagccga

SEQ ID NO: 8173 - DNA, 1023 bp, Zea mays
  Intron number 3 from transcript GRMZM2G028139_T01 (locus G RMZM2G028139) derived from phytozome v7.0 (chr-ID 2; pos 4 6000667 to 46001689 reverse strand)
ccctctaaccatttcactatcaggtacgtttatttatgtgctttgcatgactatacatgttctaaaactatacaagacatatctgaagcatccaacacatgtatttcagtttggttctattagaaatcggtaaaagtgtgttagatacatcagaaatcatcttggacgaaatttacttcggctttattgttcttccaaacttctgagtggtgtctgatggctgcaacttgtgtatgcaacaattcccatgtcatattgtttgacctttcatgtgaccacaaattaaggaactaagttggtgtgatactcatcatgtagctccttttttgttcaagttttataattgacttaaaatatagatgttgtgtttacatgttgtatgcgactagtaataccttattttgtgctataaaagtatgtgaattacaccacacttgttaacactgaaaacatttgatgatagtgcttcatattttggtttatttctgattcttaaaagccatacatgtgactgatgagcacatggatgtgagctttgggttgtgtaagatcatgaagattgttgggtggtttgaagctatcatctgtctaaagagaaagcttataggtagattggatatacggacttcatgacatgatgctagattgtattttgagctggcttacatgacatattttataattttaaacatggatattttttcttgtcctctgatgatcgacctttgagtttatgatatagggtactgttctgatttttaacaaatgtggatcacaatgattaacactatggttgaacaaatgaaaattttatttgccttggtaactactcaattcagatttcatagtttgctcttgtctcattctttacccttctagtctcatttatttgtttgtcttttgaaacagttgatgctgtatatcgtttagtactgaagtttaggcaccattttactaggattcttgctactgttactttcatgttgatttcaggtttcatatgtcttctttataggaatttta

SEQ ID NO: 8174 - DNA, 552 bp, Zea mays
  Intron number 3 from transcript GRMZM2G085836_T01 (locus G RMZM2G085836) derived from phytozome v7.0 (chr-ID 4; pos 4 3652433 to 43652984)
aggtttgtttctgttccttaaatgatttcatagatgatttgctagagaaatgtcatagtaccatttcagtggggggggaaaatcaaatcctgagtaagattgttaaatatctacctcaattgaggaatcagcaatctatagcatattttgtatggatgcagtgtcactgtgtgatgtcatagcttacagttctgagtctttgccacctcaaggtaaaaactttatttttccttcttctggatttcagataacctttttatcaagggacattcccttttttttttaatgaaacggttatgtgtgtgtgtgtgtttgggggtggggggggcacctgtccttcaaccggcctgtttacaaaggcaagttaaatgcttgtgtttctcagtagtcaacaaatgatttatgaaaaaaaaatctcggtgacagaatgcatgtactgatcggcatttctgttgcttgatttatgaaaaaaatctcggtgatttataaaatgtaatggatgatacttgtcttgcagggatactgtgcaggagcagaaacctaaagaacaca

SEQ ID NO: 8175 - DNA, 636 bp, Zea mays
  Intron number 2 from transcript GRMZM2G145802_T01 (locus G RMZM2G145802) derived from phytozome v7.0 (chr-ID 2; pos 2 4367961 to 24368596)
caatcaagtaagatccttctcttttcttatgtgattttccctatagaaatgtcgttctgcaaagctgtacatagttaaaataatattgaagtggagggcaggatggtttttcttttacagttctaccgttttgctgttctccacttttctgtttttactccatttctattgtgtatatgggatttgcttgattgttcgttgaagcctgattgtatcactcaacctatgaatactgttatatagttgatggattagatgagaacagttgcttaatatgatggatgcacacatgcaaaccgattaatgaggttctagaatttactccctccgtttctttttatttgtcgctggatagtgtaaaatcgcactatccagcgacaaataaaaagaaacggagggagtatcaattaacacagtccctttgaacattctagtattagtttggtaccttggtgactatcttcaccttccatctgtatgccgccacatgataattggctctttttttggtcctactactgatggtgttacagttttgagcttgttttatttgagtttctcactttgagaacaaaatgcatcgtttcccggtccttttcagtggatttgatccaccaccagcacgagcttttgctt

SEQ ID NO: 8176 - DNA, 959 bp, Zea mays
  Intron number 3 from transcript GRMZM2G135024_T01 (locus G RMZM2G135024) derived from phytozome v7.0 (chr-ID 2; pos 3 2846726 to 32847684 reverse strand)
aaatcagagcctttactgttgtttatattcttcaggtaaccaaaccttgctttctctcaaactggtttgttgtgtgcttcttgcactatcgatgcaattgttaaaatttctaatttaagataatgtcaactacatttggtgactatttctgcttcgtatatattctatcccctttgtttgtcccttgttgggcattgttgttgttagataatgtcatcagccttttctatgcaagaatggcagggtgagcgaaactttaataggtttggtggatggttgggtaagtactcgactactaacaaaaacagaaggctactggaagatgtccacagtcatattcttgcctcccagcaagcaaacttggacaggttgttgcttttacatatatttgagatctacctgtgccctctttcgtggcttgtgcttatcgtcacatatctaatttgttattagtgtgccggtatggtatagcgaggctatccgttttcttatctggacatgtcctgaatctgcacttattatagttttttgtatctttgttttagacctccttaggaggtttcccttgtatccgagtccattttggactttccctacttgcttcttaatataatcatgtgcagctctcctgcgcgtccgagaaaaaaaaccgctcttattatgtatttttttttgtgtgcatcattgttgtttgatatgggactttccctacttgagaaccttgcacttagatatgggaatccaataatcatattgaacttaataaaggcaagtgcagcatcattgttgtttgatgtgaatgtcttgacttatgcttatattgtcactgacttttctagctgagggtttaatcaccaagttgatagtcttctgctttttgttataagtctgaaattttgaaccccttaattatatttcaatcagacccacgagaagaagccccgtgaatctctgctctg

SEQ ID NO: 8177 - DNA, 390 bp, Zea mays
  Intron number 2 from transcript GRMZM2G126453_T01 (locus G RMZM2G126453) derived from phytozome v7.0 (chr-ID 4; pos 2 754671 to 2755060)
tcacctttgagaattttccttattatctcaggtgatatgctttggatttgtgttcctttgcttctttgacattattctgtttacaagattcttatcatgctgtttatttgaagttttgcatatgcatctgttatttatatgctacattataaaaatctgaggcaactcgtttattgttctttggttagttttgaggttgccaacaatggtgtatgcttagttgttagttcttagattatagaaattggttggttgagtttttttttttcaaagccatgttagagctgcctgcagatcaaccttgggatacagcttgatatttctttttagtcacatgtccatatctttgtattttatcggttctcgtttcatgcagtgagaatacaaaga

SEQ ID NO: 8178 - DNA, 434 bp, Zea mays
  Intron number 3 from transcript GRMZM2G057243_T01 (locus G RMZM2G057243) derived from phytozome v7.0 (chr-ID 9; pos 1 52091376 to 152091809 reverse strand)
gagacgggtatgtggtacttcctgtttggcttggaataatatcatagttcgtgcagtacatcgttctgtcctgcagtgctgccacttgcatatttcattcatgtatatttgattctttacagcggcatagcattagaagaattatatcatcagaaaattctcttcatatgcagttgcagctagtgacaggaaaacataatgaagtaaatgcccactgatacatgtaactgtagatgaacaatttaagatgtaggttatgtagtttgattgttgagtgctcatcagaaaaggagaacatgaagaaacatagttataaacacgtcgatattaaaagaattaccaggatgtactgaagaaagacatgtgatgcaaaaggtcatgttaataattcatggtgtactaactgtgataccatcttcattttatctaatagg

SEQ ID NO: 8179 - DNA, 328 bp, Zea mays
  Intron number 2 from transcript GRMZM2G457381_T01 (locus G RMZM2G457381) derived from phytozome v7.0 (chr-ID 2; pos 2 26314276 to 226314603)
gcattccggagaagaagtcggcgccccccgcattggtaggattctgctctgtgttcgtaattgttgccttgttagccgtagatttggttttgacctactagttactagttagattagattattgacaaggcttttgagtttcctcagcattgcatcgatggtatctatggcattatgtaacaaatgagcaccaccttgtttggtttgtttggtcaaagctaacagcagttcttctctattttttcattattgttctacaatgtttggtgctgcccaagttctgacattattaatgccacatcttgagtcaatcaggcgtcctgtgacc

SEQ ID NO: 8180 - DNA, 485 bp, Zea mays
  Intron number 1 from transcript GRMZM2G314110_T02 (locus G RMZM2G314110) derived from phytozome v7.0 (chr-ID 2; pos 4 5759563 to 45760047 reverse strand)
gtgaaggagaaccaatattattcatctctaaaaaggtaacgggtcataactgcaaaatagtaacctttggacaaagttgcatgatttcttgattttccacgatttgactgtttcacttgatgacttgaacaaaagttaattgataggtccagaacgtagctctattaagttgatcttattcctatgagcttgtttacattatctcatgctttgcttggacaggctagctcttaaattttgaagagatgtgggaattcctttctgtttcagctcacatttatgataatgagactagctctagacaacaaaataacaaggacacagaactactttttcttgagaaatggaagaaagataagttgtgaaaaacacatgacatatttgccctacaatgtcttcatttcctgttttttttgtgtgtgctcaccatattaatactctacaccgcagggaggaattgtccaggcgctaagcacaaggaacaa

SEQ ID NO: 8181 - DNA, 885 bp, Zea mays
  Intron number 1 from transcript GRMZM2G042118_T01 (locus G RMZM2G042118) derived from phytozome v7.0 (chr-ID 8; pos 1 62238507 to 162239391 reverse strand)
ccgcctctcctgctcctaccgcagctctccctcaggtatggcttcattacgccgcctttgatcctctcgttccgatctatagtatcaagtagtcaattgtcgcggtggatctcgtgttgcgcttcgtttcctttgggggttgattcttacttagatggggcatgttgcgcttcggttccttgggttgattcttagtgttgttcttcgggtactacggggaagatttttatataggccataggccagtggggtaaaattgaatcattgattcgaggaaagctggatcggagacgctgtggtgagaagggtcgtggttcgcgccgccgtgaggacggcgattaccgcgtatagtagcgctcccgctcgggattggaccgtgactcggacccgtgagacgacagcggcgccaccgtgttaggcgagcagggttcagcctcccccccccggtcctatgctagtggcggctccggaacccagtcttggtgtgctgcgcgaaggcagcagcggatcgtgaattcgtgatgttttagcatatataacaatttatccttgttgaggaattgttttctgctgtgaattttaatgttccaactacaacatcgtaatttcccatgtatttctggggtcctcccccgaaataaacaaatcacagattcccatcccctgatgtcaggaggtctgattgtctcattcattgccattgacacatgttaaggtagttgtaggtgtattagatacgacccttgccacgtttatgaattagaaacatttttgcaaaacactttgttacagtgccttgtgcaaagttctaattgctgttaagagttcgtgtatgctccactgattttttgtcatcttcctgtacatgcaggtttagtgttcgca

SEQ ID NO: 8182 - DNA, 470 bp, Zea mays
  Intron number 4 from transcript GRMZM2G475673_T01 (locus G RMZM2G475673) derived from phytozome v7.0 (chr-ID 9; pos 4 5106617 to 45107086)
ctggagtgccgccctcctgacgacaaggcctccctgtacctcctatagttctaggtcttctgtggcctcggcgaggccaagctgttcggaggatcctccagcatgtgtaggagaatgtgagcaccatacacgagaagctcatcttcggggcatggctcaagtatgagaaaaaagaggaggagtccatctccgacctgttcagcttgtgcatcactccacaaaccaaacacatcaaaagtgcttgcaggagttcaggctgctggatttcgtgaggggattttaacctcaaaatacctgtctggacaatttttgctcaattttttgttgctacttttttgttcaatgcacagaacatttgttaatttctatttgtcctctctgattataaaacaaaaattatcatttacacttattcattgatcttcattaagcaatgcactaataaaggttcatcattgcagaagctgagg

SEQ ID NO: 8183 - DNA, 641 bp, Zea mays
  Intron number 2 from transcript GRMZM2G081573_T01 (locus G RMZM2G081573) derived from phytozome v7.0 (chr-ID 9; pos 1 2828545 to 12829185)
aaaaggctgagggtgaaactacagacgtatgtgatttcagtaatgagcctttggttttctattgtacattcaggatggtgcaatttcagtctatgatctgggtaataagttttacattggttatggtactgctattataatctcatcttgtgcttgttttttttttcttgaacacacatgagatgtacgcatcaatgtatcattatattaagtagagatcatcttatgcatgccgtaaagttgctattggcttccaatttgaatagatgatcttgtaatacattctatcgtacgtgaatttggttgatacaatgggcaaggcttgccttgttttgactggattgtgttgaaatgtgtcaagattttgcatgcccccatcccaccatacggcgaaaaaaatgtcttgtaattttttgtgtatgaacaactatattacctgcaattttgacagggtgctaactgtttcatgctgacgtgcattgacttccttattgttcactatttggagttgatcatcgatatttgggtcctgttcaatcctttttatttgttttccatcaccaaaaggtgattgcgacttcttcccttaatgttatcttttttcagataaaggactacagtttgtgggaactgttgacttt

SEQ ID NO: 8184 - DNA, 874 bp, Zea mays
  Intron number 1 from transcript GRMZM2G117226_T03 (locus G RMZM2G117226) derived from phytozome v7.0 (chr-ID 2; pos 2 33468894 to 233469767)
tgctagccgccggattaatctttccctaccctaaggttggtcgcttcgttgctctaaatttcttctcatccgatttttatttctatttaggagtttgttagttgggatttttttcctccctgtttcttggctgccttgtgatccatctcagatcggtcggaagaagaacagcccaatctcgattcatccgaaataactcatttcatttttttggggagttcctagatcgacaagttgagttggttgggtacttgggttggtttgcttcagtgaaacggccgagagcatatttcttggattccttgcatgtatgtaagctgtgtccggaattcaatttgagctgctgctatctgtcttgtttcagtaattcatttagacattccagattttgtttccccaaatttaagtaaaaaaaagagagagttcttgatgtgatttgtttagtgctcacggatctccaagccccagtatttggtttgctcaaggtcataccagtttgtttttagtttcttggaatttctgtccacgttgtagtttggttggattaggattaaatcgtcctagtcagttgctacttgctacacaccttttttatcaagattcgaacaagtaacttgtttctatctctctttatttcttcttccatttgagttcctgttttgcctttccagtgtggtacatgattagatctatgtttaatatttccatccacgactccagattgagctcgtgtgttgttcttcttttgctatcaggaatcttgattgcgtgcttctgaatggttaggacttaagacatgcttttagctgaagttatgtggcatctgttttgtctaacaggttgaaagtggtttgaatttttcaagaacaaaagt

SEQ ID NO: 8185 - DNA, 672 bp, Zea mays
  Intron number 5 from transcript GRMZM2G057113_T01 (locus G RMZM2G057113) derived from phytozome v7.0 (chr-ID 2; pos 3 3837123 to 33837794 reverse strand)
ggcagttgagcttcaggggcaagcgggttctagaggtaactcgtgagaaaacttatgtatctagcttgttatttcatttagttggttctcactactgatctgcttgatgtctattcctgtttttgctttccataagagcagaatgtatgctccagcaggacaatctggatgcatgcataatgatagtgcctagtgttagacagttcaagtttgacatttatctattaaatggcatttctaaattggcactgacgaactaacctacagtagtcatatacccccccccccctctggtcataaaacaacatgtcgtttaggacaagatttagtcaaacttaaaaactacaaatattgatacttttaatttatttagtctgaaaacatgcaaacatatatctataagtgtattgaaaaaattgcttgcaaaatcttattaatgtgaaaaacttttaataatatattctaaagaaaatagtggtcaaagatatgcatcgaagaccatgcaaagtcaaatgggacaagtgtatttttgatcggagagaatagtttcttatattttgtcaatatttagccttggattttcactatgggtattttttaacttttatatgatcacttcatggtttaattattgttgttgttgttgttattgttgttattgatgcagcttgg

SEQ ID NO: 8186 - DNA, 875 bp, Zea mays
  Intron number 1 from transcript GRMZM2G104747_T01 (locus G RMZM2G104747) derived from phytozome v7.0 (chr-ID 9; pos 1 6177687 to 16178561)
taccggggctaccaccccttccacgtccgactgtggtgcgttagctatcctttctcttttgaagttcaaacccctcgcctcctcctcgccttgattccgtgaacgggttacttggaagttggagcggatttcttcgtgacgtcaatgttcgcaacaactgcacagtctgattgtttcgttctcctgggcgcaaatccttgcgtttattttgacccaagtcagcgcttactggatggaactgtcaacttctttcacaagaagactgaacatgttaatcacttagtttttttttatccaatggtgatggttgctgtcagtcgcccccgaaagcaagatatggttctgtagccacgctcctagggagaaatatttatattcgcctcagagatgttttttttacccccatattaatcttgttcgccttcctatttgcagccccagttatcaagaaactatcgtctattttaggttgtggttgttttacgattttcttttttccttcgtcaatcaggacctgatcatggtatctggaaagtgtagtcaaggtcaccattggagttctttgtcatcacatgtacttgaatgatttgagctttttcgtggaggccatttgttcttgccagatcacatgagctggggttattttggtctctgaacatttcgttgtattattcgatctctgaacagttcgttctattatttggtctctgaacacttcgtcctattatttggtctctgacatttcgttctaattgcgtattcagactcgttcattcagttaccaccatgttgtctagctgtttgatttttccttaacacagagtgttacgtctttgccagtatcttggaggtcgccgtggcctgttcgggcggcg

SEQ ID NO: 8187 - DNA, 679 bp, Zea mays
  Intron number 1 from transcript GRMZM2G028216_T01 (locus G RMZM2G028216) derived from phytozome v7.0 (chr-ID 4; pos 1 80580580 to 180581258 reverse strand)
cgcaagagggtacattattctccctatccattgctgtatgagttttattgacggattgttaacttcatctgggaacttcagctgagtaagttgcatagtttggtggaaatgtgtcgatcctatgatatacttatatgaaaaacaaaccgatagtttcttttgtcaaacgatggatggtatatggttgacggggtctgccccatatgctcactttataatctgtattattcggtgataatgagtttaatatagtttgagttctgactaagtcataactcataacgaagaaaaggttatatgcctgatttttgtattagttgattacaaggataaatcttgtaagccacagaatgatacggatattgttcacagcatatgagaaagacctgcaaggcatagaaacaaatgtcttacaacgagatgattaggaatcacacttatcaccttctttgtcttaagtgacttgtcactttctttttactggactagacatatgcatgcctagaactagaacaaacaattcgctgcagattgatcaaaacctttgttcctctaacatggtctgatcaaaggaatttgtcaagttaatgctgattttgcacttcccacttttcctttccagttaaccatgtatttagaattctctgttcactcacatttttatcttcagattgctcgt

SEQ ID NO: 8188 - DNA, 985 bp, Zea mays
  Intron number 1 from transcript GRMZM2G359018_T01 (locus G RMZM2G359018) derived from phytozome v7.0 (chr-ID 8; pos 2 7633913 to 27634897)
gcagcccatccacaaggcgcttggtggaggcaagcgtatggctctgtttcccactcccacgctccggttggtgcttgcttttggcttgaaatcgctagatcggatctgctgaggtgcttgggtgggttgcggactactagatctgatcgcttacgttttatgggatgggactagctagggctttaggaaggaaccggtcctttagatcggtcagtgcagtcccgcagattggggtcttacctgatcccggcaaatgtaggcgactagtctgcttggttactctatgcttgcttcaaatctgaccaatgcaagtcactgcacgccggtacttatccgatctgcatgctgtgcctgtgaatgctattattcactgccaagctcgtctgagctgaggcatacagtatctttgcagtgtctggtctaccacaccccacacgaatgctggtggcgtttctgtaactgccatactgctattaaacttttgaatacatctggtctctcgtgtttaccatagtcggaacctattatctgcaagcgcatatcagagccgatatatatatttgtctatggatcaatgctgaagggcccttttggttgctttgaattaagattatgaaaccgtggagatttgaagtttgtttgcaaaagaaatatctggtagccttcatgttatgtttatctcagtaaatgtcttttcgttagagctgtttgatactaccttatctactctgaaatgaaaggttttcgtttagggagactgtgatgcttgcgcgtgttgttgtgcctgattatatgcctttaatgtaaccaaatgacaacaagcatcatcggtttgtgtctagagctgatattctcctgccttaagcttgatgattgatagacttgattggtgtaatgtcaattgtgagacactgagacctaaatacctgatcgtctgtcattttacctaccttactcattactcttctctattttgcagctgctg

SEQ ID NO: 8189 - DNA, 636 bp, Zea mays
  Intron number 2 from transcript GRMZM2G372200_T01 (locus G RMZM2G372200) derived from phytozome v7.0 (chr-ID 8; pos 1 27964507 to 127965142 reverse strand)
aggagggtgacacaagttcaggtcagttaccagctactaatctgctactattgctatctttttgtcatgtagcaattcattaggaccgttctataaaatttacaatataaattgctttcagaattccctgtagttttatcagttttcactcgagagaggcaacaaataggtcatacaccacttgttctgtttcttattttaaattcagaacttgtcttttatagttttgtccgataacagaaatacattttctcagaaaatcaccatgtgtagtctctttctttttttaaaggtaccggtgcttttgctgagaatttattacatttttgttttccctggtaaagaggtgatttagcttaacatattcatcttggggaaaattttagttatcaatgctttgattcttagtcgaagacaaagacaagtaaaggggaatgacattgtcaaatagtaaaagtgttctgtatctctggtttgaacataatgaagaattgcacttgatttttcttttatatagactacccttatttctaaaaattgcttagttcattagatttaatttaatctagttttttagtgaagcttaattttttttttcgaatgccaacatatgtgcaacatctaggtcaccttcag

SEQ ID NO: 8190 - DNA, 990 bp, Zea mays
  Intron number 1 from transcript AC191071.3_FGT001 (locus A C191071.3_FG001) derived from phytozome v7.0 (chr-ID 9; po s 150223610 to 150224599 reverse strand)
tcggcgtcgccaccgccggctccgacaccgttcaggtacgagtacgattcgctttgttgctcgttccactagtacaaagaagttctatagtggcggttgtaaacctatttatagtggcgtttttcgtaaccgccagtgctaggggccagtagaaatcatcatttgtacagtcgggtaactgaggaccgccagtgaaaatcgtttccaggaaacataaaacatattttaaaaatagttaaaaaatttatttttattaggcccaccccacccgccgcaagtcgcggcatttttcgcgcaaaattcgcgcgctacgcggttgctagtattcgaaccggcgacctcaccctcgcgcgtaccctcccctactactccgtctatgacatgtcttatgtctagtttgtagttgttttctccacatattacaaccatttgagtgtaaattgcttatttgagaccctaaacgaattaaaaaaaacaagttgtcaactacaaagataaataacttttgaagttctaaaacttttattttgacacttttttcatccgaggtagtttgcaaaatttgaattttaaatttgacatacttagattcaatttttgagaaccgaaatgagttcaaataaaaaagttgtcaactacaaagtttcataacttttagagatctacaacttttattttggtggttttgtcatacgaggccgtttgaaaaactcgaaaaattaaggataaaaatgatttctagtggcggttccttaagaaaaccgccactagaaatcgtatttctagtggcggttccttaagaaaaccgccactacaaatcatggatttctactagaaataacacagtcggtggtgaaacgaaaccgcctgtaaaaatatattgtccccgcaggctttgagcctttttgtactagtgttcttcaccagttcccggacgacggaatgtgttacctgttacgtttacagtactaccagttcgagttcgtggtg

SEQ ID NO: 8191 - DNA, 796 bp, Zea mays
  Intron number 1 from transcript GRMZM2G074026_T01 (locus G RMZM2G074026) derived from phytozome v7.0 (chr-ID 8; pos 8 5804228 to 85805023 reverse strand)
atttgctgctgcaataaggtatcatcaggaatttttgtttcactcttattgattcattagttgagagttgagacacactagtgttaaactacgcgagttgtatacagaactcaattctagcataatatttgtttgagttctatcattgtatgccggatttgacaagtacatgtccctttcatgtgcagtgttaatattcattaatttgatagccacactgttgcagaaagatcctctataatgttgatacaagtttctcattcgtttgctttgagtaacgattagaggttattgtattttagtgcattatacatatatatatatgcacaagtgttacgatgtttaactttcttcagctcttcatatgattgttttagttggttattgtgccgagtttgtagtagaatgcattgacatatacatgttagctctgtttgttgtactcagtttgtatttgttgcaacctggactggctatgttggttatgtttatgaattatgatattggatgatctacctctttatgtggttgttagttattattattgctgggatgtcattatatgtattgtgtaccagttaattttgattgatgtcttctcactttgtttagaacaagggaaaatttcatcaagtgaatgaaaatttcacttatatacattaaactaacattttgcttgttgttcatgtgatttattacattaagctagtattgttttgttctaagcatatactgcgtatgtgccatgaataatcaaactaatggtaataactttctgttgctattctgtttttag

SEQ ID NO: 8192 - DNA, 486 bp, Zea mays
  Intron number 2 from transcript GRMZM2G067540_T01 (locus G RMZM2G067540) derived from phytozome v7.0 (chr-ID 2; pos 1 46570018 to 146570503 reverse strand)
agcacagaagcaggcgggcagtgctttttagctaaaggtcagcgctcgctgctcacttcattgacaaaggataaagatgtctgcagtaggggtagacgggtcagcatccgtggtggcactggtttaaacattagccttctaataaccattatagattcattatttgctctattttttgttttgctcatctgcatacatatcaatttaaacttgatatagaaaatgaggctcgaaaggaaattggtttctaactaacaaagacgagttgaagacattgattcagatatgacaacataacaaacctaataagtcaaactttgttaaagttgtgccccaatataaataatcagattttttattattgtcctccttttgattttgctatgatataattaagtttttaaaaaataacattattccttctagattacatatgcacccgtggccgcagggcaaggcagcagtgcagcacataagggtaagata

SEQ ID NO: 8193 - DNA, 980 bp, Zea mays
  Intron number 3 from transcript GRMZM2G048008_T01 (locus G RMZM2G048008) derived from phytozome v7.0 (chr-ID 2; pos 1 88978104 to 188979083)
gcactgttggaatcctgaatacatcttctgcgaaggtattttttttcttgtaaaaaaacaatctaggttttaatgtttccttgtgagtagtgtttgcttttttatgccctctgttaatgtctacttgtttagttgacatgttaggctattcccagtctattgcatcttatcacaatatccaaaactgccatgtcatataaaattacgtaagatacaactatcccaatgcatagtattatagattggtttttatcctttacagcgtattaaatactagaagtctagaatatatgagagtatgagacgtgggtcacttggatgattcaagtttcaatgtttgaggtcccgtgctatctccctcaagatacatctttattctctttccttttaaatctcttgccatatcatcataaatgcttaagtggcatgtattgatgtattaaatgagtatgttactatggattgagaatagccttaacagtggattagcaatttttcactcttatgaaatcctcactttggtatttgaatgaataagtatcacatccgtacatattaggttatggaatgatgttgccgtttataaaaactcggtcgaggagggaaaaactgccctcccggtattatattaagaagggatcgaaacatggtcccgacttctcctgaactctggccccctatcactagtgggccgtcaccgcccactctgcaacagcgcagccggagggtggcgtgcaacccgggagcgggtaggacatgaggggattttttaaccaagccaaaaattcgtccctgaggggtatcgaacccaggacctggaggtgctactcggaagacttaaccattacgctagaggccctttcgcatgttgctgtttgtattatttgttcttgtcatcgttttcaggtaggttctatcttgatctaactgctaaaggtctaattttccaggaaagtgacgttcatagtttatccaataag

SEQ ID NO: 8194 - DNA, 1010 bp, Zea mays
  Intron number 1 from transcript GRMZM2G135633_T02 (locus G RMZM2G135633) derived from phytozome v7.0 (chr-ID 8; pos 1 73783689 to 173784698 reverse strand)
cacaagggaacccagcaggtaatttcatcctaatgactctcgtcttctgtagggttcgggctggcggtgcgcaatagggttagaggctgtagggtactggctatttttctccatttttcatcttattactatcctactgggtacatatacgtgtagttgagcggattggtttagctagctgctacatgtgcatatccaatttgaatggacgcaagtttgcaagagctattatttcaggtttacactactacatttgatcctcattcatgtcattttgctcattggagtagtgcaggcgatgttaaaaggagatctcaagtcttcctttctagtcgcagacttccatctgcaattttagatttgggccttgacctactgatctgttctcaagttcatatggacatacactagccagttgcaaagcacaatctagttcttcaaaaaccgatgttataaacattttcagattaaggtgtcgctaaatgctgactttatagtactttggacatctacatataaatgcctttctgatggaaccttgcaaacttttctctgagtatgtgatcaccacctctaggactgattactcttcacctcctcaaggaaagcagaagttcaggtgcaattcaaggatgttcctgatgacattttagaagtatgttcatagaagttactcatagtgtagtatactcttagcatagatttacttgtatagtaatgatagtgcctttacataaccactaaccagacacaacaaagcaatatgttctttcataggttagagatcatggggtctgaaactatcaaaggattagctaaaggttcaatgactacagaatggggtagggcagatccatgcattgatactggaaaaccagtatagtggtccctttttagattgaatgaaatgcagttgtgcagagcatgtgcattgctgcaactatttttatactgcttttttactgatattgctatggagatcaacaattttgtttttattttgcagtgat

SEQ ID NO: 8195 - DNA, 731 bp, Zea mays
  Intron number 1 from transcript GRMZM2G041534_T01 (locus G RMZM2G041534) derived from phytozome v7.0 (chr-ID 2; pos 1 82659236 to 182659966)
gatttggttacgtaagtgactttttttttacttctctgcacttgtctgtttttagtacagcttagtcatgaatcatattgcatctactttgttgcagaactgtgctattgtacatttgtactagatcatagttcctaaaatctgatgccatgggagcaagttttggtattcgagaaaaaaagagagcaattttttacaaagattgaagtttatttgttgtctgggattcctgaatcttccatatataatttattggcaaaggatgagatgaataatcagatttgttttcttctagaaatgaaactcatcaagcatagactttatggaaatgtggtgtcgtgttattggcttccagataaggggtgtgaggggtataaaaggcttacattaaatgtttctagaagtattaaatagcacaaataaatttactttaccagattatcgtgtagttttatcgtaattgtgtggtgctagttcaatatgttttcatttagatcgctaaccacttaatgtgaaaattatggtcaatgtaattgccctcaccattttacagggtttgtgcaagtggttgatataactgtcccagttttacattggatctttataaatgattaataacttacatgacgttttatagcatttgtatattaattattggcatgttctacgattctcatctttgatctattcttccaggcgttccctcgaggctctccacttacacctgaaat

SEQ ID NO: 8196 - DNA, 790 bp, Zea mays
  Intron number 3 from transcript GRMZM2G338696_T03 (locus G RMZM2G338696) derived from phytozome v7.0 (chr-ID 8; pos 7 6642347 to 76643136)
gatcctgccgtcggccccttcggtactaaggtgaggtgcccctgcttttgcgacttagctcagagcctcggactctaggggatcacgtcaggtgtttggtgtcgtgcagagaaatttgcacaagtacttgctccgtcctagaaagaatgcaattatgggaaccgtcccagtgaaactagctcaagtttgaccaaattatagtaaataatattaacatgtatatctccaaataagtttatcatgaaaatatattttgtaattagttcagttatacttaatttgtaccataaatattattgtttttatataattttagtcaaatttcaaataggttggtttctcgagaagcaatgattgcattttttgtgggacggagagagtagtttcttcctcaagctgagtcctgttaggactgtgaagttaggtaattattggtactttttagaattaattatgtcaaaaaaaacttttgctgtgtccatggctattgttcacctgatctgctctgtggtctttggctagttgaacgtgttgtagtctagtttgttattaagacagccatttcgtggtacaaaatgtcatcatgttagaggccccagtgttcaatgtttaccagtctgctcattagttgtcatttacattgaagtctgtggcttcttttactccctctgtcctaaaatagtattcgttttagctctcggtttttactccctccgttccataatctgcctcgtctaagcaatttttttttgcagattccgttttcttcgtcgtatttgtatttgctgct

SEQ ID NO: 8197 - DNA, 689 bp, Zea mays
  Intron number 3 from transcript GRMZM2G365423_T01 (locus G RMZM2G365423) derived from phytozome v7.0 (chr-ID 4; pos 6 5819996 to 65820684)
tattttgaagaatttgctcgcaccaactgctggtggtattacatctatcttgtatggccattattttgatgttcccattgtgagtgtagatgctagcagtcagagctactatttgttgagcactaattttagttgaagattttgtcaattaaagggacaatggggcacttcctagcttcgaaagtcaacaagccatatgcagttgaagaaaaagggtaaatgctggggttacaatcttgtaacagaagactgagcaaaccaaacatatcaatggtcctgaaatggaaacacaacctttaaaaaaaactcaggagttacatagcatactacatcacattcatgtcgtccattcttgctgctcacatacatatacaaacccgcttcctatgtcgtgataaatactagtgcagcatggttcaccttcatctcgtttggaggttggaagtagtcttttcatcggggctgttatgctgcagtcttccaaattttgtgttgtttgtctatgatcaaccattttttgttttgtacaagtattgaatcccaaggctccaattttatatgttactatctggtgccgttattttttctcttacaaaacatttttgtgtctttatcctgacatatatgcatgtatgttacattatttcttcccagctgtttcagttgagcaagctgaagctattgctgac

SEQ ID NO: 8198 - DNA, 903 bp, Zea mays
  Intron number 1 from transcript AC210669.3_FGT002 (locus A C210669.3_FG002) derived from phytozome v7.0 (chr-ID 8; po s 53302807 to 53303709 reverse strand)
ctattgttgcggatccatccgaaggtccaggagaggataatgatgatattgatattgagaaggataatacaaccatatgtcctacgaaaccaagccacttggacttcagaaagtcgaagataaaaggaggacatatcaaggtactcacaaagtttgattgcattaataacactgagtgggttcgactcggggcgatgacttagtgccgaagcctaaagaggacgaaatttttgtttttcgaagcttcctaaaagctagtctcagattccctttgcacaaggtgatagttgttgttttgaagaggtttaatatatatatctgactcgacttagggaaacccgctcctgccgccaggtcgcggaccgtctgcgccgccgcaaagagcccgccaagcggaacaactccaagtaattggcgccaagatcgacgtcatcaagatccttgcgaggagatattataaggaagatatgtggcctcaagttgatcattggatcacttgagaagggttgagtgtaactctcgttctttgggacaccacaacatgaatgtaggcaagcattgaaggcttgggcgaaccacgggaaaattgtctgtgtattgcgtgttgttccttttgcaattttcttttcctccctcattctaagttcttgatcttcacttgagatttgtctctactctctaattccgtaatcaagggagaaaacaagtgtaagaactttgttccttctctctccgacttgatctgtattctgtgctaacatatagttggattaagtttgttttgaatttgtgaatttctgaggacttacatattcaccttcctctagaaaactataagaagtcctatcatatatatacaataatggtacatacaaattgtgtggcttaggttggctccagtaa

SEQ ID NO: 8199 - DNA, 730 bp, Zea mays
  Intron number 1 from transcript AC199918.4_FGT003 (locus A C199918.4_FG003) derived from phytozome v7.0 (chr-ID 8; po s 137725724 to 137726453)
tatacatttttcacgattcagttacaggtaatttaatgattgaagtttttgttcccttttgcatatagactattcttctgaaaaaagataggacactactctgaggacatccttcgctttgacgtagatgacgcataaccaataaccaataccgatccattgcttctcaatctgtagtgaagataaagtatgtgttctttacaatttggagaagtccttagaagtgtactttgaccatctgacaataatcagcaatttttacaaaaaaacaatctgtatttagaagatgctcatgatgtgaatctagcgatacagattttacctacaaagcatgcacatattttgcagataattgttggtcagactttatgaagtttgactttattgaatcctaatgtgacattctatatgcagtgatgtacatttcttgccttcaatttctttatccagttctctgatttttttatcttaacacttttagtaatatttggaatagtcataagtcaaactagacttccccagcgacagcgattcaacgaacaagaaccaggccagcagttatctagtgcagagatctactcccggtcccggtgagtttgattagaaatcatgaatgttcagtacctggctcagttttattagtagtgtagtgagaccgagagcatgaggcttcaaagaggaaatttgttaaggcataataggttatattcttgttgtctactaacatcag

SEQ ID NO: 8200 - DNA, 949 bp, Zea mays
  Intron number 1 from transcript GRMZM2G158809_T01 (locus G RMZM2G158809) derived from phytozome v7.0 (chr-ID 2; pos 1 93193930 to 193194878 reverse strand)
ttgaaggccacgaccaaacaaatctctacacacttgtaagtgaccataatagattgtaggatcctgatatgtagagcgcatgtgtttatgcattgcattgggtaaggtgaaacatgactttgattgcaagaaaaggttcaactaaaaagatcactctcatgtgagaagaggtaagcatagtataaccagaagagttcttagagtgacctgtgcactccaaacactaatttattatatattttctctttctgaaaaattacaacatatacatgttgttctacttagaataagcgataaaactgcacaaatgttggtttacaaaagtactaataactttcgatgatataactattatgaattattgattaggttgaatagaatgttgctctgagaacaaaaacagaatatctcgctggatggtatttgttggttgtacaaaggacaccacacagaatccttttgttgatgaccaagttcatgtaccctacatacatattttagaatatgcttctgcgcactatcttgcttctctggtaaggatattgtacaggataaggacttacaagttacaagtacattagttgcatggtagctctcatgttgctgcctctgcctgtgaacaccctccaaatccatggtaaaaaaaagaaaactacaaaagtcacagacaaattattcccacacctgtaccattatctggctcacagacacattgtacacgtacaacatattctgcacatgcacaacatggttgtgagtgcttaacaacatgtgttttattgcaacttatggctgattttggtgaaaaaaaatcacaccttccagtaaggtcaccaaaagcactctcttttttaacccccctcttatttgctctctagaattaagtctcggctcctttacaacacatgaaataaaaatgctaaagttcaaacttacctcttctaaggtt

SEQ ID NO: 8201 - DNA, 751 bp, Zea mays
  Intron number 1 from transcript GRMZM2G167245_T01 (locus G RMZM2G167245) derived from phytozome v7.0 (chr-ID 2; pos 1 76870277 to 176871027)
cccagtaggcttccttgccttcgggcggtttccaggtgagggagggcgactcgccttcgtctgattgctttctctctttcttctttcgtgcgatgttgatagtaccacctcgccctcggtgccgcgcccgtcgccacgatctggtctgcagatgctcatcttgactcctgtgcgtccagtgaaaccctcacgtgacgggactgaaaatgaactcgactggaatcagtatagtgtccgattggggggggggggggggggggggggggggcaaatccctcgcttgctgccctcagatcgaggaccccgtcgaggaatcgctgtttttttttctggaagttcccatcctgaaattggttatccatgtcttttgagttccccgttccgattgctcaggaagtttcccactctggaaccggccattgcttgattgcttcttggtctaccgtgtacttcaacgttgccttgcctacatgtctcagcatcttatatatatttagacaagacacttgtggtctacatatcgactgtagtgttgggtatctaacctcctggtaccatctatactccttcaatgctaagcaatcattgactgatatagtgatagctccagccaacagtactttcagcatttcattttgttatatatgcatcttgtcaattctttgtttgcccctgttctcctggtggaacaagtaagcgcgtgctaatccgatgccgaacaatttttttttgtggcgcacaggttggtagc

SEQ ID NO: 8202 - DNA, 319 bp, Zea mays
  Intron number 3 from transcript GRMZM2G000397_T01 (locus G RMZM2G000397) derived from phytozome v7.0 (chr-ID 2; pos 1 2129554 to 12129872)
gaggtaaccacatccttctccttcgtttagattttgctgtttcagtatggccaatcgaatatcgtgttcttccggctgttccttgaactggaagcaaagtgttcttgatttatgtgtttaattatggtcacaaagtcagtgatttgatttggaagtctagaagtaattattgttttttccccttgtcgagatcccagttgcttcagctgccacagcctacaggtagttcttgggttgagtcattgagtgtggtttatcactggcttggttcctgcaacgcgcaggagtacgacgtgaacctggacgggctcctggaccg

SEQ ID NO: 8203 - DNA, 456 bp, Zea mays
  Intron number 1 from transcript GRMZM2G167915_T01 (locus G RMZM2G167915) derived from phytozome v7.0 (chr-ID 4; pos 7 0351422 to 70351877 reverse strand)
cacaaaattagtggtttgagttctcgtgtactcttctatgctgcagcataatctgtttcgttttgggaggagctattttatttggtttcatggataagcatccttgccagcattgtttacaaaaagaacattctactaccaaagctgcacaaaattagtggtttgagttctcgtgtactcttctatgctgcagcataatctgtttcgttttgggaattgggtactatgtttgcttttttcattagtgacatggttgtgagtttttgccttattttgaatctaagtgtgttgctatttagcccctttgagcatgtagtgtgaatgtaaattaatttgtagtattctaatttggtttctgattaccattataatcttttcaggcaactttgccaaggttaccaactataaatttggtatcctttttttccctgttgccaataccactgttgctactgg

SEQ ID NO: 8204 - DNA, 526 bp, Zea mays
  Intron number 1 from transcript GRMZM2G469969_T01 (locus G RMZM2G469969) derived from phytozome v7.0 (chr-ID 2; pos 1 46015657 to 146016182)
ccattcgggagcagcaggtcggagggttcactcaggtctgttgaaaaaaaatcgaacatcaaccttcttacttcctggttttatggagctgtttctccttgtctcattttttggatcaattttctctttgtgtcactggatataggaacataaacaaatcgagagtataatgaactgccttgatactttagcacggacatgtttgatattggattaacaacttcagtgaattgttcgagcttgtctataatcacttgtcgacgtaaaaaaatattatcacatagcctcttcaggggatagaaattaatatttctgaagctggtattcattttgccagtagtttcataggattctttcctaccatttcctatattaagaaagttcttctcatctaatgcccgagagctccaattgtagccggtcctagtattcctttacaattttaaaattgtaacttgtgtactaagttcaggcctaatttgtttatggttaacttattttcatgattggacgcaggttggtgccc

SEQ ID NO: 8205 - DNA, 682 bp, Zea mays
  Intron number 1 from transcript GRMZM2G384296_T01 (locus G RMZM2G384296) derived from phytozome v7.0 (chr-ID 8; pos 4 07987 to 408668 reverse strand)
atatgtcaatattgtattaatcttttttcgagttttaggctgtcatgttgtttgctggaatggagatatttcattgttcacttggttcatgtgacagagttaattaccttatttccgtgctttcttagtacctttttctgagatttgagttgtaaataacaattccctaattgcgttgtcattataactcaatgacattattaaaattatatatagaagtctatatggtactgatggttgcaatgtaatggtgaaataactagattaaaataacaaaatttatgtatgggtaggatcacaaatgaatttcgaaacattttctcataataatataacacacatatgtacataagttatcgtgttattatacggttccgttgcaacgcacgatcactcacctagtttattatgatggatgcaacatgcaggaaacaaaggcgccatcgccggttgcaactccaacccaccgaatccgtttccacaaaagtcaaaacaactccgccatctcgatcaaacaaggcggacaatgtcaacgcccctcggcaccagcacaaatttctcccctccgaactccatctatctatgcccgttgtgcacgggagagggagacagagatccgcgaaacgccgcgcgctgttcttcttcaggtcaggttctatccggacatccggagaactgggca

SEQ ID NO: 8206 - DNA, 583 bp, Zea mays
  Intron number 5 from transcript GRMZM5G878944_T02 (locus G RMZM5G878944) derived from phytozome v7.0 (chr-ID 4; pos 7 9691708 to 79692290 reverse strand)
aggtacttgtcaaataaaatttaaagattcacttgcctttgcataacacatgaagtcacaagtcctgggcaacccatgcagaaaatagaagagttatatgagttttgaatttttacttatttcatttccagaatttttggatttggtaaatgaagttatatgaaaaatccagttattaggattggcttggttgacattgttatgtagcctatattataatgttaaatatcaagccttcagttatctgttttctttctagttaataagtaagcttaggagttgttgcactttgagtcaactatgtcataaaaataatgctttcctcaggttacactcctacaaaagaatcttttaccaaataatgtgtgatatatataagtagtttcttatcaagatttctacactgattcatgcaacaaatgctcaggtttagcaacattgtgctatttctgtgtacacatgattaaaacagatgtcattttcatgcttaacgctgcaaattttgttttagaaaatttaccgcataaagcttcctggcaatccaacagatattggagagggaaaacctgaaaaccaaaatcat

SEQ ID NO: 8207 - DNA, 875 bp, Zea mays
  Intron number 1 from transcript GRMZM2G139022_T01 (locus G RMZM2G139022) derived from phytozome v7.0 (chr-ID 2; pos 3 5185570 to 35186444 reverse strand)
gataaagaaagtaattgatcgttctgcccttcttgattgacaatgacaagtaatgaactgtgcattttgggactgaatgaagcatcgtgatgatcttccccaggaacagctttaatctgcatatttgcatctcatgtatcagtatcctatgccgttgtggcaccttagctaaccctgatgctttggggattattgctgatggtagacaagtacttaagtagcaagcagtttatgttatacatgtaatctatctctggttttcttttgtaactggccttgtgctaattacctcctagatttatatcagttgattcgagctctgaccatattattttgtaaatcttaagacgagacttattccatctgattaaagtaatgcacccgatgcagtttcttggtagctgttaaatcagctctgaccatctgacgcatgtttggccagtgaatgtttgcttggatgttcctcttgccattgcaacatcactatcctgttgcagtcttacgtccggtatttctttgtgccgtgatgcttggatgttcctcttttcattgggacattacaatccctcgttgcagtcttaaaagatggaccaactcaattcttaaaatcaaactccctatttgtgaagcattctacaaacaaaacaaagaaaaacagtgaaaacagagtagatgatagactaattcttaaaaccaaacagcctatttgtgaaacgtagcactgggctggctcgtgtcgtgttttttgttctacttctacatgtggttgagaattttgttctgattctgagacgaggaaggatcgtttggatttgatgagattcgggcgatgctttccatactattatagttcttctagattattgtattgagta

SEQ ID NO: 8208 - DNA, 441 bp, Zea mays
  Intron number 2 from transcript AC186582.3_FGT005 (locus A C186582.3_FG005) derived from phytozome v7.0 (chr-ID 8; po s 119751556 to 119751996)
ggaacaaaaatccaacaagaaagcaaagtttgaaggtaatccttggaatgaagggagaaataaagggaaatgacaatctaggatcaactttaagcagcaaggggaaaaagagtggacaatagtcttaggatgtggtcatacttcatcttataaaaggaatgatgagacatacacgcccacaaagaaagcaggggcaaaagtgtgatgactatggaaaaaagacatgaaatagagaaagttcaaatcacaaacaatgaagaagatgaagagagtgatttgattggggatgagtttctttatactggtatttgcatgggggatcttggcaaaaataagagtttggacattggaaagaaaacataagaggagaaatgcaaatacccattaatgtagaaagctacttctaaaaaagtattgtggccattgaagaaattcaaacta

SEQ ID NO: 8209 - DNA, 997 bp, Zea mays
  Intron number 1 from transcript GRMZM2G004010_T01 (locus G RMZM2G004010) derived from phytozome v7.0 (chr-ID 2; pos 3 5645312 to 35646308 reverse strand)
cgttctttccctctcctattcgacgttgctgcgaggtagaagatgagccatatgcagcttagcccctgatttttgtgtaaaactcatttatatgttttccagttcaaaagagttaaattaggtccctataatcttatgtgctacaccctaaagtttatagttaatagaggatctaattactgcatcgttttgttatttcaaatttgtatattttagagtctgaatcacgtgtaatttgaattattagcttcatgtgtatgtgataaaatattttatctagtgtctccactatctttcacatttgtgtattttaatttgaatataatggttgagaattaatttaaatatagtttttataaaaattaagttaaaggaaaatgtaactcatgtaacttatacttagcggtagtaaatagaggtttatactattcatccgaaagtgttgaaaaggttgaactactaatcatgcgaccatagtttaaatagtagcttaatataagttatctaatgattcttagattatatgtctcttaaatattattatagggtcgtggtgtagatttgcaaatgaaaggttaaaaaaggaaatataacccacgtgcttttcgatagaaatataataattaactggttaactatctagattccattaagtttgagctagcattatatttacgtatttttatgaatctgtatagtgtgtgcttccatgattaatttagcatatagtattttctagaaaaatggtgaaacaaaataattagtggtttatgtcctaacaattgagatgatcattgttatggttatggttaagtttatattgtaagttacgaatcaagttttattcttggatgtcttttttatatgatttgtatagtgtatgtttttattgttgaatggtgtatgtttatttattggtgtatttttttcttttttgtatgtgcattgtgagaatctattagaagctgatttcgtggtagaggacctgaactcgttt

SEQ ID NO: 8210 - DNA, 496 bp, Zea mays
  Intron number 1 from transcript GRMZM2G501086_T01 (locus G RMZM2G501086) derived from phytozome v7.0 (chr-ID 9; pos 1 05461300 to 105461795)
agctgagcccctcaacctctctgtggctcctcaaggtcagcagtagtcgtagctggaccctctagtttctgcgctttgaagtaccatataccatgaaagaaacaagtaacatttgagtactactgctgtactgcagaaagatattctacagaattttctctcacgatcttttttgtcattgcaactttagggctgtgatagtgtgatagctattgtctagatatgcaggttatttgtactctgctatatcgaaggcttacaaaaataactatagtgtgatctactggtaattcttaccctttgtagtgaaaaatgttagtagagtaagaacgtgaatggtttaagggagtaaccgaacaaaattgtccggtattgaagtcaggaactgcatgcattctggtatgaagactgaatgtttcagtagtgactccatcagtaatttgttttcttttaaatggcagtcaaatcagaagttacaaggtttaagggaagaatt

SEQ ID NO: 8211 - DNA, 470 bp, Zea mays
  Intron number 1 from transcript GRMZM2G021865_T01 (locus G RMZM2G021865) derived from phytozome v7.0 (chr-ID 8; pos 7 0388342 to 70388811)
acaattataagcactccagcttattgggcgtcatagttagtcagacaattataatagcgtacaaaatttacggagtgtctatgacgcccaagaattgacacatgttggatattggacttgtgctatgacgctccaacttatttttaaatctcaaggtgtttgatgttctatttcaaagcatgtttgatgcgagccagctgttgggtttatttactccttgtatgaccattagtaaaagggaaaactgacgtttctgctacatgtttcaggatttccttagccccggctgtcatttgccttgtgtcgaaaataagtatgctataaagcgtactgtcttgatgggaacttgctgaaatacataaagtaagtaatcatcttttttattttgcaaagaacctcgtaaatactacaattctgtacagagtaagctaacaccttttttttattctgattctcccagaaatctgaca

SEQ ID NO: 8212 - DNA, 554 bp, Zea mays
  Intron number 2 from transcript GRMZM2G169248_T01 (locus G RMZM2G169248) derived from phytozome v7.0 (chr-ID 8; pos 1 24190670 to 124191223 reverse strand)
gatcgggtattgacctttttgtgttctcctcaactcattatttagctacatatcttattaaatcttaatctttggtcattagctaccagcttgcactacttcagttcctcgagcccttgtgcatggatatatcatttagttgtgtctaataatttgtaattagtggcaacatctttttgttattttggttttatctgctttttattgttataagatcccgattgcaaactggcagttactacacctttaggttttcctttgtcgtatcaagctaataatgtgtgaagcagggttcccattctgatctttagtttttttgtgattttaatagcaataaccttttttcgcaaaaaaagtaacaaactttatgcagtatgcggttcgtatagttcccagtatccttttggacttagatttagtttgatatatggttatgtttattgacagaatgctttttagctttgcagataaaatcttgagcaaaatgggagaaggtttgggttttctgcaatctgtcgtctcctcttctgctgggtatctccgttattattcta

SEQ ID NO: 8213 - DNA, 740 bp, Zea mays
  Intron number 1 from transcript GRMZM2G092147_T03 (locus G RMZM2G092147) derived from phytozome v7.0 (chr-ID 8; pos 6 6556916 to 66557655)
tcgtgccgccagcacagcagatctagcaattccaggtgaagagaagagagccgatttgtgcttgctaatcactggcggagacctacagtgctacttgcatgtgtgcgttgcgtgcagatccagcaattccaggatttttgccacaccatgtgtgcgttgcgtgcttcgaatggattgaaatccaaatccatttcgtcttgccactgcactacacctgcacgcctgcacctgcacgcccggccgagctcttgaccggtggggaactttagttttgttatggtgcacaaccaatagttctctgtgttggtctgcttgtgggtcttttcattattcagcaagttgctattttcagttttgttcgaactttttaggttgtgtaactctttagttttgtttgaactctttagtaaaatctgctatttagttacctctggtgttatttacttacctctattgtttacttgcttaaatctgctatttattacttctggtgttatatacaagcatgctcagaacttcaaataggattatttattattctttcatgcctaattcctgtattttagtcactatttagtatttacatgtccaattctttcatgtcctgaaacagttttgatgctcttgtttcttagcattaagttcttagaagatgaggaattgaaaatatagacatttgtctgagttttttttcctcatcaacaggtggtacaaaagggtttttcatcaacaagtggtca

SEQ ID NO: 8214 - DNA, 648 bp, Zea mays
  Intron number 2 from transcript AC214444.3_FGT001 (locus A C214444.3_FG001) derived from phytozome v7.0 (chr-ID 2; po s 61723094 to 61723741)
gaggctgaagagccaaaggtgatcatatgagagaaggtctttgagggagaaggcccttcaaaacaatgaaatgtcgaaggtgggtgatatgtggtccaccacttggctagaaaaacaatgactatagaatagtttgcctaaactctcgcttttgccaagaagctagggtatccctcaggggcaataaattttggagcagggcaagatgactacctttacccttgcctagataggctggagactgatgtttatcgctacatggacaacattgggtttccaaagctcaaagctaggctaggaacgaaattctttactgatatttggaatgctagagaaagggagttgtgcaccaaagcatctaagaaaaaaaggaaaaggtctttgcttagcaatttaacttgctttgccactcattggtttgtcctatacgtttctttgtcttgtagatggaaaaggctgcgaaggaggtcatgacgattagggaggcacgaagaataaagaaacttgaagatattgctttcgtcatgtagccaaagctcctatcatttttatatgtgctactcactttgtttttaaaagatgctctcccataggaggtgattaaaactatcagccgaaggacgacccaaagctgaagattgcactagc

SEQ ID NO: 8215 - DNA, 528 bp, Zea mays
  Intron number 3 from transcript GRMZM5G887039_T01 (locus G RMZM5G887039) derived from phytozome v7.0 (chr-ID 9; pos 1 54303259 to 154303786 reverse strand)
ggctagggcgcactccgcgatcgacgaggccggtggtaaggctctatatttttatttataatttagtcattaaatttttttactctgtgttacaatcctccacactcatattcctctatgggcctgtttggttcagcttttttctgaccagcttttctgataatctggctgtgagaagaatctgactgtgtagagaatctgagtatcattggattacgtgcgaaggaagatataggtgttcatagaactctggatctaaaaagtgaaggattcctactattgtaacgacttaactgattatgtgtttatgttgattttgaatggtttttacccaaacaaattttatagaagctgactgaaaaccttagcgtttgacagtccgcagcagcttttggtggctagaaggtccaaaaaactgaaacaaataggggctatatattccctctatatcaactactacatattctattcattctaatccaattactatattgtttttaactatacaaacatttgattttgatgcag

SEQ ID NO: 8216 - DNA, 549 bp, Zea mays
  Intron number 2 from transcript GRMZM2G472780_T01 (locus G RMZM2G472780) derived from phytozome v7.0 (chr-ID 9; pos 1 53946318 to 153946866 reverse strand)
gtgtgggtgggaatccacttcgagctggtgaggtggtacacgggcaacaacagcggtggcatctcgacgcacgcgtgtggcgcggcagcggtgctgtggtgcactcctaacttcgaaggttttgcaaaaaatattgggtgtcatgtgtacatccatgtccttttactggagccgcctctcttctttgcgatgagaagcatatgtcaccatcctatactctttgatggttatttatgtttttatgtgtcacctttagtttagttttgatctctgctcaagattgtgaagtttctaggatatggtctgttgtcgtcttgctaggtgcattcgttgctccattgcaatctacctttgattttattctgttccgttgcaaacgaaaatcagtcatagttttgatttatcataaattagtacacagacacatggctgaatgttttttgctatcaacatagattggctacaatacttgtacgctactgacatattgttgtatataacctgtatgctgaataggagtgaagagttttgttcgccgtgcagtttaag

SEQ ID NO: 8217 - DNA, 587 bp, Zea mays
  Intron number 2 from transcript GRMZM2G058522_T05 (locus G RMZM2G058522) derived from phytozome v7.0 (chr-ID 9; pos 1 29276036 to 129276622 reverse strand)
caagggcaccatctttttcacccaagagggaggtaagccatttcatattctgtgatatggggtgtttggttccaccaaactaaagtttagtccttatcacatcgaatgtttgaatgataattatggatattaaatatagtttaattataagactaattgcatagatgaagactaaaagataagataaatttattaaacctaatcaagcatgtatttaatacttataattgatattcaaatatttgatgtgtcacgaactaaactttagtcagaaaaacttaacactcctatagtattctatattcaattgaatgttgtcttcaccttgttgactctagctgcttggatctattgttaggccctaccgctgtcaccggaagtgtctctggcctcaagcctggcctccatgggttccatgtacatgcacttggtgacaccaccaatggatgcatgtcaactggtgtttatttttctttttctttggcttgcttatgtgatcagggtgtgtgctaagttaatatcagtcattgaactttctacttgttggtgaaatcaaggaccacactacaatcctgcgagcaaggagc

SEQ ID NO: 8218 - DNA, 578 bp, Zea mays
  Intron number 1 from transcript GRMZM2G055243_T01 (locus G RMZM2G055243) derived from phytozome v7.0 (chr-ID 9; pos 9 2863104 to 92863681)
cacactcgggaggcgaggagctcgacctcttcgtaagtacccatactttctcgtctctcttcctattatggtcttgctatgatgaagctaataaggttgcccagtggttctctcttctccatgcggattttctgattgagttttgggtgttcaattggatatttgtatggctggatggttcatccggcatgctaagtattctgtagtacgcatgtggaagattttgggggtgatgttggctagttaattcaaaatggatttccgaataaaccgagttaattatgcatgcatagcaaaggagccgcaaatttaagtgcagaatcgactcatgaacttttgatgctatcccttattacatgcttttcgttcttaattgcgttgcttctctgtttgccaaggttatcgatagtgaagccgtttttgcaactttctttttacgtttagctgtacctctcttttctttttgaaatgataattaatcattttgtggcaagagcaggttgttatcattctctgttttttccctctttcgaatggttctaaattctaacctgtctcgtttttcgtccagacacatt

SEQ ID NO: 8219 - DNA, 612 bp, Zea mays
  Intron number 4 from transcript GRMZM2G174797_T01 (locus G RMZM2G174797) derived from phytozome v7.0 (chr-ID 4; pos 1 85729612 to 185730223)
gacagacacttccagttaacctcagtccattacaggtacggtggtgcttgcagaagccctattttcatttgaactactatgcaacactatgggaagggagtcgtttcattgaagcatgggtttcttaccaccaagattttcttcttagtgttagtacttagtagaaatgtgatattagtataaggctaattattatattccccttatagactgtataacattaagatcttggattagttgattggtgcttaaagtaaacacctttgtttaactcagtgtctgcatgtttcttttaaggtgcatgcagaaacatttttacctcagtcgtgaagacaactgtcggtgtatctatgtcacatgtggtgttaatttattttcagttgtttttctccttgttgacatgcatgcttataaaggaaatcaaatgaatccttcttcccttatttttaacctttttgagagatcagctttatatattcgcggtttcctgctgggttgccaatgttctgtttacattgagcaactttgttaggacactgcgttctggtatttgacacttaacagtttcactttgtaggaagaaaggttaagattgttgagacaaaggataga

SEQ ID NO: 8220 - DNA, 352 bp, Zea mays
  Intron number 3 from transcript GRMZM2G703002_T01 (locus G RMZM2G703002) derived from phytozome v7.0 (chr-ID 2; pos 3 2518031 to 32518382 reverse strand)
ggtgagtgaaaggaggcgtattacaaaacatgcatgattccctgacaaacgcgctgcaaaaaatctcgagctgcagagatgatttacatgctctcatctaaaaccatccagatcatctccatgtcctgtatccaattgattttgattggcatgttctgggaaagataacgatttcagttgcatcctcctgaccagcatcagctgtgtgccccgtatctttgtttccaatcacctcttttgaaaaccttattaagaaacattaactggggagatatgcttgaactgggaccgaggaaatcgtgagatattcttgttactatcttctgcacttggcgtgcagctcccgcgcaag

SEQ ID NO: 8221 - DNA, 681 bp, Zea mays
  Intron number 1 from transcript GRMZM2G147288_T01 (locus G RMZM2G147288) derived from phytozome v7.0 (chr-ID 4; pos 1 16863301 to 116863981)
agaccaagctacgccaggcgcatctccggaggcaggtgtgtttgtgttctccgttccccctcgcgtgacgtagaaattactacattttgtccctgttggttttgtaggtggaaaagttaagatgttaatatgttttatttatttaaccgaactcgggtttgaatttcgtgttcggtgtagttgcgagcggggattttgtacatgttttagtagtataataacatgtagatcaaaaggtgtcggtggatgctaaagtctgcgttagcttaggagcaattagcactctaccacgcgtccacaccacacgcattagctgatcaaatccggagttgcatcatgctccacttcgagtgttacatttatttgccaattctattggctgtggaagctcgcacttggttaactaactaatgcaagaccatttctatgctttcgtagtttatagataaaacttgattaggtggattggtgaactcttcattagcttggcactgtacctgaccacattcaggagctgcatgacaattgacttgagaattgagatgtatctggaagcaattctatggacaaaggaagctcatgtttggctagttagcttttgcagaatttaagtcatgctgttacagatgagtttttgctatgtcctctatcttatacgacttgctattctccagcaattcc

SEQ ID NO: 8222 - DNA, 515 bp, Zea mays
  Intron number 3 from transcript GRMZM2G052935_T01 (locus G RMZM2G052935) derived from phytozome v7.0 (chr-ID 2; pos 1 56722206 to 156722720)
tgatcagcttgggctagatagatcaattgtttgtggtaagatgtttctcgttttgccaaatgcttctcatagtcttctttgactgtttgcgtttcatgttttcagggttacaaaacatgttaaattaatttgtaatgtgttcatgttcacccgttcacccacaccaaatttctctgaggatatgtctccacatagggtatgaaagtggggattagtgtatcatatggcttaattgctatatgggttcacttcaaatgatgtaacctttgattcactgtattaaaaagaatctagcaaacatgtttctgacaacaaagcaatgttcatgcacatagatgaactgatgatgtagttttcaagcttatgcatatgttttaagttttttgtttagataacttcatgctttctgctacatgaatatttcactatccagcctttgcctgtggtgctggtaatatttcttgattctgaatgaacaataccacttccaatttgaaatcttgtaggtttgttgg

SEQ ID NO: 8223 - DNA, 696 bp, Zea mays
  Intron number 1 from transcript GRMZM5G869422_T01 (locus G RMZM5G869422) derived from phytozome v7.0 (chr-ID 8; pos 1 8198845 to 18199540)
tgtgggaggcggacaagatgtgagtttgcattttcttctcaacctgttccctagttgatctccgtgaccggactgctttgatcagtgaacaagctgcttttttcttcccaccttcactcctcggtatgctttgtgttgtttttcatggcccttgaaatctcatccttcccgttaagcatttttcttgatggttttccttttacagttaggtttcttgatcgtttttttcccgattctgtatgaatcgcgcccttcttaattataatacctgctagcacttgtgttaagcttcagatgcttaatatttagtttattttctcttggattttctgcttttccacactgcattttttgccactcgcaaaacctatgctttccttttttttcggattctttttcgcccttttcttcatcccgcaatgttttgttttgtacttgtttgcgttctttgcttctttcggtgctgactttattactacgctacttgtttatttatctgtcttcttcctagtggaagctttcttcagggttttctttgttcatccagcagttcctaagacgttttttttgctggtccctgtctggctcttgcatgcttgaagtgacctcagtgttcctgctagcgtgactaccgctatcgttgctctaacgcttgttatgctcgttgtttgagaagcaggttggattcctacattt

SEQ ID NO: 8224 - DNA, 763 bp, Zea mays
  Intron number 3 from transcript GRMZM2G092975_T01 (locus G RMZM2G092975) derived from phytozome v7.0 (chr-ID 9; pos 9 4790433 to 94791195)
gccagccttgtctctgcgctcctctacgagaagaggtgagaattttgctatcgtacttttggtggaattgtgtaggatactggatagaccttctgggtagttgttttaattttttatgccctgccagagcatggactctgcaaataaatgcaaaacttattggttatgttggcttatgctcatgctgctggaggatttggtcataggaagttagtgcgagtcatcaataccgtatactgtgatgtgtgatggtatttggggatgcagaacttcgaaactagatctttatatgaaatgctttgccttttggaccgaccattccactgacagagtacttcagatacactttatatagtacatttactacttatatacaataaactgttaagctatgagatatcatctattttctattagccatgaacaatgatgtatccagaattagctccacataaaccaagttcgtagtctattttttaaaaatggagtcttgttataattagagtttcatgttgcaatttttctcttcaaggcataagaggaaactaaatcgttatctgggtaactgaggtaattatgttcatgtgcacaaagattctgtttgatataaggactggatttcaagcctcttaatccgtagttgctgcaaattagcttttatcttcaaatactgaaactttcattggcaatgtttgtttaacttttatcatgacacatgaaactttcagattcgggccatatttttgccagccagtcattgctg

SEQ ID NO: 8225 - DNA, 376 bp, Zea mays
  Intron number 1 from transcript GRMZM2G055960_T01 (locus G RMZM2G055960) derived from phytozome v7.0 (chr-ID 2; pos 1 76344727 to 176345102 reverse strand)
acataaggtcttcactacggacagcttttgctcaagtaagtcttgttagtcgtaaatatcatcctcaatctttggtttaacatatatgaataatgttgtttctgtacctcaaaagtcaaaatacccatgtgcatttgttgtttttgttttgccacatcaatttattgctcacaacccatgccatgtttggtaaaggaatgactagaaagttttaacctagaaactgtagaaaatcattttccatgatctcaacttatatttgtacttagctgttctcttttatgcatggattgagatgctaggtttcataaaattgatattttggtattgtgcacaagctcttctgttattgatgttacttcgacctgtgtagaga

SEQ ID NO: 8226 - DNA, 595 bp, Zea mays
  Intron number 2 from transcript GRMZM2G446594_T02 (locus G RMZM2G446594) derived from phytozome v7.0 (chr-ID 9; pos 1 7966827 to 17967421)
aggtgctctacttatctacattattattacatccctttgaagttgtatcttcagaagttcacatcgacagtattttcttcctcttgccatacttacccatcatggcccatggggtgtctatcttatcatgccgtcttcaaagaatggcatcatgttaacaaaaatgaatgagaaatcagtcatttctaatggaaaggctatttcttactgctgatctggtggcaatttcctgttaaacttctgcttactagcatatgtttcaataatctttaggcatggtcaaatgtttctatattatgtcgcgatataatcaagtgcatgataacccatgtcaagttcatcatgaaatatgggaccattgaattttgaattgatcttatgtaattgttatccttcatatcagaaataatggtttttttgtcactgcctttgagttttgaacgtttaagacacttgttggctatttgcttgagtacaacagatttcttaactgtcgaagcttcttgcttcagcacaaaagatttcttaactgtcaaaacttccataccaaccctatgcgcccttatgaaattgctccctctttgatgtaggaact

SEQ ID NO: 8227 - DNA, 666 bp, Zea mays
  Intron number 4 from transcript AC205467.3_FGT001 (locus A C205467.3_FG001) derived from phytozome v7.0 (chr-ID 8; po s 44587077 to 44587742)
gattccaggtcactgattcatagctacattctttttataaaattgaacatttgttaggttttagggttaactcatgagtttatttataggtgggatataatcgtcgtggcaatatggcctgaactcttacaaaggaatgctctgcgatgggtgttagctagagaaaacaaaggcataattattggaactatgctacgtcgtaacaagttatattgtagctgatgaaaatggatcgaaatcgcttggaccaaatgtcgatgctaaggaacgtaagaggcaaaggggaagggaaggatatgccgcgatgtccgttaaacaaaaaacgagaaaagtagaaagcgttgtgaagtaagtcaacgaaataaaggacctccaatacagccacaagcatctagatgtgatgaaaaagttaaattcctaattgttattatacctacatgtaccttatacaaagttgacgtgtattcttttgtatatggtgatatacaaagaagacattaatatgaagacatgtgagacggttaactttgaaataagtcgagatgtgcatcttggttcaggtatattatcattgtaacaattattttaatagatcctcttgtggattagtgaatatctattaatcttatttttggttttcattgtgtttcacaattagtctttcag

SEQ ID NO: 8228 - DNA, 784 bp, Zea mays
  Intron number 1 from transcript GRMZM2G141510_T01 (locus G RMZM2G141510) derived from phytozome v7.0 (chr-ID 2; pos 2 12803867 to 212804650)
ggttctctcttcctcgggttggacagctccactcagtaagtctcgtcccttttctatctctctcagtttaaacgggcactggatcttgtttttcctgtggtctctgtgtagcttattcctctaatcaggcgctcatttgttctagtgatgggcatggttcagtagatggtgagtataaaaggttaaaacttttatctgcttgtaagacagcggtatcatctatatcggtcatcttcatctgcatcttctcttcctctcctctatatctcatccaatctcaaacaacgtcctctatatatggtaatctatacgtcaaaggcacccattagaaacatattttcctgtttttcatcgtaccctcaaaagtcttatatatatttttaaattttgcttaatccatcatctaaggtataaaaatgaatagaagagatgaggacgaatgagtgtcctctctatttggggacaccatctatagaggaggaaatatagaggttgaatagaggatgctgattaattaatgaaaaacaagtaagaaacctaatgttcttaaatacgtctctttcaagatttttttacctagttcaaatgtggtttctttgttctttattctgcataccagtaagtcgataaccatgatcgtagcaccatttgcttcacatattcccttcctggattttatttttcagtttgctatcatatactagatctgtgaggctactattagacttggacctaatactgccattctcctgttacagatcactgaaagctacggtgctcaata

SEQ ID NO: 8229 - DNA, 717 bp, Zea mays
  Intron number 1 from transcript GRMZM2G124954_T01 (locus G RMZM2G124954) derived from phytozome v7.0 (chr-ID 8; pos 2 0552486 to 20553202)
aagaaagtctccaaaacaaaagatttggtccagaggtaaaaatgtctgaccaaaggctggcattcagataaatcagttttatgtttcaaataactcataaatggcatttaaattctagcagtgcaaagaacaaaatcaaacaagataataatcagttttgtcataaattattttttagaataaaaacatgtttaagaactgtataagcacacctacaattagcaacctctgaagatttgtatgaactaatatttatgtgtaaccatgacaacatcacacgttagacccttgaaagaagccatatcatgtttccaaatattaggctaaatgtctgaataaaagaagaaaaaacactaggtacagtttttgccaagatagtgccgacgaggaaacaacagacacattgtaagtgattcttgcagtaccaatattcccatgaacttattactaaagaagatgtctttgtgatggtacatttgtccatatttcttaatcatatatggcacactgtacattttccctcctagtgttttggaatccttatttatggtactaataagtagcattctaatctgcatatggttgttttgttacaaagtcatattctgtcaccataatttattaaagagaaaaatgtttggttgcacaattacaagcttgctttgtttgattctacttgcagcgcggccacacgggcccagcaatagcaacgtcaca

SEQ ID NO: 8230 - DNA, 1060 bp, Zea mays
  Intron number 1 from transcript GRMZM2G028685_T02 (locus G RMZM2G028685) derived from phytozome v7.0 (chr-ID 8; pos 1 59294904 to 159295963)
ccgaagcgaagacgcgagaacctgcgatatttctggtcttaccctctctctctctctctctctccgcgtttttttttgttcgtcagttttgatgatcgtgttctccgcggcgcaacctctgatcaacggttgttccacacggcctccattaacatcgcctgcggagtgcgcggtcccctgtcccctactgtactcctaaacctcaagccaaaccccttctgtgtttacacggaggggatttttgacgattgcttcgtgatgagcgcaacgaaacgagcgtgagattgtgaagccgacgcatctgtgaaactagtagctgtgatcatatttcaatttcaactgagatgtcatagcttgctatcacaactggtgcttcagtctaaggttgtctgcgtaattggtattgatactgtttttttttactgaatcctaggacgatcaaggtgtcatgttcttcaatgacctttcagatttacaaccagatgctatttactagcctaatcttggtttctagcaagttgcctattgccgttgcatggtgttactagtccaagcaaagcttttagccatctgaattctcttttttctggaaacaataaaaatatggatgcacataacttttgtgaacagtctgctcgtaatcccaacatttacccccttggtactggctaccacatttagttttctgtcctgcacgacttatcttgaaattctgcttgcagttggttgtgttgccttaaattgacatacaccaggacactaggacagggcaacatctgtcatttatcttttctgtatcatacatttttctctgtgcacatgtgggtctgtatatctgcgtttgaatgctttagccgtctcaaaatgttcctttcatatttgctgttttggtgttcatgcatcatcccactattcgtttgagcacatttcaggactagtatcaagtataaattctcttatcaattcaaaatcacatcatgatttgtctggtgttggtaacaccattcatagtttcaatcttataggttctgcttgcctgtcactctatcagcaaccacag

SEQ ID NO: 8231 - DNA, 778 bp, Zea mays
  Intron number 1 from transcript GRMZM2G128268_T01 (locus G RMZM2G128268) derived from phytozome v7.0 (chr-ID 2; pos 1 30524871 to 130525648 reverse strand)
gtgttccagctccagggagacgtataccccaccgggtacgctggtcgacgttctctcctttgtgtaccctgatcgaagcccgattgtagtattggagccaatcagcacggccgctcgctcgtgcgaggtgggaagggattcgccggtaaattcgagttcttgccattcgattagatgcccgattcggacctttttgctggagcagtcgttgtgccttcttgcttaatcagttgcggccgcgcctggcggtttgggggctttttctcgcggaatgcagggcatcgtcgcctccgtcgcgccgcgggcgtcggccttgtctgaccaagtcgccggtcgaatcgcgaattttaccttttgactctgttcccctttcttgcctgtgcttgtacaatcctacggatttttccctatctctgtctctcacttttcgtagcttctctttttgccgttttcacctgcacgtcatagcatcacaagttactcttcactgcaacaaaatgccaccgcaagcgaggccttttcgcgaacacttttacccctaccgaaatttcctcgtttcctctgtttttttttttggttccgctgcctttgcttgctctttgtttcacagtaataactccaaattctccactcttctaataaaagaaaacaggaaaaaaaacaatcttctgtttcgtttttatcatgtagtaccatcaaagtttataaggacttgagaatccacttgacacttgtatacaaaccttgaccattttccactccatctgcagccactact

SEQ ID NO: 8232 - DNA, 880 bp, Zea mays
  Intron number 1 from transcript GRMZM2G089713_T04 (locus G RMZM2G089713) derived from phytozome v7.0 (chr-ID 9; pos 1 1496263 to 11497142)
ttttgcggtttcggtgtgttcccgtgactcgccgggtgcgtcatcgcctgaatcttgtctgggctctgctgacatgttcttggctagttgggtttatagattcctctgatctaaaccgtgcctgtgctgcgcacagaactctcccctgtcctttcctggggttttggttacgtggtggtagtaagcttggatttgcacatggataaagttgttctaagctccgtgggttgcttgagatcttgctgttattgcgtgccgtgctcactttttttgcaatccgaggaatgaatttgtcgtttactcgttttggtggattattagcgcgaaaaaaaaactcttttttttttgttcttttactacgaaaagcatcttcttggattttgctatcttcttttactacgaaaaactcttgagtctaggaatttgaatttgtgatgtccattcttgcagtgcgctgtgctttattgggaagccaaatcctattattttctgcctctagggtctgaatggaatcagtactcttgagacagaaaatcaatccaatcaagttgatttctttctttaaaaatattatcacagaactaagtgcttgtgcggaatcagtactggcttttgtttggtggaggatcaatacttgcttttgtttgggggtggcaactgttttgctataagattccatgtgttcctgttgagatgaatcatatatagtatagctgcatactacaaatctgtttttcaaatttaggttgctttggcatgatctatttttttgtcagacagactttctaagtggtagctcttgatttcttgttcttgtacaactggtgctgctgaatcttgaccgtatagctcgaattgcagtattctgaaccatcgagcc

SEQ ID NO: 8233 - DNA, 925 bp, Zea mays
  Intron number 2 from transcript GRMZM2G363583_T01 (locus G RMZM2G363583) derived from phytozome v7.0 (chr-ID 8; pos 1 50512792 to 150513716)
atactcgaggagctcaaagacttgcagagctgtaggtggcctgggttctggacacacaacaggacctctctagggtcatccaaattattatggaggacataatggtgtttcaggtcttgtgcccactacatgtaccatgatagcttaagcgtttacatacaaattatggagacattcgttatagctgatgcgacatcattaacacaggcaagttcattactgacttactaacattgttttctttagaatgtcttggaagagagcgtaaatgttagtagagatgtatctggagaaggtgttcaacaaacattgtcgaaaatcttagaaggcactttaagttactacaattgcctttttgttttgtggctgtagaattaggattttagaagctatcttcgattcagttttttataaggatctttgattgactttaactgtctatcaagagaatacaataatgatcctctctatgttgcctacttattcttaatgcaggttgtcaatatttttgagaaaggattgagcaagaattcttgcaatgatagtatacatgttacatactctatatggcccttaatgaatacatgcactgtatatcatatgggttaaatttggattctattgaatggaaaggatctctaaaatgttctttctttaaaagtgagttcacattttttatatttggataaaaatctgatgcagcaaaacaaacgaagttgatgttatggcaagactgcatgcagctcataatttctacttggataactgaaatttatatggaaaagctaattcaatctgttgagaaccaaaggtagtatataataccttccctgtttttaagattcatgtatgaaccaagtcctttatgtgtattttgtcaatgtaaaagcctggtttacttttaccattgataggtatcactgtg

SEQ ID NO: 8234 - DNA, 1037 bp, Zea mays
  Intron number 1 from transcript GRMZM2G049872_T01 (locus G RMZM2G049872) derived from phytozome v7.0 (chr-ID 9; pos 6 7906107 to 67907143 reverse strand)
tccgtgggcagtgggctgcatcgtccaatcgaccggtgagtggcctgtaacgagttcgttgtgctctcggcttcatatttccatcaaccaacatcagaaatcgcgtgtgttgcaccaagattggtcctctctagtcctggctaccaccgtggtggctctgtgcgccgccgaatagatgaccaggggaggaagaaaggggtgagtccgttggatttcgatccagcgactaatattagatcgggttaaaattagatgtggttcgttcgatctaaatggacgggcgggattttaagtagcatccccttcgcttgattaaatcatagccgtcgaagttcgatctggcggccgcgaggtgaattgcgcgcgttaaaccgagacccttggatttagatccgatggtttagatcgcattccggatcggctgattgcggatctaatcctagcggccagatgttgatcgtgcggccaggaacgcagaataccccttcgccgtgcctatttgataaagagtccctggacttcttagtaataaacccgcggtccacagtggctgtgcgctgagtctagtaattcttgcgtagagacccctatatttatctgtttttgtgcgcgcagtccaaacagagattaaatcaggaaattaatttaagaaatgaatttttaatatgaaaacaattccagaacttgtaaaattcatataaaatttattttaactcatttttaacccattccagttcctataatttggtaatattattgtttatcacctagtgccactgttttagcatgaaaactatattaaatttgatcacctagttattctcgtaccaaacacataaaatcttcaaaaaatcgtaacttctccgttttgattccgatttgttccgttccagttgcgttagtctcatagaaacgcgtagatcattattattcagtatattcttatgtttggtgtaatgttaattttatctataccatgtttgtttgtattgctacgactagcgcgaggacacgtgtcatctgaaaagcaagttggt

SEQ ID NO: 8235 - DNA, 755 bp, Zea mays
  Intron number 1 from transcript GRMZM2G024799_T01 (locus G RMZM2G024799) derived from phytozome v7.0 (chr-ID 8; pos 1 64379178 to 164379932 reverse strand)
tgggactgagggctgtaaacaaggtatgcacctttggttcttcacaccatcttctcgttttgtttcttttttttttctttttcccacactgaaaattaccatgtcccctgctatgatgcactgtaaatatacaaatcatgctaagtttctcagtggctgctgaattgcgcagcactactgtaattttttttacacttctacactgcacaaaaaaaatataagtacagtagaaatgatagcgatgtcgggtaccatgactccatgagtccgtaaaggattaccacacattcaaagttcaactttacagactgttagtgccgtgttcgtgtgctagttattagacagacacaggtcgttccttcagaacaaagcgtcaggctaatttcttattcttgcctcgattactttacgattttccaaggccaaagatttatttattaccccttctacttctaattgtaggtcattccaactttcttgaggaggtaaaacatctcaagtttaagtaaattttatataataaaatactgacgctttgtatatcaaataagtattgttacattatttattattatatttttatagtataactatttgatgtcataaatctatatagttatctctataatttttaactaaacgtaagatgcttgaacttttaaaaaaatggaatgatgaacgaatgatgcaaactttctcactcgtcccgttgttcatggaattacactacaggcctccctccctggcagtgagaa

SEQ ID NO: 8236 - DNA, 687 bp, Zea mays
  Intron number 1 from transcript AC208327.4_FGT006 (locus A C208327.4_FG006) derived from phytozome v7.0 (chr-ID 8; po s 126551310 to 126551996 reverse strand)
ccgccgactaccccctcgtcacacagggtagggcaacactggcatctatgcatctctaaggaaaaaaaatctccttggttcaatctagtaggttacaaaagaacgacactcggtagtcttcttcctttattatatggaaattacaagtagtcttctagcgatgacattgaatggaaatgtaagttctctttgtttgtcctgactgatatcaaataacaaatactcataacatggaagagctgcacaaccagtcatgagtcaaccatgcacatttcatacgattccagttgcctattagtcacactgtcagtcttactttgcattgatagttgtactgtcaggaataatagattgaggctccccttatttattgataagtaatgcacatgccaaaacttgtgctgttgctatacttatatctgttaaagtgtgcacccaaacatataggtctgttgtagagcctgtgccaaatgatgttcatgattacaaaatttctgttatacatcactcttgaatgctataatatatcatggttattctggttctccaaataacttttatcttctacagaaatctgcttcggtgcttcattaattattccagcaagtcatcattgtgtgattatcctcattaattgatggagatcattataaatctttatgcttttccctgatgcagacctgattc

SEQ ID NO: 8237 - DNA, 988 bp, Zea mays
  Intron number 5 from transcript GRMZM2G178254_T01 (locus G RMZM2G178254) derived from phytozome v7.0 (chr-ID 9; pos 1 47488168 to 147489155)
ctaggtaggttgttagttaaatttatcagtttggtgatggtgtttcatgatcttagacacacttctctaatcacaagcatgcctagtcagctagtataatgattgaacatcatgaggttgttctttgatttgctatttaaaacgaaatagcgggtccacttgtcatcaagctcacgtctaacattgttcttgtgcccctggtggagtcactttagtcagactgtcagagtaagtggaacataagtgtagtggttggtattgaatccgaagctgagcttgccattggtagcttgtttttggcacattcagaggttacatcatcttatagagatgcatcttcttctaatgtacggtattgtacttaaggtcactaaattatatggatgtatgttttaaaaagtttgaagtattgttagtatagtgcatagaaaacgatgaaatgatcgaccgttatgtgaataatggtaaagtctcagtcaattttaggtgttctatacatggatgcttcactgctgaaagagtgttttaaagataatttagatgtgccgatttaatttatcattggacaataaatactttttgacaaaacccttcattcatcaaaattcttgggtttttatctctggcataattgagaatatgaaacggatattttagcttctgagctttttttaatattgatagaaatcaaccgtttattcccagatactttgcctttcctttttttcattacctttctatatagatgcacaatatgcatctaaacttttattaattttccatctatagctttattgaatagagaaacagaagatataagtcaaacttgtccgacgaggcaacgatagtgtgttacacttctaataattgccttttgttgtaagatattagataactccatctacatagcttctgcagtgccggtcttgttggataccaacagctaaatgtataactgttttcatcattgtagaggcccataaaaagt

SEQ ID NO: 8238 - DNA, 774 bp, Zea mays
  Intron number 1 from transcript AC194036.4_FGT002 (locus A C194036.4_FG002) derived from phytozome v7.0 (chr-ID 8; po s 9541027 to 9541800)
cagtagacaaaagaacaaagtggataaaggttcaggtgtaatttattgaattgccttgatcggaaagagtaaaaggggagaggaaaattgaatggagtcgaaagagatagtaggaagaaaagacaacagcagatgtaattccacatatatttgcccaccgttcaccacttgcctcgtatgttgttctcatccgtacagaaaacaaagtttgaagcttgaatggtgccctcgccgagacagccccattcacggttctagttcctcttgcaacccaaataaaagcaaacatagctttgtgactaaaagaacaaaaggacttgagaaagaaatcaaagcaccaaaccttgaaagcaggttcatcccaacaaggaaaagcagcgccttgcttcagctggttcaaactgtgttacaaccatgtttttctttaggtaataagctaatttgtataaatattgtagatgctttggtgataaaatatagaaaaacacaatcatgcaagtgactttccaaaagtacgcaaagtagaccaagtgcaggtttgtggatcaaactccttaactgtcataaatgcacataattaataataactaagacactaataaatgaatagcaagagatgagtgaaatattagcctaaccactaagacttctgcaataagactgagtgaaaagagcttttggtgattaccactgaatgaccaacacttgctgaaaatgaaactgctccagctaattctgatggttctgcttgtgatttagcttatagctttgacc

SEQ ID NO: 8239 - DNA, 1067 bp, Zea mays
  Intron number 1 from transcript GRMZM2G106344_T02 (locus G RMZM2G106344) derived from phytozome v7.0 (chr-ID 8; pos 1 71711257 to 171712323 reverse strand)
ccacggcctcgctcgtcgctccctccggggacgaggtaagaaccaagtctcttccagcttcagctcgtcttcattccttctgcatctgcttcggtggccactctactccgatcctctgtacgttctctgctagtagggatttggctcttgggtagatacagtaaggttcatcactcatctgctagctccttcagttttttttttgtttttaatttcgtacgtttgatctaaaacacacctaattaattaaactatctcaggaaggtttgcttcatatatactgatagaaaggatttggcacatgcaagagtgaagatgagcttaataggggatcgatatataaaacacgcagataaacatgctaataggctaacgacatccatattttgtgtgtcatgcaagtatatatataaacaacgctggctagttaatctaggatattgctttcgagggcttcaaatttgaaggtaaacactgtttaagaaagtttgttcatgcatcctaggctagactcctagtggtcgagctttagatgattataaagcctaaaagcagctacaagtttcgggccttcttttttagaaaaaaaaaattaatagcaagcaactcttcatacttctacggacaatccggtaccagttaaatcgatcatattttttttttatctctcgcctaacaacaacatgacacgtgctcatgtcgcgacctcactgaaacttccacgtatacgtcctagctccttttgtagctcgtacgtgaaatcgaatcagaatatatgcagcattatttgtgctgtacttttgcttttggaacgtactgttcagttcatattccgtccctgaccctagctacgtacgacaagaatcagaatcgcacggtgaagtgcagattgagagtttactatattttcacatgttttctactgtatatggatgtagtaatttttaatcgtaacccatggtccttccagtcattctttataagcatcttcttctcgagatccatcctcaccgaacatcctggcaggttcagtttcgggagatcgacggcaagatcatcggcctcta

SEQ ID NO: 8240 - DNA, 651 bp, Zea mays
  Intron number 1 from transcript GRMZM2G703095_T01 (locus G RMZM2G703095) derived from phytozome v7.0 (chr-ID 2; pos 8 7519070 to 87519720)
gtgtacaatagatactatgttttcatgacacaaggtaccatgcatgcatgtactaacattgcttaccaagttaaatgtatccagttatccaaaatgcaataaatttatgattctcaaaaacgaaatgactaaactgtgcacacatagcattgtttgcctattacaagagtgcacccaactttttgtaaaaagaagatcccaaagcgcaaaagaaaatactactctgcaagccttcttttctatcttcatgtggttatttaattccatactgcagttgatgagaagcaaagaaaataaaccaccatacgggacagtgagataaaacctatacaaaaaggccagtaacaatgaaaaaattccctagcgttttcttcttctgaatcgcagtatgttttcttctgaatcacaaaaagttggcgtgtatttgaatcatagtatgtcacttcaactctaaatcacagtaaagcaaaaaaaagaatacaataatttaactatgtgatccacaaaacaaacgttagaactgaacatcgtgtacaaactttagattgatgtatagtattcaaattttaattatactactatctagtaatttaaatgtttatgtggtctgtttgtagctctaaactttcagttttcaaactgacactgaga

SEQ ID NO: 8241 - DNA, 771 bp, Zea mays
  Intron number 1 from transcript GRMZM5G826801_T01 (locus G RMZM5G826801) derived from phytozome v7.0 (chr-ID 8; pos 1 48512133 to 148512903)
agctcgaggaggtcggcgccaaggtgtctatcgtgtgacactaggtatactgactccttttttttttcttcttttttttttaaatttctttctttgatctttgcctcccaatcttttgtgtatccccattgtcgtttataaggaattgctgtttgatgatatgaattcagtgtgaatgtgacatgcttaaaactggtaatgtagatttgccttgttggcactatcattacttcatgacggtgaacaatagggcattttgctttccttattctgttgcttgcaattgctagtagcctttgtagtgggttgcattgtattcgttattattcgttacaaatgtcatctaaaaaattgtctgtaagaaaggtactacaaacgttttctatttgattatactttcatttaatgtgtattcttccttttataatttgtttccatacatttagcatctaagagatcaaaactgttttctctcgtatctaataaacagaataccccgccgcgtcgtacgctggtctggctgaggccacgcgcccacgccttctgttggtctgtgcaaaagccgtttggtctctatttgcatgccgatgccgtcgcgttagctgttcaacctcggttcggaaagataacagaataccccgacccttgcgcgttgcggacttgcgcctaccctatataataaaccgatctacgctgtgcctccatcaaataaacacttgcatctacgtattgttagctagctggctctcgacaagacaaggtgatcaaggg

SEQ ID NO: 8242 - DNA, 976 bp, Zea mays
  Intron number 2 from transcript GRMZM2G065839_T01 (locus G RMZM2G065839) derived from phytozome v7.0 (chr-ID 2; pos 7 9870827 to 79871802 reverse strand)
aacacaggtaattcccctttcttggtctccctcagaagtcacattttgacgatggcacccctaacatttccctcagatgtcagaacattgcgtatccagcaaaacagatttcagaagttgtgttctcgtcatggattattgacattctttgttttcatgcaaaatataataattagtatatttatatatgaaacattgtgataaagaagatgctcaacacagtgcctcgtaccctatatctatctactatataaatcaccagtttccattgtttctaccgtcgtcgtgcgtgacccctccttgctcctcattttaatggtgaaaaagctaaaattatgtacaaataaggattcaaaccatgatttttgccttgttggctccaaacccacattcatacccacataacaaacaaaatacacatgtttttgcgttttatactttataattaagcataaatggaaaccgtagcaacatatgagtacctaacaagtataagataaattgcgattttgtgagtgtgagatggttttggtatatgtgcatctgtggatctgtgctgtgatggaacacaaatgcttttgccctgatgttatgacagtacacaattggggatatgttattccataatttttttggagttggaggcataagagaatgttatgctccccattcctggacgaggtgatgagacaaggaaaaaagcccacttagaatatgcttctgattgaactatgagtctgaatcacgatgctgctgcacaataagtactcattgcaaattacccctttattttttgtcattgtggtaaagaaacacaattacaaaggataacctatactagttgatccagcattttgttatcaacagaatagtgtcattgcttcttgtttggattgctcatgaagttatcttttgatgtacatttcgtttaatgtaattgatattggaatgtgacctcagccatcgagcggttaac

SEQ ID NO: 8243 - DNA, 916 bp, Zea mays
  Intron number 2 from transcript GRMZM2G379295_T01 (locus G RMZM2G379295) derived from phytozome v7.0 (chr-ID 8; pos 2 8690661 to 28691576 reverse strand)
aggtgcaagtgggtaggggtaagcagtctacatcccctacatgatattgtataatggtatttcttctttaaaaaatgatcattttttatttctgactacgaggatattatccacgtcagatgcataatgtgtaagaacactgaatatattcaaatcgtgcaaaaaatgttcataaatattaatcacttccttaggtatacacatacctagttcctttcttgatctattttctgacttgccatgcaaaacttatattgtttctgaaagttgatttgaatagaattccactaaccatgggcgcatatactatcgctagcatgaatgatagacgactttgtttttaatccattagattcaagcattatgaccatgatcatagtgagacctgagttggcaatcattgtaccattttggtctattattctatcgcttttgatttgtaaatctgaagaaaaagaaaggtctatcaaaagacaacatgaccttatttcatggcaaagcacacccatttctttgttggcagtattccacctttttgttcattatgtttattagctacaacaggtatatggctaaaataagccaaccttcacatattcctttgattgataaggagactaacagagtaatattcaaattcaactatggtacaaatgtgtgataactatttcatttgatgtatatgatgaactattttattttattttattttattttattttattttattttgaagttccatcagaagtataactagctaaataacatataatttctgcaccaatccgtctttacttggatgtgcattttctgtccatcttacctgtttcgctcattttatttgatattaatgttactagcaatttggatatatcttgtagaagaaagtcaatacaagacaaaggaagccccaaga

SEQ ID NO: 8244 - DNA, 975 bp, Zea mays
  Intron number 1 from transcript GRMZM2G130230_T03 (locus G RMZM2G130230) derived from phytozome v7.0 (chr-ID 2; pos 3 6463385 to 36464359 reverse strand)
tccgtcgtcgtcacagctacctttgctccggcccggtaaacggcggtgcttacttgcttctttgcgggtgttcggtgtcgcgatcgcttcgcgttttcaccagccgcgcgctagattctttcctcaatcgctaactgttccgcggcggatcttgtactgccagagttgcagatcttttttccctcttcgatggagggaattatagtaaggctccagctgctttcttttcgccttggggttttagcaattttctctacgtgttgcaatcgcttcttcacctccggttgtttcgtagcggctgttttttggttgttgcagacttgcagagactggtccatttaattatttttgctgctagaaattgggatttggtcgaggttttgacacattaacttgagggtttttttacttttcgtttctactgctaaaattagccacgaacgagaacttgtgctacccctcgatgttaaaattaaaatgaatgggtttaagcgggcactgctcttttgagcttcagatattggtgcttttggtgtcgtcagcatgcagagagatataaatttcagattatttttctgaaaagaaacacaataaactcagatacctttggaagaatacaatattttgatatgctcttacctataaagcataaacatcgagtcactataagatgcagttcgctacttcacttgaaagaggacggaaaagagtgtgatcttagatctgatcatgtccagtttttgtctgaagttctgaggtcgcagtagatgctgtgctctttttagcataaaaatggtgttgcatggagcaggactaactgaagtgttgtgctaccttacttacctgttcttggacatttcattaacaatacgaacatgtttgtgataaatttgggtcactgcaaattcattagtatcttcctcacttggattggtgtgttattgtagcaggtagaagagaatcgtgccatttgtc

SEQ ID NO: 8245 - DNA, 874 bp, Zea mays
  Intron number 2 from transcript GRMZM2G087081_T02 (locus G RMZM2G087081) derived from phytozome v7.0 (chr-ID 8; pos 6 2476136 to 62477009)
gtcaggtgagatgtttctgttgatcccgtcctttcttgtacttgatcctaattttctaataaatttctagattgaactgtagtacttagaggtactccgtgtcactcaggtagaacggggatcatttctagaggctagagctgacttgctgcttggttaggccttgaaatgttttggtgatacaaacaattggacaaaaggaatatgatctagaaaactacggggaatcatccaaccattgatacacacttagtgccaccaaaacagatactgaaaatgtgcccctatggtcctatgggccccgtgtgcatccatcgttggatacttggatgcatacgaggaagcatgtgagcaggaaagagaaatattgagggcacctctctccggctgtacacggatcccatggggatatgtccttagggcaaaattaacattcacccactgaaaaaacttctgcggctgttttctgttgctttatctttatcaagcctgacattattgatattcatgccatagaaaaacgtgaggtgttaatctaccgctgtttcatattatagcaagtgcttccttgtaaattaagcattgatgtagaattgctgagttattttagtccttgtaagttgttgtaacatgcagacagctgtctcgaaaaggaggagaaaaacatgtacacacatccttatggtgcttctgtaaatttgttttactagtgttagtcaagatggtttgtggttttccgcttcgtttgatcttattcttgataagtacttgtattcttcttaataaaaatttgtatgcatggaattcattatacttggctcatcacaccagggttaacttttggtgctaaaatcatttcttacctttggcagat

SEQ ID NO: 8246 - DNA, 985 bp, Zea mays
  Intron number 2 from transcript GRMZM2G167318_T01 (locus G RMZM2G167318) derived from phytozome v7.0 (chr-ID 2; pos 2 05615511 to 205616495 reverse strand)
tcaagctcgtcgagcccgcgctcgactgcctccacgtaattattaatcatcatcatcatcatcctatttctgctcttcctttgcttgccttgcatgcctgaggttcatgaagcgtcagacgtgttgcattgacgtcgaacaccttgatgggtatgataaatgcgtgcaccatgaatgctttggatgttagcagcctagaaacgcatttccttgtctagggtagatactcgtatcgaccattcctcattttgtatgtgcagagcctagtccctgaattgattgtttgggttgagatgtgtagatagttccaggtttatgccatttgacttatttacaattttgagagtattgtgatgtaacagactgttgttatatgaagacaatagaactcaggaatcaggatggtaaaatgagtgtgcagtatgaacaagtagctctgtagacatcaagttgatacatcaatatgcattttgcattgtcaaggttcaatatgctaggatgctatgctatgcattgtctaatattcagaaatatgatgtgtagatacgtttatttaagttctatgttgccatcacatacatctcatgtaacactgattttttatccttgtgcagtaattgcatatacacttacacagatgtgagatttggacatagggtgctattttatcttgcccctaatccatgcataaatcaatttccatatgttcccccttataccatgtgctagaaagctcagggagtgccaaattacttggggtagagttaaatgtgtagattttacaatagttgcaaagcagttcagatcaatgtgctattttccgctcctttttcacaatatttcattttgaaccaagaaccagtccgtaatatatcttaccatttttttcttgtataaaaatacaaaatacaaaattagatgacacatcttcaacaatccattctgattgagtcgttcaatttctgttaccagaaacttattgctt

SEQ ID NO: 8247 - DNA, 656 bp, Zea mays
  Intron number 1 from transcript GRMZM2G031934_T01 (locus G RMZM2G031934) derived from phytozome v7.0 (chr-ID 2; pos 2 5390647 to 25391302 reverse strand)
cagcaactgaagtccttaaagagtaaatatatcttcccttatccatatgatactccttgtgtctcaaaatacttgaccttataggatttcaatttcaacccaaaaatacttgacatatgacatgcacctttatcttctcctaacacacatttttctttttgtgtaatatgcatctatttttctagcaaaatgcttgtttatgttacgtgctgaaatttgtgtgaaccgagccatgaagaggatccacacttctgtattcagcataaatttcttggttttgtacacaatgtctcattttctctttttctttgaaacccaactgtgaacatgctaccattaaatgcctttcagcgagttggttgccagctggttttctagctatctcgttttcatagttttgattttgttccatcatattcagtttattccttaaatagtttacgattcttagtacaatgttcataatggtatctgcttaaatttgcctcaaattagtgatacattgcatggtcgctttggctagatcttagaagtaaccatctggctaccatagtaccatcagaaaatgtgttcctgccttcctgactgtgtatttccctttagtgatactaggtactgacatgtgaaagttttacagaaagcaaccaaaagaccgt

SEQ ID NO: 8248 - DNA, 747 bp, Zea mays
  Intron number 1 from transcript GRMZM5G825226_T02 (locus G RMZM5G825226) derived from phytozome v7.0 (chr-ID 8; pos 1 72779672 to 172780418 reverse strand)
ctgcctgccgtaaccgcgccgtgcaactgtgcaaggtaactaatgcctcctgtctccgtccgaccggcgcctatgtctgtgctttttaatctttccgtgtttgattgattctacgcgccttaggtatcgtggcgtagctcgctgcgcttccgagttttgatctcggttttcgttgttctggtctagggtggggtggtggtgccatggcgagcacggtgtggagggaaggcggttgtggccagcatgtacttttctgtttcggtactctggttcgatcctgatggggttttcgtccatcgatcgcgtctcggtcctgcacgcaatgcagagggggttacggttctttctgttcttcctccccgcggtccgcgtcgggatgctggtctggtcgatgctttttttggcttaccgcggacgcgacgggatgcttcggccgttgttttcttttgatctctgtgacccttctgggaatcgattccatgccggattggtcgcaatgtgcgggaggttttttcttgtcctgttttttcctcgctggctggttggattctgccgcgaaaagttctcccccttatgcacctttcccccccccctcaagatatctttattcgtcgttttcgtggttccttatgggtgcttgggttcccttgtgtggttaaaaggccaataagctgcagtgtttttgttctcaagagttctttccttgtgacagggggacatcacagattctttggtatcttcctggaa

SEQ ID NO: 8249 - DNA, 903 bp, Zea mays
  Intron number 2 from transcript GRMZM2G126765_T01 (locus G RMZM2G126765) derived from phytozome v7.0 (chr-ID 4; pos 1 77643448 to 177644350)
tccggcttcaccagttcgccgtcgaagggagcaaggtacgagaaccacatttgacaccgtctcttttcagtctcggcaacacaaacatttggtacgtgctagcgtaacagtggcgcacaacaagagcttctgtgtcgtcgtcctgttcctgtacaagggtttgcaagagacggagagagagagtgagagagagagaacatctggagtctgcgtactggcaaagggtgtctctgaggctcacttttgcctgtcagtgtctggccatttgctgtttctgcatagtaaattttgttggcggtgacggggatcccagtaagcacgaagatagaccgggtaggttaggtattctcatctatacgactatacctagctgtaccagatcaaacttgcttggcttataaaaaaaaagatatacagcttaacggactttggcatttgtagaaagtcctgtaattaaccgacagttgtttcagtcctgtaattaacaatgctttctggttaacggactttggcatttgtagaaagtcatcgttcagtggccacacgttaaggcggtttgacattgcaagacccagtgtgaagaaaaacttatctcttgtaatgttgctacttttctactacaactctacgagtacgatggcactaggcatatcgtgtgagaaccaggggtatctcccactgataattttgtcagctcagtagacaacttcagacggttcacggttgccatgaaatgaatcctcttttaaatcgccgaccacccaaataatgtattctttgtttcctgagtgggttccctcccccctagaaagctttttatttcccttattatgatttcatgaacaatgtgtggagcttactgaaccttattatccacagagtggtccgacagtgctggatacc

SEQ ID NO: 8250 - DNA, 744 bp, Zea mays
  Intron number 1 from transcript GRMZM2G012326_T01 (locus G RMZM2G012326) derived from phytozome v7.0 (chr-ID 2; pos 2 34206867 to 234207610)
tattgatttcgggctctccatcttcttcaaaccaggtaaagcctccattttcattgttgtgttgtagtgcctagtttgacggctagtttgctgtggtggtggtcccgtggactagtagctcatttgtgcattcacagctttgagttgacactgctagttcgctttgctagtatcctagtagtgcacttgttcattggcagctttgaattgacactgctagtttgctgttgaatatgtgatactagaaaaacttgttcaatatgatcgtggaaggattttcatgccttgtagtagaataatctaatttcaggacacaaaacccttatgtcacaacaagtcaacaattgcgtgtagcaggggtacatatgcatcttatgatattgaataaatctgggagggaaccttgtgagggataagagcaaaacgagctccatccctgtatcaacttgaaaacgtgatcaagttcttgcagttggaagctacaaaggaatatacaacaaaagaaagaaaagacacacatagatcggcatcatggtcatttaatctctaccttgcaatctcctcaatggaactctctgcatgtccagtgtttgttttcttagcttatgaatcgttgtctcccagttgagttgaagtttgcattcattttctgcacaacaggagcacggttattttttatgtttgataactgaacattttctcttagtttgcttcaaaatgtgcgaatttgttctgtagagaccc

SEQ ID NO: 8251 - DNA, 583 bp, Zea mays
  Intron number 2 from transcript GRMZM2G446591_T01 (locus G RMZM2G446591) derived from phytozome v7.0 (chr-ID 2; pos 1 39907765 to 139908347 reverse strand)
ctgacatcattgccatagtgctggtttactgcgtaagacatcagtcgattatgaaccttttgctatgcatggataattttcaatttatcttgacaatattttttaggctaataacaacattattcgtttccatcccacaagaaggaatatcaatggtcttctacgaaggtagagtttaccacattatgtacacaaaaattgccactgattacagtaagcctataccagactggcttgagaattccaatgatgaggtagcagagaagtgtgatgccataacatctggtgttctgaagaagcggcaaaaaacttgctagccgtttgagtatttctaacgtgcctgaatttaaatctaaaaatgcaaatcagagacaaggctgctactatgagggataagtgagtcattcatatcttacttactcacgcagcatggtattctttgcagaaatctcatctttgcatgtatcatatgtgtatctaatttggctcgtcacatagaaattttagacatctctctgtttgtccgagcttcttaatctattatgttcattgtgccataaaggtttaggcacttggagttctt

SEQ ID NO: 8252 - DNA, 1013 bp, Zea mays
  Intron number 2 from transcript AC233953.1_FGT002 (locus A C233953.1_FG002) derived from phytozome v7.0 (chr-ID 8; po s 159531322 to 159532334)
catcaaatcctcatccagtcctgccagtcgcagaggtcagtctcacagagagcaacttccggttctgcttctccataggctgtgttcaccaaaacaggcggagctttttttgcttagaccatattcagaaactgcacccttgaagtattttcatactccattctattttgtttgtatacatgggaactccaggatactctcacatcgcccttgccactacagcctacaataaagatttgcaggtagcagtcctgcagttgctgcttgtcattgagttgtggtggcttcctagggttatggagctgccatgcctgttggctgttgccacgactggattccaaaagttgccatctcctttacgtgccattgccttccaccaaagtccacgttgtttcctccagccgcagagctgattcattgtatgaactatgaagtatcctgtttgactgctagcatgcatttgatgtttgggatttatattttattcacttggctcatgattctgttactgtggttcactgatatccaattgaagtgaggatgattagtcatctgccttttttgcttgcttaataaaaggtagaaaaatattacatatctctaatgtgcccaacttgtggggtgtaggcctgctggtgcagtggtgagagctgtcttattgagtcatcaggtcacgggtttgaagcaacctctccgcatttgtgggagaagatttgtcttgatttatcccttccttagatcccactcatgtgggagcctcctgcgggtctgctctttagtgtgcccaacttgcatgggattaatattaaagagtcactgttgtttgctcaaaattcttccaaacagcttttcaagcttgtcgctttagcttgttttctgggcttataaggtagtaaaagctggtttacaggataaactaagcttggccagaccaacactctgagctaggcatccaagtgggtacccagtgttttctaggtcagctgaggggttcacggacaagacaatcatct

SEQ ID NO: 8253 - DNA, 934 bp, Zea mays
  Intron number 4 from transcript GRMZM2G084252_T01 (locus G RMZM2G084252) derived from phytozome v7.0 (chr-ID 2; pos 1 546536 to 1547469)
tacaggattaaaatcatccagaaactttagaaaaggtactctaggcaatgctgcccccctctatttacagttggacatctgcttactgaaatgaatgtgtcacatgtccgattccaaactgggcagtggaggttggctggggccggtctgggcagctgttgagctagtcaatgcggcctggacgacggcagcaggggctagcagccagcctggatggtccaggcggtggctgcaggaggggctgccggagggcctggtggcggcggcgtttccgacggtggcacaggtgcagagaagggagtgacagctgtagacagagagggggggggggggagataaagggattaaccctaaatttgtctgccttcatttataattctccgtcatatatataaggggtttacaagatgttaatgggcttggtctcaatagaggccacagctcctattttaatctaatctataacagctgggcctctgccactccctatttgattagcccgttagtcactcagccatcgtcttctattagatgtcttaccgaccatgacaaatgtaatattttacatgtggatcctttctttgccaaattttcattttttgtgattttctccaaattaacctgattttgattaattatatgtttatgatgaagaatgaacctgatcaaacagaagacacaatttatgtctgtatgattatgaaccatggacaaatctaatggcatagatatctcctggctcttttttttggccccttgagaaattgcccaaatgttgctgatgaatggtttgagctcccagtcttttttaaaaaaatctaaagtcaaagattatttcctgaaaacctttggttatgtatttctttctatagttgcatattgacttaaatttataccagttgacacagaggttctagttaaggattctgttggc

SEQ ID NO: 8254 - DNA, 722 bp, Zea mays
  Intron number 2 from transcript GRMZM2G022032_T01 (locus G RMZM2G022032) derived from phytozome v7.0 (chr-ID 2; pos 1 93830892 to 193831613)
tgcattccatattgcggcaaagcagggccatttgggtgagctttcattccttcataattaaatagtcgagttttaggtagtgtgaattggaattcttttatatacggattcactggtttgtactggcagttctgtgatcttctgtagtactcattctgcttgcaattggtatgtttataaaacttgacttgtatcttattgacttctgcaaatctctatgaccatgaactgtttccctcatttattttccttcaggaacatggagtattaaaacagtgacactgagtccctgatttccttttgctcagatgtctgataaatttactaggctgatctggtctagattacatcctagcatttctttctttcttggttttacagacaaattgttgatttctctgagttggcaatttctatttttctacaatcttgccatgctattgtgtctaaatcaaagaactgacaatcctatatctagtgacgagatatgctccctagtacttgtctgctcagctaggaactttcaccagaccaattaggctatgaatttctgatatttgagttagtatgctgtgtttttttaatgaaaactagtcagtatgttgtgttgaagagcaaactactacacagttgttatttaatcttgttttttttcttcaaaacttgtatattctcttgtttcagagaaagagatcatattaattcagttttggtctttgcag

SEQ ID NO: 8255 - DNA, 1030 bp, Zea mays
  Intron number 1 from transcript GRMZM2G702650_T01 (locus G RMZM2G702650) derived from phytozome v7.0 (chr-ID 4; pos 1 57845529 to 157846558 reverse strand)
gaggtgttcaccaacagccaaatttgattcaggttttctcactgtcttttgtaagatgacagtcgaatcgaatttgatcgaatatgtacgtcagttttagtttgatttaggtttcccttttgaacatatcaattcctctgaatcgaatttcagtctccaatctagaagatttcatgtgtttttaatgtgattttacagtcgatgctgcagtttggtttggtgattgatgtgtattgtttctgcagtgtaggaatcagtggaagggtgtggtggaggatgcacggagggatgggagcaacgggcactggcctctaagatggaggtgagcattggaggcatgtgtatttccttgcatatgcatcgaaatattttggtccttgaatttcattagattagaatacttgttgctctttgatcatctgatgctcagaagcaagttccttatagattgttcctcttcgcttgtttatatgcctccagttttgttgtggtggagtgtgattccgatcccataatgctgtagaaaaagaatatgttaccatgatttctgcatgtcctgtttttttatgagccattgtcacttcgaaaatggaagctgcttttatggtcatttcattacatgtttatttttatgatattatgacacattgctgtttttcaagtaaacctaatttgttttaaattgttcacgagactattcttcctgttgtatccatatcttgagttcttgacatacatgtaatgttagctaagagtgctacttgtgcggttgtgcctttcattctttatgcttatttttgttgtgcatgagtagcaattttaagactgatatattgttttatatttctaggacaagactctggtaaggaaaagattgatatcaagcaacaacactcgtgtcaaggcagagtctggcacctgttaacgatgatgagtttagtgcaacctcagatcatgctttgtatctgtaactggtagaaacaaagttgttgcaacatcatccattgttgatgatttgtcagaggttgac

SEQ ID NO: 8256 - DNA, 824 bp, Zea mays
  Intron number 2 from transcript AC204839.2_FGT015 (locus A C204839.2_FG015) derived from phytozome v7.0 (chr-ID 2; po s 210365084 to 210365907)
ctggttatactctcaggtaccttatactagagatgacaataagttcaatgatgccatttatgaagacttatgtgtggtcatgctaacatgacatttgagaattacgaagagttatttggtacctctcacattcgaactgaggaactctttgatgacaccggaattgatagttacttttaaatgaaggaaacattgctttttgctcaatcaacaaataagattggacattgttttaccatcctagagcggagctggtctctgttgctgctgtgatgagtagcagaagccacttcttgttgttcctcatgataagtcgaagcacttctactcttaagttttgggcctcctctaatcttgctcaaattattcttctgtattttttcactgcgattcatgatttcattcacttgtcgagtttgcttttactaccaatgaaagagcggatgtgaggctttatcatggtgatacaggtctgcaatctatggcatactaggttggagaaaattcccctatgtgttgtatgcaaaccgtgtatttgccagataagcctttagctcacataagaaagatatataactttctatttgacaggaatgactcagtaattgggagtcaactggaattaaaataataccagccttagctaaatgacagttggaaaggtgaatgaggatatgtttaggtaatacaagaaatactccaccattgtgttatctttattgcatgtttgttgctacacacccaagacatccttttaatgatattaaatttgtgacatgcattcttcagaagcaagaacacaataaatccatcttctacaggag

SEQ ID NO: 8257 - DNA, 727 bp, Zea mays
  Intron number 1 from transcript GRMZM2G094955_T01 (locus G RMZM2G094955) derived from phytozome v7.0 (chr-ID 2; pos 2 22706278 to 222707004)
gccttcgccttcggcctcctcggtaaactctctacattccttcctgtcgtcgttccttttttgtttttgctaatttggtgaccaatgatcatggagatccataaggaagaaatcttcttgttatttaattttgaatagtatgtgattctttccatggatctcctcgtcactaccggaattttgctctttgccaagtaccaaatactttgcagagcgccacgcaaaaaaccttcggtaaaagaaaatactcggcgaagaggttttttgccgagtgtcttagacactcggcaaagaacgcgattctagtagtgcgtgaccccctccctactactgagctaaatactataggtcgtaggtgtaggatttaggaacatgtgttctttccggaacatggttgcttttgttgcagcatcttaatcctttcgtacgtatttaacttatccccacccatatcccaatatattgtagagatagctactactactacaaattaagagagaaaaagagaacgatgaaacgattaaacaagctaatgtggcgtgacatcacagagcaccgttattacgtacagtattttatatatatcgaaattaattgaagccaggatagttgcaacgtacgacgtgcttgcatgttatcacaattcacaaagcatatcgatcacagtctgacgtctcctcgtatacggctggtgctgtttgtggttgcaggcaacatcatctccttc

SEQ ID NO: 8258 - DNA, 710 bp, Zea mays
  Intron number 1 from transcript GRMZM2G391741_T01 (locus G RMZM2G391741) derived from phytozome v7.0 (chr-ID 2; pos 4 052593 to 4053302 reverse strand)
actggccaggtcgcccttcccgtggccgctgcaatgtaagcgaacacagttttttgtttggttcacgccggtagtgaaactcgaatagccatggagctacggaagccgtgattcgatttcgttcgccgctttccgggagcacgctgtgatgtgtgtttctttttctttttcttttcctttttgccctatagcctacccatgtaagctgcctgtatttacagtatgcgcggttgagaggattttccttggtgctagggtaaatcacccattaattatatagttcacaaacagtagcaagtgttagtacttcgtatttgattggatgactcagtctgaaatggaaaagggcgatcttttaaatttgcaagacgaaaagttgctagaatgcatgacaaggtcgtgccggcaagcgcgtgatggcttattttttaatcctttcagcagttggtgatagtagtactttttaaaaaaaaaatactgtaataattacagttggtgatagcagactagcagttgattcatccacagtcacagacaatcgctgctccaacgagttgtgcgttcttctacaaacaaaacttctctcatcctctttggttgctgcatggaaattgtttgctggttactgccttactggcactgctgaaaattctgagattgctggttcttgcatgcaatttcgctttggccggcagaagcaaggagcagca

SEQ ID NO: 8259 - DNA, 532 bp, Zea mays
  Intron number 1 from transcript GRMZM5G852193_T01 (locus G RMZM5G852193) derived from phytozome v7.0 (chr-ID 9; pos 1 52104186 to 152104717 reverse strand)
aacaactaccctcgcaaagatactctttacgtgtggtaagttattgaaatcttgaatatcatcaaaataacacgaaactatataaaacacaaactgtagcttaagtttgtattcatatataaatgtgacaagtgaactatatacttacggaggaaagggacgaatgtctggaactgtcctattttggtttattctaccggatcctgccattgatcttgtaggaccaatcatgacattattgcaaagaaaacatcattaaaaggattaaatgacaaagtccctctgtcaaacaaatagatttcttttacatcataatgaaattacaagaaactatctggtagaaagtgtagactctatctacgtctttgttgttttagaaacccagcatcaaattgaagatttttcatataacaaaatttaaagttaaatcataaaatgtaacataatatgtctcatatgtttatgtacatactgtgacagttgctggtgaataataggacagcaagcgccagtgaaatagtaagtacacatt

SEQ ID NO: 8260 - DNA, 1020 bp, Zea mays
  Intron number 2 from transcript GRMZM2G175419_T01 (locus G RMZM2G175419) derived from phytozome v7.0 (chr-ID 8; pos 1 32518701 to 132519720 reverse strand)
ggaggtaagcatcacattatatgcacatagaactattctgaaactcagagtgtgctggcgtgctgctttttgttatgtggtcggacaccagttatgctctactacctccgtttttatatatttgacgccatacaattccacttttacatgccgacgtcaaataaaaatgaacggagggagtagtatatatcatgagcacgtgatgttaactctgcatggttaaattttgtggtacacaactacacatcaatccagatataaaatacaatagcaagctaggggctttcctatcgtgttcaaaaaaaactcgacctgtgggggtaagaccgtctgtacaatattatattaagaagaccttctcacacaggtcaagaagaccttccacgcaggtcgagaaaacctctaaactcctgccccaccacccccacccatacacaatggcaccgtagcccaagtgagaacgaccgggccaggcctgtgctttggcttgggacaggcgaggggatgttttaacttttaaccacagcctgaaaattcgctcccacggggagtcaaacctagaacctgacaagtgctactcagaccacctaaccaactcgcctgttcataataggtagtttatgaaggtgttgggttttgtgatgcttgacatcattttgaggtttttgtggatggggtcatacaagtcttctgattttattggtgtatgttctgttacatcactaagcacaaaataaatgtttgacctgggcctatttgacttgaatgatcttgttgaaggtttttcggttttttacacaaccatggaggtgtggtggaagggtgcccttgatggaattggtggccatagttccaatgtttgtggaggactttggtgaagggcgcccttggtgtaatcttattgactgttgtagatgatgaagttgcaagttaatgtatttgagtacttcgactcacgtcagcttattgtttgtggcaaccatttccgcagaattcgagaagtggagttgaagcgtgact

SEQ ID NO: 8261 - DNA, 994 bp, Zea mays; identical to SEQ ID NO: 4717
  Intron number 3 from transcript GRMZM5G890561_T03 (locus G RMZM5G890561) derived from phytozome v7.0 (chr-ID 2; pos 1 76469258 to 176470251 reverse strand)

SEQ ID NO: 8262 - DNA, 561 bp, Zea mays
  Intron number 1 from transcript GRMZM2G460135_T01 (locus G RMZM2G460135) derived from phytozome v7.0 (chr-ID 2; pos 1 50751454 to 150752014)
tttctctaaaggatttccttaaatctttggctaagattttgagtgttacagaaaccctagcttcaacaattcctcattcttctgcagactctaggggtgtgtttggttgcgggatagcaggtagatcccatgtcccctgacgtgccctctagtccctccaattttgagggacgactgctcaggggtgggccccactagattcaatggtattcaactgaatacctattatttttggcaaaaaaatcaatagatactaatatacatgtatatgatatgtgtacataggaaatagaaaacgaatcaggatttatgctcatttgggctgaaacgtcccttttctagcctccacccaagccaacttaataggtttagtgtggcccattctcaattagcacatattttcatctaccaagtgacctagtcccaaattcccaattcccaaaccccacacagatagcaggcagcaccagccggccgccgctcgcctaccactacggtagccactgctgtagtgctgctcctacagtcctgttcggcgcgacgccgcgaaggcgccacagt

SEQ ID NO: 8263 - DNA, 709 bp, Zea mays
  Intron number 2 from transcript GRMZM2G107556_T01 (locus G RMZM2G107556) derived from phytozome v7.0 (chr-ID 8; pos 1 8255818 to 18256526)
cattcatcaccgaagagatagctccaggtaccaaggtcagttgaccgtgttctgcttctacctcaattgtttttgtagacaattttagtcaaatttgatagttttcaagtgtaaactgtacatactttcctccctctgccactgcctgccatctgggtattgactattgttcatgacttcttgttcagttctgagtattaatgccatcagtgccagagaccagagagtagcttaacaacatttgattaaattctgagcatgttagaaatgaataagtaaacaagaatactcaggtagctctttgtgcgacagtatactatccttcagaatgaaaacaaactttgaaaaagataaagtaggcacactaatatttcaacttaatgatgtaaacaacttatttttgatgatgtggcattaacatggggttgggagatagcattcaattgttcccattggttacctgccactttgcaccatggtctgtctaaattttcttatgctttttctaaacctcaataggaaggcctaaaatttggctaaaaatgatacattattgttctctgtgatcatttgaagactggtatttacacttcctcaaatatacagtcgttgcccgcctgcagttcattaaatactagcattgacatgcatttttttacttttcttgcccctttatagattcgcctcgagaatagggttccaatcaata

SEQ ID NO: 8264 - DNA, 542 bp, Zea mays
  Intron number 2 from transcript GRMZM2G341405_T05 (locus G RMZM2G341405) derived from phytozome v7.0 (chr-ID 2; pos 1 82512698 to 182513239)
gacacctgtgcacacagtatggcttcgtatactttgtttacatatcttttccccattgtaatgttactcatctcccttttatgtgtatactttttagagagaaaattaccttgtagtctcattgtttcagtttatggtccaatttacaatggcttcactgtaaatgggaaaacaactcggtaggaatgcttttttgaattataaattatttctatttcatacgatgcttataggtatgtgatgagtcctccaatctgagaagtagagcatggtaaagcactccaagctgctctttcatcgggaaatttataggtgacacttgtgtcatacattgaactatggagtcaaacaaattacatattatccttcaacatttttcaccagtgggaactgtagttattgcgtagaatagatggtatattaatcgttgagagccaatgtttacattaactgttatgcagaagacaatttatgttttattttatatctaactgtactttgttgcagcttgtaggtactgatcacagcacattcaactccac

SEQ ID NO: 8265 - DNA, 741 bp, Zea mays
  Intron number 3 from transcript GRMZM2G083984_T01 (locus G RMZM2G083984) derived from phytozome v7.0 (chr-ID 2; pos 1 61754998 to 161755738)
ttcgcgagtatccaattccaaggaattcaagtgccgtatgtatttacgatacacgtggctggtcaaacgacctagagaaaaatttcaaaatgctgcatcagtggatgacaaaaggaataagccatggggagacaacaatgtggtaaggggtgacttactaactctttgttttctgtcgtgaaactagaaaaacattgtacactgcgtgaccctatacaaactgtttattattttttgagagagtaattctcaaatttctgtcaatagattcgagtaatcaaccttttgccattcagtatgttcatttctaatctcagttgtcaccagctgtatacagattgcagaatgaggctgattcttaggactaactttagattgtgactggatttgttgtctctcgtcagatatgattgatttccagcatcaataggacaggtgtcctgaattacttacctaccttctgtatgctttataagcatttaaggccttaatgaggaccaccatgaaaattctcccattctctttcataggacacaacatttttagccaggatatggatatgttttgaattttatgacaattccagtcatcattgcatgtcattcagagtatcgttatacttgaattccgattttctgtttcaattccacaaacttctttattgttctttttttcatccttttatgtactaatggtgttcttcatttctacagctccaaaacataaaatctgaaatagctg

SEQ ID NO: 8266 - DNA, 477 bp, Zea mays
  Intron number 2 from transcript AC215249.3_FGT007 (locus A C215249.3_FG007) derived from phytozome v7.0 (chr-ID 8; po s 155821386 to 155821862 reverse strand)
cgtaagtgctctgttcggctgttcctactttcgcatatggagttatagactaatcaacagatttctgtggttgtagtgacgacactcctccaaaattagatattcaatttgatctgagcaatgaacccacttttctagctactatgttctggcagttgctatcaatgttccatgttgcaaacaactaatgtcccagtgatctcttcccactttttcataatccttggcaacatcaccattcaccaggattatgtttataggaaattcttgttaattaatggtttataggaaattcttgttaattatagcagaagcatatattataggaaattcttgttaattaatgtttttattccatttgaagtagagtatgatattttgtcctcagcggatggcttttgttaagctgtccttttccttcacttgggtttccatgtagtactcagatttttaccgttgtgccttttatcttcagat

SEQ ID NO: 8267 - DNA, 644 bp, Zea mays
  Intron number 1 from transcript GRMZM2G060284_T01 (locus G RMZM2G060284) derived from phytozome v7.0 (chr-ID 8; pos 1 22147367 to 122148010)
gccaagaagaacgcccggaagagcctacgctccaggcaagtacccacaatcctctccaccctgctggtcccttccccgtgattcggctataaattctagaatctccaggagcgaactggtggggaatttttgaaatcctgtctttgcttaattggctactacactgaaggcgtatgctcgaaaaaattgtgtacctgttgtcctgtttgagttacttcaagggttggtgagaaatatgcatatggatgggggtgggagccctaaattttgtttctagatgcaggactggttttgactatactggattggctgtatatttggcacgaaacagattggtagactcactggaccgcaggaagaacaagaggaataattcactgttatcgtggataaactaaatttgtattcaacgaaagcaagtgttcatattccagttgattgcatagttgctgtggtctagatacgctacatgtcacacatcgatcttgttgaaagtgtgattgcaaattgttaggtgactaattttaagaccagatgacataatcgaattccttggtattaatgctgctcactatctgtttgtttcatgtatatgttttggcacctaccattcttacatcatgctattgcaatgacagttcaag

SEQ ID NO: 8268 - DNA, 671 bp, Zea mays
  Intron number 1 from transcript GRMZM2G054987_T01 (locus G RMZM2G054987) derived from phytozome v7.0 (chr-ID 2; pos 1 32321733 to 132322403 reverse strand)
cattgttgaagttgcaaagatgtatgtctaagtttattttcacataatagtatattttttctattatcaagaattgtttctcaatacattcatgagttggaaattgtactgtgagcctttctatattatctagtctagctagctctacaatagagctctagtacagacagaacacgtgctttcatactcctgtggaatagtagaatcaggtagcagaattaggtgttcattaaccatgcaaataattaattcaagttatctaaataggcccttagtttatactgctgaaagtataaaaagtgttccactctcaataccgagaataggaagactccaccatgtatatgtgttcttatcaggtgctcttctttcccgataaaataaaaatcctttgcttcaatctgctacatgatactttgtgtatagataaaggaatacatccatatgatgttcctgggagttagtttgatgtccatatactccatgcttgctgattggaaaggaaactagttatttcgtttgaagtcatatgctgcttggcgtcattctaatccaagtagctgaggggtcaacagtgactaacttccctgtcactttattccaaagagcaaaagggaatcccaccctagctgtgatattttccctggattatggttgtccaggaatcctac

SEQ ID NO: 8269 - DNA, 526 bp, Zea mays
  Intron number 2 from transcript GRMZM2G424707_T06 (locus G RMZM2G424707) derived from phytozome v7.0 (chr-ID 8; pos 1 9114271 to 19114796)
aaactagagactggccgtctgagtggtgctagacggtatgtcattgaaatgtgaatattgctgttcattctcatatttcatcagcaatacttcctttattactttcgttcactccgtatttaactgttgatcatttgatcacagctttagtgaaccttaggtcatttttggcaagttgaacgattcttgcataggcatcactggtatatagtagcatcacttattctatatgatggtacctgtggataggatgcacattagttatgtgcctgggttttttgttttcttttctcaagcggaaaatctcttcctggagctgtaaacattgcactatttttattttgtcatgcatagatagttacttaatctctgtttgtttagttctgtgtgtgggctctcatgtcctaaacaaaacatttattcttttatattgtagtcctaattctttgtatacatttaggtgtgttggtagatacttgtatgttagttatttagttattgtagcccttcattgccttcattgggt

SEQ ID NO: 8270 - DNA, 380 bp, Zea mays
  Intron number 2 from transcript GRMZM2G028535_T01 (locus G RMZM2G028535) derived from phytozome v7.0 (chr-ID 8; pos 1 68172772 to 168173151 reverse strand)
gggaggctcggttctctctgtgaacaggtacaatacgtataatagaggaaatttcaaaagaaaaatgtaaacagaaacatctttgtgacaacataaaaatgtggcccacatgtcaggctcatagcgtgcctcattgttgcatgaggctatcacgtggggcctcattgccttgttgttacaagggctagcttcagatttttcaaactatgtatatcaaagtagctgtagtcttttttttttgtacaaatgccaaaacagttagtttttaaaattatcttcatggtatgctttcacccatggttttttttgggtttcagtatatgtcattaagtagccaacttgctttcatatgcaggtgaagcaactgaattttcaagggt

SEQ ID NO: 8271 - DNA, 486 bp, Zea mays
  Intron number 2 from transcript GRMZM2G386643_T02 (locus G RMZM2G386643) derived from phytozome v7.0 (chr-ID 2; pos 8 47253 to 847738 reverse strand)
ttcttctggcctttcgagtgacttcttttctttaggtgagggagctcttccttgcttggagccttggactgtctgagttttgctttgctatcatctgtcagccctcagctgcaagcatttgaatctgggattgataaccgcccagatttttgcttggatattttttgctgcttgggatagcactagtaccaacggtgaaaaatggcagtatttaattgacactgttctggggatttaatcttgttcgacttggactattactagttttggggcatgattggaaaaaaatggctgtatatacctctttgatatgattatgtgttcatttagcacatcctgttacctgtttattgtcatatgtattattaggctttggcattccttttttcttttgtttgatgcaagtttcctatgtccaggcaattttaacaatttaatattttcatgtgcaatgcagtattgtgagatacaacatcagctgatcca

SEQ ID NO: 8272 - DNA, 483 bp, Zea mays
  Intron number 2 from transcript GRMZM5G840225_T01 (locus G RMZM5G840225) derived from phytozome v7.0 (chr-ID 2; pos 1 67332853 to 167333335 reverse strand)
ctgtaactgatcaggtatgatctgtgacgaccatggtcttctaaatacagtttcttcatttttttcctgtcaaatgcaatggttaatgccctgtttggatgatttgaacacttctgtttgctgccctttgctacattcataaacccatacccatgccacaaagatattagcgtgccctgtattgatgcaagtaattttaaccgaagctttgcctgggatcattgatgtcaccaatgctgatttgctgtgagctagtagccatcattgtgtgaaccttttcgctgtagctttatccctttacactactgcaactacttattctacttattgaccactattttttgaattatgcatgtttaagatggctgttgacattatggaaacaaattttcttctctttgcctcttgacacaaccaatggaactctgtgttttgctgagactatctactcgttctaatttcaggaggagggagcatctgaag

SEQ ID NO: 8273 - DNA, 1010 bp, Zea mays
  Intron number 3 from transcript GRMZM2G115630_T01 (locus G RMZM2G115630) derived from phytozome v7.0 (chr-ID 2; pos 2 31464320 to 231465329 reverse strand)
aaggtatcaagagctcgtaccacagatcgtttgaactgtaactgatcaatattttacaaattttgatatcatctgtaccaaagctgtgcaactttagagttcacaagttatagaatcgagagacatgtcagtctcaactatacatttcagaattcgtatttgtttttaatcttcttactatcttggagacttggacgatacatcctttagcataatatattgttgagctcaatgagacctaagctaccgtggttgaaacaatttccatttggaatcatatcatttcaggtctaaaatattcactgcaaaattatgtaatgtagtaaaaaagatatagtagcatgccatatacataattattgtctgtgctgacggtccttgagatttaaccttcaaagacacttttttggagtttgtggaaatcattaattatggtgggcctcttaacacgcccgcgtcaatgaatagcaataatacacagagtataagaaggctaaatactaagttggaggagacaaaaaatgagggaggagaagactatcatgatctacgcgaacaaaaaaccttatgaaagagacaagtagaccataaattactaatgaagagctaactattatacaagtgaggtaagaggttggttgcaacaaccacagtagctatcacttggctatatcattagccttgctcttagttgattagctgaggttgtggcctcagttaatagattaacacaggtgagtagccgacctgagactgcaaatggtttttgaccatgtctaaaaattctttatctagtggatgaaattatttctcatttctcgttataagaacttctaaaactgactgaataataactatatataattttactgcctataggaagttgtatgtcgatcttatgtttctcattgtattgaggtatcacatgttttttatcgaggtatcacatattttttatctaggtatcacatgttttcagggttctggaagagcattttgtgctggaggtg

SEQ ID NO: 8274 - DNA, 1042 bp, Zea mays
  Intron number 2 from transcript GRMZM2G158652_T01 (locus G RMZM2G158652) derived from phytozome v7.0 (chr-ID 8; pos 1 45205538 to 145206579 reverse strand)
attggctgtcagattgtgtatttgttgcctacgtggtagagcgcaagtcatgcccaacatgacttgctgaaaaaatcaaacaaaagcagcaacctttcaatagtaggagttaattagtgcaccttctcattagatctcaagtttaggtttgaatggagtgcatttctatagagaaccattaggagggagggtgcacggtgcaaggaatgcagctcgtcaccgaggtgctcgctttcgtcgtcgcgcagtccatcaaggtactcaccaccaggtacaccctttccccctttctacctatgttatatatatacagtatgcgagagtggagtggagcagctgtaatatttccacttttgcattagatatgtcatttctatttttctgtaataaagcatgttaggagtaaagaaaaatgatatatgagcaattgacaaaggttaacaatctgcatatcttatggagttggacaacttgtttataaactagaataaataactcctccatgttgggcagcagctgcaatatttccacttttgcattagtgtggtgagcaaattgttacaccttaggcttgttttggcaaagaatcgtggcaatgactagaaacaacgtcgtcttcaggggtgcaccctcctccctgcacattctccgccaacgatgcaaagaagaagcacgcttatggagccccgggatgaaactttgtgggcttgatggcagaagttggtgccctgtattttgaccatttgtatccctagcgctcagtgttctgaatcatgtatccgacttctgtaactttcactcctggtttctaatataattcaagtggggacagatccccccagtctgtttttttaaaagaaaggtaaccaaacatggcacacccaatttaatttgtttgccatactatgtacatatttttttacaatctataagtcactatgttgtaattataagaattagtttcatgcaattctacttatttggtgactgaattaattctggaacaggcaattgcacaagtaagaacagtgtactcctttgt

SEQ ID NO: 8275 - DNA, 611 bp, Zea mays
  Intron number 1 from transcript GRMZM2G365282_T01 (locus G RMZM2G365282) derived from phytozome v7.0 (chr-ID 2; pos 2 04007940 to 204008550)
cccacacgtaagttcatctctaatactgcttggttgactttttttagaacaatctttcatcttcctttccacttaactatcagattagaattaagaaacagaggggcatacagaaaacaggactgccagcatcagaaagacagatcacaaatttgcagaaaggtttagattggaacttgggtaaatcataaatatactaatactgatacatgtaaaacaatcaaccaaaacaattatggagaaaataaaatgtcacttctttagttataatttacccattaagtaccaaaattctctgctattagtatttttcaaattaaataatactaagcatttgagtatagaattgaaattggtcataaatcatatacatggacatgcagcaagcaagttttggatctgggtcatgcttggatcgttctctgtcgtggtttcaatttcatggttgcttgttcatatttggatcaaaacagagagaaaaagaggtaacattaatcttacatcatgtaacccttgcatctggtttgattcttatggtaaaaaatgagtgccaagaaaaaccctcgatattgttttcagaacgagcaagatacgaactacagttgctgtca

SEQ ID NO: 8276 - DNA, 871 bp, Zea mays
  Intron number 1 from transcript GRMZM5G874575_T01 (locus G RMZM5G874575) derived from phytozome v7.0 (chr-ID 9; pos 2 5066344 to 25067214 reverse strand)
ttgtcttgctagaacactgcctgtgctaaaagggtgagaacagaaacgtgttcagaacttggtgctggaaggttactctaaatacctacgtgttggagaaagaaaggaaaaggatcgctgcctgatccaaatagctcatactctgaatatcgacaccgaagaagtttgcaccgagtagggactttttatagagataaattgagttagatcataatgatgtagattgattaggcttctatggtttttatgcccctattgataaaaaaaaccaattcttgatttttaaatgttaagcaataaggttaaagatcagctaattctaagtatcaagaagttattggacctatagattagcgtcatgatctttattttttctttggtagggtggcatgaatgatcggcttcactagataaggccatgtttatttcatttttgttcagtttctggccaccaaaaactactgcagatcgctaaacacctaactttttatctcgcttctatgagaatcgttttagtttaaactgtccaaaatcaacgtgaatatagaatcaacaaagtcattgcaatagtaggaaactgtcattttctacgtactaaaccctatggattcttttatcttcctctacatgtaatttacacgatactcagattcttcctacccaaattctcagaaaagttcctcagaaaaaaactaaatcaaacagggcctaagtttagtgatgcatttgaatctaagatgctaaacttttagatgtaaggtacaaagatacttctaggtacaatggataaagtagcttattgataggtttaaatcccatcgcacaagtttagatacatgctaacgcattccaccaaacaggcacataccaa

SEQ ID NO: 8277 - DNA, 534 bp, Zea mays; identical to SEQ ID NO: 6070
  Intron number 3 from transcript GRMZM5G875502_T02 (locus G RMZM5G875502) derived from phytozome v7.0 (chr-ID 9; pos 1 35257072 to 135257605)

SEQ ID NO: 8278 - DNA, 915 bp, Zea mays
  Intron number 1 from transcript GRMZM2G128771_T01 (locus G RMZM2G128771) derived from phytozome v7.0 (chr-ID 2; pos 2 12301908 to 212302822)
tacgacaagttcgacaccacctaccaggtaaccgagaccgcgaatcgtatccatatccaccgtctcgtccgtgcgcgcggcgatcgatttaccgatcgttgtgtctacaattgcatcgattgtgtcctttctctatcgaatgttggtcaatcatcagatgtcgttagtgcacgtgtgttcttcatttgatctcgcattgccgcctctattgctttgtgcaatgttaaggatctggagtgaccatatgaggaatagtgggtgcatgtatatatcatgatcgcctatggtaattggtaccgtggggaattagcctccagtttgcttgcgtccgattccaatcacattgtctcaacatgcatgtagaagacaatttggtcgcgtaggagtagggtgactccaaactctactagtggctgtggtctgtgtcgatcaacttcaaagaaaatattaccggactgaacaatcaaagcgcatgtgcagcgaacgggacaccgcacgggaagaatttcgggactggattaaaaaattaacctcactgcaaaccaaagctgggcctgcattgtcagggttagagcagtttcttgatcgagtgaaggctgttttccccctcttattaatgaaatgtggggtgatcttcccaaacccaccgagcaccgagtatcttctttttttaaaagctcttgttgcagatagttggtatggttttctggtgaatgcagtcctagaaatgtctgcaaatttgattagttcctgaatttcagataatccattttgtggaaagtggaatttcccgcatgcatgtcatatattatgcttgacagaatgtagtatgttagtaatttgcttcttacgccttttgtcacatgtgtacttggtccaggcaacgattggcattgactttctgtcaaaaacaat

SEQ ID NO: 8279 - DNA, 1057 bp, Zea mays
  Intron number 1 from transcript GRMZM2G102163_T01 (locus G RMZM2G102163) derived from phytozome v7.0 (chr-ID 4; pos 1 71665543 to 171666599)
cctgctcgtccgcgcggaggcctccgctctccacggtaccgacacttccctctactgtcctgtcctgtcccgttcccgctcgctcctccactgagtcctgtccgtgtccactccccccttgcattccgcggggtcgctctgtttggaggagtgggcgaccgggggccccgcgtctcgtgccgcattccaccggaaaacctccgaccttgcctggagcgctgctgttccggctcctgctggcccgagcgcgcgtgcgttgctggagcttggcatttctgctgctcggcgcggaattcgtttttttgtgcgtgtgtgtgggggaattttttaagactgcagtgtggccgcatggttttcgcgttgcggaaaggatctagcgacgcgtgaggcctacgatactgtcggtggggtgggttcggtacccacttcgtccccatccccgcgcgcgcgtgtgcggccactggcgagtggcgtagtgtgcctgccttttggaatgggggttctgcttagactggcacatgccttcctctcagttggacctcgttgcaactcgttctagtaagggctcaggatacatgggattgattgttggatgcaaaagttgcaatgtacgagtgctgtgctttggttttgtttgtgcatggaggctgttgcttctttaccatgcgtgcctttttttttctagcttggcatcagttggaacttgggtgtgactcttgcaaagacccattgcacgagtattgaatttgcattaaagtaactcatgcaaagctacatcatttttggatgcagtataaagtttatttgggaactcaagcttttgaagaaaaaaaagaggttttatctttctatatcaatcatgtaggtttgcctattgccggtggatgttggccatttagctctgtatggtgttactgttgcactgcatgcaatgtttatatatatattatatgattgctacataattttcctccaccaggtttgattaattttatctagtgcaatccctctttattctgcaggaactatattgcctaacccagcaccgagtccatct

SEQ ID NO: 8280 - DNA, 523 bp, Zea mays
  Intron number 2 from transcript GRMZM2G060045_T01 (locus G RMZM2G060045) derived from phytozome v7.0 (chr-ID 8; pos 1 34741585 to 134742107 reverse strand)
cttggtattaacatcggtaggttctaccattttttcctctgtgagcgatgtacttgtttcagagatctctactcttcgttgcttttcgctcttgcatacacacaagtggtcccagtgttactagtgccctactgctgctatcatataaaggaaccatgagtaactagtatatctgtatttactcattgtaatttctcaacgaggcaagcagtttaataatcacatgcttatgtagaaagttagcaaaaacattttttagtgaaaaaacataaaacaaacagtacagatataatgtagttctatatgttcaccagctgaagtttgaatgtatgcagtcctttaataaaatgatactattgtggctagaaactttggttttttttaaattatggtcatcaaactaccttggggggtttaaacagcatttgaagctttaatatactaatgatctagatgcattattctcaccgacctgtgcgtttctgcaggtgctgcgtacagccgtagggcatagattagcaag

SEQ ID NO: 8281 - DNA, 751 bp, Zea mays
  Intron number 1 from transcript GRMZM2G149496_T01 (locus G RMZM2G149496) derived from phytozome v7.0 (chr-ID 9; pos 1 1429922 to 11430672 reverse strand)
aacggcaaagaagcacaagcccttccccttccaaggtatccggtgattgcgtctaaaaaaattcccgtctaaaaaaagaatttccattcaaatctcatctcaaatgtagaattctacttccggtgtttttttgtctttacctttaatatatacatgtactcaaagttcagaatagagaacatgccatatcgccagtcaaataaagcatctttttaagatagaaggtcgctaaaaatctgattgaaaccttcctaatcgttcatcagttggggaatcattttatttgaggcgtacgcgcatcataatctataggttttgcttgctatctagatgtttcctccccaccgtatttacaacctgcaaggatgcgaaagtccctattcacgccggactaattccgagtcttccgaacaagaaaacaacatcatgatgagcagcaggtgtccacggccgtggtggcccgcgcgagaggaaaggtagtgttagctctagcagtgttctctacctgagagaccgatttgctagatgttttagacttcggattcaattcaatccggtggttacatggatattatcctgaattgcgctatgggtttttcaacctatttagttcttcaaggtttagattgagcagcctctgaagtttgtttttccttgaacagatgatccatgcttgggagtagcaattcacaattatttcatctcatgtgcagaagaagtctcgctagagaagggaagcagtaactcgaag

SEQ ID NO: 8282 - DNA, 904 bp, Zea mays
  Intron number 2 from transcript AC212565.3_FGT003 (locus A C212565.3_FG003) derived from phytozome v7.0 (chr-ID 8; po s 16213172 to 16214075 reverse strand)
aatagtttacgtgggtattgttgtaagccgtcgcaacgcacgggcaaccgactagtattatttaaatactagtcctagaaggtcagtatacacatttatacattaaatagtttttgatctgcttaaatgagacaaccctatacagatgccgatcaactttaaaagttagtctacaactcgggacatatcatcaggttggagctgaagcagcccaatagtacaacagccataggcatggttgggaacaaacgtatctcttacccgattagtgatctccttccttgaaaaacaatcaagcaagagtgagtacgtacatacccagcagcccaccttcacccatagaatagagaaatcatatataatgtattgagtatgttgagctcagtgtattttgcagaaaaagcaatttttgatgcagttctattttataaaatattttatcattttcaaagtgcatcctctcccaagggagcaggaagtttttgaaaatacaaccaagtcctctggactaaaccatccaggaaccttgatagtttcccaccagttttattttcaactagtatggtgcctgtgcattacaacggaacacaaactattcattaaatgcttattatatgagcatatctatgttcttgaagcggcatggtagactggttacctcatttaaacatgatctacctatgtgaggtaactgttgggaacaggcttattaatctctgcaacaccaactatctagtgtggtgcccactcagattacgacccggtagactgattacctcatttaaataaactattcgttaaatgtttattacctgcgcatatctagacttgtagtcttcgaaaaacatttgatggtatcctccatacagcccccgaaccccaagctgattaagataatcaggtt

SEQ ID NO: 8283 - DNA, 667 bp, Zea mays
  Intron number 4 from transcript AC233855.1_FGT003 (locus A C233855.1_FG003) derived from phytozome v7.0 (chr-ID 9; po s 103530493 to 103531159)
attcttatcggttgcataagaataactcatttgaggtgcatagaagacttggcagtgaaaaactttccacacatttgtcaggtgttggttgagatgatgttttatttagaagtagttagatttattatgtttcataatcattttttatataaatatctactaaaattctgttataatgactgttattgcaactatctactaaatcaatgtttacattgtgtagatgaatgtccacaggtgtttgtaagcgacagaagcatcaaaaatctgactgtacattgtgataacactttaggtaattacatttatctgttatgttatttaactatatcgtgttgtaacactctagataacgtgcaccattagttggttgagctctcatcattcaacctatatgtacacctaagacctttgctattttcaactttaaagtcgcattgggtcagacgagtcatcaacatgattccaatcaaagttcagaagttttagatccaagggaacgtaagagaatacgagaaagaacttgatttgcatctcaaacaaaagaacaaagggcattgcgtaatagggaatcatgtaataagatggcaaggaaaaactataaaagaagacaacgggaaattaaactccaggacttaatcggcattgaggacccgaagtttacccc

SEQ ID NO: 8284 - DNA, 945 bp, Zea mays
  Intron number 2 from transcript GRMZM2G041356_T01 (locus G RMZM2G041356) derived from phytozome v7.0 (chr-ID 2; pos 4 2422613 to 42423557 reverse strand)
tcgtgcttggctacgacaccattggaggatacgtggtaagctccagcatcacactgctcccgttcttactgacacagccgttattggttttatgtttttgcttatctctgcaacagttttacgaactactgttgtctgcataacgtcgtagtgagccttggacatgcattcattcctcatttccatcttccggatttgcgccatcctttttcagttttgcaaatagtgtatatgcaaggagaagatatatatttatttaattacttggccgtccagtatccggcaaaaaagccacgctgctgctaaccagtcaatcattcataaggccatggctatcagaaagaaacacagccacacggacctatgccgtcgctgtcagtttgagctcagttttctacacggggaggtcccagccagagaaaacaacccccacacacacacaaattttttttttttttttgagatgtgttcgccacgtctcaaccttgtaaagcacagcgggatagaatagaaaagaaaaaggaactctgagaaacgattaggccattagctggatgcagtttcatttctttatgctgggcgccggcagtggccatgttacgcgagagatagcaactagcaagtattatatgaactgtgggaagcagacagcctccaccacgtgatctcctgatctctgcccaagactaattaactaactctagagccaacagggtaaaagttcaaatgcaatctctctctctctctctctctctctctctagcttcatccaaaaaagcatctttgccaaccttttacaattcggttcaataattgcattctcagtgtgctatatagacctatagtacattcagtttctgttctccatatggataagcaactaaacctcctagctcgcttcactcttcagagtggtaaaagctacttcggagcgcttgtcggacg

SEQ ID NO: 8285 - DNA, 566 bp, Zea mays
  Intron number 7 from transcript GRMZM2G008058_T02 (locus G RMZM2G008058) derived from phytozome v7.0 (chr-ID 2; pos 2 36661734 to 236662299)
atctcacaatagtaagctcttccatatactacttgtacataatagtacatgaattagtattcagtaactgagcagtgaatgctagaattgctgatgttcataaaactgctccaaaaaccagcaaatggtttgtcatgtagttgctgaaaccattaattcactgtgagaagctatactactttgtatagatgatgaccttttttttgccgaaatagcatacatattgttaaatcaacaggaatgttgtcagttaccagccaatttcctggcatactgaatttgctgcaaccaacaggagatatatattccctttcatcaacctgttgctatacctaggttatatggtaaaaatcctttagaaatgttcactgacagaccgaaaactgatttgtaatcctgtgatgcaaaagttgaaaataagcatatcatctataacaacgcattcgctgcttatatgatagataactttgtggtctgtctttcaatgtgatagttctcaaattataatatgttatagtttgatcattggatactgaaattgttttcttgtttctatttttctgaca

SEQ ID NO: 8286 - DNA, 988 bp, Zea mays
  Intron number 2 from transcript GRMZM2G104390_T01 (locus G RMZM2G104390) derived from phytozome v7.0 (chr-ID 8; pos 4 0835748 to 40836735 reverse strand)
tggcgcagcggcccgaccgggcccagggtaagctagctcatgatcgccctccctcctctcctcttgttagccaggctagcagctccgtgcgtatagcgttcgtccgcaccagattggggattcctggtcgctggtttggttgctgatcttgatcaacttagctatgtatacacacgactccaatagtcgtcctgcgtatacttactactcgtttttcctggttgtattggagtatataggataggatatgtgtgatcatctatctattcataataaccttattaatttactaccgacctcgtatatagtgaatgttggattcaaattcggtcgaggaaagcagtaggatgaaatggaggcaccaaagaccaagtccaattggtgcagtgtgttctaatcggagacagctagctaagaacgatccagccacattccaccaaatctagcctgtgcgcccaaggtcttctagtttttgtgtttttttaattttaattccataggcaacatgctgacgcggtaccatcaacgtgagctgtcactccgagacaagcacgctgtttgagggtctattcagcgaagtcttcttttgctcttaccggccaaatgcttgaaagtggatttgacgatggaggagctatttgcatttgagataaatgaaactgctctattagtttttcatggaaatattgcttttatattcatactaatacttcttgacttgttgatatttctctctatccaattggactgcaagttggtagttaggtgagctgttcctcccaacagtgctaaaaaccgagccaatgatgtgctgggagaaaaaaaaagatactttatccactttgattcccctagctgaaaacagatgattacattcagtctatacccttaaaacaaatcgaatgcagtcacttttttttctctcccttaactcgtttcaattctgctggcagtcactttgcaacgcctgtgggatccggtaccgaaa

SEQ ID NO: 8287 - DNA, 634 bp, Zea mays
  Intron number 3 from transcript GRMZM2G048500_T01 (locus G RMZM2G048500) derived from phytozome v7.0 (chr-ID 2; pos 1 59329635 to 159330268 reverse strand)
caggcctgcatccgtggaacatttccgtggtgcaggtatggggatcaaagggcaagtgttactaatcgattaggccatttggatgaaaaccgggcatgaaaataataataatagaatctaaaatatggtatactaggtgagtgcccgtgcgttgcaacggaaacataatgaaaataagctagcagaaatttgcatccaatgttattaagaagtgtcttacttttggttctcatgagcaacgacagattctaatcaatgaaatgcttggtagttggcacaactgatgagaacgaacagttacatatttgttttcaacaatgattctcagctcactttttcttttaaaatcagtagttggcacaaccactctatagcacaactcaaagcacagaagcagacgcctaagaaacacaacacccgccggtaccagcgcagcgtgttgccggccggtgacacaatgacacaagacattatggtgtcggctaccatctccttggacatcttcaggaacgggtccatgttgtggtggtaccagccattttgcctcactcctatggatgttactctctagagcaggtgagttcatctttaactcacagcttgctgctcatcgtcggaccagtagccatcacgt

SEQ ID NO: 8288 - DNA, 649 bp, Zea mays
  Intron number 2 from transcript GRMZM2G161768_T01 (locus G RMZM2G161768) derived from phytozome v7.0 (chr-ID 8; pos 1 54855430 to 154856078 reverse strand)
gcagagttggtgacagaaccatcactgtaagtgcacaagatccacaccctcttaaccactccgcagcgaagattttctacatgggctcacctgacagcaacctgcaatagttctgtttatttgatattttagtgtaccttttacttgcaactcaattaatcatgctctactggattaagagtttttaaactggtcattgcaaatatcatatgattttgtagattggttcatctatgatctttctcatctccttcgaatttgttctgtttatacatcatgtagggggaaaactggaagccatttgaatcgaatacgattccaccacctctaactttgggtgattaacccacttgaattggacttcacaaaagcaattgctatcagaaaccaggtattccaattccacctgtcaatgcatggtatgaattaagggccttggctagaaaatgggaacatataaatttttacgtggtagatagttgtgggagtgtcagaatctcattctttctaagaacaccatggaaggtatggaatttggcaatttgttctatagtacaggttggtaggcttgatagtttaactatatgtttgcaggtcaccgatattgtatttaatgaatttgcttgacatcccaaggtctatatttgga

SEQ ID NO: 8289 - DNA, 733 bp, Zea mays; identical to SEQ ID NO: 5699
  Intron number 1 from transcript GRMZM2G110509_T02 (locus G RMZM2G110509) derived from phytozome v7.0 (chr-ID 8; pos 8 4607240 to 84607972)

SEQ ID NO: 8290 - DNA, 604 bp, Zea mays
  Intron number 2 from transcript GRMZM5G837461_T01 (locus G RMZM5G837461) derived from phytozome v7.0 (chr-ID 2; pos 2 22084105 to 222084708)
ccgacgtctgggccccacgcgtcagtggaagcaaggtcacgtgatgcagtggaggtgggctagcgcgagcgggtgagtgaaggagaaggcaggccactggtccgggatgaagtagagggccgagttgagggaataggcccaatagtgagttttctcttttatgtttttttcttatttcctttgctatttcttatttcaattctaaattcaaatttgattctgtttttaaatctcaattttaggtaaaatgcgcaataaaacctcgaattatgccatatatatacatttatattaattactttactcatttacacaaatgttgtaatttatacaaaacacaagtgttattcattttaggaaaaatattatctttaatgtgtagttacattacaagtatattcaaaagttcatatccatttgtttttatataaaatattttctagtgtctaatctttattacaatgtaatttaattatctttaccatttattttaaaaggggtgaattcccaaatataattattcttcaagggcacttcactttgatttcttatactaatcccaaaatcaggattgtcggttttacaccagctcgtcgaagtttga

SEQ ID NO: 8291 - DNA, 989 bp, Zea mays; identical to SEQ ID NO: 6479
  Intron number 1 from transcript GRMZM2G126010_T01 (locus G RMZM2G126010) derived from phytozome v7.0 (chr-ID 8; pos 1 00397445 to 100398433 reverse strand)

SEQ ID NO: 8292 - DNA, 558 bp, Zea mays
  Intron number 2 from transcript GRMZM2G125020_T01 (locus G RMZM2G125020) derived from phytozome v7.0 (chr-ID 8; pos 1 9121997 to 19122554 reverse strand)
aagaagctcgacggcaacgacatttacatctaccggtatgccattatctaatctaatctgacctgacctgacggggggaagggtttcagagaagagatactggctttatcagaatgagacgttgatccgagtgaagtagaactgcgcaccaaactgattcatgcagtgttcagctgacagcaatgctagttttttttcggagaatgaaaaaaaatgttaaaatcgagctagacaacatgctgcatcattaccaaataccatcaatttttttattagaggcggttccaagctgagtaaggccttgttcgattacgtcggattgcacccgaaattgttccagttaatcaaagtttatataaattagagaaacaataatcgttccgacccaccaatccagcacaaacgaaaactgaaccgtccgttagcagagcacaggcccttccattccatccagctgaactgaacactcgccatcgtataattcgtccacattctcaccaatcttggttgcgtggtgttgcagcggcgagaaggcattctgcagcgccgactgccggg

SEQ ID NO: 8293 - DNA, 437 bp, Zea mays
  Intron number 1 from transcript GRMZM2G443445_T01 (locus G RMZM2G443445) derived from phytozome v7.0 (chr-ID 2; pos 8 780657 to 8781093)
tctggggttctctcaccatacaagtttaaccgcaggtgaggtggctccccctcctcatttggtgcacaactcatcatcatcatgtttttttatcgccttttcagaacactgctgtctgtcttctcgctatgctagaattctttggaatagctgccagtgttgttttccttgccttttacatgtacatcatgttttttttcctgcctgtggagtgggttgatttaaatcactagcaagtcaaaaattatttctaatttctttcgatctcattaaattcacacagaacgggaataaccgaacacagcctaaaatcgtgaaactgatgcatagcagacggtagaccatccgtaaccgtacatattcataacgtctactatgccttctggtattttttttttccagggcagtgcaaagcagcgacgtttcgctgaagatca

SEQ ID NO: 8294 - DNA, 979 bp, Zea mays
  Intron number 1 from transcript GRMZM2G351977_T01 (locus G RMZM2G351977) derived from phytozome v7.0 (chr-ID 8; pos 1 41642701 to 141643679)
gggcctacgctaccaacttcgtccccggcaagtgagcgagggcatatacatacttgtatgcgtgtaccgtagacatacgtattcgtatatgtactgcaggagatgtaccagtatttgtgaagaagggagcatgggctcagagattgtaccagtagtgtacgtatttgcatgcatgctttggtccttgtggacattatcaatgaaatatgctgtaaattatacatacgtctttaataatgcatactgtacatgatttgctctggcaattaagtcggtgttgtgatgaagtgcaacagagttcagtgagcacgtcctacatcaaacaccaggcagctggacagcaataaccatggcacactgacagtctctctagcaatgaatatctggtacatatattttattatatacatgttatatcaaaattgatatacctaaatatataaaaaaaatattatgtcataagaaaattgatataaacataactataatgcatatctaggtatctagacatgattagatatgtagatatgatgtataccaatatagctttactacgtatttatatatatatatataagttatttatctacaaaaattcaaagccacttataattgaaaagaagcaccagaaccacttgtacagttgggaaggagagcactttggtccaaactctaaaaagatatgcaacaactgcaactgtcaaggaaaaagacctaggttataactgatgctaacaagttgaagcaaattctcgcaaaaaaaatatatgtgaaaaaaatctactcactccgtcgtaaaatacttgatgttacaatatccaaactttatatcaaaataattatcattctctctttccaatcctatcttttcaatgcatctttctctttacgtaatacatatttttatttttgcattacatctttgtctatacttttctagctaggggcgttttaaaattttgcattcttcattggtttt

SEQ ID NO: 8295 - DNA, 592 bp, Zea mays
  Intron number 2 from transcript AC155376.2_FGT004 (locus A C155376.2_FG004) derived from phytozome v7.0 (chr-ID 8; po s 164136504 to 164137095)
gaccaaggaagaggtctgcgacgcgctctgtgaaggtaaacaaaatcagccattttgattcgctgcatacatgctacaccggtgttcactgttttcgcgatggcatgggattaattttgctcgtgaccatatttagccatgcttgtccgtatagtatggttgggcttttaataagttcgtgtgaatgaagtgaatgccagcatagagccgtttgagagtcgttgctggaattgctgctggtccatttatgctgagaatcacgggttgcttcaggcatgtggaataggtacagcgagttatatctgcagtgactagtgagcatgtgaagaacgttggagaaattgcttcatattaggagcttccatgtttcagtcgtttatcacgactttttgtggaaaccactgcaagcctgttgtattcttgcagaacttggagttttttgggctagaattctttcacttttatattgctgaagatgtactagtagctctacattttccactgtatgggcttcacttcaccaatgtgttaaccgattcaccacgcctgtccttcaggtaacacggagaactttggagcagaactactggag

SEQ ID NO: 8296 - DNA, 956 bp, Zea mays
  Intron number 2 from transcript GRMZM2G028570_T01 (locus G RMZM2G028570) derived from phytozome v7.0 (chr-ID 8; pos 7 1715526 to 71716481)
gccaagtacgtcggccgcagaggggtgagaactcaaaccacagctctgcgcagactatgggttgtatgtttcaggttaaatttccgacaaatattttacttttcagcaaaatcactaaaatcaacgtgaaggattctgtcgctttcgccccatagtattcaaattcttatgacatataaattatctacaaatccagatttctagaaaatttcttaaagaaaactgtaccaaacagaccctacttgtacgtactacgtagtactgaaatttgattaaggtgcaatttgatacgcgcaggttgattgaaccccacagtcccactgctcactagccgggctagccgcacacactatttcgtggtctatgctgcttgtatttttgttttgttttgtttctggtgattttgtaaaccaaaaaaatatagtgtagattaagagatctttggcgcttttttagccagtaataactgataagaaaacgattgcatgctctcactctcgcgctctttcatccgcgttgacaagaaaactcaatcgatcggttagagactgagcttttcatcggacgtcgtgcctgtttgtttcggcttctaccagcttctggccactaaaagctgctgcggactgccaaacgcttagcttttcagccagcttttataaaattcgttatggtaaaaaccatctaaaatcaacataaacacataatcggttgagtcgttgtaatagtaggaatccgtcactttcaagatcctgagccttatgaacaactttatcttcctccacacgtaatcgtaatgatactcaggttctctccacagccagattctccccacagccagatttttagaaaagctggtcagaaaaaagctgaaccaaacagcccgccttaacgaccagagatcgacggtgacggattcactgaatcctaagctgtggtgctctcttttgcagtcactg

SEQ ID NO: 8297 - DNA, 288 bp, Zea mays
  Intron number 1 from transcript GRMZM2G154235_T01 (locus G RMZM2G154235) derived from phytozome v7.0 (chr-ID 2; pos 1 07079662 to 107079949 reverse strand)
cagatcacgctctagccagttcgtcctcctttgaatctacattaattttcttttttgtttcctagttttttgtttatttatcgattttgtcttcagtcttcagacttctcatttaaggaagggaaaactcatctatgtactcattttctcctgacgaacactttttttacatttccatgtgatcagtattatcacatactaattatgacatatggatatgcatgcatgtgtttgatttgtttcttttttccagagtgtggctatacaactcctttaattccattctgc

SEQ ID NO: 8298 - DNA, 1008 bp, Zea mays
  Intron number 1 from transcript GRMZM2G104179_T01 (locus G RMZM2G104179) derived from phytozome v7.0 (chr-ID 8; pos 1 63474561 to 163475568)
tcgaggacgcgctcaccgacgagcagctgcgagaggtagtgccatggccgccccgtatccttattgcatttcccctcacgtttgctgactgggatacatgaatctggggttcagttgcttggtgtttgaactagactgtaggattgattgcttgattcgtgcttagaaagttagagttggaggagctaatagtttcgttgctggatttgattgtggggtagtgatggaccccccataacgtccctcgtcccctgtttgttatgaacatctgtaagatggtgatatgtttagtacgtgcttagtggctgactaactatattctattgatcagacttcatatgttctctattttggcaactgcttcagattacctggtgaagaaacaatgctgcttctgttcttatatatgatatcacaatatctgagcttcttaccgtgctcaattacaatgaaagtgaccagtaagtttgttttgtggtttggttataccacgctgtataggtgatcccgatcacttgtcgggtttggttataaacaggtacaaagtgaacgaatgcaataaaagcaaactctactagaaaatgacgcatatgcatgtgaaatatacaaaactgatgtggccaacgtgatgttaaaagacttgttatcaaattttcaccgatgtgctacattttataactattccttttgcaaaattatgataaaccagatcttaactgtacaatttgctaagttttgtggcaaaactaggtagggatggccaaccatcagatgcagtgtcttggtgtatatttgtgatggcagtaactgccactacatgatatagacattaattcaattcattattatcttgcaacctcttggaggccattgcttggagctcattatatttttaaattatctgttagcttgggtccgaattctctagcatcctttctggggagatttgtttcactctggtaaatgagtactttttctacttgctgtagaaatctagaagccaagcaa

SEQ ID NO: 8299 - DNA, 853 bp, Zea mays
  Intron number 3 from transcript GRMZM2G434252_T06 (locus G RMZM2G434252) derived from phytozome v7.0 (chr-ID 8; pos 3 2602425 to 32603277 reverse strand)
caatccaccaccagaaccgccctaccccaagataggtatgtgcaggttcaactactcatttagatattggtacaacctgtaatagactttggtacaataggatttggttctgctattcactttgtttttagttccaaacaaccaaaaaattgcatgtcctttagaaaaaatatcacaggaatatcagtaatataacactgataataaaaatgcttcgattctatatatttttcatgttataaggttgaaaacattctgtctcacggatcaaaatgggtacaaggggacgtactgcatttacaaatatatttaaccataataaaacatctttggaaaatgaatatcatttaagtccaaaaatgtttttgttgaatgttcattaagctagagtgaagagtaaacttagcatttcttttctatatctctccctcgtgctcatgtagccgtagtctcctccatccaacatttcctacgcatgcagctccatctcagtcgttgtacccattcaatggcgagctggtggcagcgatgtaggagatgatccatgacgaggtgcacaagtacatgttagtggacgacacctgccaaagatacacaatttctactggtacacattttattttttcatggtgagaattaatttcttagcttgcgcaaaaccaaaggtttagtgatttgtcaaggcagaaatcagtataatgataggtgtgcttgagcttttgataattggtttatttgaacttttatctttttatgatcatgatatattgagacataaatatcttacatgtacctttgcagtttttcagttggagaaaacatttaagacaatattttctcgtttgttctccat

SEQ ID NO: 8300 - DNA, 604 bp, Zea mays
  Intron number 1 from transcript GRMZM2G529768_T01 (locus G RMZM2G529768) derived from phytozome v7.0 (chr-ID 8; pos 1 71007509 to 171008112)
ttagcaattcagttgctgggaattcttcaattaatgtaggtttctaatttactttatagttggattctttcattttttgcatatatttgtgatcagatattttctccacattcatattattctaataccaagttactggtagctatgtgactatttttcaatcacagtagctttcacaatgagggactgaatcatatatgttgattctgtatagttgttgtctgtgttttagcaccttatataacggaaggacactttagatttgatttcttttattcgtcctcctgtttggcagattatccttttgaaccaattgatgatgctatttctatttttgtgaagcttaatttgcgggagttgataggttttggtagtgttcttatattgcaattatgatttcttactcgttatagctagcagcatccttattggtccttgtttatttgaatgagcaatgagtgtagcatctcatggcatgcggacatgggcggttactctcatattttgtcaactgattatgcaaaagaaattatggatcaatcttgttttgctaacatgtttgtaaattatcttcttgcagggcactccaaggttagtttctgca

SEQ ID NO: 8301 - DNA, 805 bp, Zea mays
  Intron number 3 from transcript GRMZM2G402708_T01 (locus G RMZM2G402708) derived from phytozome v7.0 (chr-ID 8; pos 1 58568481 to 158569285 reverse strand)
tggtatatttgcttcataaggttagtggtttgaaagcattttaatcaacccacttgtgagttttttttcttgtaaggtactgttattatcatgcttaaggcccaacaatgcttaaccactctccttgttgttagcatgtatacctattctattcttcatacagaaaaaatggaaaaccctgcagtttctgtttttattaaattaaggaaaacagtaatatggtggcatgggattagggttgtcatgtatctaattgttatgccagtaattggaatctcaaagcagattattgctctgtaatccctaaaccaaggatttgttttattttctatcagttatatccatctctgaaaagtgtagccttgtgcacatcaactataaagctcattactccctccgtccgcatgaattagtcattttgggtttgtcctaggtcaattactatcaactttgatcggttatatcagatgtttcataagattttacaacattaaagtatagttactagattcattataacttgaactatcataacatataattcttttagtttaaaatagtttaattatatatatatatatatatatatatatatatatattattggtcaaagttcgaatagtttgacttagaacaaatccaaaacatctaaatcacgtgggcggagggagtaggcgatttggtgatttggttagacaagtgtcagttcatcattagttgaagctacatgttgacgcatggataatctggatggtgtcattgacatcttccatttaatttgaagcaggaatacagagaaattact

SEQ ID NO: 8302 - DNA, 771 bp, Zea mays
  Intron number 2 from transcript GRMZM5G882410_T01 (locus G RMZM5G882410) derived from phytozome v7.0 (chr-ID 4; pos 1 77161786 to 177162556 reverse strand)
caaggtatcacttgcattcctatcctgctatacattcctgttgggttccacatacgcgtatgtaccacaattctgtttgcaccagcatactaaggaacccatgaacaacctcaacctaaaccacatattatcgtccctgtgggggctaccgcttcttattctccacgctagcaaaattgcccatactctcaagggaatagatgaaggggaaatgcgcctagacagtaggaacgccattagatcacactggggtcaatttgcgtcctaaaacttagcaggactatgtccacaaatcatgcaggggttatgctacaaacaggttggccatagtggaaaataaaaaaaatgccatcttccttgcaaaggaaaactggttctaaactacctatgccttcagttcaccatacttcattgcaatataccctagaagagttcattttccctgctcggccagtcctccatgtctaagattatctattgccgactcaaagttccgtttagtacatgggcttaccatgcacactgtgttcatatagaaggttactagacaacttcatctgcaatcggccatttaaacgagcaactattttgaggcctaccatttaatggtttacatacttcgcgcgtaatttgcagtatgaaatagccctctagacgcacagtttacagctttggtttctttgcgatatctacacctaacacaatacaatgaacagtttatctgtaaactcgctgttcttcgctctgacagggatactgggccaaccgttg

SEQ ID NO: 8303 - DNA, 756 bp, Zea mays
  Intron number 1 from transcript GRMZM2G467612_T01 (locus G RMZM2G467612) derived from phytozome v7.0 (chr-ID 2; pos 3 7693947 to 37694702 reverse strand)
gccaagggccgcctcaaggaggacaccgcgcgcaggtacttccagtagctcatctccgccatcggcttctgccacgcccacggcgtcttccactgcaacctcaagcccgagaatctcctcgtcgacgagcgcggcgacctcaaggtctccgacttcggcctctcggcgacaaacaaatttactgaagctacactgcctgcagatgctgagaaaaagccataggatgggaaaactctgccaaagttggtttctctttaattagaaattctaactttaaatgcatagttgtttgtaacctagatataaattctgattaaaagcacgttgtttcaagggtgattgcatggtcacacccacactatgcttatacttatgggtgaaatgaaggttgtctctattcatcctgttccagatagttgcctcctttattcttggtctgatctttaagaggatctgataagcttttgaatgatatattacttcaacttccgttggattgaaggacatctgagttgaagcagcacttgctgcttcaggaatgcaaactaaaaagtggacctggtttagcaggaatatttgtagataagccaactgatgtctagaaatgccataaatatgattctcaagattcaaacctttaaactgaccatatggtgtgagagttgatggatgtagcatggatttccattccattttgttttaaaattattgccctcgttaatatttgaattacaacatcaaatttgtttgctaggt

SEQ ID NO: 8304 - DNA, 678 bp, Zea mays
  Intron number 2 from transcript GRMZM2G153781_T01 (locus G RMZM2G153781) derived from phytozome v7.0 (chr-ID 4; pos 2 37378690 to 237379367)
ctcaaggtaccatgccaacagaatgcttagcttttacgcaccaggtgtgttctctttaggatttgaaactgtcttgtgatttcttttcaatgaacagaattttgatttttcagacttcttttctggatgctaagttgtacatagagtagtttagtgctcgcatgtgtggttaatcatacaacataggttcttcaagctcatattctggatgcatgctattgttactttgttagtgtgttcacagattttgtgttcagttgtgcaaataaccacctcatagccttatgccatgccacacctgttttagagaacctgaagatagcttgcctcacttcacagacttgtagatgttcataagcgtaatgttttacccctaagtcgttgtttgtctaaactattgcttagatgttttatgcatgtctattggatatctcagcttttatgactggaataatggaatcacaatcatgtgtgctcgctagaaacgttctgtagctgtttaactagatgctggtttcttgcaaaagttgtggtctgtgtacatatagaagtcactgatgtttcctatttttcagggtcaatgttatatatttattattaagaattgttcgatgtttataatcttcctgtttttttactgtcaagcgtgtgacgccatgtgggagcaaagttgggaaa

SEQ ID NO: 8305 - DNA, 871 bp, Zea mays
  Intron number 4 from transcript GRMZM2G518033_T01 (locus G RMZM2G518033) derived from phytozome v7.0 (chr-ID 9; pos 1 32453199 to 132454069)
gcctcaaatcatcaggtaaattacttctctactatttgagttaactgatgctatctatttatttgtttataaccgaacaggttgttagatctctctaccccatacttccatggacaccggttgctacaactgaagccaagtactactgcatatatgttgcttgagctagatgctgctgcttcacacctgcttctgctagctggtaccaaacactgcatatatgctacttcacgcctgcagaactgatggtgaattctatgtgtctgaactgaattgtatgaactcaggtgatgcttttgtgtgaatggaataagtgtgcgaaactgagaagaacagattgtgtgcataaccgtttgggctaaccgtgtgacagtttgtctgcataatacttgtccgaaaaactgattcgactgactaacaattcgaaagattgtctgcataacagttgtctggcacactgagaaactgaaaagcatcacctgagttcattggttccttggttcaaggtttgttttattggagcatacatttacataaaattagaatggcaattccatacacaactcacgagctacttgcagcaattgttcagttcttaattatattagtattatccgatcatatttcagagcgttattctgtaggcgaggtgcttgagacaaggaaaagtagggagtcaaaatcatgatgaatattgtcatcttgaaacatccctaagttaaaaacattgtcaggggttagccttttttacctttgtatcagtttttaattgtttcttattgagacttgtttggtataacaacaacctggtgatgtcttgatgaattgcaaattagttgtgcggagcctgcttgggtagggtgaacaaagt

SEQ ID NO: 8306 - DNA, 933 bp, Zea mays
  Intron number 1 from transcript GRMZM2G337594_T01 (locus G RMZM2G337594) derived from phytozome v7.0 (chr-ID 9; pos 8 8287074 to 88288006 reverse strand)
gtctcctcgtgctcacactgttcgtcgtctccgcggccagtggcgaacctaggatttgatcacagggtatacgatagaaaaaatgtcttatgcaatttggtaaaccattaataatttggtaaaaccacattctaattcggtaaaaccatatagagtacgacgataaatcttgatacaaattgttcaaatgaaatacatataatttaaagtatagctatagaagagacttacaatattacttgttgatcctcctcttttctaatgacatgaatgactcaattatatcacattcatcaacttagaagaaaatatctcgctcaataaacgtgagtagacaatcatccaaaatagtatcacctagcttatttcttgattttgatttcactataaccaatgcagaaaatactctttcaacactcgcagttgccaccggtaaaagcaataccaatttgagaaccagtagacgaagaacctacgagtatacctgataatctgatatatattgaagatgatataatctgatttagagaaggactgaactcactgaagggtggcggcggcagggcactagggcggctctcagactctcagtttccgacgcgcgcggtgggctacggatctgcagcgggtagcaagcagaagctaattatgtttcactaattgggctatgtacggacctgcgcgcgacgggccagaccaaggagcggcgtgctctctgctgtgtcatgggtgatgggccttagcgtccactcgtcatctcgtccagtccagatatatttttctttctttttccattttagtttctacatgcagcaatactattatataatatgtaaatattcactgattttgcagggtatgcgggtgcatacccagcataccctgtgcatccgccactgtccgcggcggtgatcttgcccacctccctgtgcc

SEQ ID NO: 8307 - DNA, 523 bp, Zea mays
  Intron number 1 from transcript GRMZM2G037185_T01 (locus G RMZM2G037185) derived from phytozome v7.0 (chr-ID 4; pos 2 35163251 to 235163773)
agtagaagaggttaaccttctggttggaaacggtaagtactttagctacaactatgtttttcttatctttttttgaacattgtgaaccatatatctggataattttgtctatggaatcatgtaactgtttggtatacacgctttcccccacttggaagtagctgatagaactgaacagtataataaatgtcaagagattactcctcaaggtctacatcactgtctaatgtgcagcgagttcagattcacaaagtcttccctctatacttgcttggttgctcccattgcttagcagtatgacagcttttgattgtagaactgaaccaagctataatttctttcatgtatcacatatgttgttgatactcaaaactagaataatcgctgtacgctgtcacctgtcttcttttcacatgtgcgggttttcaacaaaaaatgttactatttcatttgttgttcaaccacactgttgtgttctcagtcctcatacatttgttcattcatgagtagtacttcgaaggct

SEQ ID NO: 8308 - DNA, 515 bp, Zea mays
  Intron number 3 from transcript GRMZM2G160527_T01 (locus G RMZM2G160527) derived from phytozome v7.0 (chr-ID 2; pos 1 566843 to 1567357 reverse strand)
cactggtaagaatcaccatttactaattttcatttgttttatggatcaatgttcttgtactcatagtgcatgatcttgtcagaaacaatagttgtagcttcttctaggcgtggagcctgaatattcttatacagagtttgaattgacatgtgatgtaattcttaaatcacttcccagagaagagacaggtcacaaacaatgctctagtgttggtggtgcacaggaagcttgggaccagcccagggtgacagggtctgcacggttcagttttccatagccaaaaccaagccagtggaagacatacccttagttatgcaattatgcaattgcagaagcatgttaaaattactactatgtattgtgtacttccatgctgatttcttatagaataccagctaaacaccatatttttcccagcgttttgctaaatcctaattccaatagctactgtattaagagaagctttttatatatatctaggttgaagaattgaccagccagtttgctaggtgcca

SEQ ID NO: 8309 - DNA, 1005 bp, Zea mays
  Intron number 2 from transcript GRMZM5G887286_T01 (locus G RMZM5G887286) derived from phytozome v7.0 (chr-ID 2; pos 2 22161790 to 222162794)
gaagtagccagcacgtggtaagaacttatatttgatgacattgattatccattgtagggattctagtggagaacaccgtagtagctaatgattaagctgaaatcctgtctctggtgtccatgccactgatagaagccaactagaagttacatggtcaggctcctacttttcatgcctgagatatactagtgcggattatgtttctgcatcagatgcatgcatctacggtattcattcacaatcacaacacattttcagcaatgaaaacttgtggttggtactatactgtgggtttcttggcatctatcaagtacaacttgttctcttattgaaggatttagattctacatgagcatataatctttatttcccattgccttgagtttgtctttgtttttttaagctacatggatgctcctttgagggtactctacatgaacaatctcatcgcattatgcttgttttcgccaagggagcttccaactccttgaattccctgtcaattgtcacttaaggccttattcagttgcacatgcattggaggggattaaatccctttctatgaaattttgactaggaagggatttattctcctccaatccccttcaattcactcaatccccttcaattcacttcaaccggacaagccctaagttggtcttaccgatagagaagaatatgggagtgctttctgtataactaaaaccggacattgtctgttcaccttcaacactgttgcctactgtaacgctgaaggaaaagtctatttaaacttaaccaaatgcccttaggctggactgaggagtaatgtttgttactagtttcaaggtcaaaaggccttttttcgtaacataaggaatgaactctcctaacataaagattttgtgttctatatactgcagcgagtgctttcccatatttattccatttttcctgtacattttcccaatgtgcttaaaaactcttgcagcacagtgttttgtccaattgctggttgtggtgctc

SEQ ID NO: 8310 - DNA, 581 bp, Zea mays
  Intron number 2 from transcript GRMZM2G050193_T02 (locus G RMZM2G050193) derived from phytozome v7.0 (chr-ID 2; pos 1 96333995 to 196334575 reverse strand)
tcaaggtgtgtacattccttttgctcttctgcctttcttactgtatatgtttatcttggctgctgtataatgaatagttggattgttgacaactgttttttctaatatgtttccgattatttttgagtggcctgtagacaatttgagatcctgaagtaaagacaacacaaacgatatctggccattgttgaatacatttacttttttctgttgtgtatcacattattattacagtctgatcagcatccttgacataagccacaagtattatgttgtttagttgcgatgtatgatacagacctctacatatgcattagagtgatatagacctctacatatcacattattattacagtctgatcagcatctttgcacagtgtttagtttagagtgtttccgttatattttgcagtttgttttgtgtaatgcttgcaaggatttgagtcaagtggttttaatatgctgaatgcaatatgccatctttttttttccaattgcctccataatatatggatttatgggatgattttatttctccctacttttctgtcaggatgtcaaggttcgcccgcttgtagaat

SEQ ID NO: 8311 - DNA, 636 bp, Zea mays
  Intron number 3 from transcript AC149828.2_FGT002 (locus A C149828.2_FG002) derived from phytozome v7.0 (chr-ID 9; po s 150419381 to 150420016)
caagtacgtcggattgcttgccactggcctcacaggtaatttctgaaattgactaatgatattgctggaacgaaatatagaattatgacagcataggttgggatttatagtcgagttttgcccatcattgatgtttgtttgattgaattaaggtagttgattgtcaaagtctcaagtatttggagcttcattcattatgaatcatcatactattgaacctttgacaaaagaattcaaggcttttcacttcataggaaactgctagtttgagattttggacaagagtttgtgttatgatttcataacaaacaatggatggcatgccacatttgtttattcttctcataataatatgtcactttgacttgtggtttttgttgggtttcaactctaccctacctcaacttgcttgggactaaattgctttgttgtgtataggaatatgacgaaacttagtggccttcctctaaatatcaattgatctgttaccgtgtatttcccctagaggatgcccattaattcatgttgggcactggttaccaccttactgttttcaaatattgcactatttaattacgcaataatacatcttgatctttaatggtaatggatatgttgttattctgtttacagctg

SEQ ID NO: 8312 - DNA, 407 bp, Zea mays
  Intron number 1 from transcript GRMZM2G406603_T01 (locus G RMZM2G406603) derived from phytozome v7.0 (chr-ID 9; pos 8 7261357 to 87261763 reverse strand)
gaagagaggactcctgttgattcattcattcacttgtgtgccaagacacttttgcagagtccacgttttaagtgcacatgattcgtgcattgccgtatttgaatagtgtagtagtcacatacggtccttacggatgattctgtttacggaccatatataaagatagaaaaacaaataatacgcgacagtactattatttgagaaagttgcttatctgacaccgggaaaaaaactgtgcgttcctttcagtcctgaaaataaaaaaaaaatcattcttccctactcaggttgaaatttctaaaagcaaacaaaggaagcactactcttctataaataataggataaggaattttcttatgttatttttgtctccaggatctgctcagctcagcaacaggaagcatcgt

SEQ ID NO: 8313 - DNA, 641 bp, Zea mays; identical to SEQ ID NO: 4509
  Intron number 1 from transcript GRMZM2G126190_T01 (locus G RMZM2G126190) derived from phytozome v7.0 (chr-ID 4; pos 2 14239277 to 214239917)

SEQ ID NO: 8314 - DNA, 490 bp, Zea mays
  Intron number 1 from transcript GRMZM2G438998_T02 (locus G RMZM2G438998) derived from phytozome v7.0 (chr-ID 8; pos 1 1250424 to 11250913)
agttccgggcgctttgcgggtttgccggtattgaggtaacgtgtctagagcttgaattatttacgctcaaccgttttttaaatattttttcctgctctcgctcgccggtttttttttttatttcccacccaaccatttgtcgtcgaaccatcggctatcaagttcaaaccatcgaatgcacatgagaaggccgaacgaaagtacgcgttttcttcttcaaatttggcaccaacttgtgtttctctgtctgtttgatgtttgggcggttgagacccgatgaagaaagtgtatcattgaataaattagttaggagacgttatggtttgttataggtattcttgatgtgcagctgtaacaagtacttttgattacactaaaaaaacaaatgattttgctaccttaatctgctagtagtggacacaaaaaaaattctggtgagtagctgacatgagaaaaaaatgtttaataggtttccctacttagaaaagaa

SEQ ID NO: 8315 - DNA, 744 bp, Zea mays
  Intron number 2 from transcript GRMZM2G143010_T01 (locus G RMZM2G143010) derived from phytozome v7.0 (chr-ID 9; pos 7 0889364 to 70890107 reverse strand)
ccagcgtcaacttcttttgactccacagagatgtaggctcatttgctccctcatctccctgcctcggtttgtgagtaatgaaaggtgaatggatgcacatttgcaaacctatttccttgtcaggtacccgaactgcccgaactgccagtacacttcagtgtgggtaagaagcatattttgatctaatatgtcgtactgtaaccactctctatattgtttcacctttgatataaattttgtgtcatattttattacaaaatgctagagccctggtgaggcacgcaaaacacgcctactattctagttagatgcagactaccccatttctctgcctcttcaagggttacacatatatcttggttttgctgcattctaaatgtgatttgatggttacttgcttattttataccatttttctttactagttgaggaaacatacaaatcattagggttgtagttactagttagtattcccataatgaacattctatgttgttatgactgtttttgttccttacttttcaaagacagcggtgatcagctacacctattcacattgctaactcaattcaaaatagaattatgctgcaagctacataaggtcttgacatccaaaatgtgaagtgtgtaattgtttgtatagtagagataactttatacattctggtatggtaatgtttgttttggtttcattttatccatatctcttgtcttatttttatacattcttgttgataggatact

SEQ ID NO: 8316 - DNA, 457 bp, Zea mays
  Intron number 1 from transcript GRMZM2G089282_T01 (locus G RMZM2G089282) derived from phytozome v7.0 (chr-ID 2; pos 9 587629 to 9588085)
tgcctgccggctgggagcgacggcttgacctcttggtgagttgattatggttcgtaatatgcgccgagggttgtggtggtctgtgttttatctgaggacttgattttaaatacctgttcttattttcaatcgctttattgatcgtcacatgctaggaatagggatatggagtggagtttaaatcaagtttacatgttgtttatttttatgtacgtactcttgttttttttattgatcgctgatcgtcgatcgcacatgatattttgcttcaatattaaccctgctgaaatataatccctcgcttctttttgttttatttatcgtcgtgtgacaaatattcgagaagaaaattagtagtttacaatacgtacgtattttgtgtgcaaagtatactaaacctttttttgttgtttttctcgcagtccggcaagacgttcctgacccctcgccaccagag

SEQ ID NO: 8317 - DNA, 751 bp, Zea mays
  Intron number 1 from transcript GRMZM2G042084_T01 (locus G RMZM2G042084) derived from phytozome v7.0 (chr-ID 9; pos 2 7968016 to 27968766 reverse strand)
gggagcaaaaacggcagcgcattgccaggacagaggtcatcctgaagttctccttaagtcggacacttagaccaggctgacgatgtcagcttccgagttcagaattccataccagcaagtaaacggctcataagtttcgacaataatttttatgttctgtgctggagtttggctatcaatctgtatataccccaatgcactattcaagtgctttaataaaccagatattactgttctgagttggatagcaatcacaccgtatagtttacttcactcattctagttatgaatcattagttcataaaagagtaagctcctgtttagaagcaacctagtttttaagaaatcagtttttatcttttagctagaacaggtcagttttttttttaagaaactgagaatcaaatttctataaactgaggtataaactgttatgtttggaaccacctcaatttatataaaccagtttcttaaaaactgagtgattccaaatagaccctaaatcatggagaatatgctgcacaatgcatgcctatggaagatatgttgaaacaaaatacatgttggacgatgctttgagtaataacaatagttaaacttctctatgtaaaagcccccctcccccccccccccccaataaagtcaagttcacaggatcattgtttaattgtttgagtgaggcactgttctacatgttcacttcactttgtttaattctctcgacaggtttcttcttcacagcctgttgaga

SEQ ID NO: 8318 - DNA, 960 bp, Zea mays
  Intron number 2 from transcript GRMZM2G428130_T01 (locus G RMZM2G428130) derived from phytozome v7.0 (chr-ID 8; pos 1 60700435 to 160701394 reverse strand)
attggtaagatttttttggcatacttcccatctatttatttaattgtttcaaggtgggatttgcattcctagaaattagaactattacatctgcgttgtcttagggtatatagataagagtttcattgtgactatattctgcaattatttatccctaaatgtaaattatcatcttattttctcacgattgtccatataaaattattttcatgtgtgcgaaggggtgatatatatcttatttgctttctaagatacgactgacaaccatatagatgagtatcaggttatggctgccagccgtatgcagcaagcgcagatgctaaaattgtatttaaaaaacatctacacacataaataagtcgaagttgtgcacagatggaatgctataatcaaataggttctagatatgcatattctaatagcatcgttatagaacaaataaagcataggcgacatgaaacattatgcacagaggctgtttttagttatataagaacattctgctttaaaacgacaatggaagtagtttacatagttcaaaacatagttgtgatacaaaagagaaaacaaacattgtatttatgtgaaataagtttccaaatgtgttggtcgtagttttgccattgtagaatagttctgcaaacaaaaatactcgcttgttttcaccaaatgcctttttgtggttctacttctttttcttttgcacagtgatcagtttatttatgtagtttaattcacagaattcctctatatcttcccaagtgaattttgggcttggagttcaaaaggatcaagtattacctcatctacaacaccagaattttgtccccagttctgcagaaatataaatgatggcttattttttttactttcatatggcaaaataaattgcaatgtttgagatattttatcacttatagttgtttttcctgcattgagaatttacacctatatgtgcag

SEQ ID NO: 8319 - DNA, 1005 bp, Zea mays
  Intron number 2 from transcript AC186815.3_FGT003 (locus A C186815.3_FG003) derived from phytozome v7.0 (chr-ID 8; po s 145401947 to 145402951)
gagaagaagtccacccctaagctctagaactccaggtcagcacctgcacctccccctcccttccttccaccagattctagatctcttgatgccgacaccagttttcttggatctattggcgagttcatcgactcatgatcattagaacacgcttggctctaggtgattatgcgctgatggctctactccttggctctaggtgctcgccgtggccacaagcgtgttgtcccccgacgcagagaagaggaagggcatgtggcgtagtcagagggatctgaaccctagcggtcgtccgcccgtccagatctgtgacccgcccttctggatgcttcggtgacatgagtgcctggaattctggggaggcgaaacagtgacatgagtgcttgcaaaatgattgtacaggaatacttgctaagctgttatttcttttctctggtacaataaatctggtcattggatttaatttgtttgcttggttgtaggtcagagtttagtcatgtcatgcttgatttgagttctgtgccacatcaaagcaagtagtagtacgtgagaagttaaccatcaagagacaccctttttgtctttgtgtatcacaggttggtctcagactaatcttcttcgatgagtaccttgatgtgtatacatgtcatttctttgatcagtacgtgaatgaggatgctatgtttctgtctcagaattcaaacttatgagaacttaaatagcaaagacaagaaaattctaggcatactttgctttaagccgtttgaaaagctctccataattttggttcccatttcatctgaaaacaaacctcgacaatgtcttgtatttttagtgacctttttattccttgctaaacaaataccttgctgattgttttgttattgcatctgtatcaattctctcttagaaagatattatttctggtaaggcaaaatacattttggttccttatcgagcgttgattttactgttccttgatattgcatagatattgttacgttg

SEQ ID NO: 8320 - DNA, 981 bp, Zea mays
  Intron number 3 from transcript GRMZM2G063603_T01 (locus G RMZM2G063603) derived from phytozome v7.0 (chr-ID 9; pos 1 49812085 to 149813065 reverse strand)
ttctgcccattgcatcttgctgacagtgtgagttcattctttcatttgattgttatgctgtgttgtttcagttgcaaccattgtagctttgcttgtatgaagtcaataattgtaaatccgatatgcatgtgctacaaaagttatcatgtgagaaggaaacatggtaaagatacatttttttcttgattcctcccttgaaccagagagcatttatgaaatggtctagtcagtttaaatagttctgttagccttattatggtaaaattgcctttataccattaaactaccgtgatgattgctaaaatacaatacaaagtgttgatactgccaaaataacatctgctggatgcctggacccactggtcatagacacaacaatgctattttggcaactgggtttcaacttcatgccataatggcaatgagtcttaagttttaactgttttattttatactctctccattccaaattataagttgttttggcttttctagttacataccttttgctatgtacctggacacggcatatatttagatgcatagcaagaaaagccagaacaacttatggtgtatttggtttgtggactcagtgactcaccctatgcttcacgaggtgatgcatcataagttcatcccataaattttggtgaaatcaactcactcctcatgtatatactaattattagcttatgaggaatgaggtggtggtggatcaactcattctattccacaaaccaaataaaaaagtgaggagtgagaagaagatgaatcgtttcattcctcaaaccaaacacacccttatagtttggaaccgagggagtagaaaatactagttctggtgcttttatccttgttcacagtacgccacttcaatgagtttttagtttcacatttgttataccttgaactatagttgttttcttattgattttctgcccccaatttgttctcagaagaagacatattcacaccttacac

SEQ ID NO: 8321 - DNA, 598 bp, Zea mays
  Intron number 1 from transcript GRMZM2G053210_T01 (locus G RMZM2G053210) derived from phytozome v7.0 (chr-ID 9; pos 2 8994868 to 28995465 reverse strand)
ctgaggcctcaatagccgatcttggaaacaaataggtatgaacaacaaattgcagttattactactagggttcatcgcttgctgttatctgtttggcgtcacctacctatagttcaggaatcaggtagcaccatgcatttactatcgcatttgattacggttactgtattgactgccaaagaaaaagaaaaaggctctattgtgccatcattgttctacaaaagcgtattacaagagtgaatgaccatccttgttctatgtttacctgatattaacatggtatgcacttggcgtggatgataaccaagattcatctagggcaatcaatgggatgtaacttgcatgttgtaactgcgactatcactggaccgatctgttcttctcttgggttatcagtgtgtacggaagtgctattgatttagatgtctactatgggccttttgtttatctttcttggtttggtttgaaggtatagagctgtcaaaagggtctgcatttgtttaaccgtgtttgatttagttgtggtaacctgcaagctgcagtaggttgaccactaattatgttttgctcttgtaattctgtaggctatacaccaaag

SEQ ID NO: 8322 - DNA, 782 bp, Zea mays
  Intron number 1 from transcript AC219097.3_FGT002 (locus A C219097.3_FG002) derived from phytozome v7.0 (chr-ID 9; po s 57067750 to 57068531)
acaccaggtaatacatcgacaactaaatctatcttatttctcataatgttaaaaagatatggatattgctcttttagttgtctatttaaaagccacatatccatccaaaacttggtagattgtctatcacctacctagaattgaccccatcgcaaaaaatcatctttaaccttcataaggctagaccagaattcaaaatctcgttgtcgtcgtgaaacttgagtaagcgctttggttcctaaatacttgtttttgagaaattactgccaagctctattttcgttaacaagcttaaacaaccattttgaaaagttgtctagagggggtgaataggcaagtggaaaaattaacaaaaaatagaaacgaactgggtaaaaccggttcaaccggtttgcacgagtccaactaaacaatgagatataaaactgaaataatggtgaaattcacacatataactttgcaaatggggtgtcctaaatgattcatagagttcaaagtagtagatctgagaagatcaattctcaaaatacacacacaaaaaagatatgaacaattcttccacggaatggtgagagaacgaagaacacaaaaaaacacaatgagcaagaatacaagagacacaagatttatctcgaggttcagtcacaacaccaaggtgtcctacttcctcgttgtggcgcccacaaagatcctatcacaccgattcaatgcagttgatgcgcataccgctgcagtccttttctatgtatgctgcagataagctcctcgaacttttccataaa

SEQ ID NO: 8323 - DNA, 910 bp, Zea mays
  Intron number 3 from transcript GRMZM2G497769_T01 (locus G RMZM2G497769) derived from phytozome v7.0 (chr-ID 2; pos 2 0111339 to 20112248 reverse strand)
aatcaagtccaatcctggtgaaattattaagcctggtatgttcccacttccaggggcggatccagcaccggggctgccggggctccagccccggtccagcagcccacgtctcctcagaactctgttttttcctgcttctgcctggccagctaatttgtcatatcataaagatgatctataaagtgaacatgccctctatgtgagtagctgttagcccactacatacgtacgtctatttggtctttgttttacgtctgcgcagtcgaactcgaggtggagctgctccctgcagtgtgctgagaaggtgaagaagaagcacacatggcaccacttatcgttttcagccgccacacagacggcgttgcagtgatgatttttttttattttagcctctttttctattagaattttagtttgatatcttaacaaagttgttactctatactattttatagtaattttagcatagtcattggaagaaagctccataattgctgatccatgatggtaacaggctacatgtccatgtaattcgcgcatcctctccatagtggtttcgttaattcacattgtgggaccatgtttagtctctccaatacataattcaggctctcttttcatttatttctagatccgccgctgcccacttctagaatctagaattctagatggtattgttttgggttgacacataagtatgctttggtatgtaaattctattgactttgacttttggaaatgattcaactcatacactttgttcaaaagaaaaggtcagccataaatgatgagggtatgcccctgcatggtcgggctttgatgaaaggccatctattgtggaattcgacatcgagttcccagaatctggcgctatctcgcctgaccaatgcagggcactcaagtatcagac

SEQ ID NO: 8324 - DNA, 605 bp, Zea mays
  Intron number 2 from transcript GRMZM2G121269_T02 (locus G RMZM2G121269) derived from phytozome v7.0 (chr-ID 4; pos 2 38363102 to 238363706 reverse strand)
gaagggtggaacgagtggatctgaagacaggttagttcgttactatgttctcaaactttatgatctattttagcaaaacgacaattgctgctacatctatatgttgtttttagtcaaaggcagtgctttatttcatcaagtgaattacaaccagtcatcaactgcagctttggaccattttgtttctttgatttagatactgaagcattactgaatatattcataagacaatgccatctgaaaacataacatggcctttgtttaaattttgattttgaccatttcatatggaatattggtttgatcacaaatacatgatcttcgcataactcctctaagaatgtgatcttcacgtggaaactgctatcgccatgacttggcagagattgtcgatcttccttcagccatgcttggtgttagaagcgacaaacagaccaagttgttcatccgatgtcgaagccagaggagtttcaggaaaatcggcttatgtttatgttttattgttatgtcattggacgagtgtgtatcaggataaatttagaaaaaagaaatttttccttaaaatttggtcatgtactcaattatttctttgccgcaggaatatc

SEQ ID NO: 8325 - DNA, 591 bp, Zea mays
  Intron number 2 from transcript AC208341.4_FGT010 (locus A C208341.4_FG010) derived from phytozome v7.0 (chr-ID 8; po s 96274036 to 96274626)
ttcaggttcgttacgattgagatgaggcagcctaaaaaggtgtaatatatttgtggcactttaacaagtgccttatattttttgtaatattttttttacaatagaaaagtgttggagtatatttttagattaagccctatatttaaattgaaggcatctatttgggacacttttagagatgctctgagagacttatcttagatcagtccaaactctccacgtcatctaatttctatagcattaatttagttgtcacataagtaatttagtaacataaaaagaaaattaatgagaaagagggcggaatggtttcctccttcagaaatcaagtctacacgcgcaatgaagacacaagaaaccactgtggtgagcatcaagttttgatctgtggagctcacatgtagctcactagccgcattcgtcatatccacaattattatgacaccacaacaaaaaaaattaagcgttagaacttatagtctgtataagtaatttttttagtaaggtgacgactatgaaaattacttagtagtttttggactgtgattgctcttagctcctcgcgctctaccaaaagccacctgccatcaa

SEQ ID NO: 8326 - DNA, 671 bp, Zea mays
  Intron number 1 from transcript GRMZM2G034052_T01 (locus G RMZM2G034052) derived from phytozome v7.0 (chr-ID 8; pos 7 0552513 to 70553183 reverse strand)
ctggtacgcacacgcctctaacgatttccttatctcagcctcaaaggtcttctgatcaatgcacattgacggtgtgatgtgctgctttctttatgttctaaggggggatgaaatttattgacatcccctgtgcctattagatgaaagtgtacgtgtaccttagataattactatcagatctttttcgtttcttttgtttaaatccttatttaaattctgctagcgctgatttcacttatgccccgtttggtttcttctaatttaattacattctaataatagcaatttaggcaaatatcaattaagctaatatgattttatgctaaatatatttgtatactattattaacaatatgtgagagatatttatgtgctacattttttttactatagagaagtgagtcgaagaccgtcttataagttttagggtcttaacatattccgctaaaacaaaaaatcattttacattctgcacaccatgaatttaagatagcttatatctaagctttggaaagtgatggaatatcatattccaagctaaatagactactttatgaagtaaatttcaattcctcagatccaaacggtccagtatgttacatgcatttacttgacacctatcacagagtggctacgagctaatgcttgactggcttgtttttctgcagcta

SEQ ID NO: 8327 - DNA, 1013 bp, Zea mays
  Intron number 2 from transcript GRMZM2G458307_T01 (locus G RMZM2G458307) derived from phytozome v7.0 (chr-ID 2; pos 3 2480237 to 32481249 reverse strand)
catcaaatcctcatccagtcctgccagtcgcagaggtcagtctcacagagagcaacttccggttctgcttctccataggctgtgttcaccaaaacaggcggagctttttttgcttagaccatattcagaaactgcacccttgaaggattttcatactccattctattttgtttgtatacatgggaactccaggatactctcacatcgcccttgccactacagcctacaataaagatttgcaggtagcagtcctgcagttgctgcttgtcattgagttgtggtggcttcctagggttatggagctgccatgcctgttggctgttgccacgactggattccaaaagttgccatctcctttacgtgccattgccttccaccaaagtccacgttgtttcctccagccgcagagctgattcattgtatgaactatgaagtatcctgtttgactgctagcatgcatttgatgtttgggatttatattttattcacttggctcatgattctgttactgtggttcactgatatccaattgaagtgaggatgattagtcatctgccttttttgcttgcttaataaaaggtagaaaaatattacatatctctaatgtgcccaacttgtggggtgtaggcctgctggtgcagtggtgagagctgtcttattgagtcatcaggtcacgggtttgaagcaacctctccgcatttgtgggagaagatttgtcttgatttatcccttccttagatcccactcatgtgggagcctcctgcgggtctgctctttagtgtgcccaacttgcatgggattaatattaaagagtcactgttgtttgctcaaaattcttccaaacagcttttcaagcttgtcgctttagcttgttttctgggcttataaggtagtaaaagctggtttacaggataaactaagcttggccagaccaacactctgagctaggcatccaagtgggtacccagtgttttctaggtcagctgaggggttcacggacaagacaatcatct

SEQ ID NO: 8328 - DNA, 891 bp, Zea mays
  Intron number 1 from transcript GRMZM2G128160_T01 (locus G RMZM2G128160) derived from phytozome v7.0 (chr-ID 9; pos 1 2566034 to 12566924)
cccccgacgcctccgcagccgcagcaggtagatccggagtcgtttttttttctcttccggagttttggtgtgctcgattggcagtgggctggttagcgacttgctctggccatgtttgataccaatcgggggagttgtgttaggatctttggtggcgagtttagcgtggtatttttgggaaaagtaggcgagctcagctgtgaaatccaggcgttcgatccaaattaccctcgtactcgaggactagaggaagctgcaacgaagagtgattctcgtacagcttatttcgtgcagacaaatttcccacgtgtgttatgtatgctactcttgcaatgcaaatctcctctgtctaggtgcaaaagacaggttgacattttatagtccacacttactttccctatctgtgcattctgatgctctaaaacaagcagggaaaaagaaacaatagtttaatcatgctcgtgacgccatattctaccatgctgtccaattagtaagccctgtcatggtacaaatctatggttggaatttgctactatcatctagacacataagcacagatgccagtaacatgttgtgggcttggtgcattcacagaggatagcactgtactgtactagtgtacatgtatgtactctgtgcactaggtaaggttttgtttagaggattccagtccattatatggccaatatatatgcgttcatactttatctggacaacacttgctgtctgttcaaaatatatgtcaggaatgaacggaaaatatgaataactttgttgagaaaataatctgaactggctatttatccctaggtagttgtatgcatatataattgcagaattttcagctttgagatttattgttgttatgttgttggactctttcaggat

SEQ ID NO: 8329 - DNA, 968 bp, Zea mays
  Intron number 1 from transcript GRMZM2G159053_T01 (locus G RMZM2G159053) derived from phytozome v7.0 (chr-ID 8; pos 1 44870593 to 144871560)
ctgggaactgcaggttagccagataaatgtgtttcatacgttgaatcaattttcaactctgcaaatgtatgagaaaattgtgtcaattttttatttgtttgtttttagtcccttgttgatttcatttctagactaccccaactttgcatgggaacaaaacaccttgttgttaatgttgcatcatagtcaattctttgaagaatcaccaaacatttagagagtgtttggtttgaagaatcaatccattctagatgaggtggtgcatcatgagttcattccacaaatttggtggaatgaactcattcctcatattattactaattattagcctatgatgaaataaatactgatggatcaactcattccattccacaaatcaaacaagaaagtgaggagtgagaagacgatagactacctcattcctcaaatcaaacacactattactaagcgaccatttaaaggactttatgttcttttcttatacattgggctttcaaattataacttataattaagttgttttagttttgtcctaagttaaacttatctcactttggacaagtttatagaaaaactgtatcaacatctacaatatcaaatggatgcactatcgaaatatatttcacggtgtctctggtgaatcttattcgatgttgtatgtttgtgtattttttctataaacttggtcaaagcttgagaagtttgactttgggcgaagctaaaacaagttgctgtttggaatgaagggagtagtcatttaaggtttttgtactccaggttcttcagtgcctatttcagtttaccattgttacagaactacaagatctgttacgttaactaatgtaatcagctttgtgttgtatgcttttcagtggtattgtcataatggtcattgttctgttacattggaactaatctaatctgcacttgtacttcaaaggttagctgttttggaggccttccaaagg

SEQ ID NO: 8330 - DNA, 941 bp, Zea mays
  Intron number 1 from transcript GRMZM2G136412_T01 (locus G RMZM2G136412) derived from phytozome v7.0 (chr-ID 2; pos 6 3669341 to 63670281 reverse strand)
ttaacatcggcctcgaccccactctggatcgggaggtgagtgaagttgtcttcggttattgattgtttggtttgaccacttcatcagctgctcttacgatatcataattgatgcttgacagttcgttggaatttaatcatgatatcataattgatgcttggcagttcgttggaatttaatcatgatatcatagttgatgcttggcagttcgttggaattaagctgtgaagtaagatcaggattaaatcaactattgatcttcagtctatgtcttcttaaataaacattttcacctaggatttgttgcttcctaactaggcttctgcatgatttggataaagaataggcggagatgaccagaacattttgttaaccatcttattattggtttgtgccatagtttcacgttgtcgcatttttgtcatctgggatgcatcaaaggtctatttcttaaatctggtgggacgacgttattcctcatattagtactaactaactatgaggaatgagacggtgatgcatcaacttattctattacacaaaccaaacaaaaaaaatgaggagcgacaaaataatggaccaactcattactcaaaccaaacaccctataagagtatggacaaatgtattagatttaatggttcactaggccctctatggcagttttttaatgagtgggagcatgtcccgtttccttttgattattgatgagtttttgtttttgtagtagttaatgataattgtaattggctaacgagatatctttatttggatgtgatatatgcttgacctggaaacagcttaagtaacttgtctggagttctcttgaatgtttcttcatggtcggtcattatgagttatcctatgtatcgctgttggtgtggttctactggactcttatgttagaagagttgtttttttacaggaagaggaggacaagt

SEQ ID NO: 8331 - DNA, 997 bp, Zea mays
  Intron number 1 from transcript GRMZM5G808300_T01 (locus G RMZM5G808300) derived from phytozome v7.0 (chr-ID 8; pos 1 22904099 to 122905095 reverse strand)
atcacacacacacctaataacaacggatcatcatcagataataagtcagaactgaacaagacagtctagtgtctagactctagactcgtgcaggggccggggggaaataattcggcatgcatgaaatgagatcgatggcgcattggccacagtgcgtgctggtgagcagcatgtggaattgtgaatggatggatctggcatggccactgttgtccactggtaaacgagcacagagcagccttattcggtaaaagacatgaagaatcacggaaagatatggcactgaaacatgaacttggtgtggatacagtggactgtagccctctttatatgctttaattttgcttactactctacaagcggcagtcaatgtaaatctgaaggtgtttattaaagaaacagacgaattatattaatatgatgttggttaacaaaagattagctttagtggcgtttaatttatgagctctttgcattggatatttggattcaacacagcaatgtgtcagtactcagtatcaaattaccatacagtatataagtcctatatatccaagattagcaagagatactggagaaaattagaaaccagagggagctagaattaacggggacgatatagatagatgaggaacaaaatcaaaagccgccatgaaaaatcagattgagctgcatctctgggttccagtgtatctttccttgttctgcaggtagaatgaagcacatatacgacactaaaagaaaacgtgattacgtttccccaaaagacagaaggcactaactacactactccactgcacacataaaaacaagggagtgtgtggagcgcgtatgcgctagtacgtgttgaaataaaattgtggagtaaatgttaaaaaaaaaggagcaagagctggagaagaaactaaaatccgggcagctgctgcatgtagatgatggtagatccattaagaaccacttacaagcatcatcaaattgccggcccagctcagctcag

SEQ ID NO: 8332 - DNA, 917 bp, Zea mays
  Intron number 2 from transcript GRMZM2G169116_T01 (locus G RMZM2G169116) derived from phytozome v7.0 (chr-ID 8; pos 1 51016839 to 151017755)
gagcccaagggcgagtcaggccagaagcgtatccttccttctcatttcgctccccgtgcggtttctttctcttctcgttcttcttacgccgagaggtggatccattggatggattactggcggtcatgcgtctgctattgctgccttctgatttgaagtactggagtttgtgatttcgtcgctcccgttgctactcaactccatttttatcctcctatatagagctttcttttttcttgtaatctgtcgtttggaaaatgaaaccgtctttgaatctggattgcccttggatcacagtttgccagaacttatctgcagttcttttactccttttcttgagcgggctgtgtagaattctgatcaaaattttgatccattttaaatttaattatgacagttggcatcattgagcctttccattccatcatgttagcgtcgctattggcagtttagtaataatatgctattattaggtgcccttcattattggggtttgagagatggtgagggctgagccaactcccatttatttgacaggtgcaccaacaatacggtgcctgcactgaaggattcctgtatattggttaggttagcgtcgcacatttcagccctcaaatctagttcagttggagttccttgaccgcttttgcatttgtgaaacagaaactaactttttggtactttaatcaaatggcctatgtgtttttttacatctatccctttgatccatcgatgaaggacaattattagctgcataatatcagcatgatgctatgtctgttgatcactgtgctgtggttggctggccactcgtggtggcggacaatgacccttaaaagtatatattctgtttgtacaaaccttgacttttctatcatctagctattgaagaagcaatcgacagcttgaagactgat

SEQ ID NO: 8333 - DNA, 821 bp, Zea mays
  Intron number 1 from transcript GRMZM2G143392_T01 (locus G RMZM2G143392) derived from phytozome v7.0 (chr-ID 4; pos 1 7327100 to 17327920)
agctgaggctcgcttacgcggctccggcgattcaggtgccccccccccccctctgctctgttgtctctgctggattgtcttccgaattgcatttgctgtactgtccttgcccgtttttgatgctgtgttttttctttgcgtttagtttaacatgtgacaaattgggagacttagtccactcctttgttcgacatgttgatgatcaacagatacgagtacattaatccaaacaatgccatgaacctatctatgatcatgtgggcacatcaaaatgagttcagggccaattgatgggagcggctagtaattgcagctgcaggctatttatggtaaaaaaaatctagcatatcaagtgctaaagtccactgttaaaaatgtaggaacattgaataagaagcaactttgtacaagtcatgtctgttactgatttcctacttggaagacaacattttttttaccaaatcagcaggacgaattttgatctgtggggacaatcattggcaatttcagttttgcttcattgaattgttagagtattcctctatcataattggaagaaaaagaaataaagcaaaagttttaagcttctagaaggaaggatgatatttagtcattatataaggcaaacacaatcatgttccttatagcttctataagcccttttcttttcttgttgaaggctgctgcctttcgagcattgcttgtagtgtgagaaattccttaacagcatattataatgtagaacatcgcaatatttgttcacctttactatgtaatgtatgtcagagaaactttgaggcaactctggcatcagaagcact

SEQ ID NO: 8334 - DNA, 445 bp, Zea mays
  Intron number 2 from transcript GRMZM2G087196_T01 (locus G RMZM2G087196) derived from phytozome v7.0 (chr-ID 9; pos 1 0329548 to 10329992 reverse strand)
tcttctcctctgagagttaaggatcacatgtaagtctctatttcctcttgtgaagggttttcacttgttaatctttatgaaaagttagttccagccaatcaaccatttctacataaatcttctgaaggaattctctcattggatgggtttttcttactctacttccttctgcaaacagggccttaccttttcttggttctccatcctaatatcatgccatttcacacacattctgcctgttttgttaaaaaaacagatacaactgctgcaataagtttttgaatctgtatgttttattaatgtgtcttggaagaataagctgtaaacagcgggtccaaatctctattacttttgaaatgcaatcaatagttgaatgcttcttgagttacatattgtaccttactacctttcactgggcatgtaattgctgttatctgtttcaggt

SEQ ID NO: 8335 - DNA, 1028 bp, Zea mays
  Intron number 1 from transcript GRMZM2G040349_T01 (locus G RMZM2G040349) derived from phytozome v7.0 (chr-ID 2; pos 2 10791931 to 210792958 reverse strand)
actcgaaggggagaggacagaagagggagatacaggtacactgcccctgacccctcctcgattggtcagttctgttcttgagcgcactgccaccacagattggacggcttgtctgctctccgttcccggagtggcgtcgtgctcactctgctgggttgctttgccttatagtcttgctctgcggtttgatttgcttcatctttttttttcttcaatcttgtcactcctaaggtttcccccctctggttttcttgattccccgcttgggaatttgtgaagtttaacaggatttttttggctgagttcgcatgtttctgttcttggccatgcccatgctatgcttgcttggataagctttggcttcagcctagctcgcattgcacgatgcgttgttcctacttcctagaatccgatcgcaagtcctatgagctgaccactatttcgtggattgcccggggcgtgggctgctgatggtttcggcaatttgggtgggtgggaatctgcaatcccttttctattctagctaggattagatggcttgaatctaaattgtgcagactctggtgattataactgtctgataaagggtcatcttgagggtgcggatatgcatgttagaacttcaggggagtgtcgagtcaggcttatcagtgcctaaacttgttgatacgagctaaaagtttgctgaagcatctttcctgtgaggacctgacaactgacatgcacaaaattagtgggataaaatgctgatccactcttggtaaaaacaaaggttctctatagtgttttccagtgtccaaacatctgagatgggaaaaaataacttgccattgatgataatgagataatccactgaaagcagataccacttggcactctgcctggaatagatgtcaatctgtaactgatagagtagggttccgtcaattacccttgttctttagcttgttactgtgaattcagctaattcaatgcgggctacttgccacaaaggttaatttttaggtaccagatcatctgatttctca

SEQ ID NO: 8336 - DNA, 988 bp, Zea mays
  Intron number 1 from transcript GRMZM2G175661_T01 (locus G RMZM2G175661) derived from phytozome v7.0 (chr-ID 8; pos 1 51740471 to 151741458 reverse strand)
cggtacgggtgctggctaccccgtgcggagctccgtttttgtgtttttgtccatcttcccctgtcgcttcctgttggatggggtacttgacccgtggtggatttgggcttggatgtgtgcgttggcgtgggcgaattccggtggtatctgggtttagggttgcggaattgtcgccttcggtttgggtgtacctggtgggatagggattggaccgggcaaacgttgttaggatctgaaactgggtatgagttcatacggcggtgtagaagctttcgacgaattggcgttggatggtatgggggacagttttagctgtgttattggttgattagctatgctactacgacaattatttgcactttgtccttccaatggtgacaaaaggagatataatctgaggaaaacatgagggagaaaacttctgtttacttgatgctacagtggaaattttgattcataccttcgtatgttgtcttgtttgcgtaacttctatggtaacactaccatccttttcctctcatttgaacatggaaactatggtaacttctatgatgtttgcattagtcatgtatctcttagttttcacttttcgtgaagcagcttataggggttgcaacctttagccttcttgtagattttaaaatatgaaaatgaacttctatcatcactttttgttacaaggagtctagctgacaagcaaatgatttcagcttttcctaaaatgccgccaaaagtagaaacaccgtttttcgttctgtaactgcccggccgtttcttcatgagcctgtcgtatatggcctattcacggcatcaacattgtttctgtttattatgtaacccattacatatttacccttatttttggaaataatgccaacactttacaaattgttcttatattagtcatctttccttgaaatgcgtctataggtttcatttcttttgaattgcaggtcatttttccagcactcgatatccgagtaaagaa

SEQ ID NO: 8337 - DNA, 374 bp, Zea mays
  Intron number 3 from transcript GRMZM2G011031_T01 (locus G RMZM2G011031) derived from phytozome v7.0 (chr-ID 8; pos 1 4074892 to 14075265 reverse strand)
catttttctcattgcctacttcaacagcagcccaggtcggttaaagattctcggttagacttgctcactcatttgcctaattaatgtttggaagtttcttcttggcgatagaacatggcttgtgttgcgtgcaaatcaaactcttcattgtagggtggcgaaagagtttgcgagtttttaaataaaattaatcaattactttgtagtcagtaactcagtacattgtttgagagtgtggacacagcaaccatgcacaattgctagttgtttgtcaaaaagtaacaatgtgcaatcagtgttttcttgtacttcttgtttgactcgttctttaatggccaggtgtaactgttacgagcaaagagaccgtgaccagg

SEQ ID NO: 8338 - DNA, 738 bp, Zea mays
  Intron number 3 from transcript GRMZM2G156110_T01 (locus G RMZM2G156110) derived from phytozome v7.0 (chr-ID 2; pos 2 33256463 to 233257200)
gcgctcatcaagaagctgcgcaaggcggtcagtttccaaccgcttagttttcattaccactttttgttagcgtgttccgatcaagataagtgcgtggatcgttatgctgtcatgatttacccgtacgatatgaggtgtgatcttggtgtcaaaattttgatcaaatctcagcgcctattgttgtttagtgtaaatatcgtcttgaaagaagatgcaattaatcaaccagaagactgtttacttgaatgcttggcaaggttgctagtatgagtgttgcaattacaaatgtcgtagcaaggttgctagtattgactgtagcaattacaaatgttgaatcttgttatctatgtctagaaggagaatttgttgtattttgtagagctcctatatcatttgttctctcttttctctagacaaataaggttgttggtttagaaattgcttactgaatggtgcatacttctccattttctttgttatgtagtctgctgttttgtgacctgccttgtatcaatcataccattgttgtgtctgccgaatactattgggatattgataaatcaaagtttctatcctgaatgtacagtatgctagctgcagtgccttctgttctgtgccaggtagatgcggtcaatgcaagattgtgtttatcagttatcatctgtggaagtttgttttcttatacttgttactcaatttcctcacgagctatatcccactgtcctgaacagaaaaaag

SEQ ID NO: 8339 - DNA, 699 bp, Zea mays
  Intron number 1 from transcript GRMZM5G800973_T02 (locus G RMZM5G800973) derived from phytozome v7.0 (chr-ID 9; pos 1 7068213 to 17068911 reverse strand)
aagtatgtgttcttttcaattatacactactccctctattttttataatgttcattacaatttggagaagtccttagaagtgtactttaaccatctgacaataatcagtcattgttacaaaaacaatctgtatttagaagatgttcatgatgtgaacctagcgatacagattttacctacaaagcatgcacatattttgcagataattgttggccagactttagtttgactttattgaatcctaatgtgacattctatatgcagtgatgtacatttcttgccttcaatttatttatctagttctctgatttttttatattaacactttcagtaatatttggaatggtcataagtcaaactagacttccctagcgacaacgattcaacgaataagaaccaggccagcagttatgtagtgcagagatctactcctagtcccggtgagtttgattagaaatcatgaatgttcagtacctgactcagtttttattagcagtgtagtgagaccgagagcatgaggcttcagtacctgtctactaacatcagatgcattcgttgatgtcttgattagttgtagcaggttaatctctatatctatgtcacaacatcatcaacttcactcttcacttgatgtgttaatgttacctgtaccgatcttctacagggaacagcttccagtgcctcttgtaccgatcatcg

SEQ ID NO: 8340 - DNA, 530 bp, Zea mays
  Intron number 1 from transcript AC190858.3_FGT001 (locus A C190858.3_FG001) derived from phytozome v7.0 (chr-ID 2; po s 58614750 to 58615279 reverse strand)
gctgctccacaggtctttttctttgccttccatctgagattttctattagctgttgtatacactacttatccccgcagccgctcttcaatgcttcttatgtttatttatgataacatgtcgtatcttgtatctctagtttcatctagttatttatttaacttcatttatgaattgtatgtccaatccttagaaatgccaccagtggctaattgtgtaaaagatgatcagtagtagtaataataaaatgtttcctttggaaccaccaaatgggcatgacattttaccataacttgggttgcacatggccacactaaatcacaaatcagaactgttgtcagtttctgaaaggatggtgaaggtccaatcatgtgcatatttttggttttctcttgttaggatgaagagatctggattcaatacttgatttttcatttgtttttaaatatttgttaattgttatggtgtatgtcaatggaatttgggcattggttgctttgactgtttcttggattgcagataaactacgctt

SEQ ID NO: 8341 - DNA, 922 bp, Zea mays
  Intron number 1 from transcript GRMZM2G016106_T02 (locus G RMZM2G016106) derived from phytozome v7.0 (chr-ID 2; pos 2 09506756 to 209507677)
aggatcctaccctcactgactggcctgaaagtagctaacataacttattaattcagtttcctttgtgtttaatggatcacccttatttggtttgcttgtgtctcaactcctaacaatttgcagacgactaccggctgttctgtggagatctaggcaacgaagttaatgatgatgttctatccaaagcattctcacggtttccatccttcaacatggcaagggtaaatatccctttttatccaaaaggcttatttgtagcaaaacttgttcaacaatccaattattgttatgcaatacctattgtcaaattcttttaggggctgtttggatccttccattttgtagaaatgagaaatccaaatcaaaataacactgatttctgcaaattttagcagtttacagaacatcagcgatgcacatggtgaattagtgatactgttttctgtataaaattttgtacgaattggagataaccagcagttagaagatatttcttgtggatcctttcataataatgtgctacttcatgctagctagttctgagaattgcattaacggcagtttgttaatgatttatcatatgaagatagcaaaaaccaaaacaaaagtaacagggttcgtataagcttatgcatccctgaagaaatttgtagtaacattctacactttgttggacttgttctctgcttccttcgatgcttataaatcttttcgcctaaagaagcataaactacctgattgcgagaggagttaagatattgactcacaaagaaatccatatgctgatctctaagtagcgaggcttatgtcagtcattgtgtgcagcatttggcatgcatttcttgattttatacattcttaatttgcctttgcactctttatttcaggttgttagagataagaggactggcaagactaaagg

SEQ ID NO: 8342 - DNA, 1012 bp, Zea mays
  Intron number 2 from transcript GRMZM5G839749_T01 (locus G RMZM5G839749) derived from phytozome v7.0 (chr-ID 2; pos 9 9641879 to 99642890 reverse strand)
attagacttggttctggtgttctctagaatagcacgtgagcgtatacggtggcattaacaatgattctcaacttaaactatgaagctataagaaaagatctcaaataaaatatagaaagatatgcattaagtaatggtagtatttctttttcagaactgcattgccttattatgaaaaccaaatagcagcaacaaactactatacgaaggccatcagtgtatttgaatgatctcacattcagatattcagattataatctgcacccatcttcccctaatttaaccagttctacaatgaggtctacgcaaaatgttgcattgatcttccattcatatattctctgtctgttgattttgaacctttatattctccaccgatcttccagtgattccactagttttacaattagatctatgcataatgttgcattgctatatatgcaaactataagtcattgaacctatagaagaactcgtcttctatggaagcttatttcattttgaatgtgtatttcatggagcgccccatatggtgctaaaggtatgtttgtcacatagctaactttcatcattcattctctctatatttgataatttcattgaccttgctattttctcacaggtcaagtacgctacttaacctggtgaaaatgtagttctgagaggaaaaggtaacttattgtgcgcacttttgttctattttgtcggtgcaatatctctttaattacagattgtaacactgctattatgcgtctatggaacgattagtccaaacgttttctggaacatagcgatggtagagattattttcgtccgaggaactaacaaaattatgaatcgatcgagcaatcaaattctcctacgtgtgtgttatgacttggaaatttatctggcatctaggtgaactgccaaatgtgaattgaacacattgtggggacttgaatgtttacctaaattgtgatgtatctatcttgcaggaatcaagaaaaaaactcaccataccacgaagatc

SEQ ID NO: 8343 - DNA, 763 bp, Zea mays
  Intron number 3 from transcript GRMZM2G481237_T01 (locus G RMZM2G481237) derived from phytozome v7.0 (chr-ID 2; pos 9 8367194 to 98367956)
cactaagacaagattctgcgcccaccaaggtcttggtctgcttcggttgctgccgtttctcttatgatgaatagatttttgtcttttcctgatggttaactagtgtggattgatacttagttcctagtgccagttaactatggcctagactgcaactggctccaagttttgatgaatccaaattatttttaactcccatgtggtttaatttgacaaaaagcaaacaacaccaactaattgttctgttgttttggctgagtgagagtgcgacactgcaaggcccatttcgagcagctgttcaaggagatcgggagttgcaacaagagcttccaatcacaatcatgtactctttcattcagtatcaaaccattgtcatgaaaataaaagttttgtgtttctgcgaaactatatagtgatgtgctcgtgatttacttctttcagccgcaaagaatagtccagaaaagttggcccctgagttatggatctgtacatgcatcccatattttttttacctacaaatctaccattatgactttttcatctttacgtactatgttaaattccaggataatttgaagcacatggatggtctggctactttgagaccgacaatattcgcaagtgttccccagttatataacagagtttatactgcataataaaactataccaataacttctatgtttcgtattaattcttgaagtgatatgatttgtttatagttctaactactagttgcttattggatgtgtaggattacaa

SEQ ID NO: 8344 - DNA, 991 bp, Zea mays
  Intron number 1 from transcript GRMZM2G147226_T01 (locus G RMZM2G147226) derived from phytozome v7.0 (chr-ID 8; pos 1 60595453 to 160596443)
ggcgcccctcgaattcggcaccggctccgccgaaggtacggcatctctcgcgctccgctcgctctattcctgctctgctctggttttgatctagctcgagctcgccggcgctgccgcgttggcgctgtgttgtgtagttcgccgcctgctctgggatttaggaaccgctgccgctgccgctgccgctgcgcctggtgtatgtctgtttttgtctgggatgttcgtgcgtgtgaattttctcctgactcgttttccccccttgtttgagccgcgctgggacggtttcagccggaatccggtcggggcctcgaatgattttttcgcttgtttgattaggcggcagcatgtttctctgttttctctctctctgggtttcctggtgatgttgtgtgcacgcgcacacctgctacacacctgctgcgcgtttcctgggcgagattctgtagctgcaaggttttgctctgccgtcgacgacgatcatgccatgtgctgctcgggtaggcgggctattactcagtctctgcttctgctcctccgtctgctgatgctctccatactccaggacagaactccaggtctgtcatgaggagaggcagttctcatttacggcttgcgtggcccgtcatcctttctggggctgcttttactgctttatcgaaaaggctggagtttttgttgcccttcctttgcaaagacagagtaggactctagctactagtgtcggctatcaatgcctggttgttggtgagttgcgaatgggtttttatttggcttccaggcgcatctgtggtttaactttggttatgttttttaatgggttccttttcagaacctgaatattcggtgcagtcacaatgtctgaaaacaacatacaagagtatctattttgccactttattttccatgattattccatcttcggcacattatttcagcatgaagtgatttatggactgtacttaatattgattttcaagccagggtgcgtata

SEQ ID NO: 8345 - DNA, 832 bp, Zea mays
  Intron number 1 from transcript AC197427.3_FGT003 (locus A C197427.3_FG003) derived from phytozome v7.0 (chr-ID 4; po s 206165680 to 206166511)
cctgaggtggagaaatacttcatgtaagagtttatttccttaaatttttcatatgtgagttagtttatgtcctcaaatatctcatgtcatgcaataatatttgacagcgagtttgatgaacaaaacttgaggtttctcggtaggccaatagcgagagacctaaacaaacgacataatttcattatgtagctttgggaccgtgtaagtcttagttatgtggctcagatacctaatttcattattttagttaactgcattacacactttgctaatgctttgtggcataattgacagtttggggaggaaatgaatatgaatgatgacttatgtcagctatctattagaagagtaactgccaaaagctatggacattatgacgtcaatggataccgcttttgttcaagcatatttgaatctagtcatcctatggctaccactcaaaatagcggagtcgttactagcgcaaccgattcggaaggacacgaagactgctattacgaaaagataaaaaatataatagagattacatttgctggaaataagcctttagcgctagttttcttcgagtgtaaatggtatgatccaaagtattataggaccgaatttgggatgacacaggtcaaacctgataaattgcttcaagcgcacgacacatatatccttgcccatcaagtagaggacaaatagatcctgattttgacgatatataacaagtaaagtaatatgtttcttcatttgtttttatttttgaagtattatgtcatttatattttttattcatttgttattatttaaacattgcactaatgaaattattctattttgatgcagg

SEQ ID NO: 8346 - DNA, 706 bp, Zea mays
  Intron number 1 from transcript GRMZM2G377265_T01 (locus G RMZM2G377265) derived from phytozome v7.0 (chr-ID 8; pos 8 4635658 to 84636363)
taccaggtagtgtaagtagccctcgcacgaatggtgaaaagggtctctttcgaaatcagaatgcggggttcactgcacttgcaagtcctgtgaggagagaaatcggaaatatgcatgtaagcgacccttgattggtgtgctttgttcttttttctttcccatagaatttcactatttacctcaccatagataattagttaaaacttagaaacttacaataactccataaacactgatcttctctatctgaatgaaaatgtctccacagatagttataactgaaaaaagacattcacaaacattatcatgtctatgtaatgaaatgcctccgcagcaactgctcttcaagctaacaccatctgctatgtttttctggataataatcgagtttcatgttctccagatcatcgacaaggtccttctgtgttgatgacaatgacttggaagatggtaaggcctcaaaaaagggagagttctgcacagtcactcaggctcccaaagattcagaatcaggctctcttatctggtctggcttactgcatatcatcatgcaacatgatcttagtcaacaaatttgttctatctagctatggtttgagtgctccagtatttttgatgctttaccagacatactactagtgctgactatttactttcgaaattttcatgcaatgcagttgtcttccttctttaaagcattgtttcc

SEQ ID NO: 8347 - DNA, 607 bp, Zea mays
  Intron number 2 from transcript GRMZM2G377265_T01 (locus G RMZM2G377265) derived from phytozome v7.0 (chr-ID 8; pos 8 4636516 to 84637122)
tttaggtatgtacttcagcatcagtttggtgtatcaagtagagaagttcttcctagcttcttttctagcggttaaatatgattaatttcttcaggagacattttgtcttttccattttagactcataatgtgcttaagtttactctcttcgggataatgaacatgaatgcaaatctagtattttctcaccttccagtctacaaatacagattacataagtactaatgatggttttgagaatcagtattgaagtttgatatattatgggttaaaatggttaggctatttctctttttaaaaaataccgatgaatttaatttggctgacagctatttgattttaaatttttaaaattgtgttgcttgtttcatgaatctgctctatttagggtcatttagtgccttgtacaaagatgaacctgaatttttttggtcgttttgttgaacattttctattaatattttccatattagttgtgaacgattctcagtttctcactcaaccttgtacttgtagcaaggatgttcggactgaaattggaagccttttataaacttatcactttattcctaaatattttctttacttttcagtttgaagtacatta

SEQ ID NO: 8348 - DNA, 812 bp, Zea mays
  Intron number 1 from transcript GRMZM2G128518_T01 (locus G RMZM2G128518) derived from phytozome v7.0 (chr-ID 8; pos 6 891468 to 6892279)
gctgctcctctcgtctctcctcccacccgtccaaggtgaggagggtttctttccgtgcgccgaggtcttggcccgtcggtcgtttacttgcagtttattacctcgtttcttcttcttgggattttgtggtttgtccgcggcagttgatctgcgattcgcttgcattcggggtcggttcttgcgaaacctagcttgaccgcaggtaggtagctctgttcttgttaattttgatttgaagggcatcacatcagtcaccagagacctatttgtttctttggttgatgatgttttttccttcagagatcctatgccagatttctcagtgaaacactgtcttctcccgttgtcgagatttcaggaaccagtcctagttctatatgtttcacccataaaactccattctttcccgtcgctaaattttttttcaccacatttcacgctactgcctcaagatctgtttggattaggttactgaaaccctcacgaaaaaacggcggaaatataaagaaacacgagaacgtgtttcgttttttccgtatagaaggcaacaccttttcggcaccaagcatttcctttgcttcttttccaattggaggtcaatgccgtaacgaaagaaggaaagctcgtttgcatccttttttgcgggccatcgcggtgttgataaggaaaaggcgattgccccaccagtcctgtttggatttcctccgttgttttgatttttttgtacgcgcattggttcctccacgcttgctcgctctattgtagtcatttccttccaatttagcggactcaatttctcctgatcgtcaggc

SEQ ID NO: 8349 - DNA, 888 bp, Zea mays
  Intron number 3 from transcript GRMZM2G063693_T01 (locus G RMZM2G063693) derived from phytozome v7.0 (chr-ID 9; pos 1 000709 to 1001596)
tcatcaacggcctccttggacccaagaccataccggtatatatgcatgccattggcatctctcccagtctccccctcaacaggcaacacctacaccctcagcgacatcttgaaatgcttctactgtctttccgtagatcatccgcggtgttcgtttaggattatttggtttcgtagaataccataccatggggaaaaaagttctgtggcactgaaacatcaagaattgtaaaataccacccaaacattattgtgttttatttactgatatacatattttgatttcgggacaaccgatccagatcttacatatgatggtcgtgcaaaacaatgttttacacggtagattatactgtttatagattagaatttaaaataagaagtgagatacgaggtaagatagaagagctaccgaagaaatcctcaagaatggaaaatggatgcactaccatatatcaggaatggatgcagtaccatatatcgagtgcaactaacgattatacaatattattaaatatcatgaaagcataattgggttaacttgtgtatgtaacggcgaaattttaaaaataccacaacaatgttccaatggcctcataaatcaatgaggaataatcctaaacaatatgatataaggattcggtgggatactgagatctgtacttaagtggggatgaaatgtgcatgcatgtccattctgaacactcactaaccacatataaaaccacgcctttcagttaccttttgaaacatataataataatgttggaaatcgtcttattatatatgcatattataacctataaatttgcatgtatcatttctgacgtcggctccttcgatgtcaatttcaggagaacgagaaggctccagctttcaagctccccat

SEQ ID NO: 8350 - DNA, 860 bp, Zea mays
  Intron number 2 from transcript GRMZM2G040970_T01 (locus G RMZM2G040970) derived from phytozome v7.0 (chr-ID 8; pos 1 73798579 to 173799438)
tgtgaggttcttcaacgtttctctgttgaaaaatagttgtgtctgtatactcttgtgcatcgccttgacatcctgctgaattaactttagtccattcctacgtcagcaaaaaaaaatatcagttttctgtatttgtagcaactataggtctgtctggtttccttaaccgctttttactaaagttcagacacataacctgtatcaatgtatatgctacataaggggcaaaatatagtttatgtaggatgccttttgcaagtactaattttcatatgggacacattcaaattgggtgtctgaaattatacaccaaacttttatcatcccgtgcagattaaaggtctgtctaatgtaaaggaggaagtttatggggcacttgactcatttgttgcatgggaactggagtttcccttgatagtagtaaagaaggcactgaagaaacttgaggacgaaaaggaatggaaacgaataattcaggtgttaaatggaacttcctagttttatgtcactacttggtctaacttattttcctacatattccgtacaattgtcatgaatttctagttaaagtttcgttctgtagtagtcgctagtcccctttcttggagaatgttactagtaatttcatcctttgacaagtcagttagctgctcccagttctagaagaatagaattagctgctctcttttaacagtaaactgtttttttttaagatagtggcaggagctctgtatttcaactcagaaagataaaccaattttcctttaccaatactacacctgtgatttagttgttcctttataataacaaactcttttttttctgaactgaaacaatgaccacatgatctaggtcattaa

SEQ ID NO: 8351 - DNA, 731 bp, Zea mays
  Intron number 1 from transcript GRMZM2G331932_T01 (locus G RMZM2G331932) derived from phytozome v7.0 (chr-ID 2; pos 8 1144589 to 81145319 reverse strand)
gcatcagaaggaaaagtaagtcgttttgtctcctgcttaactttgcaaccatataaatttggatatgctttctggttgtttttaagatcatcgaaacagaaagtgtccttggtcattttcttttgagacaacagacttcataacaaaagttagatctgctcttattttcctgaagtacccccctctttcattttgtaggatgctttatgatttggagaagtatttaaaacacattatatttagaattactacaaaattaatgttaagttaaaaggtatgtgaaatataaatatattcatacaacttcactacactaagtatgcataaaatttgacttcctaagatgctaatatgcccctgtaaaaggagatgaacttctaaccatctcagttttcaccatctcgcaagctctagaaacaagggcatttccattccaatacaaaatcttaggattttgatggtggctgaaaatcttaggattttgaattttggtgcatgtccttgcaggcatgtgttcttcctgcccccaggagatctttttgtggcaattatgccagagtcgtgaatcaaattttgcaaggcctgaccaatatgcatgtattaccctccttctcccactcctcgttctgtcagttttatctgtgttctagatatgcttatacctgaatggtattttttcttctgttttttctcaagttgtggatcaggttgcctctggagaattctaagcc

SEQ ID NO: 8352 - DNA, 766 bp, Zea mays
  Intron number 3 from transcript GRMZM2G098215_T01 (locus G RMZM2G098215) derived from phytozome v7.0 (chr-ID 4; pos 9 2792080 to 92792845)
attaccttttccagaacggggtaagataacatctattctccttgctttttctaagtaatataagcaacaatagtgtgtcaaatctaccttttctatgctatgtttttcaaaagcttaatgaattctatcatagaagcacatagaatatagaaatattgttgttcattaaatttcttcgtatactaaaatgagcactaaaataaattgaaaatatttgacgcaagctgcctcctggtggaatggaatcgtgaaaacccctgttagagaaacatacttgaaacgttcaaaacttggtgcactcatagtgcatccaaagattggacatgccgcaaaagttgagatgcaaattcggttctgaaaaaagttcatactaaaaagacaaatttgaggtacatgtgtactagaagacaaaattgctcatccttcacccaaatttagactggggtgacttgaaatcaacgtagtcgttggcgtattgctcctgttttataccctaaatcctatgtcttatacactaaaagcctggttttcgatttgtttttatatctgatctttatctttatcatcttatctgtagtaggtttggtactggcttgttctggcccgactcgtccttatgaatcaatttttgccaaagctatatttgtttttgtcattggtatattaagtgtggacaaccatttgttcaatcaacctgagtgacaagttcccattatcatcaaggtttatgtttaatactataaacgcattatttttgttttctaga

SEQ ID NO: 8353 - DNA, 1019 bp, Zea mays
  Intron number 1 from transcript GRMZM2G083572_T01 (locus G RMZM2G083572) derived from phytozome v7.0 (chr-ID 2; pos 2 36301818 to 236302836 reverse strand)
cgagagaggtaactcctggccagcttcgtcccaacgtaacggtgcttcgtgtccgccttcgttacttcctgttcccttcgattttgtctgtgtgctagctatgtgatgtttgactacttcttcggttttgtcttggtgccttcatttggaagtgaggggggcggggaacgtggggctgtgatccaggcagggtgccttgatttccaattccaagagagggggtggggaatgtgggactgtaattcagggtgccctgcggttaggttttgtgccaatttgatgtgatgcctttgagcatttgtgcccggtctagagtgaggttcagtatgttgttggttcatgttcttgttgttctagtaattgtttttactgcttgcggtgcccttgcttcgaacatgctaacttgctagggtttgaacagagatccagactattctggtttgttcaaaggttgcgggctccaattaattactgaccggtaggaaatgtagagatccaaactattcttctttcttctttcttacttttatgtggtagtcatgtgatgttctagcagttcctggttttgatttggtgccttagtttgcaagattggaagaggcggggaatgtgacactgtaatttagagtagcttttggtttgcttctgtgtccattcagttcaatagtgaggttcagcaaattgttggttcctgttcttgtggttatactagttgttttacacttctataccgtttcccgtgctcctgattccaatttgcttacttgctatggtttgaatagagatcagaactattttttgtctgtacaaaggttgcatgcaggcttaccaattattgagcgctaggaaatttggagaacctgagcgctgcaatgctttcttgtttcttaattggcattcttcgctatacacagtgtatcctaaattcctaatttagtcgtttgcttgaagtccgaactaaacatttcgacccttgtccttcaggtgtgcagattagaaccgttcacagcacacaactg

SEQ ID NO: 8354 - DNA, 488 bp, Zea mays
  Intron number 1 from transcript GRMZM2G372093_T01 (locus G RMZM2G372093) derived from phytozome v7.0 (chr-ID 2; pos 2 25811904 to 225812391)
gtccaataaactccctggatcagaatacaatgtatgttccaagacaattcaattattttgctaataaaatagagtacttgaccttgatcagaatgctgtaaataaacagctacctagaatgtgcttattgaacagctacctgcattttctttaattagattagatgacatcatatatgtatctcattaattgtgatattcaactgacaagcttgtattttctgcacctatgttagcaaaatcaatagactttgattattcatgattcggtatgatgaaatgaactgttcgactaaactttgtagattactgatgaaggtggaagagattttgacacatccgtagaaatgaagttctactaatttcgcttacatacataggcatatgacttgtgcttgttttctacttgaacttaggtagtagtcgtggtccgttctcgataatactgcttgctttttttacacagccgatgttaatgacacaggttgt

SEQ ID NO: 8355 - DNA, 564 bp, Zea mays
  Intron number 1 from transcript GRMZM2G126190_T02 (locus G RMZM2G126190) derived from phytozome v7.0 (chr-ID 4; pos 2 14239354 to 214239917)
gaatctttctccattacgattttcgtggcgtcgaggttagtctgaagcacgcagttcaacccattcttgcgcacagtagatcagatccgatttgttactgcggcattccgattgctgagctctggttgccgattagttatcaacataagccgcggccaagcagttcttacggggtcacaagaagaagatgaacagtttgtccatcttgcctcgcaaggataaccgcccgctagtgcgtttgtatttgtttgatttctgaaatattcgatttggagtgtcattaactgccctcgtaacgtgttttgactgcagaaactgtgcctgttctgtagatttagatgaatcacagtgttgagacaagattcatctgaatccttttgttaaattagaaaatagagatgatccaaggtcctgtctcagtggatagtggtgtagtgtgtttttgccctgtttcctttgctgaaaatgcagctaataccaaacttgctgtttcctattgagatagatattctgttacttatcctttgtctcctcgtgtttttgttccagcatcatcagtaacaa

SEQ ID NO: 8356 - DNA, 993 bp, Zea mays
  Intron number 1 from transcript GRMZM2G349810_T01 (locus G RMZM2G349810) derived from phytozome v7.0 (chr-ID 8; pos 3 2858876 to 32859868 reverse strand)
acgccaaggccagtcacgtcgaattggcagtataggttcttgatggaatgccccacaggccacaggaacgtggagctgctggcacgcggtcctgaggttcacacgctctatgccaagctcggactccatgccatgcccttcactgccttcgtgctcgtgtcattgtacacgcatgccaatggatcgacgacaagatgtgggtgcagcacctgctagatccttttcatggatctggtcgtcgcgaacacatccacatgacaccatcttctccatatactttggtaggcttcgaccaccccctccaaatatgtcataatatacaatgcgtttgaggctgcttctgacctcatgcttgcctacgaggttcagtgctctaaacaaattggctttcctctgctatccctacctcttgtttgatgaattgtgtcgttcatgttgttgcttgttgttgcactatgagggcatgtcctatgcacatcaaaatagtgagatgcctaagtttttgtgctgcctgatgagatctagccaaagaagaaatttagaggcaagtgtataaatcagtatgtgtgagtgtaacattgtaatgcaatttagactaaatgtaaaaaccactctttctctagataggttattatgaactatatgcactttaaaagttaattttgttttcctgtacaaaacaagtgttgctgttcgggcaaaggaatattattttgaagtggagataggggaatcttggtagtttcatctcatgcaatttgggatttgttttagggggtcgaggataaagcaagtattcttgtgctaagagttttggcatattgttaggtgctacttgtggtgctttatgatcaacttggggtttgacagtcattttgggggctcttttttttattttgttggtttcatttgtattctaatcaacttcaagaattgtgatgatttaatgttattgattttttaggatcttggagtaatctggttggtctacgt

SEQ ID NO: 8357 - DNA, 1030 bp, Zea mays
  Intron number 4 from transcript GRMZM2G136486_T01 (locus G RMZM2G136486) derived from phytozome v7.0 (chr-ID 2; pos 2 3316511 to 23317540)
gagaaatcaaagttggcctcacgttcactccagaggtaaaccatctcacgtagtcactcacatccatgtacacacatgtacaaagctggattcaaagatgtaagaccttatccagcaggttatctataggctttgtttgggagcaataataaggctatcttcagcggatctattatcatgtcttctatttaaaattttatttgtaaatagtgttaaacaatgttatatacaacgtcgcgtccctattttacacgatataccgaagacagtttaatggagggaactgaggggttagaatcccttgttattttaaataggccctgtttgtcacagcttattttcagcttcttcacaaatttaagcagacgttctgccaaacagacagtttctgcagcagcttatcagttcagctgcttctcaaaatgaactaaaaacagccaacaagcagaagctgctttttaccaacttatcagataagctgctttttcaacaagcaacagctgtgccaaacagggccatagagagattctagcctcctcaatttcttctattatatttgctcccaaacaagcccacataattagccaaaacactgttttcatgagatacaggatgtgtatattacaccgagaagtctctataaaagacgcttttatttgtgatttagaatgtaaaggttcgttctcatcaagccagggaaaaaaaacgctcaaacgcaagttttccagattgccttttgctaaagatttgtcgcgatagcagccgcaaggtgtgtggatggatgttcgtgttccttttgcctccttccttttgtttttccttatctagttttgtgcccgtggcaaacgatatacactgtactttgcgatagtgggtctcttatctctctctcttttctgtcgcctttccgtcccatgtcactgaagtactaggagctgggttctgttctgaatctatcttgctacagcctgctgaaatgcgccttgtgtgagcaggaccagggcttctgaggaataacttggcgtgtggc

SEQ ID NO: 8358 - DNA, 726 bp, Zea mays
  Intron number 1 from transcript GRMZM5G804033_T01 (locus G RMZM5G804033) derived from phytozome v7.0 (chr-ID 8; pos 1 67752223 to 167752948)
gatacaccgaggtgtgttgcgtcctcagcctctccacccgcacccccttcgttagcgtagtgatgacgcctcactaatggtactctattcttcaaactcattggctcattgtgttggtttgtatatgccattcaattaatgtaggttgtgcttagcccaattcatgttgttaacctatgtcctttagtgttgtggtcggctcactcgtttgtttttattttgcttgatctgtatttttaactatatatgacacatgttttctaaacgtttgctcccacagaaaatgaggaccactcggaaacgtcgctcactctggctgaggtaatggaaaatcactaggcatccaaaaccagcactttcaatctttagaaaatagcactggttattagagtcatttttttgaccaatggacttatcctttgattcagtcagtatttttccctaagaaacaaatcaaccatgtggcacctgaaccactatcagagattgcagaggagcacgatggtttagagagagttttagtgcctatgcaggggattgtggataatgggaaaagtacttcagagctattgactggctctgtgtcattgaggtcagctgaggtggggatggcaagcatgatgtgtcttagttttttccttttttgcaagtttttcagaaaaataatttcaattttcctatacatttttaggtggctagatcacctgttggccgaactgtgaagtg

SEQ ID NO: 8359 - DNA, 964 bp, Zea mays
  Intron number 2 from transcript GRMZM5G804033_T01 (locus G RMZM5G804033) derived from phytozome v7.0 (chr-ID 8; pos 1 67752946 to 167753909)
gaagtgtgaggagtttctgaacaggacctgctgtatgtaatatatgcatattgttcgatctacattttatatcttgtgcaatgccgatggatattaaaatgtcggttgtatttatagcctatgttaagttagtgtcaaccccaagaaggattcaatttttctttccatcttctgatctggctttccgtatcgagctgacgatgtgaaatgctaacagtagaagcttggctaactatgtcgtgtgggaattagatttaagttcttgaatgttacattattttgtgaatttttatgttggacaaattatatagtaagggtgtcaagaaaatcatgcaaagaatggaactttacgacttaccaccctatgtcccaaattatagctcattcttaggaataagaacttaaaacgcaagataacatagtcaatctgaataaaatgagccacagaacagctgcatgtcgcacttgcatgtataggagtacatgttacatatttttagatttcataaatataaatgaaatgtctagaaaggagattaagtttgcaaaaggtttaatacatgcgaccatgcaggtattacatatcaattgaattgaatgttgtatcaggaaagtatacatatgtagttgatgttaaagtagtagagaacatatttcaaatttgcacaacatgcaattttgaggatttgtccgcttctcgttcatattagagtttgaagcataaaatttacataggaatctgtagaattgaaagtggtttcttaatgtaagaacatcagattaatcacaagagatagggtagggaagttagaattgaagcataaaattcacatggaaaggctctaatgcattgaatcaaacatgctgtgtgcatgaatgtacgagtgtagtcgtgcaacaatggtagtcaccttgatgcagtcccgtgattgatcttgcttggacgatttaggtcttgacttat

SEQ ID NO: 8360 - DNA, 1065 bp, Zea mays
  Intron number 1 from transcript GRMZM2G114220_T02 (locus G RMZM2G114220) derived from phytozome v7.0 (chr-ID 2; pos 1 5989255 to 15990319 reverse strand)
ggagctgaaatccaagattccaagctcttctgtcagtaaggaaccctaacttgcttggggatggatctgaggggagtttccctctagtcatttgctagtgattccttcgctatcccatccatccatgtttgcggttccgtgcgattagtggtttgctcttccgtgcacgaaagattgatcccggggcccaagtggttgctccacgcacgcaacgccactacgccaggtcatcgtcccagttgtttggcaaacttaagtttggggcgtggccttttgtagtcacgcacctcgcggattgaatcaaacatcacgaactagctatcactgccaaaaaatgcagatattctgaacggcacccgtcatatatgttctggcttgactaggttcggaatttgaatgcagattttctgaacgatacacgtcataactgttctggtgtgactaggtttggatttttgttttatgctattaatttgttccaataatggtggcttcaggtaaacaattagtgtcaaattgtcaatgcatcccagagaggttctaggttttggtgacttgtccactgcattatcccaataccagcatcgctgttgccgttctggttttaacaagaaaatttttgagctagctcatgagttgagttttgtgggagaaaatagtgaaaacggtgatttttgtaccacatctgtgttggttttcctatcaaatttcttctttgcgagaaaaaacagtgattgggtatctggtggtgtgttttagtaattcactattctttacctgcatctcagtttcatttgcatctggaatttgcctactagtgcatacggtgacaacagtaatatatgttctaatgttcatggtcacactgcagtgaagctttcatcatttgtgatttatcatttatgcaacttttgcattgtgtttgattattgatcacggcaccttttcactgtgtatttacatcaatggctgtttcttttcaagtctagcagctgtgctcacgcaacttcgtgttatttgttcatagcaggttgagggaagttgaagcaaaagtctaagcaaaaa

SEQ ID NO: 8361 - DNA, 610 bp, Zea mays
  Intron number 4 from transcript AC212404.3_FGT006 (locus A C212404.3_FG006) derived from phytozome v7.0 (chr-ID 2; po s 169816320 to 169816929 reverse strand)
gttcttcagttggtaattgaaacatttgttctaatatccaaagttgttccttgaaacttcgagggtgtctagtttttcctactgaaaatatgttccatgtggcccctaaaagaagattgttctagctgttgggttgatggtgcaaatgcttattcatgacattttttgtgactagttattttaacatttaatttattatttgatattcggtttcactgtacgtgctgtcctgtcatcctgtgatgtgaaggcaactaagtttgtcaggacacaaaaatgctaggggtaaggaccaagatcttctgtattagttaaatttggtttctcaattagttgtgctaatttggttcctcatttagttgtgctaatttggttcctcaattagttgtgctctgtcacatttctatcgttcttccagaaagttttaaggaggttgttcttgagatattcatgtttataaactcaaattgttagtggccaaattttattctcagagtggttcatctgacaagatgtgagatttaagcatgcactttcacgtgtctaatgatctaacaatatggttatctgatcagggtctcagtggtcaaccattgtcaggtcctgatat

SEQ ID NO: 8362 - DNA, 455 bp, Zea mays
  Intron number 2 from transcript GRMZM2G515800_T01 (locus G RMZM2G515800) derived from phytozome v7.0 (chr-ID 8; pos 1 67675394 to 167675848 reverse strand)
gttttgtgggaaatactgtaaagaggtaacacttatttaacttagatgatgttgaaagttgcaagatgctttagtgaccatagtccattgtgttttgtcatacctgcagaaattgtaatttgcgtgaccattcctcgtcatagtcttatagatatagtggactcatatgtttgaatgcttaggacagcgtggttcacaaaatcaaaccttcctagcttagatttggttaacctcttggattgctagtttttcaatctcaaaattgtatgtcaatttttatgggtattaggttagaagtaattagcaccccatgcactagacaacatttatgttacttctttgtgtgcctaacatactctgcgtcctggttccaatttttttctcattcttctgtttcttcctattaatatgttttctaccttgctgctaatagatattcatagggctgcgtagtc

SEQ ID NO: 8363 - DNA, 1024 bp, Zea mays
  Intron number 1 from transcript GRMZM2G097878_T01 (locus G RMZM2G097878) derived from phytozome v7.0 (chr-ID 8; pos 2 2824951 to 22825974 reverse strand)
gcgtgcctcatccgcccgcccgcgatccccgggaggttagtttctcagctccgattttttgttttgtggtgccagctcgaaagattttcctttttgtgtgtggttccttccaggactagtgccagcttacctctcggggtgggcgggttttggtcgatttccttctcaaaaggcaagtcctatggacgaggattcatcgtcccttcgcgatcttgttgttgttgcttggcttggctgttattaaagtttctacctttgagccccagattggttttgcttgtggtgggcaagcgcatctatacacactcctcgcttttcgacgccatcgacgcgcaactccgtttgaggtttgcgttccgttcgtgctttcgatcgccagcaagtatcatcactcttcattttcgatagattagattgaaatagttttgatttgcgtgtcgattttacattggggtgaggcatgtctcaggcttttagaagccgcaatccccttttgactgaatgctacttttggataagaagacgtcctttgtttgtgcatttgttttcttcgcaagcatttactgctgcaattgctcactgtttgatgcggcgacccatggaaagtcgcaaggataaacctgacaacgatagatctattgtacgcagtctggcgattggtcaatcgcagacgtcgtgcttgggccggtcatcctcatgctgttgcagttcctcatgtttcaacgcgtactatatactatttgtcaaaaaccgtgcgtctgcaacccgtttcacacctgtttttttggggacgcccagtgacaatagaaactagaaagagtcaacagcccgcaattttgaattattggtgtctattattttgaatcgtgtattggatacttgctaccgttgaactagccatttttctagtgcaatgattgccaatatattagttgccgttgctcaacagattctgttaacaattttgcctccctattgctgtattttaggactcttgggaagccctccctgtacgtgactactg

SEQ ID NO: 8364 - DNA, 978 bp, Zea mays
  Intron number 1 from transcript AC226244.1_FGT009 (locus A C226244.1_FG009) derived from phytozome v7.0 (chr-ID 8; po s 173323900 to 173324877)
agactagtgttgaaatcatttggatattcgtatcgtcaagtcatagcttaagtgatatcattggataggtttttgagtcaaggatctcaaacatgttatgtgcgtcattcgatggtgcataactcactttcgaacttggttctagtatggagtagccaccatattatcgggtgcgacttcgtaatgccagacatatcatctagttaggatgccaccccacctatgttcaccgtacaatcatgtggtgactttgtgataccagacaaataggggtgaaaacagaaagaaacgaatagaaagtactctcttctatttccatattgcaaaggcatatcgtcaatgtgatatatggtcatccaaaaatagataaatacaacaaaatagactataaatgaaaaatgttaggccaaaaatagataccatatggcagcccaattacataacatacgacaaactaaatatttatacaaataataaaccctcatgccgtgacatgacatacataaacacaatcaaaattgaataacatgcacattacaagtcacaatgatagacataagccaaacttaataagtacgactcacaagtcacaagctcacatcatcatacacataagccaaactaaaaaaatcaaagatatagtacacatgataactactcataagtcacatatgagagacttacagtagtacaatgcatacatcacaatacaatattagaccatataagtctatcattccacaaataagtacataatacttcaaataatagacgaaacacacaagaccatgtgtgaacaacaagtccaccaacaacacatgtgaataaaaactctatgtgttaaaagcttctcccaggtcaccattttcattcattacatatggatcactttccacttcttcacgtttttagcacatgtggttatttataatcagttgcaaacgtaaacctatgttattattttaggttgttgaaaaa

SEQ ID NO: 8365 - DNA, 341 bp, Zea mays
  Intron number 3 from transcript GRMZM2G118599_T01 (locus G RMZM2G118599) derived from phytozome v7.0 (chr-ID 9; pos 5 8781517 to 58781857)
gggagcgacttcagttacaagtaatgcaacttcagttacaagtacttattgttaatgtgatggtcttaattttatggtcgctaccatggcttgcagtctcaggaacttttttgttgggaagccaattccttactgatctgagggacaacatttttgtttgcctgataaggtgatgaaggtggctggacaacacgattatgggtattttcttatcgaggtatgcttttcctttttttgataattgaatatgtttatggatatttgtttgtgaaaactgtggataatttttaaatatccactttacagtgatacaagacattgttctgccactgattacagta

SEQ ID NO: 8366 - DNA, 589 bp, Zea mays
  Intron number 2 from transcript GRMZM2G302365_T01 (locus G RMZM2G302365) derived from phytozome v7.0 (chr-ID 2; pos 1 63257408 to 163257996)
gagaggtacatgatagaaaattgcttgtttattcaaaacatattgatagtgcgtttttcttctgttgtaagatctttaagtctgctactagtagaagccagagtgcattagcaaatgatggatacaaaaattggaggcaaattagtttgaagcttagggaacatgaaaatagtgctgagcatattaatagcatgagcaagtggaatgagctcaaaacaagattgcaaaaagaggaaactattgacaaagaagtgtagaagcaaatcgataaggagaaagctcgcatgaggcaagttttattaagaataatagctgttgtgaaattccttggtaaacgcaacttggcttttaaagggactagtgagaagctttacacaaacagtaatggtaatttctatgcgtgtgttgagatgattacagagtttgacttagtaatgcaagaccatcttagacgtattaagaataaggagattcattatcattatctcagtcataaaattcaggatgagctggtatatcttttagcttctgatattattagttctatcataaaggttgttaaagaggccaaatatttctctattattct

SEQ ID NO: 8367 - DNA, 309 bp, Zea mays
  Intron number 1 from transcript GRMZM2G019876_T01 (locus G RMZM2G019876) derived from phytozome v7.0 (chr-ID 2; pos 1 8003979 to 18004287 reverse strand)
ctcgattcgctcaaatcctcaaagtccccggtaagtacagttgctgatctgcagttctgcactctccgatagaatggtcgaaacgacctatatgactctaatgtcccttatatcaaaaaagaataagaagaagaagaagaaaatgttttgctcttaatgggaataatagtgaaacagagaacgggacagcatttgtagtgttttcagaacacgggtgtactactaccattagtccatagaattttgatgttcagatgtttgttttgatgaaagctctttggcgtgttcttttgcaggctgtgatcaact

SEQ ID NO: 8368 - DNA, 1061 bp, Zea mays
  Intron number 1 from transcript AC234185.1_FGT007 (locus A C234185.1_FG007) derived from phytozome v7.0 (chr-ID 8; po s 72629970 to 72631030 reverse strand)
tggtggccgtcttcgccgtggtcgccgtagcgaaggtgagccgggtttgtgttcatccccccgcatacagcagttggccggcagggtggttcattaactgcgccgctgcccaagcgttctgtgggatgtatgtgcttagcgctggtgggatttggatggttttgaagctgcctacgggcccagcgtgatctcgctccgagtctaaggcaccatgttagctgaaaaagctgcactgacgttgatttaaggctctcgcagtcgcagacccacagatgtggatatgtggaataggagcaaatattttatttaattgcactaatcagaattcgaactttggctttgatagcattaagtttcatgtccgactgttccatttaaaagattaggctgatgaagagagatgtgcaattcacttgtattctaacaattaacaacaaaaaaacacgcgaggtagacatggttagttcgtgtacaagatatatgtgtccaggctatatatcaaatagtcactggttgccctttaaacaaccccaaataggtccccattattattcaattaactagtgacaatactgatgctgataacccaaataggctgccccattattcatgtagctgcagcatcagttaagctggagaatactttggtgacaacccaaatagatgcatcacagaatggtgattctgcaaattcaagtaattactaactggtgagaatactggtagactcagcggctgcaagcccagtactgaaacacctgttgtgcgagctctgcctcatgtaaacaaggcaatctgcattgaaattgcatttggctaactagtgttcttaagttgcctaggcgagcaagtgcactagcgcctaggcggcgcctaggtgggtaaggcgacaaaggcggccagttttgcccgagcgcctggatgcctaggcgtcgcctaggcaacgccttaagaacagtgtggctaactgatgctgcagctatgtgttggccttctatggtgatgcatctttccttttgaattcagggtcgtgctgataccccaccagctgaaacaaatag

SEQ ID NO: 8369 - DNA, 473 bp, Zea mays
  Intron number 1 from transcript GRMZM2G342491_T01 (locus G RMZM2G342491) derived from phytozome v7.0 (chr-ID 8; pos 1 35904116 to 135904588)
gaaagggcaagctgggagctatttcaatcaacaaggtgaaaaaaagatggacaacaatctcagaaggactatgtaaaagcttctctaagcaaaagatgttgaactgtatatgatcatcaatgaagacaaaaaataaaaatgaagtggccatagaaaaaagtcctagggaggagaaagttcaaattacagacaatggagaagaggaagaaagtgatttgctaagggatgaaacatttatcactagcacagatatggaggattctgagaaatacaaaaacggggacactagaaaaaaacagagcgggagaatttcttatactcaataattcaaaaagatatccccaagaaaagtattattgtcattgaagaaattcaaggaaatatcatattagatggaagtgagaaaatgtaagccttggctggaactcatgacaacaatatattaagtggatcataggaagttgataatatag

SEQ ID NO: 8370 - DNA, 875 bp, Zea mays
  Intron number 1 from transcript GRMZM2G377237_T01 (locus G RMZM2G377237) derived from phytozome v7.0 (chr-ID 2; pos 1 71935751 to 171936625)
ctaggattggaaaggctatacttagagtgcctgaggtgagttgatatcttgcctttactttcaaaaaaagttgctatcttgccttcctataacactgccttgtcaaaaagaagctttgtagtgtgcaaattttgacaaagattgactatattattgttttttttaaatgtattaaattttattatgatctcccataatagttatgagattatgcaagcaaacataccatggacaatacactttattcatggaacccctcagttttaagtatgtttttgaaagatctcgaacctttgattccatctaatattaataacaagaagaaaattggcccagtttataggggaaaatgggttagttgaagtaaaaaattcctgatctttagcttctaaactggccagtttgggagaaaatatggtacaagatattaattgttgttagatagtatgactgtgtgatgtccaaactaatacttctatattgttcccgtgacaaatttaaagtttgctgagagcttgaactcatgaatttgaagatgaagctttgatagttggatctcgaggcctctttgagattataagtgagcaatagctgacagtcttcgatgtgacgttccagttggtacaacagactaaaataacacataaatttgaaggtttgaatttgcctaagtatatctgggagctgtctctgcggtttttaggagaaattgattctgttaatcacgtggagaatttgggaattgtcttttgagatgaaatacatcagaaccatcacaactcgcaatggcattactgcatgattttacttgggaacttggtatccttattgcacttgcaggtttcagtgtgagtagctgaagcattctttgacct

SEQ ID NO: 8371 - DNA, 774 bp, Zea mays
  Intron number 2 from transcript GRMZM2G125889_T03 (locus G RMZM2G125889) derived from phytozome v7.0 (chr-ID 8; pos 2 2085526 to 22086299 reverse strand)
actcatcactcccaggcggccaaacagctccccaggtgctaattccttatgccgaatgcctgcaggttctgcagaacagagggtacgacggctgaaatacacacaatttagttgaatttaagttatgcctagtgtgctatggccactagtttgaatttaagttagatttaaaggttacacacaatttactagttttattatctgaatggttgaattggtctcgtactactgtacataatgacagctgaaatacatcatgtctctaccactttagcctttcgttttttatacactaatactgatctacatggactgcaatagtattcacaccacagtgaatgttgagcgtttattcagtaacactaatataggcaagaggtatatgtatttcataggcaaaagtaacactgaagacataggcaagaagtataggcaacaataacactgatatacttagagggaaaagggtatatgtatttctagcccttttataacagtcatttctagcagttttagcaaatgactggttcagtgtgtatttatatagcagtttcagttttatagcagttttagttctagcacttttagcaaatgtatatatatatatatatatatttcatagcagtttcatagcccagccgccgcggcctccggctgggcacgaggcccagttgcccgacaggccgtccagggcgtgcctgagaatacagatttgtcttcgaaaatcatctcacctgttttcttttttgcagattgtactttacttggagcttt

SEQ ID NO: 8372 - DNA, 982 bp, Zea mays
  Intron number 1 from transcript GRMZM2G384979_T01 (locus G RMZM2G384979) derived from phytozome v7.0 (chr-ID 2; pos 4 1957070 to 41958051)
cccaagaaattcagctccaagttagaggtacatactttgacagaataccctcttcctgcttattttcactcttcctgcttccggtatgcttgaatgatttttaagtcgtcgtctaatcaagcacacagtacaacactgtttcgtttccttggcatttgattgtttgcgatcttaaactctttgtcaccttttggagaaaaggagagagagtaaacattgattgatctgtcttccttcctcatgttctttatgcgtctaaggggatgatgtttggattcttagaccttagatgctttgatgtcgattagaaggtctaatataaattaatcgcataagtcatgactaattcacaaattaaatctaattaatccataaattatctatgtggggtacctgtattaatcatttattaattagatttaatagattcgtctttaaaattagagccatgattaattagcattcaagtatttgatatgacttgaactaaactttatttagttcagagactcggacaccctcaaaatttgtcttgctgctgggatgcttaattaattgtgttgccgccctgagccggcaaaatcattagaaacaacgtagtaaaaactggagttgtctccctttataatatctcattcgttttaactcatcgcatggccgacaaaaacgttccttctcaagaaaagatttgcaagagatataggtttagaaattaggtttctagggcccgtggaaaggtatcacacagaaggtaccaaaccttgttaaccctcccatttcaaaaataattattcctgctaaagttatggatgatagtaggctttaaattgtacactataaaatttaatgattaaaatggattagagttaaactctattcctatttatttttgaattaaaaatagttaagagctgaacaaatagtgaaaaatatttgaattgtgatgtattgtcacctacgtcaacttgtttccagagcagga

SEQ ID NO: 8373 - DNA, 809 bp, Zea mays
  Intron number 2 from transcript GRMZM2G087117_T01 (locus G RMZM2G087117) derived from phytozome v7.0 (chr-ID 8; pos 1 74402883 to 174403691 reverse strand)
tcgtggaaggattactgtttacgaggtgggtgtctgggtgatgtgctgtttctaacattgttcagatgtctaccaaagtcgggtgggtatcagttccacatatagtagtgcgaagtgtcatgtgaattggatacctcggtgctccataatcagcacaaccaactttggctaatatggattagtggtggatgtggataggattgtcaaacacagtataactagcatcagggaagcatagtcgaaattaatcaggtcttttggggtatggtatgagcattgagcatggaggaaattaagagttttggtgtgaaacaaccatgaggccagatgcgtacacagaagaacctatatgctaaattaagcaaggatggcaaactgcaaccatttatggtcttgcttcttttaagtggtaatatcactcatgctcccacttggggatcaaaccctggttgcgggcggtgcactccctcacatttaccaccacaatgtgaatcaaaactgctacagagccatatgatgatgtgagctcaaaaacagattttgattgtactttctttgtatttttgtttacattccagtaaatttgtaccatggcctatgatttagaaaacacttctaactcgatttaataaaagaagttagcaaaacattgttataatttttgtcttcctgtttacccatttgtttgtattttggtgtttaagttgcaacaaattataagtttaatatttgctcttatttgtatgtataataattccagtattggttgtgcagttgtcccaacagctttggctactgctcttgatata

SEQ ID NO: 8374 - DNA, 585 bp, Zea mays
  Intron number 2 from transcript AC196020.3_FGT001 (locus A C196020.3_FG001) derived from phytozome v7.0 (chr-ID 8; po s 138184026 to 138184610 reverse strand)
agccatcaagaacaattgtctttgatcataaggtatgttgacgcatcttccaattttgtttgcattgagtccttcttgggtttttagatgtaaatgatactactggacaaggattgttcaatgtcttgcaaaatgaattggaaaatctttgccttgatattgataatgtgagaggacaaggaatcaaggatatgataatgaatcaaatatgaaagggaaaaccaaggggtacaaaagaaacttttggataccgatcctagggcctttcattccgcttgtgcttgtcatagtattaatctaactttatttgacacgacaaagtcatgtgttaaagcaaaattattttttagaatcatacaatgtatccatacaatatttgctaaatccaccaagagatggaagatattcaatggtaatatattaggattgactctgaagtcactatcatcttctcgttgagagagtcatgtcaatagtgttaagctataagatttcaaatggaggaaatacgagaggctttcctccatgtatctgaaaatgataatgaagataatatatgtagtgaagctcgttccttagcaacca

SEQ ID NO: 8375 - DNA, 553 bp, Zea mays
  Intron number 1 from transcript AC196020.3_FGT001 (locus A C196020.3_FG001) derived from phytozome v7.0 (chr-ID 8; po s 138184847 to 138185399 reverse strand)
aaagtaataatgattttagttttcagcctgatatatttgatccaagatattgggattcatttgataaaaaacaatgattgacattttgctccaaaaagatcctgaagagatctagctactcataaaggtcctaaagactgatttaatagaaggttctctacaacattacacttggattttaagaaatggagagaagtgtgatagagaatggttagtatattgcaaagtaggataaagtattctaattttgttgcatgttattaaagaaagggcaaacaaaatgtcaattatcaaatgagggtttctgtgattggtcacatcttagcaataagcttaaagagcatgaaactagtgcagaacatatcatgagcatggccaatcggtacgacctacgtctcaagtttgatatgaatcaaactactgataaagctgcacaatgagaacttgaaaaagaaaaaatatcactggaggaaagttttactgagaattattttgattgtgaaattccttgctaaacataacttggtatttcgaggttgtaatagtaaattgt

SEQ ID NO: 8376 - DNA, 740 bp, Zea mays
  Intron number 1 from transcript GRMZM2G177659_T03 (locus G RMZM2G177659) derived from phytozome v7.0 (chr-ID 9; pos 9 7539602 to 97540341 reverse strand)
ttgagatccggctggggacagaccgacagaggaaggtgaattgtgggaaagtgcgtgctctcggctcttttcccgtcttccttgccttgtggttttgttttggaagagaggattcttgcttgggtaggattgggtaatttgagagttcatttctcgggattttgtggctgtacgaggcttttctgaggccaatttaagtagatgaaagttgttcatttgagtttgagttgttgagttatgtgctatctgcaatgttgtattgtttcatagagtagttgtttgttgatgtgaattgtgttggaaaaatgaattttgggcgtgctttagccgacctacttaactagtatctacaccaagacgatcctgtacccttaagatttgttattaggccctttgctttggctgtcctcttacttttgtttcaggaagtttttttgtgtgcatactgtttgactatgaatggaagacgtgttatcggattgttttgttcatataatggatctatatatttcattgctttaaggcactgttcatacataattacatgtatgagaaggtttgttctgagtaaacaatatatagaaatggaaatcaaaatagagagtgcataactcaaggcaacctagatctcatcatagtaatattctagtaagaaaacaattgtaactggctattcaaatcagtgatttattgcaccaagtttctgacttaaaaattttcacatccaggaggacagaaaa

SEQ ID NO: 8377 - DNA, 1000 bp, Zea mays
  Intron number 3 from transcript GRMZM2G053600_T02 (locus G RMZM2G053600) derived from phytozome v7.0 (chr-ID 4; pos 3 0197582 to 30198581)
atcgctgtgcgcctgcccatcatcgagacccaaaggttcgcccctctggccctctatctgacttcaattttacagcctgtaattgcgatcactgtttgcttgttcatgaggccacggcccacgggtgtgctttgttgcccctggatatggcaaactgtgctggaccaccagctcccttgaggccttgagatttccagtaactggtttttatagcgaacataaccttgcttgactgctatagtggactatggctgtgtttgttccattccaatgtgttcttagcagagacttggaccctaaagataaccattactttaagggtgtttcgttccagcgactaaagttcagtatatgtcatatcgaatgttaaatatgagtattaaatatagtctaattataaaaataactatatagatgaagactaaataataagacacaaattttaatcctaattaatctatgattagcaaatgtttactgtagcatcacattagcgaatcattgactaattaggtttaatagatttgtcttgtcgttaagtttttatctatataattagttttttgattaaattatatttaatacttataactagcatctaaacattcgatgtgataggtgctaaaatttagcatagggaaacgaacgggcccaatatgtccatttggcaacagggacaagttatcttcgttcttataccctctgcattcttacattccttatttgtttgaagacataaccattgtaatcccaactccaaggatgttactgatgatattttctttgctgctgccttttttatagggcgtattatcttgaagtataaagcagggatcctgaatcctgctcgtgaatacaaatgggctatagttgataaaattgattaactgttttgtgactaaaaattctgcaagagatgcagataagtctgactgaattgtgtttccttgttttgttggcttcagggagtgtcctattgatctcaaagaagcaatatcaa

SEQ ID NO: 8378 - DNA, 950 bp, Zea mays
  Intron number 3 from transcript GRMZM2G108619_T01 (locus G RMZM2G108619) derived from phytozome v7.0 (chr-ID 9; pos 1 17049521 to 117050470 reverse strand)
gtgtagagactggaagacatcgcgcgtaagtgttggtgagtgtctatttaacctttgtgtcttgtgctaacatgtttcagaactacttagatgcaagcatgttgctgttatcttgtacgacctattttatgactattgatttctcatgcatatgtgccgataagttgagcctttgttgaaaaacggatgtagagctcaattaatgaatgcttgatcaagaggatgctattgccgcactgtttgttcactgtcatcagacagttacatagatagctaaagttgttatgtatcttctgactactggcggtaattgagttttgaagaacaagatcaatgtcatttgactacttagacggtttttccctctagagatctgcatatcattatattatggagaaaaaatattttccaatcttcacagaaactagaaacagctatgtcacggcaatgtggtttttttttctaaattctatccatgtttgcattcaaatattttctgcatttttataggaagttttgttgctagctagctctactgagcctttttcaattcaaagtttagtatagaacaagtcatgaacctggatcacatatttgtagctctaatatacctctagatctatgtctattaactgaaatttatgaacttctatattaataattcatgtgagtgttcggagttctgcaagtccatatattcccattgtagcatcattcatgctttagttgatattagacatgaccacgagtccaagatcacaatgagattattggaacatttttcaggttttattctccttactttattctcttatgcgatgctttgttcattgcaagctaaatcataatccaacaaggcaacaagatggcctgcacatagagcttcatgactattctaaccttatgcattttcaggttcagttggatctagtcacactccggattgccag

SEQ ID NO: 8379 - DNA, 792 bp, Zea mays
  Intron number 1 from transcript GRMZM2G549827_T01 (locus G RMZM2G549827) derived from phytozome v7.0 (chr-ID 2; pos 1 57329846 to 157330637)
cggttgaagcctgtgccggtgattgttcgttgcaggtacatctaaaagctatgtttgctaatacttctatttaagtttgatcttggtaatcttggtatgccagatattatcatttttcctatacaagagtagttctgattttgtttaactcggttgttgggctgatgagatgagaaaaaactgtgctactatactgtttagcaagatctttgctttttaaatggcatgtaaactgtgctgcatgggaggattactgtgattttaacaatatcctcgcccttcaggatgtcctgtgactaatagcagcagattaggtttagccagatagtagtgggtgactaatggagacatttgccatgtgcattactgaagatatgatatattgctggacatggtatgaaatgtgattatcgcatttcagtttcctgtcttgaatatcttcatattttattgatgtttcatgtggttttctttatgtcattatagaataattagagcaaaaactccagaagtttgtcacagaaaatacctccatcttctgaatgttcctaacaagtacaatttcatggtccacgtgttacaaatattcagaaaaatacttttgcaatgtgtcagtgcgggtgatgtttttaagggttgtaaacctctttgttttaatataataatacacagctcccctgcttgttaaaagaatggtacccttgttgcccatccctgttatgatattatccctagatactacttttgtggcttgcaggtgctgcggccgagtgaagctaccccacttctatt

SEQ ID NO: 8380 - DNA, 770 bp, Zea mays
  Intron number 1 from transcript GRMZM2G064467_T01 (locus G RMZM2G064467) derived from phytozome v7.0 (chr-ID 2; pos 3 1597894 to 31598663 reverse strand)
cgctggaggccgcttgctccttcctagactcgcaggtaccactcttattaggatcagtttattttgtcttgggtcctagtagagagtattagttgctctacatgtcgcgtgcacacactgcacggttcgccacctcgaagtgagctgcgaccagtcgcgcctacgtaatattttaccctctcactgggctactttgtatgtctgagaagcactgtcagtctgccataatgtccggttttattcttcctatccacattgttcattgaagatgggatttcctttcagttttattatatcatataggtggcaccgtggagtgatatgattgtgtaggaagttatctgagggtgaattaagctctgaccttgattatcagcttcctttaaaaattatgtttgtcgattatcaaatagccaaattaggctttatattactacgatcaaaactgtaatagttttttcagtggtgaaataactgaaatttggtgcaccatgtatcagctgttagtttctgtgtttcttgatctgttgttcatttgtatgattcctgcatctcagattgcttaccagttaccactaccaaattttactaataatgaaactgtcttaacatatttttagtgaacttatccatactgcaccatcagcttgtgtactttcagttatgtccaattgttaccgataatgatttggtagatcatcagtaaaaacaaagtgattgcacatttttttccaggctattgaattagaggctgaagcttacccattact

SEQ ID NO: 8381 - DNA, 830 bp, Zea mays
  Intron number 1 from transcript GRMZM2G091560_T01 (locus G RMZM2G091560) derived from phytozome v7.0 (chr-ID 4; pos 1 90877498 to 190878327 reverse strand)
agctgcttcattctgaatccagcagctactctcaggtcttccttgtctactaatgattgcttaatttctgtgtactactgtaagatattgtgatattcggatctgcttgtcatgtctttctggcataacagtttcgtaaccacaagatcagttttgacatttaccacggtgcattagaaaacttatagattagtgaatagaaccctagaaaaatattaaagattgtatatcagggaccttaagtgggcatttggatctgaggcaagggggatcctagctttacagcgaaaggattgaagttttataggacatcaaaattcaaaagacttattttggggcaatataatctgcaatcacgagcaaaagcttgctctgtgaagagagccaaatcagtttggcaccaaaagaaaagtagcgctgcagtgaaaaaaaagtctggcaactgctattcagaattatggccaaacattaatccttttctattgctggttgtagaacagatgggggagctaggtataatctcagcagtcccatcttcctggtgaaagtaactatttgaaagtttgaatcatctggctataaatgcatgtgataggctcacacaagaaagtatgtttttttgtgtaagtatgacatatggaacacaatacaatgatacagataataaaccataaacactgctctaatattgacaggggaaatccagagggaatgaaaagaattacacagcgtctcatcacataaaagtacagcagcttcagttattgatcagtggttgctactttggctggttaggttgacctaaacagggctggcgtacctttgctcga

SEQ ID NO: 8382 - DNA, 643 bp, Zea mays
  Intron number 1 from transcript GRMZM2G432083_T01 (locus G RMZM2G432083) derived from phytozome v7.0 (chr-ID 8; pos 9 4300452 to 94301094)
aaaaattaagaattatcgataatagcaatcttaaagtatgttgggtgtatgtttctgtgtctcatgaagtttaggatgaaaaattgactcatttcataataccctatgttgtttgctgcatgtgatatttacttaagcagagatagctgagttgttcatttgagtttatttggaatattatttggttcatgcatgtctgatcttcagtcctctagttgagttggttaggtggtatgagtagcactccttaggtcctaagttcgactttccatggcaacaaatttcagtctagggttaaaaaaacccatcgtccatgccacgctaaagaacagccggttccgttcatggtcgtcctcacatgggctatggtactgttgtttatgggtggggcagggggttcaagagttttctcgacttgcgtgagaaggtcttcttgatgcaaaatgctagggggctgccttagcccgcagatcgagtttttgatcttcagtggttgttaagctttaactttattcattcttgttgattttagtgaccaaattccattccattttgacttatgaaattgtagaagtgatatacctatatcagaggagtttacttttatttttttgtacaggaaagtggacctaagttcggcacc

SEQ ID NO: 8383 - DNA, 582 bp, Zea mays; identical to SEQ ID NO: 5291
  Intron number 2 from transcript GRMZM5G814859_T01 (locus G RMZM5G814859) derived from phytozome v7.0 (chr-ID 2; pos 7 5820695 to 75821276)

SEQ ID NO: 8384 - DNA, 603 bp, Zea mays
  Intron number 2 from transcript GRMZM2G076152_T01 (locus G RMZM2G076152) derived from phytozome v7.0 (chr-ID 8; pos 1 70962686 to 170963288)
ttagcaattcagttgctgggaattcttcaattaatgtaggtttctaatttactttatagttggattctttcattttttgcatatatttgtgatcagatatttgctccgcattcatattattctgataccaagttactggtagctatgtgactatttttcaatcacagtagctttcacaattagggacttaatcatatatgttgattttgtatagttgttgtctgtgttttagcaccttatataacggaaggacactttagatttgatttcttttatttgtcctcctgtttggcagattattcttttgaaccaattgatgatgctatttctatttttgtgaagcttaatttgcgggagttgataggttttggtattgttcttatattgcaattatgatttcttactcattatagctagcagcatctttattggttcttttatttgaatgagcaacgagtgtagcatctcatggcatgcggacatggggtggttactctcatattttgtcaactgattatgtgaaagaaattatggatcaatcttgttttgctaacatgtatgtaaattatcttcttgcagggcactccaaggttagtttctgca

SEQ ID NO: 8385 - DNA, 604 bp, Zea mays
  Intron number 1 from transcript GRMZM2G078946_T01 (locus G RMZM2G078946) derived from phytozome v7.0 (chr-ID 2; pos 2 28817510 to 228818113 reverse strand)
cgctagacctgagctacaacgccttctccggtacgttgtttttggggcactatgattttggagggtctaagtacatgcttgacgtgcatacttttagtgatatgtatagtatatatcactatcacatattgttttatatccccatcttacctgtggagcttgtgaatcagtaaggagcgattaagctctatttaggtaaaaaggaatgatcagaaattttaggtaaaaagaaatgactttgccttggcttcttgatgataactaactttcacgcgtctccttatcaacaaggctgggcaacaagcaaattaatgcggatcaggaaaaagagagagaccatattattgcttttgattttgttttacttagatgttaagttcccttgagtttttttataaggagtcatggtttttgggtgatggtggagtggtttgtatcgatgaatttgataagatgcgacctgaagacaggttggcaccagtttatatgtttggtgaaactagaatagacatagtaaatcttctttcttggtatgctctgtcgaaacctcattaacccagtccctgttttcttatagaattctagagctgcgattcctgaggcc

SEQ ID NO: 8386 - DNA, 986 bp, Zea mays
  Intron number 3 from transcript GRMZM2G404207_T01 (locus G RMZM2G404207) derived from phytozome v7.0 (chr-ID 8; pos 1 54387590 to 154388575 reverse strand)
aactgaagcatcacctgtgccaacaaaacctgcaggtagcaagacgttctgtccatggattatcattaactttttagtccatgcctttttgtgtgacatcttcacgaggcagcaaaatgcagcttagggagcctcttgtcttctaaaaacacaagttgccacccctttttttctatgaatacatgaaccatgtccgtgtggcagcatatagtaatacatcttcggtagttattccctccgatcacaaatacttgacacatttgactttcatggtttcaatgtgtatatttgaccgctaatttttttctagaatatagttttaaaattcttcaaatataagagattctgcaagtcctttgaacacagatcaacacatataacttacacattctcaaactccataatgtaataattatttgtgtttgtaattttctaaggttttgataaaatcatattgtagaggtagtatattaaatagaataaccagtgttccatgctcgtcctttccttaaaaacttaggcgtggaaaaatggtgcactaagattgtgtttggttccggagctagttgggatggaacggctccgtcccaaggagcggctctgtccgagagattttggggagccaaatggttcaacatttgagcataattttccatttttagaaccactccgtcctacatggaatcaatccaaacaataacaatttgagagtggagcggctccatcccaccatacttcggaaccaaacgctacctaatatgcttatcttgtttcaagctttcaagggcattgagaaagtgaaaaatgatgtttttatagccaacaacaaatgtttgcatgtaagattaagtatccaatttcatccatgtttgataatttttaagacttaccattacagttttatcatatcattgatcatgatgctggttgtatcctttttgccctatttcaatgattgcattgcaaatgcaggtcctggttctgca

SEQ ID NO: 8387 - DNA, 391 bp, Zea mays
  Intron number 3 from transcript GRMZM2G132968_T02 (locus G RMZM2G132968) derived from phytozome v7.0 (chr-ID 2; pos 1 38865007 to 138865397)
tcacattgtccgtgaggttgagaagccaggatccagtatgtccacccccttcttttttattaatcaattaagttgatcacatagtccagttttttgatatctgaaaaatgaactgtaacaacacaactatttcttcacaggtttctgaccagcagtttttagttttttatgaatttgtgggcacttaactttagatgataagccacacaactatttcttcacaggcccatagacttactcaaaacaacagttttttctgtttgaatatccacaactgcttgcacccatgaatctcaagtacatggataccatttcactccattattgtaactgctcttcctacttgatttcttcagaactccataagaaggaaacttgtgaggctgttacc

SEQ ID NO: 8388 - DNA, 888 bp, Zea mays
  Intron number 1 from transcript GRMZM2G125494_T04 (locus G RMZM2G125494) derived from phytozome v7.0 (chr-ID 2; pos 1 5580249 to 15581136 reverse strand)
cgtcggtcttttcaccggcgacgacgacccactaggtattcccaccccttctattcccttctgctgtgcgaaaccgagcacccaaccctggcttaaaacttgatgatccctatcaacttagaacttttttgcaaaaaaacgtccgtgttgctttactgggtccgctcctgaacggctggggtggcggcacttttgctctttgctccttagcagctggagcgcaggagcggtcgtatgctgggcgtgatgggtatgctgtttgaactaaactttgggtgatgttctcgttttggagctgaatggaattgtggtgttttctcttttttagttttgtttccaggcacttagtgtgctagttatttgcggtgttagctcagtagaagttcgaatccagttttaggatgaccatagaatctgttgtttttaggatgactacagaatctgttgttatgttgcgatagtttacaccttgattatttcatgaagcagatggagggacatttgatttgaaattttatgtagccagactttgcttccctttgtttatcagcttggcgtcttttgatccatggaagtaattaggtgcaattgccattagaggaaattttatgtgtatgcttctataagtatttattaggatagtgaaaatataagtgataagtaaatatggtccaacctttatttgcaatcattactaacaattttgatactatcctcaatctgtagcataaatttcatttgtatgtacgaaaagaaaaggcatcagaaccatattaatgctttcattatgtgggcctgtgaaacttgcctattaatttgatttcacatgtcaggaaaagaattttcctggcatatttttgtttccagaaatattcgtgtcaagttggt

SEQ ID NO: 8389 - DNA, 597 bp, Zea mays
  Intron number 2 from transcript GRMZM2G405178_T02 (locus G RMZM2G405178) derived from phytozome v7.0 (chr-ID 9; pos 1 8892250 to 18892846)
tggagtaaattatttcattcttctggcagatggttccaccagatactactgtttccctcctagtttctctccagtaaccaagtctgactaaaatatgactattactttcaccttaggacaccagtcagtataaattataatgtgcctagttttctccatatatcctttgtagtcattgagagccgatgtgatgtgccttgacaataacagtacccaacttgccatagtacaagacattagcaatatcagccttttgattgagattttatgtgtaatggtaaactgtacttaggggtgataagggatcacgattcaaatgtttcttcacaaaaagttagggaccttaataaattttagttcaaaaatgaatagaaatagagcataatcttaatccgattcgatccttagattttatagtgtaaaatttagagctcattacgacccctaactgtactatactacacaccattttacagtgcatgacagtactgtaagcaggaccccactttgctggcattataataatatattacaaactggaacttagattttagcttttattaccagattgagttgcttctgtataacagggatacg

SEQ ID NO: 8390 - DNA, 648 bp, Zea mays
  Intron number 2 from transcript GRMZM2G064139_T01 (locus G RMZM2G064139) derived from phytozome v7.0 (chr-ID 2; pos 1 044120 to 1044767 reverse strand)
ccaacgatatcctgtgtaagcagactgctctgaaggttggtgattgttttgttgaacttctggtgtaatttgactaatgtgttaatgcaattaaataattctggtttcactgaatgccagtactttgcatagagttgtttttgcacatctaatgaatggtttcaagtgttctaaacatggaatattttagtcatcaaacatggtgaactttaagctatttggtcacataaccattttatggatacattttatggatttcctgcacatgaagacaatatgattctgcgcatgtgtataagaaatcaccaagactatgttgtcctttcatttggttacgatgtccaattgtccaaggattaattaggtggacaacctctgccccacagtcaagaattgtcatgtgtgtgtatacataaataggattgatttttctaatgctgcagtaattgattagttttgatatcaattgggagtcatgtttctatagcgaatttctgataccttaaattataaaatccttcaaactcagttgcttttaataattttatacattttttctctgttactgaaatatattgactaacttgtttttttttgtgtcccatgcatgcagagggagagaaaaattccagttcttgtcgggattac

SEQ ID NO: 8391 - DNA, 757 bp, Zea mays
  Intron number 1 from transcript GRMZM2G145802_T03 (locus G RMZM2G145802) derived from phytozome v7.0 (chr-ID 2; pos 2 4367048 to 24367804)
gaagagtcagtgctctctcttttccggtcccttgctgctgtgtgtttggattctgtgaatatagctctacgagaaaaccgcataggtttgattgctcatccatggacaatagatctataatatttttcttagtgatgtataacatggttctgtgttgaaacccctgtcaactgttctctaagtaggaccctgagccctaccgagaaatttggaatagtgccattatcaaacttagactgtaagatcttcgctagttcaccattctcacacgctgtttacagacaaaatgccattcgatacatcaacagagaaaagatcacctgcttggtcttttttgccccttttcgaaatcagaacgtagctgacaccgttcgtggagatctcccattcacttgacggctcgagcctgcgtcgagtctgccgctcctcttccaccgccgccgctcctcccgttccatctgcgttcgatctgctcctcctcccccgcctccgctcgctattcctccatcaccgtcattctgctcagtgtttggttgcatatatagatgtcatttcgtttggttcagttgtgctgcatttgtatcgtcgtatgtataaaccgaagatgcctggtgtgtctatgtatgcttatactaaataatttgtttaatagtgtcatgtcatttgtcttccgtaacaattgttctccatgctgctttctggcttactgaaacaagcgcgcttgtgcattagggcagcaccagtgacatttcctcgc

SEQ ID NO: 8392 - DNA, 830 bp, Zea mays
  Intron number 1 from transcript GRMZM2G015906_T01 (locus G RMZM2G015906) derived from phytozome v7.0 (chr-ID 8; pos 1 09964276 to 109965105 reverse strand)
tgttcaggcccttcgccggcgacgagcacacagcagtatgcctaacctttctcttcccctaacttagggtgggactaatttgtagttactctattttattctattttagttcctaaattaccaaatatgtaacctaaaatagagttttagtttccacatttaaaatttagagactaaaatagaataaaatagaggaactaaaaattagtctctagaaactaaacaccccataactgtttgtattcgaatagggtgttattacacagtatacatgtagtattactcctactaaatctgatttttttgccagaaatcatggagaaaataaagttaatctttttagatgcatatctggtgttcatgtatttttttacttattttgagttgtcgttaggtttacttgaaaatttgcacataatgaaagaacaaagaaacaagttggagtggataacagagccaactgaacttttttccctctcttcgaaattgatagtcatttctattatagtctcctatattgttgtttgaagccaacttcaaaccaagtttaatgatctgagacaaaactgaatttcattcaaattctgctacttttgattttgaaagaaaaacaagggcaactggaacatatttttgtaacaaaccaccgggtttattgtccagccctcagatttgtgcttgaaaggaaattatctgcctcttttttatgtctaccatttaacttttgcattatctgctagtttagttactagttagcaaataattgatagtgacattgtttatggaatggactgaattgttccttataattcatatgtgttacatgcaga

SEQ ID NO: 8393 - DNA, 667 bp, Zea mays
  Intron number 2 from transcript GRMZM2G069005_T01 (locus G RMZM2G069005) derived from phytozome v7.0 (chr-ID 2; pos 1 58236444 to 158237110 reverse strand)
ctgagatcaagaaaacagctaaagaaggccaggtatgaactcttataacttttggaagttagaagtcatattttgattctatttctgttattctagcctgcttgatatttagaattattggaagtcgtttttaaataaaaaagaattctttttggggaataggttatgtttcaattaaccttcagccataatgatgtaatgttgtagaaatcctatgcatacaattacaatagttaccatgcatgtgggaactggggacttcaagaatcaagatatgtccacgtacctgaaaataaatctgtacgtttagttgagagacacatgttaccacaataaagtcaggaaaatttgacttttggctgctggtctgttggtttgttgccacctatggcatattacattttcttagacccatatgtgctgtgtcgcttgtcatagatccgttctgttcccaagcttgcaagactcagatagatctaggggtctaaaacttatattctaaattttattttatttacttcaatagtttagcaattcaatgtcttgcgtcttcaattgacaacacataaatgtacaaattctgtgtgcattgttagaatttcattcattttgcatgtagtgtttgtgttctgactttttgttactgttatagggagctgtcaaagta

SEQ ID NO: 8394 - DNA, 1042 bp, Zea mays
  Intron number 1 from transcript GRMZM2G135461_T01 (locus G RMZM2G135461) derived from phytozome v7.0 (chr-ID 4; pos 1 42928164 to 142929205 reverse strand)
cgcccatcgactgccttgtcgacgccgccgaacaggtggttgtagtcactggaggacgaccgacgctggtgaaggggagagagcaggggagcaactcaagcacttgctgtttgacagtctcgaggtaggagctagccacggaaagggaagaagcagaggcagtgacgacggttttgattggccaccgcctcttattgaagaacacaactgggacttcgcgcagggctggagtgctacttccagtatttcttgcaggtcgaggagttgatgagatgcaacggcggaatgccaaggtgattacttgtatgctatgcaaacatgtataaaacattgtatatatgtgattcccattacgtaattaggctatatggttggttgctagctacacagtacaaataaatcaactgggttctctataaatcaatagtcatgagcctggggttgtgttatccacttttggttaatggcaagtaataatcttatcataattagctagtattgtttgtcaatttttcatatatatactcgtgctaatgatatttgttgcttcattctgtacaattatgagacattttatatttttatatatatatattttttggttatgcatatatattggtttttagtgtatatatattatttaagtacataacattaaaaaaccaaaacatctttgaatttttctttggcatatgctatcactttggaactgtaattaaccagttcttactgctttgatcgcacttaatgaaactaagcatttaaagtctggttaaaaagatttgatattgttaaatattgttatgagaaggtctacaacaacgcttaactgctggaatttcttctggcttcttatttaaggtctatttgtaaacaggtcatgtaaataattgtagatgggacaaaagtctgaactgttctaaatgtgtcacgtattgctttcaggttctctttccagatcacaatttaattatttaattttttgtttatttttttatcatttaaagattctaggagttgggaagaccacttctcaacaaga

SEQ ID NO: 8395 - DNA, 768 bp, Zea mays
  Intron number 2 from transcript GRMZM2G318949_T01 (locus G RMZM2G318949) derived from phytozome v7.0 (chr-ID 2; pos 1 6834418 to 16835185 reverse strand)
gcagctgctaaagaaagtgtaagatgctttgcctcaccttaatatttatttctttcagcaagtgtgaagatagcattcaatttggcaaataggtgtcagaacagtgaggaaaacaatctggttaagaattttgaattgaagatatttaaagaataagtatgcatagtttctgacgatcttcctattgtctctattccacctgtttcatgattttaggaagattttcgtataggtttgtccaaaatatgtgacctcttgaaaaattgagggagtattcgataccattgtttcttttcttgaacaatattatgaaatatagggaatatttgtggaccttgatgttcatggtcatgaagcattcaatcatttaggtttttatttgtgccaaaatgcaatgtaaatacaccctaatgcttgtactgtgtctccaccttgttattatttgctctctatcctgagttaaagttttcaatgttgtagcttaacttgggaagttaatgtattctgtccttgtgttaattatagatccaattttagaaagtatccactttacccctgacaattgaaagcgctggaacactaataactttatattttcccccatccattattgtatattgatctttctcctgctgctttcagtttaatcgagaaatgtcaacatcaccagctatcgtcacctatacatttgattattgttctctaacgtgaatatttgattcaaaatagctctcttatggccttaggtagggcttgaaggcagtggca

SEQ ID NO: 8396 - DNA, 562 bp, Zea mays
  Intron number 1 from transcript GRMZM2G101007_T01 (locus G RMZM2G101007) derived from phytozome v7.0 (chr-ID 9; pos 1 15987891 to 115988452 reverse strand)
acatcattctgtacctgtttgccgaggcaacccaggtatttaggccctccagacacttcgctcctttagagctagtttgttaatttttagggtgtttgattttagaaattaactagtccatcatcttctaactcctcatttttttgtttgatttgtggaattgaataagttgatccatcaccatctcattccctatagttagttagtactaatgtgaggaatgatatcattacaccaaatttgaagaattgacctataatgctctacctcattttggattgagggattccttaaaccaaacactccctttatttcccaaagggatttttattttcctaaggaaaaatgaattaatttcttttaacgttagtttgggaacctcatttttttaagggataaactagcccttagtaaaataaaaatcacttgaaaaatagggttcacaaactagcccttatcatttgaaatttcagcgtcatttgcatccatgaaatctctttttgactacgtactcaattggaacagaggaaattggccaagagcagataacaagggttcttct

SEQ ID NO: 8397 - DNA, 507 bp, Zea mays
  Intron number 3 from transcript GRMZM2G464791_T01 (locus G RMZM2G464791) derived from phytozome v7.0 (chr-ID 8; pos 1 50582807 to 150583313 reverse strand)
ctgtcaaacggtatgtatccctgtaaagcgcatggtcactcctaatagcaggaggtctttgtgttagcctttctgtgctatgcttctttagtcttccattatctctatactttatcagtccatttctgagggttttgctgctgatctatttaaattatgagcagtgttttcttcttaatttatgcacacacattttttgtttcttaattaattattttgaatactattgatggtcattagaatatagttatagtacgataaatatgattttatgaaagattgaaggtacatttcaagacatatttacacatatgatttttatgtttcataactaaatattttgataactgttaacagtcaaaattaaaaaaacgtctagattattgagcttatggcacttttgcgctgcttgaaagcaacaacaacgtgctgggtatggcatttagtcttgtagattttctttaactatccttgaatggaaggttgggacattcagtttgcagtggc

SEQ ID NO: 8398 - DNA, 633 bp, Zea mays
  Intron number 2 from transcript GRMZM2G025264_T01 (locus G RMZM2G025264) derived from phytozome v7.0 (chr-ID 2; pos 1 29970968 to 129971600)
aaatcaataaggaggccattcttaatcaagtaaaggtaaactttcacattttttcagttgccatgtagtaatagtacactttcacaattcttttccaattgttatgcagaagagatttctttaccctgcccgcatggaaacatgggtgctgcgaacaattggagagagatggaggcaacacaagttcaatttgaaatccatttattttgacccacataagagttaggatgctaataatagtaatgctcctgatggtgtattagctgattagtgggttgcgcttgtcaataattggatgacccctaaagcacatgtacattactatagtcatgataatcatttcattatttatctgatgaaccatctaatttacttttgttcctatatactctttgtttcgtaggatttaagtgaggccaataggataaattgtacaagaagaaagtcaatgcatacatctggaacaaaaagctttgctcggaatagagaagaattggtattatttttgcaattataattcacagcatgttctttacaaatgtcaaaaatccatgttaattacattaccttagttatatttttattaacatgtttacagagggaacaagatcctgaaaagaaataccctcatag

SEQ ID NO: 8399 - DNA, 1009 bp, Zea mays
  Intron number 2 from transcript GRMZM2G355610_T01 (locus G RMZM2G355610) derived from phytozome v7.0 (chr-ID 8; pos 6 4658982 to 64659990 reverse strand)
tcagcccccctcgaccgacttgctaggccatgtgagtatgaagtgcttcttcccgttgggacgcaaccaatcgattcccgacgaattagcgcgtgctattggttcatcttgttcttccttgtttctttcaaattgagggagttctgtttgggtaatagtgttcctgcatggttatagccttataggttcgggggctaggaaaaaaaatccaacgtactttgtttttgaaaaaaaaatcttaatacagaagtagattgtttaccaactgcctaagctgtgcctgttccccatctacaacagtgtcttaaatcagtgctctatcttgaaatatagagctcaactcataaaaacagtgctttgttttataaatttttatcaaacaaatatagggcacaccataaagtgatccaaatatattacaacccggttagtgctctatacttattttctacatcattctcgacattttcgttcataataatgtaatatacttcctaaaatacatgatttagggtctaaatgttggagctcaatttatttttagtggcctaaacactttaaataatgtagtgtttaaatttttgggcattattttgagacaccttgttggagaatggagatgctctttagagggcttaaaccttatgcttgaagctgagttaatgcagataatcgacatatagcaatgttgtaacatgtgcaaattaacaagttcataaatcattcaaccactcaatgcctcaactattattagtttattaccatgtactctttgtgtctatgaaggtctgttcataccgatattaacatctctcagagcgcctctggtttagcattcatctaatagacaggttgcagttctagcttctcattgtaaagcacaattttctgtctagtctaacccacctaagagtaactgctgctacggaacaaaaatagctctttgcttggattttgagatggaaaactgagacagcctttgcaggttttgaagggtttgtacataacg

SEQ ID NO: 8400 - DNA, 686 bp, Zea mays
  Intron number 1 from transcript GRMZM2G010941_T01 (locus G RMZM2G010941) derived from phytozome v7.0 (chr-ID 2; pos 2 03773546 to 203774231)
cggacggtgtgcccaagagcaagttcaagattaaggtctgggttttctaccttcgtatgtctgtctgtcttttgtttcattctgtatccattaattttgattgtggtgtgattgtgtttgatggtatcgcaatttggccactctatacattttcctttgggccctgtagtattggtgtgatcaaggaaacataaacaaaatttacaaatgagtatcgtgtagctggaaagatggagaaactatcggttcattgctgcaacaacacatcttgctctgctatataaattgctggtttaataaagaagggatgtttttggaatactactagcatcaatcttcatccttgtcttaacaatatctcatttcctttccaaacctcatcagcaccaaatagataagccactcaatacattcagttccttcattactcttttataatcaaatcctgctgcagaattcaagttgctcagtttatgaaatagttacgatcaggtcagatcgaagacacagagaattggtgcaagcatacttactcccgtatcaatattgatagcatttttacgtcttctgttgaggacatgatgccactcttgttcttttctctacaaagcacaatcctttcttgttccaatcgactatatcttatctacttcatttcaggctggcaaaacattaagtgctcggaa

SEQ ID NO: 8401 - DNA, 586 bp, Zea mays
  Intron number 1 from transcript GRMZM2G037128_T02 (locus G RMZM2G037128) derived from phytozome v7.0 (chr-ID 4; pos 2 40523616 to 240524201)
ggcgacgaggagacctccatcaaagaacccacctggtaggcgtctgtgctcttgttgtgcatctattcttccctcacaactgctgctctccctaaatttcgcaatcaaaatgaattcttggtggaaatcggaagggggagaaagatgggagaaaaagaccgcatcttttttggctgcttgctctgcttcggatgctattgctcatgctcgtggggagggagcagaggacgagcaataatagtggcatgattgagaaagaactgctaatggctgatgctgatggcgttcccctctccccttctcccgcgctccctcctctcctcactcgagcacctactttttcattccttgtgctgatgtttctcgtgtgtcgctctccttttctctacgccaactatggatggattcgatgattacctcacccgagtaaaagtttggtggtgacctagacaaaaggcggcatcttgctcttgcatgcaacagattctcgccatccttctgtttcttctctggtaaagtggtaatggattaccatccctctgtatgcccaggcggccgctagacatcgactacttgcacagctcga

SEQ ID NO: 8402 - DNA, 370 bp, Zea mays
  Intron number 1 from transcript GRMZM2G513457_T01 (locus G RMZM2G513457) derived from phytozome v7.0 (chr-ID 2; pos 8 6222961 to 86223330 reverse strand)
ttattgtagattcagaggtattgtccttagtagattgccttttcttattcttcttgaattcttcaaaacataaatacaccttttcactggttagatgtttcttacatttcatattagattaataaaactgggaaggtgtttggaaatataggaatctttgtctgaagttataaggtttgattatcctttattgtgaagatcgatgactatttagaacactgtagaattatctcatttaccacttcctaattcttttttgcagaatcatgctgtctgaaaagcagatttgggaagaaggactttacaaacagtttatccagtcttcaataaaagcaatggcatctggagctggattaccgataagcttggt

SEQ ID NO: 8403 - DNA, 649 bp, Zea mays
  Intron number 1 from transcript GRMZM2G401062_T01 (locus G RMZM2G401062) derived from phytozome v7.0 (chr-ID 2; pos 5 3793129 to 53793777 reverse strand)
accaatttgtgttttgcagaattgggagaaatcaagtaagtactaactaggtgtataaatgcaattccatttcactgattcaattagcccctattcaatttgtccgtggatagtgctgcattggtttaaggaagaacctcttcctgaatctaccatttcttagttttagcctttggggtaaggatttggtgtttctagacctaagttagtgactccagtaagggtttgtgggagcttatcaatcatttttttacttatccaaccgctacaaatagatggtgtagtgatttgtctgatcaagtttgcttttgtcctgttttgtataatcatatggtgattttggaggaaaaaaactgggatgttatttttcacatgttgcgggatggttgcagtaaaggtggttagattactttggaacaaatagttcaatgttgataagcattgggttttctcaagttatggtcctgaattaattctgattagttagtgttggagcacaggaatgggattcaggtgtacacagcttacttcaaaatggcgaacaaaagaacaagagattttaataaaaacaagttctgttctctttgtcaaagttctttctatgctatgtgcagataacttcacaacagatcaggaagctttagagctt

SEQ ID NO: 8404 - DNA, 1021 bp, Zea mays
  Intron number 3 from transcript GRMZM2G030216_T01 (locus G RMZM2G030216) derived from phytozome v7.0 (chr-ID 9; pos 2 6827430 to 26828450 reverse strand)
ccagtggttactttcctgatatcacttgctttcaggtacccatcctcctcctccttctttttcagcagatttacatgatttctcctctctctctctctccatctctctgactctccctccatctctctctgactctccctctgtcgaaatgtctaggccgtaaacttacagtatatatttctattataaaaccccatggcataaaaataattgactgcaaagtagtagagtgctattattggcactaataataataataataataataataataataataataataataataataataataataataataataataagatacagtggctatcgatcaccgctatgtattaagttgcatgtaccaatcaatttaacccaaaagcttaaagctgatatatactccaacactctccctcacgtcgagtctctcttgggtctcagacgtggaataggagcgaccaataattattttattttaattgcgctaaccagaattcgaactcgtgacctctggttctgataccatattaagttgcatgcaccaaccaattcaacccaaaagcttaagctgatagaaaaaagtggacaattcacttatattatactccaacactatggcctatggcaccttacatggaaatcaactagtgctacatcctaaacatggcacctaagaaaagaaaggaagcttcaacaaactcccatggataaagaaacgagctgatttcaaaatgggccccagaccaaaaaagcaaatgctgaaacttcaactttgttcccaacagcgaaagtttagctggttaattttagaatggccaccaccagtgcaaattaagcacgtgctacacagctgacgtacggtccccagctgagcctgagcacattatagcgcaacccatcacgcccgtgattgtttaatttaggaccacgcttaactaattctgtaggctggctcacacactcctcacagtacccagcttcaccaggttcgaagcactggaggtgaagagcaagtcgggga

SEQ ID NO: 8405 - DNA, 269 bp, Zea mays
  Intron number 3 from transcript GRMZM2G132061_T01 (locus G RMZM2G132061) derived from phytozome v7.0 (chr-ID 2; pos 1 94227174 to 194227442)
aggtgtgcttttcttccttttatttattataagaaaacaagcactattcaacttctgttcacatatgattgaagtcaaaacaacttttcttcttccgaagatgaggtcactgtattgattaaggagagaaattgaaatttatagacctaattccaaaaatgcactctaaccttagttcaccctgaatatgtttttgtcatgttttgatctttttttacacttatgctctttgctgatttaggacaatctgaatcgaataatcagtggaa

SEQ ID NO: 8406 - DNA, 659 bp, Zea mays
  Intron number 1 from transcript GRMZM2G457003_T01 (locus G RMZM2G457003) derived from phytozome v7.0 (chr-ID 2; pos 2 02153701 to 202154359)
aacaggtgcgcagtttttttctcctcgcccttcgtctctctcaccctgcaaatattaggagctatgcagaaacgttcttcttgctctgtgaatcctacatttccataatatgtcgtacgtactcacttttagaagcaagccgccaccgtgaagttcttttccccgcgtttccggcgcgtattcagatactgacggattcagggaggcgagaggtgtagatcagacaacagtagcagtctaataatccccagtgtaggagtgaaccacaagcaagcaagcatcgcgctgcagagcgttcatttgactttcccggtcctgcaactgcaacacttcagttcacaggtcacgtagcatgtgcagtgcatgtgagggcttatttcatcccgtgccagatctgttgggtctagactgtctgggacgattctctcaaaatttcttcttctatattccatttttacctcacatagccaaaattttatccctatctttttttttatcttctgcaccagttctctctaaactccctatattctactataacaataaaatatcattttttatagctatccatcatctattatcattttttccaactaacaattactaatttgcacataaaaccagacaatcatttcttatagctatcaaccatctattat

SEQ ID NO: 8407 - DNA, 430 bp, Zea mays
  Intron number 3 from transcript GRMZM2G033283_T01 (locus G RMZM2G033283) derived from phytozome v7.0 (chr-ID 8; pos 2 1874797 to 21875226)
cgaaacgcctgcctggtggtaagctcaagaaaaaggttggtcctctgtcatttactcctatgaatccaccccattgcagttgaatcgtggtgatttacatttgattgctagcctgtgtgtgtcacctaaatctactggtcagcgttagttcaaaaattcaaggtgaccttttgtaatggtattttatctcattgaagtggttttagataacctcttgttctgtaccgaatctacaattgatttagcggtttagccaatgtcttcatttcatgatatgaactgctaccgtgctactgttttctgagtttatgccacttgaggtgtctgcagacagtgtttcttttgtttgtggtacaatgaatttcatcgatgacattgttcctttccaatcgtaggagaagcaagaagtggtcattgagaagattgtccg

SEQ ID NO: 8408 - DNA, 571 bp, Zea mays
  Intron number 1 from transcript GRMZM2G361600_T01 (locus G RMZM2G361600) derived from phytozome v7.0 (chr-ID 2; pos 2 4163138 to 24163708 reverse strand)
gtttatagaaaatttcatagctaccttgtggcattgtaagtaaaagatatgaaaaatacctatttgcattttacttttgtcgtaactatttggtggctaccatctatgtaatctctatctcttctctactactttaatgggacactttcgtgtgtcaccctccctcgaccatgttctgcgttcgctgcccacaacaactgctgccccacgaccctcggcgctcacccacaacattcgctgcccatgaaggccccctcaggcctgcaacaactgccgccccatgacccttagcgctcgcccgcttgtgatggctcttgccttgcaatgaccacgcccgacccccaatagtccaccctcgacgctcacccacaagaaccgctacccgcgaaggccccctcgtcgattttcagtttatttgatgtacacaagcattagccatagttacttcctatctattcagtttatcccagacttgccctttttctttgatatatctaatagtccaccttgagcctctaacatcctttataattttcttcagtatacaagttctacacatctgttctctttt

SEQ ID NO: 8409 - DNA, 468 bp, Zea mays
  Intron number 1 from transcript GRMZM2G582616_T01 (locus G RMZM2G582616) derived from phytozome v7.0 (chr-ID 2; pos 2 1169650 to 21170117 reverse strand)
tctttttctctagcaccacccgcttcttttttctcgttcctgcaagcgcaaaaccttaatgaacaaattacattggccgactctttgtatcatgttccaaaaaccatatccagtatcgtgaacactctcggttccatttattggtcaaatcaaagtggcaaaatgaatttattttccccggattagtagttagttaaacaaataacagaaaacaaaagcttaccactttcatcttggtttcatttaaagttgcatccttttctttatcaaatcggattgatatccccctgatgcatcctttttcgtcattcctctattcgacgctgtatttcatgcttaatttcatcacaatttaggttctcgtcaacattcttcctaatagtttgctcaactctttttgccgtctcctcctataatagcctcagttcaacttccttttggcgcctgcagttgatatagcaagttgaa

SEQ ID NO: 8410 - DNA, 866 bp, Zea mays
  Intron number 2 from transcript GRMZM2G112210_T01 (locus G RMZM2G112210) derived from phytozome v7.0 (chr-ID 2; pos 9 0378998 to 90379863)
tttcgctccagtgaattaagcctactacaactagtgtaagtaaaatactagattaattattcacacgagcaactataaaggctagtttggaaacccattttcacaaataatttttattttcttagaaaaatagaaatctattagaaaaatggagtttccaaactaaccgtaagaatatctttgcattctccctagtagatacaaatagagatttttctgggaaaaaacagaatcctttacctatgtacttttttattttgatctctaagctaggggatgtttagtttgaggaataactacatcaaagataaaatggtgcatcatgagtctaatccttaaatttgatgggattatccaattcctcgtgttagtactaactaactatagagaataagttgatgatagattaaactcattcaattacacaaaccaaacaaaaaagtgaagagtaagaagatgatggactaacttattgcttaaaccaaacaccctataaatagggtcactcacatatttcgggtttcttgcttgctaaagatgtaaagccaggtcgagagtgcacacaatatacatagacagatgttattcgacggtggaaagatatagagcatgacttttattctaatggcttttcaaatatatagtgagagacagttttatatgcatacatttattccgctggtttcaactcgagatatacaggcatactgcctggatttacactgtaagcaaaatatattgtgacacatacactaatatataggcagcgttatttacagttgattaattatgtatacaatatatataacttttacatatttcattgattaattatgtatacaatatatataaccttgtgtaggttt

SEQ ID NO: 8411 - DNA, 922 bp, Zea mays
  Intron number 1 from transcript AC210792.5_FGT003 (locus A C210792.5_FG003) derived from phytozome v7.0 (chr-ID 8; po s 126142928 to 126143849)
gatcagggaagtaagttttgcttcctaggtgtatcaatatttggaatctcaaccaaaccctcttgtttttccacccgctaacataaccttatggaacccaacacaaaactcaatgaaaataatgatgcaatgatacatacatgtccaaagttcataccttttttaagaaataacacttctctagatgagataatcagtatatgtgcaattattgtcatgtgttgtgtgagctgatggattgatttttatatcctaaacagtgatttaggttacagtttacctgagattcatggagccagttggttgaaccgtttatccaaattttatttgttttaatctaatgaatagcaatctattagcagtggcatgatgagagttcatattcatcggtcaactattgtgtgtgatcttcagaggacaataattgtgcatgtcttttgagttggatggctttgaatatactaacttttgctttagttccttcttttttgttatggattattctgaaacatttactctggtaattggcatgtattactttggacgaattggaaccgatttgctttttctttgcaaacttatgtacagtgacaaaatatcaaggaagaaaccttggaaccttaaatttcttcgtagtattctttttggaggaaaggcaaggtaaattgtaactactaaatgcaaattcatctatcgtccaagtgctttgtgatggcttaccttcctcatcacctacatatctttattcttgtccttgcacaatagctctaatttaatacataatacaatagttttaaccaattacagaaactttaactattaatgctgccaactgtttggcccaaatgcaattgtgcattgaccaatgatcttctatgtcattgtcatttctgatagctgaactgataaacaggaggtcgag

SEQ ID NO: 8412 - DNA, 699 bp, Zea mays
  Intron number 2 from transcript GRMZM2G154221_T02 (locus G RMZM2G154221) derived from phytozome v7.0 (chr-ID 8; pos 2 6095257 to 26095955 reverse strand)
aaggattctcaggtgagtttgcttgctattgccttcagcccttcattattttattgagcttgtgttatttttttttctttgtcatctatattgagttgcatgcactgaccaattcaacccaaaaacttaacacgctctcacgtcgagactctcttaggctttatacatggagctgatgaagagaggtggataattcacttattctaacaatctacaataaacatgaatacatgatgactgattgatttatacagtgcaaaagtgggcattttttccttcagcagactgctagtgttagtgatatgctatatgcaatgtatattgcatgttacacaattaattttatagttttttaatgggacatcctgtagctaataatcaaattttatacttaaatataaagaaaatgttgttcgctgaagataatacatgctttatactatgaatatatgtattttacagttgtggtattgataatgaaattatatcatcttgcttaaatgattcatcctttcttgccaaggcctctgttttcccctttcaaatgattgattccctttgtaatgctagggtccagtttttatttctggctgatgttgctttcgatactaccaattgcccacttttttgtcttcgtcaggcagttgaattatgttacttaaagacttgttctacaggatattcagagcacaacagagt

SEQ ID NO: 8413 - DNA, 725 bp, Zea mays
  Intron number 2 from transcript GRMZM2G097226_T01 (locus G RMZM2G097226) derived from phytozome v7.0 (chr-ID 2; pos 1 92576778 to 192577502)
aggtggcgaggggctactccgccgcggcgaaggaggtgaggcgccgcttgaccgaaacctatcttttcgtttaaccttggaggcgaggaggttgtgtctgtattagacgtcatgtatatcgtaagcgtgttgtcttgatctgtcgacaggcggctaaaatgtagattgggggtagatggtttaagcggtggagacgtgtggttgcgagttcagttactgcagtagttgccatgatcccacaagcgatttttttcatagtttgatgatgggttggtcgctttgttatggcagtggtttgtgggccaatgaaatgatttcatgctttaatttatggcttacatcttagtgggatacactttcgttttgtgcggtgcatattagttgagaaatgctactagaatatattcgttgaagtaactttttttgtgcgagattcctgacaagctatgttgggaaaacccaagccctggttttgcaattgtttgtgctttctgtatagatgaagcacgtttggtagtttctaagtgttaaaattgtaaatggggcttatttgatgtgtaatcaaatcattgtatttagctacattttgttatgcattttttgtttcttctttctttttacctgatttcgtccctgtgccagctccggctagtgttttattcccatgctgcagtttctacatctttatgtggcaagtcatatacattattagtctacatgttcag

SEQ ID NO: 8414 - DNA, 742 bp, Zea mays
  Intron number 3 from transcript GRMZM2G032001_T01 (locus G RMZM2G032001) derived from phytozome v7.0 (chr-ID 8; pos 1 49551279 to 149552020)
agttcctgtgacagcattggatcgcctaccccaaggtcagctcttctacgtctctccccgtttttgttaaggaccttctagacactttctatttagatctaaaaatgttaactcgtacgcgttctagattaagcacactgtaagcacgatagacatagaccaactttacccctttcagttgcatattgcaatttggaggtgaatactagaaaagaaataaaaattactgtacgcatttcgtatttggctttgattcttgaacccatcagtaatagcaatgcagagattcatagctacccagctgatgtcagggatgtaaatatgccttacaaattcgtttgaggtatgcacagcattagagcaggggcaatagccctgtgcaaggttttggttaccaatcaggtagatagtagatatggctgcttcggttccaactacagctagaagagttcctatgatggaggttgtccagtatatggcttatgcagttagagtatcttaagtttggtgaagtttagtgcgcaacgcattagcataccgtacatctgtaagatagacctatgccaatttgtgcatagtgtgcttgttctggtaatatagctaaaagaatagtcgttaaaacaaactatggcaactaaaggagacatttagtgtctaggacagatttcatggtttgtgatgtttagcaatcgaaccactctgtgcaggtacaagatatccctcaccgctgaagacgacactg

SEQ ID NO: 8415 - DNA, 804 bp, Zea mays
  Intron number 1 from transcript GRMZM2G342197_T01 (locus G RMZM2G342197) derived from phytozome v7.0 (chr-ID 2; pos 2 19329098 to 219329901)
ctgtggtgactgacgcagattctcagctggtaattcaattaatctttgccatctcgcgtgaaaaaaatatttggttcattaatatctgcgggcaaaatttcaccactcacacttatttttttcataggtgatttcctaccattactttggtctagataagaattaatactttagggtttcattcacaagttttttagaagaaacaataatatctttatttactactagaacaaaaaaaatcagtgcatataaatataggaaatccactcttgctatggccatttagtactctattatactgttgtttttttgtttatgtgggattatgtcattttactaaattttgcaattaactaatcatttaggtaattgattggaaatatatatgcacacaactatatatatatgaagtactgttagaggtacacatatatattttttgttctaaaaataattaatgtttaattaaattattgttgttaggtgtgatgcaaatcatcgatgtgcgtcccaaacagtaggaagtcagacggcagacacactccatgatcaaatatcacatagtattataacacagtaaagaaagctccatatatatgtcactactctgaccgaagcatatggctccactagaagacagtatatcaaatcctatatgttttcggttttgacctagtaaaaagaccgacgttacagttgcactctacactgagcagataatatgtaattgcaaagctttattaaaatctttgtcaacttcatctcgcaggcattctacggtgtgttcgacggccacggaggccg

SEQ ID NO: 8416 - DNA, 638 bp, Zea mays; identical to SEQ ID NO: 4560
  Intron number 3 from transcript GRMZM2G096169_T02 (locus G RMZM2G096169) derived from phytozome v7.0 (chr-ID 8; pos 1 62666631 to 162667268 reverse strand)

SEQ ID NO: 8417 - DNA, 1036 bp, Zea mays
  Intron number 1 from transcript GRMZM2G010927_T01 (locus G RMZM2G010927) derived from phytozome v7.0 (chr-ID 8; pos 1 21669668 to 121670703)
cgactccgagtactacctcacagcctacgtgccaggtacgatcgctgctactgctagctccatgctttccacatggctgtgcacattgttcatggattaacggatatgcttgtacaagacgcgaaataatggtttatggttttagaacactcagcagaaagaaacatcaacatttaatattcctctgaaatgttcagattgcaaattgatatgagattatttccattcagcggttgtagattagatttagaactctgtgacaatatgcttccgtgtagttgctagtatctgtgaattttgatgctgcgtgttccgcttccaccagctaatgcgttactgagcgagccggcgtgacagtaaaatcgcattggcagtgtgccgtccatccatccatccttcagtattcaaatgctatgctttacagctttccagatagatattttgcaactagcggttgctattgctagagcccagaaagagagggtgaaagcaacaataaggccccctttggcagggctctctcggtggctctttttgtggctcttcgtgaagccgtaccaaacggtcttaaaaaaacggctcctcaccgagagccatcaaagagccagagccgttttgctattgggagccgaagcacgagaaaacaggcttctaacggctccttctatccggcacacaataatgtttcacgaaattacagtctctgccaccgtctccacgtgagaagctgttttaccaaatgaattacaaaacggctctggctcctctatagaagccaagaagccagaagagccagagccgaagctgttagaaaccctgccaaagggggcctaagtcatgtgtatcatcctcttccccactaccttccttttgctttatcgtttacagaaacgttagaacactgcttttttgcgcaagaattattcgttgcgtttgcgtgtggcacaccgcagtccacatcgatcatcgtgggccctggtgaaaaagatggattttttttattccgccctctccttctttattcaggtggaaggag

SEQ ID NO: 8418 - DNA, 991 bp, Zea mays
  Intron number 1 from transcript GRMZM2G325296_T02 (locus G RMZM2G325296) derived from phytozome v7.0 (chr-ID 8; pos 1 20066110 to 120067100)
tttcgacctatccgtgcgagatctccgtgcttgaggtatctctgtgtcgagggaaagcgagtgcgagatctccatgtttgagatctccgtgcttgagggaagccccgccattcatgcctccgagcgccaccattctcgccaccgagctcgcgccctgcacgcccgcgccttcccctccccctgagacagccaccccactcgcgggcacaaccaccaccgcgacagccaccgccccctgctcgcgttcttctcctccaagttagccgccgtgagttctctgtgtttgttgatctctgtgtttgttgatctccgtccccctgctcgcgtgtttgttgatctccatccccctgctcgcgagtgcgagatctccgtgtacagtccttttagtattttctattactaactgagatcaaatcatcttgctgttttttggtttaggtagtagcagtaatcacagctaacccattggttgtttctccaaatacgatagttggctacattgtagcaatgttcttttaattcagagatgcctactgatttttgtcatgctttggtgtgcgcaaactgttatttgtctactgatcatattgttgccatggctttgctttcatgtgcgcaaactgatttttgtcatgcctactgatcatattgttgccatggctttgctttgatgtgcgcaaactgatttttgtcatgcctttgattacactgtgggatatgatgccaagcaatatgatatttctagacaggcaaggaaccatatcttgatacctgatatatgaagattaatgaccacaaatctatggctccctttgttgagtaccaaatgggtgttttatcctctctgtcaagtgaatgcagtccgaggccagggtgagatctgtagcggagctggggccaatatttatatttgtatataattttcaaactggtacccttatctctgagattttactaatagctatttcctgttttcctctttggtttgcag

SEQ ID NO: 8419 - DNA, 492 bp, Zea mays; identical to SEQ ID NO: 4701
  Intron number 1 from transcript GRMZM2G012465_T01 (locus G RMZM2G012465) derived from phytozome v7.0 (chr-ID 9; pos 1 56682948 to 156683439)

SEQ ID NO: 8420 - DNA, 526 bp, Zea mays
  Intron number 2 from transcript GRMZM2G429675_T01 (locus G RMZM2G429675) derived from phytozome v7.0 (chr-ID 2; pos 3 5813190 to 35813715)
gtgactacattggttcttgaggtaacttgtttttgctcccaccaatttttttgtcgcaaatttctccttttgatttggaggactttaaaccaactttgctatgagaaataatatgcctagaacaagatgcttttgtattaaaagacctatttatatcaatctagttgatagtctaaattttgagatagtcatttttcaataggagacttatttataaccaggaatgttttagcctttgacaataaccagaaccaatttcaattttcaaccttgttatgtgaagatgtccatgctgcctgtgaaatcaggttcttggcctaagattgactcagatgacccttcaaagaggatggaataactgaataacaaacctaagcttcttattgtgatccagttctgatgcactgaatttaatcatttattctttttctttcccgcaattttacatgtatttactattgtttcttttctaaaaatatactttggatttggtgtaaggttgaggatttgtctgcacaacaagtgt

SEQ ID NO: 8421 - DNA, 921 bp, Zea mays
  Intron number 1 from transcript GRMZM2G441937_T01 (locus G RMZM2G441937) derived from phytozome v7.0 (chr-ID 2; pos 8 9565084 to 89566004 reverse strand)
aactagaacggtaacatgctaatattgttttcttcgatccacattatttttacctctttgatttgccctgaatgcatcttgtagctatgtattctgcttatgttagtttaggcagccttgcgacatagtctcgatgggtaggtcagtgttttagtttcatgtttatacattattagatacaaccatctatccacctcaatcaaccatgctagggcatagataaaatatagtaatgcattcaattgatcatttcacctgtgaactgaaacaactgaattagttcaacctacaagcatgcaagtgcatacctgctgtccaggtggaaaccataattatcattgagcaaacaaacaagaacataaaaacatgtgtcaccgaataagaacccatttgtttgacaaagagagggtcaaatatccatcacatacttcactacagtttccccttctaccttgagcaatccagaaagctaacgggtcttcattgttgaccaaatgaaaagccatgattttgtttgagggcagaaggaccaaaggtcaatcaatagcagttcaatgctctatccaaatgaatttttaccaatgtatgtctctaatgcgtcaatactattcaccagctaaactaaaaaacagtaatgctactggacttggaggtaataactggaattctgaaaaataatcttgttagacatgccattatcctaataccaaattggatttacgatgaaagcaacaatgacaaacacaaaaggtacttaagtaaatgcacaataaattgcattttacaaggctatgcatactgttgttttttagaccaaaactgccctatttttttgacataataaatgtacttttattgtccgaaccttgctgcccaattttttcagatttgacaaatattcagggaaggttgcctctgaaa

SEQ ID NO: 8422 - DNA, 487 bp, Zea mays
  Intron number 1 from transcript GRMZM2G033877_T01 (locus G RMZM2G033877) derived from phytozome v7.0 (chr-ID 2; pos 2 18783083 to 218783569 reverse strand)
aggttagtcaggtaatattcgacttctgaaattagctttgtttctcttctaaagagatgaacaaacttcagatttgagtgcagctgaggaggattgaccagtaataagcaatgctgaacttcagaaaaaatataatttacaacccaagcatgcgccaagcgcatgctggatgatctcaaaacacattcacatgcggaattatctgaatttataatttacaacccaggcaagtaaatatcaaaccaagaggcaagctttctcctaagaaagcactaaatcaccaactgaaatgagaaaaaaagtttatgttcaaaaccatctcttttgcaagaacaagaggaagatgaggttgttaagatgaggaacactcctgatttatttaataagatagttgatagcatatgtcctactatctttctatgtttgagtgggtttttctttattaatgtttaagccatctacttaaattatttgatgtattgcagac

SEQ ID NO: 8423 - DNA, 739 bp, Zea mays
  Intron number 1 from transcript GRMZM2G176791_T01 (locus G RMZM2G176791) derived from phytozome v7.0 (chr-ID 4; pos 1 3629696 to 13630434)
actgtcttctcatgtatgagatggtggaggcgccatgtgcgaagaaatacaagaatgttgatgtggtgagcaccatctcaaagttctcatcctcgctggagacagtgggtgggcagttgggcactggcgggtggactgtcttctccgtgctgaaggaatgccattctatttcgctgtgctggaccagggtgctcgaagtgtttcttcaggttgagctattactttttggccattgctatattatctaatactttatcctattgcgcagcaagagtaatcatttcaaaggaatgtcatttctgcttacctcatttgttggagcctttcgtcacattttgctacgaattggcagttgtctcatgatgctttacatatcattgcgtgagtttgaattacatttagacactttctgttgcctgcttccactgtcgaccaagcgttgagcacatagctactccaacgtcatgattagagttattctctgatgattttgttttttatccatgtgtgccatataccgaactggattaaactaaatgaaacaatgattataaattgcctgaaacaactggtcatgaaaatgtttatatcacctttatctacatgatcaggttggcacctatgcagtatatatgtggaggcataaaagaatttttgggaattctagggagagtttagaatatatttcctagtattcaattgtgcctagatgttcaactaatcctgcatatttttaggt

SEQ ID NO: 8424 - DNA, 749 bp, Zea mays
  Intron number 1 from transcript GRMZM2G091435_T01 (locus G RMZM2G091435) derived from phytozome v7.0 (chr-ID 8; pos 1 63744131 to 163744879)
gccgtcgcccagtccatcaagttcttcgtcacacggtacgcccctcgtccgtccccgtccggtatgtttgggtctggagatcgggcgcgaccgtggtcggatcggatcggatcctcatgcggtttcggcggtcaaagctgcctcatggcattgcttcgactgttccttattctggacgtccgaaacgaccttaagaatttctcctagttctaatacatctagaggaatgaatgaacgatgatagactgggaatgtaatagcatcgtatatggtaggtttgctttcgtttctcgacggttttggtgagttgagctcgaagcaaatggagttggccttgatccggtcagactatgtactaagaattgtccacagtggttgttctgtgaaaccaatgaagatgaacacagagtccgcattgtgtttatacatgagaatggtttgtcttataacagtgcagttttcttgatgttcctcttgtaaccccagctaaggatcggaggttcatttatgctttctaataaagctggtctgggcctgtgatctaaaaaacaataatcatgcatcaaggtctcttgcttcttttctcatatttttttttccacggttcttatgtggattgatacacccctccctataaactttatggaagatcgcggttcattctagtctgaacaggcgtttatacagttcccgtgctgcagtaagtttgatctcttcttgttttttaaacaaaggtacaaggagaacag

SEQ ID NO: 8425 - DNA, 1041 bp, Zea mays
  Intron number 2 from transcript GRMZM2G081032_T01 (locus G RMZM2G081032) derived from phytozome v7.0 (chr-ID 2; pos 1 6654827 to 16655867 reverse strand)
aggtattggagccacctatccacagaggaatcaaggtacttcatttttgttttcattttcccacggtaaatgtactcatcaggaggttcagatcgtgtctcagtgtatttattttgttaatgaactggttgaagatttcttttccgggtacacacacatgacacatctttctttcacatacctacccaagaaagacctatgataatatttttgtgacgattgatggtatgttttcccagtaggatgcatggggtgtccttagtaccggacagcttatccaaattagcaagccagtaaagtactttgagtgtgattgatatgtgtagcatgacttattttttttaggctctgtgctctgttaaatgttactgagtccttttgctgctatcttatcttttgcgccattgtacagtacatatacaaaatcctgaagcaaattagcctgcttcttacagccaaagccacttcagtgtcatcggaaagactacatccttagtctgatggctactgatgcaaactgaacatccgcaatatttgttctgatgtgatttggtttattgtacttacattacttgcccgttgagtacattttggtccttgcactgttcttgtatgtcatcggtaacggtaagcacccccaccactttgccagttgctgtcatctacctcaacatctgaaatcccgaatgatagctttatgggggtttctgttactgcaactcagagcttgtgtagccggttcattcggattcaaatgttcatgacttcagttggagttaaactggatgcaaaacgtaccaaaccaggcctcatccaagcaccccttattgtgagctgatttgttgtacttgcgcaataaccctgaggcccgtttgaattcacctcgcatgttgtggtgcttgttgtagcttgtggtccattcggagtgttagtttgagctctatctcattgttcctctgaactcaaccggacaagacataaccaagtgccatggttttcattgcagatttcacggcgtcgcttatcttcagcagatttggt

SEQ ID NO: 8426 - DNA, 737 bp, Zea mays
  Intron number 1 from transcript AC184130.4_FGT012 (locus A C184130.4_FG012) derived from phytozome v7.0 (chr-ID 4; po s 235229241 to 235229977 reverse strand)
gatttcttctggattgctcataatcatgtgagtgatgctagataaactgctcagaagaataaataataaagggattgtatcaaatgtctgcattagtttccctgtttggttttctgcaattagtaataagttacaccaacctttgactttaaaacgagaagcttatatttgtattattttgttaatcaaagtaagctaatgtttgcgtctatctgacagctggaattgggttctactcaccagatctatctgacaactgcattagtttcccttggagacgaattttcaggcttggttaaaaaatctcctcattgtgcctcatccgctctcggttacgatgttctgtgcgccagcatccggttgggccgttgcatagtggacggttgacgtcggcccgttagtgatgggaggctagggttcgggtattttctcggccgggaccattgtttcggactcctattaatattataccggcagggtggtcatttcctccatggcccgagtttttttagatctctgtttgactattgcatttcgtggatgagtctagaaagtgatttgttttcttcattgcattttgtggatgggcctaaaaaataatatttttatctttttcatgcgtcacaaagtaatctgtttttatctctttcattgcatttttctagtttatctgattatttgcctctagacttgaaatttgagttaatttctgttctatgacctaggctatcgagaat

SEQ ID NO: 8427 - DNA, 769 bp, Zea mays
  Intron number 1 from transcript GRMZM2G551110_T01 (locus G RMZM2G551110) derived from phytozome v7.0 (chr-ID 2; pos 8 2181515 to 82182283)
tgttccttttagtttgttaagtgatctcggcaaggactaggtgttggtgacttgctctcaaatgctttggcttaagagcaaggcaacataaaggatgttaaatgttaaagtcctttgtccttcgggacattatttcccttaggatataatgactctcggacaaaggttacaaagaacataccttcgtaagcacgacatataaaaatgaagagggagtcatacgaagcatgaacaatatgaacaattaaatatgttgtcattattgaattatttctactttattactatgaataagtagaaataataatttattacaagtgtaccttcggcttgaagggagataaggagtacaagcgtgacgcaaaagcaaatgccaagtcagcgtgaacagtacgggagcactgttcatctatttataggcacgtgactcatcccatgtaaattacactcatgccctttacatttgccaataactctattataatccatcggggtctagatagtcttttcctctttaagtcggtttcctttttcctgtcattatgccgaagctcccttgcgcatagcttcggctctgttccatccttcgtcccccttgtgtttcttcatactttgattttgacttaagtacgaagagtccatgcccgaaggtacctgctcatgtattatactccagaaatattgttaaatcatgtttttgaggaccttcgaaagccggaggcccccaacactaggtaactgtgtgtttgtcttagttgcggtgaacttt

SEQ ID NO: 8428 - DNA, 709 bp, Zea mays
  Intron number 1 from transcript GRMZM2G005619_T01 (locus G RMZM2G005619) derived from phytozome v7.0 (chr-ID 8; pos 1 514835 to 1515543)
aacggcggcggtgagtttcctccctggcgcattctccgattcttttggttgattcttgtgctggttcggtgattcggcgagcgtggtttgggggggatagagtagaaggatgctgccgcgctagtagtgtttcttgtttggggctgttgattggcgcatcttaaaaatggtcggtttctttcttggtagcctttgcatagtagagatcgacggttcttgagtttttgggtcatcgatcggtttgattacaccttgcgctgctcttgcttgcgggtttctgcttccatgtcgcgcagaccgccgagcaggttgggtaacgtttcgattcttgtcctgtttgctggataaagattgcaatttttcaacaattaggtttatgtttatgtgcgcgtctataccaaatctccccttgtgttcgcgattattgggattatttttttctctttcagtactgtaatgaaatccatgatctttattaagcaaataaagatcattcagattgtcatttctgatcgtcagtactgtaatcttagttctgcaagtttttttatctggtgtacctttagattgttattccataagtacttaagtagcactcataataaaggtttgaatatttgatgttgcatggtccttcatgtgattttggtactgggattctctctgctaatgcacttatgttcgtcttctaaaaattcaacttgatcag

SEQ ID NO: 8429 - DNA, 771 bp, Zea mays
  Intron number 3 from transcript GRMZM2G044805_T01 (locus G RMZM2G044805) derived from phytozome v7.0 (chr-ID 9; pos 9 2312537 to 92313307)
ggctaagaattttaccaaagccaagaataaaagaggtagaatgtagcagtttatcaattccaaggaatttacccctctctgtctggagccccccccccccccccccctttttgggttggggggggggggttatttcaatgatgttttttatggaactattgcaatgaagttgtgtaaccacttaaatgcaatgacagtattatgattaccataatgaatttaatttcccctgttttgcatcattcagaatgtagatgcttgcatagtattcctagttcgctactgctagtgacgacctctgaagaatgttctgcaagattttcagtggtctgctttttttatgaatatagatggtaattgtcactgacatggagatgtcttgctccgtgttccattttcattctttagttccacaaatttacatatattcctattgactattgtgttactgatgacctgcactagatgacttcattttttgaaaactgcaaacatgtttctgttgaattccatcctacagttttcctgattacatcttgcaattccatggagttccgctgctcctcctaactgtaactatatcaaggaaaaaacacatgcacacttttttcttaagtcgtcaaggtgcagtcgtgcagattctactcatcaaagatgatgaggtttttttcttctttccttaatgagttttaataggaagaatgacttaattgttagctttgaatttgcattgtagctgcaatacagtgcttgaagaggaaaagactatac

SEQ ID NO: 8430 - DNA, 654 bp, Zea mays
  Intron number 1 from transcript GRMZM2G017533_T01 (locus G RMZM2G017533) derived from phytozome v7.0 (chr-ID 4; pos 3 5626900 to 35627553 reverse strand)
gcgtcgagctcacccacgagccgggcttccaccaggtgcctgcttcttgcttgtactcttccatatgctgttgttctgtgatcatggaatgttcgaccacattggtatgagcagttgccgtaaagattaatttttttagtgttgtttgggttagactacatgggtcaggactcaggagtttgtggattgtctcacgagttttctgatcaaattggactaacctatgtaggagccaataaagtatccgtgggccgtggcacataactgttctttctcctcggatgtctgtagtacgtgcggcttgacaaggcatcttgttgtttcttgtttttaatatattcaattttttttctggtgatctgttccaatttataattagtttgactttctataacctaagtttaaccagattttcatatttaaatattatatttattactgattcttactgtgatactgtcatatcctttgtgatatcgtttgaattcaatttagcatatttattaagtatggctttgattttttatttttttcaaaaaaaaattgaataagataaggcgattaaacttgacaaaaaataaatgaattataatttgagacggaggaagtattagatattgctatcatctggttgtgtgtctgtgtagcccctgc

SEQ ID NO: 8431 - DNA, 1051 bp, Zea mays
  Intron number 1 from transcript GRMZM2G034927_T01 (locus G RMZM2G034927) derived from phytozome v7.0 (chr-ID 2; pos 2 08075086 to 208076136 reverse strand)
ccgcggactcctactcgccctcgccgacgcgcacggtgcgttcctggaggcgctgctcgacctaaggcgtggccacgccgcactctggctgtgcgacacggcgggcgcccagcggcacgctgagagtgaccttgtccgcctcgtgtcccccgcgcgccccggcgtcaggctcccgcaggcggcagtgcccgtggcgccagccagcgagcaaggaatagcacttcctgttggccatagatggcgatgaaagccaactgcatcatccgcacctttcccctaagttgcccgcatacgctctgtagtggcggaccatggcctcccgcttcacctgctggacgccgccgaccgagcacgcctgtggcaggagccgctcgcttaaaccagattggcgcccctttagcagcgtgacttctgtccttcaagctatgaaggtgaatcacatgccctcttcctcatcagattgttcgggttagatgctttgtttttctttttattttccttagcagtacctaattttgtcctgttggtttgttcacgcaacagctcgtcgtgtttgtatatgatgcccgacagctcgttgtgttcatatttgattccagggcttcatctgtatgctaaaattgcatgattatgaaagatgttatcctggatctgaatcgcctaaatgaaaagcactaacttaaacctgaattggaaattgatgttgcgatagtttttgaaaacttcactaattagtttatttatatcttttctcactccggatctgtgcagactgcaaatctcataaaatttacaatattgctagactaagttcattgaatctggacaaattcatgtttatgtatctgctaaaataaatccatgctatttagtaaggtcattatcatgttgcctcttgcattacatttagattatttaagattgtggatgcttgtgtcatactgtaactgaaacaatagctgtgcagaaacatagaaaggttatctgcaactgcgagacgcaagcatttcctatggcatgacagggacacgtaattgggcagtggtggttc

SEQ ID NO: 8432 - DNA, 879 bp, Zea mays
  Intron number 2 from transcript GRMZM2G052671_T01 (locus G RMZM2G052671) derived from phytozome v7.0 (chr-ID 2; pos 1 89312893 to 189313771 reverse strand)
atttggtatcgcagacgtcgcccttcccagttcaggtgccagttgcaggtcctctcctgtattattttgatgactgtaacttttcttgtatatgggtttatgatgaaggcggataggtcggcatagaattttgccttcttttttcagagtagttgaggtttgatgagatcgtttggggatcgcaatctgtttttctcatttcagttggcgattaattgttttcttgtgggaaagtttgccgcttggtttgatatttacttgcttgggctgtagattgggttctttatcctgcatgcgaatgtgttttgggtcacacgttaatgaattttctggatttcttttgtaaaggttgcagtttgttttagtagatttgcaactcttcgattcctgtatttggctgctgtcatctcaatttattttagtcgacgtttgtttactggagttcagttgctgtgtgctattggccataccgccatttacaatttatttggcctttttgttctgccttttggctatttcttctttcatctgatcctgattggttttcaacttctgttttcctcgctatgtaaagagaaaggggaaatgtttttttttgctcaattttactaccggttctttgggttaatctcggcaaacgatgactctagataggctttatgtttgggctgccgtggtatgggttgttcgaggaggcctttcgccggctgcccagcactcttgttaaggttttgggcccggttccttaagtctaggtcaattccatcctttttaattgagaggtagagctcctgcacgttaaaaaaaaccaaatgtttcaacatgactaatgcgatgcttactacatggcacttttttcagttgagagagatttctggc

SEQ ID NO: 8433 - DNA, 998 bp, Zea mays
  Intron number 1 from transcript GRMZM2G078092_T01 (locus G RMZM2G078092) derived from phytozome v7.0 (chr-ID 4; pos 1 45623814 to 145624811 reverse strand)
caacctgcgtgtcctcgcgctgcagaactgcaaaggtgcggccatctattcttcttgcgctacccacatgtgctgtttatcaatttggtggatgacatatagcgcattttcttgcgctaaccttatagtgcattttcgagttcttcagagacttaccgattcaatcatactctaagaatgttagtctcacgtacattggataaatacttgtaatctattttgcagtcttgatttagtctatttcaagtccatattctaatctgggagatgttggagtttctttgtgaggtccttcagtttgtgaattaactttcttgtcattctggaggtgaatcctatctatactactcctaaatcttaggggtaagtttataaccttatatgttgtgtaaacctttttatcaagcttatttcgaggaaaaaatgaaccccacatatttgatgatgaatttgcactagcctctggtggttcatttcatccttgtgagaacatgaagctgtgttcatttctgaaactagaacgaattctctcattattgttaaaataaagataattataagaaaaatgggaaaaagctatgtgcaaaaccttttttgtccagctggaatagttttatattccttatgtactgttttcaaggatattgcctcatctttcaatttatttcatagaccccatttttttacagctttgctattatttgcgacagttttagttacctaagttatggtctcctgagatctcaagtttccaacaacggttaaatttgccaatttggtatcctgttaacagatctttcttggggggcatgtcttttttgttttttcttgttcttatgctggctgacattaccaatttgctatcctttaaagccattactatctggggcattctggatctttgtgtttagtgcagtgattctggtgaaaatgtccttaactgagttctgttgattattagacttcccctggttcatggtgtctcacaggtatctctg

SEQ ID NO: 8434 - DNA, 850 bp, Zea mays
  Intron number 1 from transcript GRMZM2G526411_T01 (locus G RMZM2G526411) derived from phytozome v7.0 (chr-ID 8; pos 1 49128495 to 149129344)
cccaagaagccacccaccaccttcttctacttcatgtatcatgtatgttctgtgctggctgctcccctgttaatttgccgcctacggatttaatgcctgttctggccgcgactaagcaattttgattagttgggggttctagcgtgcatctcttacatatcaaaaaattctaatgtatgctagtgttagtgcaaggtactgctaaatgggctcaccattgtagctcagcagcttgtgcaatcaggcttttgcctagtcttttcgtttcttttcttttaacaaattgccatttattgcttttgatttgggaattgggatgctgggaggtaaggttacattttttgtgcactgtggttttgtctttcagtttcatctcgggatgctgtgattttgccatttcttgcttttgatttgggaaattaggatgctcaccattataggtttacattttttgtgtactgtgattttgtctttcagtttcatctaggattgagattattggttaatgtcattgctgaacttaacatatggcactggtgtgaagaacatttggaaagtaatcatcttactgtactcagtccaggtcgactttacatgggtttgtaaaagaatcatacgtggtgttacttattaaattcttatttaatataaatgctttatgcttcaaccatattgacacaccatcaccgaacatatcaattgctccttaaggtttctcccacattttcaggtgtaacactaatgtgaaagctctttcagttgtttgcctttgtgttatacaccaatctataatgaagctctatgttgtgctgaagggaggattttcggaaggtttataagcaagaaaaaa

SEQ ID NO: 8435 - DNA, 1043 bp, Zea mays
  Intron number 2 from transcript AC196465.3_FGT006 (locus A C196465.3_FG006) derived from phytozome v7.0 (chr-ID 8; po s 149903549 to 149904591)
ctggatctgaggataacattggaaagcttttggtaatgttgtattcatcttatattctttactctattatttggacaaaagatgttgagatcctaaacatatcttggttatcagcgaagattttaaggttgccttgagtcattaatggccacattatatttattgggacatcagttcccaagaaacattaactgtgatgacagtcgccagtcgtctcccttgctcaaaggcttagggtgtgtattgggtttttgtaggggagacctcttgacgcctcccctgttttctgtacattttgtatggtccctttctcatctatactactctattaagaacataatgtggacacctggtgctaccacggcttcaccctccccacgctcagcgcgtgcaaaaaatagtgcaaagtgagcactcgaacccacaacccatgctctagaaaattgaggctaactattagaccacacgtaacttagtgtttagaaataaacaataattatatttgtagtctaggcgccgctcccctgcttcgtggcaacgcacggacacatacctagttattaatgaaatgacacaattctcctgcattgtttgagggtaaaaatagttcttaagaaacattaaattacatctgaattctgaagtgttttgtttcttttatttattaagatgctttgctcttttttagaaaatggaaaaaattctggcctttgccaccacacagccaggtcttagaatgttgtcagcttatttgctgacagaaataaggaaaaaatgcatccaaatcaaagaaaatcatatgtgaagtttattattactttgccatccattcttggcaaacacatctaaaagatgctatgctcttctttgtttgtcactttatcttcccttatgcttctctctagtatgtgtaaacgttttcaatttttaatacattgacatcaattctatgtttgtctatatactatagtatctatggtatttgtataacgccactttgctaactggactgcaggtgtggaaattcttaattactttcactg

SEQ ID NO: 8436 - DNA, 922 bp, Zea mays
  Intron number 2 from transcript GRMZM2G106960_T01 (locus G RMZM2G106960) derived from phytozome v7.0 (chr-ID 8; pos 1 37405177 to 137406098 reverse strand)
gtgttgggaagtcttgcctgctgctgaggtttgcggtgaggatcccgaccttccctttcaccacatatgagaagacacggtcttctttaactttgaatgcattctccattaccacaccgggaggaaaatgtccatatacctaagaagtgtttttttttttgtttagttttgatgcatctcctactagggtagatggaatgctgttcttcaaggcatggtgttagagtggtgtatgactcacacttatgtcaaatggcttttgacatgatatagacattgttaccataacttattgtgaatgaccccttggcatgcattttgcagtcccgttcctggctgaatagtttacttatatagacaaaatgttgctttggtccagtatcaaatattgacctgtcaagtgtagatttctgatcaactttggaaaaatagtcaagtttcaaattcttatctcaattacattattttgtcgagtcgaactttgaagtaggaatttttttttctcgaacacgcaggagagctgtgtatcattaaattaagaaaggaaagagggtccaaaaatagatcaattacaaatataagaaaaagaaaaaaggacaccctatggcgtgtcgggtgtgtgtaggtggtggcctttttaggtgttccttcatggatgtttcatgtattccaagtaggaaaaattatagtatgcagaatctagcaggtgctaatagatttttgcttgagttgacatactctcaaatttcaattatgtcccatcgtaccataagagcattctgatacagtaccaccatttatggaatggtgtttagaaacagctgtattcctgattttctcttgggcatcatccctcctaataagtgcttgttatgatcatctgttttattgtgagcatctttcttatcatttactttacagg

SEQ ID NO: 8437 - DNA, 855 bp, Zea mays
  Intron number 1 from transcript AC185413.3_FGT002 (locus A C185413.3_FG002) derived from phytozome v7.0 (chr-ID 2; po s 9278477 to 9279331 reverse strand)
gtcgaaagggagagacgtggagcgcgaagtgtccggtgtgtggcgcgggcggcttcttccgcgagaagcaggcgagggggagtgcacagtgacaccctgcatctggcgtgagagagaggagggtcgcggcggaggggagcggatagcgctcgccgctacgggggctaggggtgaacagtgtcccctaaaacatgaacagtgatagcggaggggaggggaagggggagcgttgcagtcagtctgatgcacggatttctggttcagtagtagcctgtaggtagggatgaaaacggtcggaaacagtatttattcggtaatcagtttttcctttgattgcgaataaataggatatagaatatacgatacaaatttgtattcttgtttttaacatccagcttgttaagattcataaaaggtaaacctcaaattcatcctacaatttctcaaataatagatataaacttcggtatggattcggaaacaaattcggtaatttttttaactttttgtgttgtagggagcaaataatatataaaacaacttatataatattttattcatatttgtactaatgtgcttgataacataagaaaagatcaacatcaaattttatacatatctattttaaaatattaaatttgttttaacagtttggattaccactttcatccctctgtagctgatgcgatattgcgatgtgatggctttaattaatgatattgcatataagcagatactcatatcctttagccttggtttagttgagagtttcagacgcgttcaagtagcatcagcaaaatggcaattaggcaatggtatggtatgtatgggctggcaggctgccctgcaagcaaa

SEQ ID NO: 8438 - DNA, 478 bp, Zea mays
  Intron number 2 from transcript GRMZM2G093412_T01 (locus G RMZM2G093412) derived from phytozome v7.0 (chr-ID 8; pos 6 8162699 to 68163176)
tacagttttatctcaccatatacacagtgcatcaggtatgattggtcacaacttatattttcatgtttgactgctatatgcaacttctcaatataatattcacatagacttttgttctccctttaaatattttttagttttccccacgcactgtgaatatgcttgtagaaaatagggccttatccaaagtaaatgcttccatgtcttttttcgagataattctggtttgcatgtgggggatgatttcaagcatcatccagcaacctgatcaacgaattatatttatggcaattcatttttatgaaatgaaacatgattataaatcaatttcattgttcaactactcatgtgttttttgatgttgtagtttctgttaattatcattgatgagattatggtaaaatcattttcttttcatcgagcttatccttcccaaaatctgtatcatgaacccttcaccagttgatattgtctgcag

SEQ ID NO: 8439 - DNA, 594 bp, Zea mays
  Intron number 1 from transcript GRMZM2G168829_T02 (locus G RMZM2G168829) derived from phytozome v7.0 (chr-ID 2; pos 1 42864986 to 142865579 reverse strand)
gaacaagccgtctttgtgggctttaggtatacgaggtagctctaatctctatactagcagtcttattcgtatttgtggtaccggtgtccggtgatctctctatatatagcaagcgtagtgtcagtgtcactgtgtcaggtagtaggattactggagtattggctggaatctgtgtctcgtctcaaatgattcgttgtgaggactctcaatttatcttcttctacaacctgtttgagttgttgtttttttggatattaattgttctatagcctaaacagaagaaagatgaaagggtcttctgttgaattcagttgctggttcatacgaagggctgcattgctgcaaattttgttttccaattagatcgatgcattctggctggcaagtagaaagtgtattcagcaaaaatgtgaactaacacattcagtttctctcttcaatgtgagccatgttatttttaaggtggtgcctattggaaatgttggcgctttttgtgcattgttgtatagctcaaataattaaaagttgtatcaaagcattctttttgtctacattaaaacaactgatgatgtttggtgggtgtgctcattcaga

SEQ ID NO: 8440 - DNA, 793 bp, Zea mays
  Intron number 3 from transcript GRMZM2G084969_T01 (locus G RMZM2G084969) derived from phytozome v7.0 (chr-ID 2; pos 8 3487511 to 83488303)
ccgcagcgataacagtatgcgtaattttttttctaagttgctttattatagaagtacgttttgtggatgtttgagagtggatgctattttgcagttccaatacgggaacctagatgccttgtgccctccattaatacaggcaaagaagaacaggaaaaacttggtggtacatgtcccttctataattgtacatgagatctgtaaaatcttactggaagacagaaggagccagcaaagaaataactatccttgtattaacattttaatgtaaattgttttaccaattaaactcccctgccaatagcaaataagaggaataagcatagtagtttaatctataaagatggaaaatagttacactgttgagtgaaaattctgcaggcaacctgtcgatggatgaccaaacacattatacaattttactattatatcttcctcttttagagcatcctttttgatcttccatttactggttttgcaggaagcatatgctcaatttgtgtttttagatccatgatatgttgtcggtctgttgtttgtagtcctagatatcttcgtttttgtcactactaaaaacaccgatcggttctgatgtactgctatttattgctctgatatttttgtcatgtatgtgattggtgacttgggctttactagaggaacattcgtggtatagttttgaagagagaagtgagtcataaaattagagatatctgcattcattgtgatctatctttaacacttcatttttactgtagacatcaagtaagtggcgacatcacaacccctacaa

SEQ ID NO: 8441 - DNA, 757 bp, Zea mays; identical to SEQ ID NO: 8391
  Intron number 1 from transcript GRMZM2G145802_T02 (locus G RMZM2G145802) derived from phytozome v7.0 (chr-ID 2; pos 2 4367048 to 24367804)

SEQ ID NO: 8442 - DNA, 680 bp, Zea mays; identical to SEQ ID NO: 6089
  Intron number 3 from transcript GRMZM2G020843_T02 (locus G RMZM2G020843) derived from phytozome v7.0 (chr-ID 2; pos 2 104668 to 2105347)

SEQ ID NO: 8443 - DNA, 777 bp, Zea mays; identical to SEQ ID NO: 7673
  Intron number 2 from transcript GRMZM2G173862_T01 (locus G RMZM2G173862) derived from phytozome v7.0 (chr-ID 8; pos 1 72396658 to 172397434 reverse strand)

SEQ ID NO: 8444 - DNA, 629 bp, Zea mays
  Intron number 1 from transcript GRMZM2G399127_T01 (locus G RMZM2G399127) derived from phytozome v7.0 (chr-ID 2; pos 1 0634378 to 10635006 reverse strand)
gactggccacatcgcccgcgactgccccaggtaaggtgtgtccgcgtccgtctaaccagatcagatcggatcgctccaccacctgctggtctaatggcgccgcccccttctagatctcgcttaaaaaaacaacccctctcgctgtgtgtcggagtaccactttagtttagccgatccaggcacgagtgctcgctgcctctttcctcttatgcgtaagaggatcccgtccgccgttttcagatttcattcggttcgtagaagaactcaagttaagttaagttatcatggtgtgtgcttggtcgtcgttcgtcgttaaggtcccgtcctgtgttgccgaggggaaatcgaatttgcttttcttttattttcttttttgtggtttgttccatcagactgaggaaggagatgagatgattattctcccagattataatcctgcctgcttgtgcttgatttggttaccacaaatgcttcaccactacctcgcgatttgattatgcgcaacgcatgggcagttcttgtgatactgcggtgggtggttagatcacacgacccattgtttggtacagaatggaattgctggcacctaccagtagtacacaactacacgtctgcctattgtttagaac

SEQ ID NO: 8445 - DNA, 836 bp, Zea mays
  Intron number 3 from transcript GRMZM2G434252_T02 (locus G RMZM2G434252) derived from phytozome v7.0 (chr-ID 8; pos 3 2602442 to 32603277 reverse strand)
caatccaccaccagaaccgccctaccccaagataggtatgtgcaggttcaactactcatttagatattggtacaacctgtaatagactttggtacaataggatttggttctgctattcactttgtttttagttccaaacaaccaaaaaattgcatgtcctttagaaaaaatatcacaggaatatcagtaatataacactgataataaaaatgcttcgattctatatatttttcatgttataaggttgaaaacattctgtctcacggatcaaaatgggtacaaggggacgtactgcatttacaaatatatttaaccataataaaacatctttggaaaatgaatatcatttaagtccaaaaatgtttttgttgaatgttcattaagctagagtgaagagtaaacttagcatttcttttctatatctctccctcgtgctcatgtagccgtagtctcctccatccaacatttcctacgcatgcagctccatctcagtcgttgtacccattcaatggcgagctggtggcagcgatgtaggagatgatccatgacgaggtgcacaagtacatgttagtggacgacacctgccaaagatacacaatttctactggtacacattttattttttcatggtgagaattaatttcttagcttgcgcaaaaccaaaggtttagtgatttgtcaaggcagaaatcagtataatgataggtgtgcttgagcttttgataattggtttatttgaacttttatctttttatgatcatgatatattgagacataaatatcttacatgtacctttgcagtttttcagttggagaaaacatttaagacaatattt

SEQ ID NO: 8446 - DNA, 967 bp, Zea mays
  Intron number 1 from transcript GRMZM2G090928_T04 (locus G RMZM2G090928) derived from phytozome v7.0 (chr-ID 8; pos 1 30406144 to 130407110)
tctgtttgtgtttggtcacctaactcttccttcaggtgccaaatcgagattcttgtttgtttgattgttttcgttttattagcctccgtcgtccacccccacccctttctttccttcttttaactacctctgccgccgtcgagtttaggtgtaacgaaaagatgattagttggttttctgatctggggatgagttctcgtgcgcattttgggttggtcgtcgcccacattcgggtgtagcgaaaagaagattagttgacgttctcacatggagtctgagtagcgtggcttcaaatggcgatggtttgacacccatttttagtgtagttttgggcaagaaatggcatcccctttctgccacaagcaaaaagaagttgccggtgcccctgtttcgcttagctgaacattttttgcttataaagaaataaaatagaaagcaagcggagaacaaggggagagacgccgccttgccatgtgtaagcaacggccaacggcaatgctttgtttgcttgcaaagcctcgtgtgaaagggaggaatccgggagaacgatggtacggccgttgcttgtggcgttcaatcaggataaaggttgccaactttgcgtgtttccctcctgcgttccttcttaatttacgcaccccgtttcctccctttgtgccacctcttcctagtataagtgccgcatcctctatttttgcaacaccttcatttggtgagagctaacacagcgctcctgcgtgttacatgggtggttttcttgtcatggttaggctttcttggcaccggtcggatgttctggcttgacaattcgggtagacaagtttgaaattgattcttgtttgatttggttcatttctgtggctgcacctgtcccctggtttagacttttgataggctgagtaacctaatttgtgcccaactttcctctgcaggtacctagtattccagaggtgatttctcctcattg

SEQ ID NO: 8447 - DNA, 667 bp, Zea mays
  Intron number 2 from transcript GRMZM2G363377_T01 (locus G RMZM2G363377) derived from phytozome v7.0 (chr-ID 2; pos 1 84744172 to 184744838 reverse strand)
tttaattgttctaatttcagtgtactgagttggaggtaatatataccaaacactggtattttgaatacatgtttggttcttgttagggtatatcagttagggtcttgttcagctagggtgtagttcttacattttgcatcaaagcatcgtaattttagctctaattttaacggatagagcacagagctgggcttgaatagaaaagcacatctgacctagttaatgttgtaggccaatgagctccatacagattagatcagtcttctttcttgtcaatggttcaactcactccaataatttcattatgttattgttagcataaaataagataataatatgtttgcatcactagacaataatatgtgattggacggagggtatttttgtttgactactattaagacaatttttgtggtagttgtgatgccaaacaaaataaacacagcttgccatagaagccaggcatgatgacaattagcaaggaagcacctggtttaatattattaattatagatgaccggtccatattttgaaactgttcttggacaacttcataagccttagtctgttcgaatcctatttgtctaggttcagttcgttggtgtacatgtcaatttaattgttctgttagaatctcgtttgactttgtactcatgattttagtgta

SEQ ID NO: 8448 - DNA, 977 bp, Zea mays
  Intron number 1 from transcript GRMZM2G151021_T01 (locus G RMZM2G151021) derived from phytozome v7.0 (chr-ID 2; pos 4 7422725 to 47423701)
caccgtgggcgctcacctcgctgccgcctgccaaggtacatcacggtcgcactctctctctctctctctctctctctgtgcgtgcgtgacctgtgcgcgtgagtgcggtgtgtgcgcgagggtgtgtgttcgctcggatcgagtggtggtctgccgtgatcctagtgtactgttctactgtgtcttcggatttggtttttgagcttttggcgtgcgtttttgtgtcatggtatttcgttgcgagttcccgtcttccgctgtggcgacgaacccgtaccgtacgtcttgataaagtttgttcgatttttcttcgcaagagcgctactactgggtgggcatatttggggcgagatcaccagtggctccatagtccatacgcgcgcgactcgtgttttttagcctattctatttggcctgaattttgaaaaagtttgttcgtttaattggttgccttctctgggcttgttttgccccattgatcacgtgacccgtttctgatgtttttgcttactgaaatatacatttgctttagtattaagcgacgcacggacgctgcgtttctttttcacttattcctttttgcgtcattgtctgcttgttctttgttgctcgaaagtttgctggcctgaattctgaacatagagagtaactgccctctgggctctggcctctgcaggagcaggctgcaagccggttgcagaacctgcagcagcgctgcagcctttcaggatgccggcaaagaccagccccgtttctcttgcccgtttgttttcttggcccgcacgaaatggcgccgcgtcgcatgcttttctacgcgagagacgatactgcccttgcactaattatcactcttgttgttttatttttgaacgtgaaattattgcatgtctgggcggactataacgctgttaaaaacttaaaatcacgtgctattgcctgcaggtccgtcacctcccgccaccgttcctgttatcgcc

SEQ ID NO: 8449 - DNA, 719 bp, Zea mays
  Intron number 1 from transcript GRMZM2G155435_T01 (locus G RMZM2G155435) derived from phytozome v7.0 (chr-ID 8; pos 5 8610519 to 58611237 reverse strand)
gtgccggagaacggaaagatcgctagggacgctaggggagtgcgtctccgagttcatgtaacacaataaaagccatcaactaaaaataataaatttggttattatgttaaatatggtaataattttttaagtgtttaattatttatttgcactttgaatcattttctttgtatgcgcatcggatgttttatagcaatgcttcttaaaagaaatacttgtaattaatatgataattaaataattattagtctaaaaataaatattgtatttatatataattttggtgaatttttatgaatttttgagctatctaaaaatgtatttcggaattagaaaaaaaagaaaaaaaacaaaaaccctcctaacctagccggcccaactaagggcccatcttctaaccctacgcgcgcgcgcctgctggcttccagccagccaagccgccgccgcccctgttgtgttccctcttctctcccctaactctctcctctctctgctctcttcaacgcacagccgcccgaccgagctccctgcgccatcgacgcccagcgcgcgccccatgccgaccgagccgcccaggctgcgctcgacgctcgcgcccaaggccgagccgtcgagctccctgcgcatcaccgccgcgacgcccacgcgaccagcggccgagcccaagacctcgaccggcatcagcaccgcgcaacccgactgcccccaccgcatcatct

SEQ ID NO: 8450 - DNA, 664 bp, Zea mays
  Intron number 1 from transcript GRMZM2G038909_T01 (locus G RMZM2G038909) derived from phytozome v7.0 (chr-ID 9; pos 8 655353 to 8656016)
gccaggtatttcttttttcctgtctctattcaactgttgtcgcatagctaatcttgaactacggattgcgacagccattagaatccagttatatatactttgctgcagtgagcagccaattggccgtagaccgaacaatctcatgttcatgatgaaaaagaaaaaaatgagggatttagagttttggaacccaatctgtttttacctttcgagcttggttgcaatgagcaggaagtgacttcaaccctttatagtgcagggttgcaggctgtagtttcttttaaattgtttgcatgtatgcagtgatgatgcatgccaaatcaaaggtgctatttgcttttgacctaccttatgtaggaatttatgatgtgtaaacaggctacctaattcccttccatcacataaaattgttacctgtttgtatagcacataactgcattctagaagatcacagatagtcaataacataaactgctcgttcttggattcggaattttgtaaacccaatgtgcaatgtaataactatggacaccccatccatgcatttaaatatgtatattaaaaatattaatgtggtttatgtccaatgcatttcttaactaactaccttcatctaacacaatatttagggctacatcatcttgttgttgacgggttccgtgtg

SEQ ID NO: 8451 - DNA, 245 bp, Zea mays
  Intron number 1 from transcript GRMZM2G133643_T01 (locus G RMZM2G133643) derived from phytozome v7.0 (chr-ID 4; pos 2 40162915 to 240163159 reverse strand)
aaactcagttgaaggcatctcgcgacgtaaggtggcaaacatgtgtcgctagatatgttgcttcagtgctccattttgaatgtttgaatccatagtacgaaataatgtacaatttattttgtttgactaggataaggatcacctctattttgtttttcttttctcaacaatagtgatgctttgcctctctttttaccatattctatggtatgactgaactaatgtctccatatatctcatacagg

SEQ ID NO: 8452 - DNA, 619 bp, Zea mays
  Intron number 1 from transcript GRMZM5G816552_T01 (locus G RMZM5G816552) derived from phytozome v7.0 (chr-ID 2; pos 1 49203843 to 149204461)
tggttagtgaattgattttttttctttgcttggatttttgtagttcaagttcgctcattgaggtccttctattttaatatgttctcgactgatgtttatgcacagtagtatgagcctatactgagactcagaagtatttttgggacatgttatgcatcattattatttcttggtacgatctcctggatcatggggagcaccgaaaaatctatgaagttctatatatttttacattttttgggaaaaattaaacggaaaaatggaagcacctctttaattgattttgcatataaaacatgctgtttgcctgtttcttaccatagcttatggtggtcccatgagatccaaatagtacctgagctgtgaatcatcctgaaaaccatactaatatactatgttttatattgattggttgtctaaatcaaaatatcacccttcatgattgtcccccttctcatgttctcatattatagggttatctatattagttctttctgtatgatgcatagattcataggatacagtcaccttgaattatcattggcaccttgttataatgcattttgacccccctcttctcccaggaatctgacaagcaaactcagtgctcaattagcgc

SEQ ID NO: 8453 - DNA, 451 bp, Zea mays
  Intron number 2 from transcript GRMZM2G167019_T01 (locus G RMZM2G167019) derived from phytozome v7.0 (chr-ID 2; pos 1 11484399 to 111484849)
gttgcctgaactacatcgaggagaacgtaagttctatttctcgagctcataggactctttgaccatgggcaactctatttatccagatcatacgacttttcaccttgggtaactgatggttgttcatgcctgctgttcgttgctaattgccgccacactccgtctctctgcataggcatatatgttaaccacgatgttgttcactaaagaaagaaggataactaatgaaacatacaaatggtatgccactggcactaatagtttcatatatgcctatgcattttttacagactttgtgtgagaatattattctcactttctttgctttatgttttcactcatatatatgcaaactagagtggaatctttgatgcacacctctttcgcctcagatttaaaaatccctatttctgcagcatagggtgcgagagcggggaagggagcgacggtg

SEQ ID NO: 8454 - DNA, 1016 bp, Zea mays
  Intron number 3 from transcript GRMZM2G128491_T01 (locus G RMZM2G128491) derived from phytozome v7.0 (chr-ID 9; pos 1 20080201 to 120081216)
agagcgccgtcgcaactgcctcccgtgatcgtcaggtgcacaactttggatctgcagtctgtggggtggaacattttgtttggcattgatctcctgcacaaagtactcgttgtctatgctgggggtctggggatagttctttttgtttcacgtggcgtgtcggcaggatcaatgaagaacgtctatcagatttgttgcataaagtgccgggacaggtatccggttttgtcgatgttcaataatgctatagatcttagcatccggatactagaattagagttttcagtgttctcaagccctcttagcagatttttattcaacaaagcagaaatgcaaacctgatcgattaaaacaggacctagagattctgcattgtcaccacatgactgatctggttgattagagattcagttaacctcttatgctgttctgtgttgttcttagatactactagtaaaaaacgtaggtctcttcgtgaagaaaaattggtgcaaaacaggagtcttatgttattcttcattcttaaatagtatagtaaacaatatgtaataatgtaagtatcgtgattgatgggggaaatgtaggtctgattgtgaaacacgtacaatacatgtaatgcaaaagttgcagttccagccatcatatcgtcgtgatcaactatggtcttggttttttcatggaaggatgatcaactttataattagctacttcacgtaacatactaaaaacttggtcagtagagttcacagctggagatcttttgatgctattaggataattgtattagcctacttttctacaggtgtctatgccgtaatttgttggaactataattatgcacttgatattgtctgctagagaacaggaaaaaacaaacattttccttctaaatggcatacgtattacttcaaagaaatgaagaaaaaatgatcataccattctgtgtgatatggtgagacaatgagcttttataatctgcaggctagccagatcaccttttcccaggacgggaccgt

SEQ ID NO: 8455 - DNA, 917 bp, Zea mays
  Intron number 1 from transcript GRMZM2G135695_T01 (locus G RMZM2G135695) derived from phytozome v7.0 (chr-ID 8; pos 3 2519172 to 32520088 reverse strand)
cctccctctctgcaccgcgtcgccgcttctcacaggtaaccaatctcattcatcacacttagtcagatcggttgattttccttcgttagggttattccgttgctttttcttcgtgcgcacatccaccgttgtcttcttcgtgcccctcccccgccctaacatgagcatggtatggatgacccagttcttctttaaccacactgttactgtcttcttggcgacgacaacattcatgcccgttcccatccttgcttgcagagatgcaacagttccactggcacattacttactgctattactgcattcgattttattttgttttttagctcagttgtgcgattcgcgcgtgctaacatcacaaaattatattttttttctttagtgtaaaaatagtgagtggattaaaagtctcgcaaattcaagaggcttatagaaaagtggatttagttgcctatacaaattactcttaccaaccgaatcccctcccccaaagcctgtcgtctgcctctctacttcctagttcctctgctccattaactaatggcaatccctgtgtaatctgaccatccatagttgctattaaatctttttatctcattgccctgatggggttcagagcaacctctacatagagtagttgttcactatgcggctatatagcaagcttttgaatcattccaaactaagaacgttgcctatagcaatattactgctcctaccagcccattcaatcagctaatgaccacaattgacctattaaatatttgtacctgtttattataacccttcgatgctgcaatcttcaacaaagctgctctcaatgaatatgtgatgccttgttttatatagtctctaactatcggtaaatttttaggtatctgtttctgctgcatttgaaggacaacatcaggactgca

SEQ ID NO: 8456 - DNA, 935 bp, Zea mays
  Intron number 1 from transcript GRMZM5G837682_T01 (locus G RMZM5G837682) derived from phytozome v7.0 (chr-ID 1; pos 1 07883620 to 107884554)
catttcttcaggtcacatcttccaagaaacatagatgatcaggtgtttatccaatgggcacaaatacttcgcatgcttagagggtgtttgatttctaggaacttatttttagtctatccattttattccattcaagtctctaaattaccaaatactaaaactaaaataaagttttgatttccgtgtttggtaatttagggacttaaatagaataaaatggaagaactaaaatttaatccctataaaaccaaacacccccttagtccccttggtccagggaaagtcttgagaaacagggaaatgttttccatgatcttcacaccttcctaacactctttccgtactctttccttatctcccacagctgctccccaacttccttcatggtcggccggtcgtcccgtgtcggagcagcgcattggaaagccaggctaaggagcttttcaagcacctcgtcgtccacgtgatcttccagcaatgggtccagtatctctctcgtgttgccttcgttgaattttttgaaagtctgcatagaagcacaaacacacacccacattcactcggccatttcagaaaacatcaaaaatgacaaatggtctcattataaaaggttatagtatatataaaaaaaaggaagtccatttttcaacccaggaaactctactgccagtccgatcttcaactttgaactatgaaatctaacttcgcaacccaaactcacaaaagtggacttatcctactaatgttagcctcaatctgaccgagttgcatgaaaaaccatggttattgtaaaccggcaatttgatcctagcatttgatttctatcttagatcaatttcacacattgtataagcatagagtgtggagatacatgaaatgaaggggattgccgagacatacccatctgattgtgatcctctcttcaggggttcgct

SEQ ID NO: 8457 - DNA, 674 bp, Zea mays; identical to SEQ ID NO: 6877
  Intron number 1 from transcript GRMZM2G029909_T01 (locus G RMZM2G029909) derived from phytozome v7.0 (chr-ID 10; pos 82759713 to 82760386)

SEQ ID NO: 8458 - DNA, 952 bp, Zea mays
  Intron number 1 from transcript GRMZM2G083551_T03 (locus G RMZM2G083551) derived from phytozome v7.0 (chr-ID 1; pos 1 94661674 to 194662625 reverse strand)
cgtggcattacagcgaggagggcgtcgatcttgtggtaagggactactggttcggtctgagcctatctgcttctgacagaaatcttaaattatgtatattgattgatgcattcttgggtcgtatctacgactatttaggccttgttcggttattctaattacatgtggattggagtgtattagaatggattgagatgaaatttgacttgctatggatttaaaccgactcaatatcactcaatccacatggattaacagtgaacgaaagcctttagggcgcaacgatgaagtgatgaactaataattcaacaaaattacatatgcacctatgctactatttaaagggtctgcatcattgattatggatgtgaaagaaatatacgttggaatgcccaattgatcatatggggattatattgctacagtccaattatgggatggaaggaatgtggtgtggggttttgagcacaggacatgatctgtggaacttaatagccttaactaaagctgtttgttgcatctttttctgactggtatctaacataatctgaagtctaagggtttgaattatgtagatgtaaggtattcaatttgtgtaatgaagaaaaaagaaacctctaattatatttgttactttttaatgttaatctttaataactaatgggtccgtcaacaaattagttggctggtgacagcttcaactttgaactcctgttgctctcttaactttatcggatttttcaactcctgtccttattttcttttgctgcaacaaagctttgatggatcagacagtttgacttagtaagctcattaactagtcttgtttggtgcttgttgggctcattaacacaagcactgtagaacctttcctcgatttatagtttttccttgttttacctagcgttccaactgtaacgccatcttgactaatgacaggttaaggatccta

SEQ ID NO: 8459 - DNA, 768 bp, Zea mays
  Intron number 1 from transcript GRMZM2G088487_T02 (locus G RMZM2G088487) derived from phytozome v7.0 (chr-ID 10; pos 39593762 to 39594529 reverse strand)
tccctggtgatctacaccttgccaggtcagctgtcttcataacctttcatgtgccaacccttcttttgtttgtttagggttaatgtttcatgtaagttctgaataaatttaaaggttgggccatctaggaacatctagtgtttgaactttgtctgtttaaccaatttaagtgcacacattgataaccttttttgacaaactggattttgtagcttccagaactagaggtgttgtgcatgcacacatgtttttgtgggagctggtgaactagcattttgagctgaaacttcactataggcattagaaggcttgaaagaccttagcatttgaattttaagaacacaaaacttatctttgtcaaacaaacaaatagataactaacctaaggacactggaatgtgtttttgggactatcctatacttgggacttttgttttctcatattgttgtttatagtgtcttcgtaaagcaccctgaatttacaatgctaactccagaatccagatgccattaatgtcgacggatgctaagagaatgttattaagtacatgtttcctttgcttgaaagttgtttagaggcattttcttaaaatatattgtgctgtattagggaagaaagaatgagttaaatgatgtaaaatcacattcctttgaaatggggacctactaatgagttgactaaactatgggattttatgctactcaaatctcttagcagcttgctgtgcaatttctgggcaggttatcatttaaggataacccttttag

SEQ ID NO: 8460 - DNA, 650 bp, Zea mays
  Intron number 1 from transcript GRMZM2G432557_T01 (locus G RMZM2G432557) derived from phytozome v7.0 (chr-ID 1; pos 2 0218813 to 20219462 reverse strand)
gggaaccaaaacccgacggagaattccagttagaccttgttcggttattcccaatacacatggattggatgagattggaaaaagttaagaaattcgacttgtttgagattcaaactcatccgatcccattcaatccacatggattgagagctaatgctatatactatacatctatcgccaattcacgatacaacgggctaagaaaaaattatggaatcataagtttaattagacattacggtttgcatacttcagcaagatatttcctttaaaaaaacaaagcactgaaaacacatagtaacatgttgacacggaccctctgtatcttggttttagcttgacaagttttttttggacaatactaccaaacatgttccgttgtaatgcacagaaaatctagtagtatatttgtaccacattaaatgttgcccaccacatcattacgaatttgaaatggatgactatgaaatttgcgcagtctgccggtagcaatgaacagggcattgcctaattgttgatcaggtatatggacacacctaaatgcagttgcagtgactcactttgtccattgctcaaaaacgagtttctggccaccatttcttccaagcacctggcgctgtcaaccccgtccccacggctatgcagttgga

SEQ ID NO: 8461 - DNA, 934 bp, Zea mays
  Intron number 2 from transcript GRMZM2G062129_T01 (locus G RMZM2G062129) derived from phytozome v7.0 (chr-ID 4; pos 2 831640 to 2832573)
ctgctgcgagctcttaccggtgagtcttaactggtagcctgctttattttttatctgaactctcaatatagtttaaatgacagagtcactgtgttttctgtaagagtgaatcatgtaatgatcttcatatgttagtacttactacatactttccacaaaacttacgcacattaaacccatcccaatatcttctccttaattgctgagctgtttgtatcctgtcatgccatgccatgccatccatatgaatatttgaactttcaggggtatgttagtattccaaatctccatcattcttaactcccccaaaggttataaacctatacatgctccttgttgtgaatttctcggaggactccaatttccagttcactttatcctcctcctctgttagtctggtgggctccaactttgacatcgtctccctccactcagccatctctagctcatcaaaatccacttacattcatcattgactgttatgcctatatgttacttctctagcgattactggtatatgcatttagttttgcatttgctggagtgttttcacttgtgcatactaaagtcttcccgcaatttgtcaatgtaaatgtcacctgctgtcagggtgctttgagaaatcttgttccgacttaaaaatattttctgaggaaaaaacgtggacatcccctacttaatctttttcattatttttttattcaaatattgaacctagtcagttgaagatctattctttctgttttcagggtctagtttttccctatttttatagatattttttaattaatataagtggcagtggtatcacaaggctcaaggactgtatgtgcaaatgtgcactgttgtttttggactaaatatctatccattaataatttcccatgtgttttttgcagagatttcaagcaacattcaaggggaaatcctcaat

SEQ ID NO: 8462 - DNA, 264 bp, Zea mays
  Intron number 1 from transcript AC205550.3_FGT002 (locus A C205550.3_FG002) derived from phytozome v7.0 (chr-ID 4; po s 140353466 to 140353729 reverse strand)
gaggaggtttgacttacttgagagggagcatgcaaaggaaatgatgaggcacatgtagaagatttgaattatttatttatattattgtgttgtgagaactatttatttgctttatataagcacctttggaatgatgatattgtgtccataatctttgttttctgtgcacagtttgctttgttgtgtacaatttgtttgttgtctacatattcatttgctattcaaattatgttgtaaatattaatatatccatatcttgtgtag

SEQ ID NO: 8463 - DNA, 801 bp, Zea mays
  Intron number 1 from transcript GRMZM2G124042_T01 (locus G RMZM2G124042) derived from phytozome v7.0 (chr-ID 1; pos 1 4032284 to 14033084 reverse strand)
agtttctgcaaggtttcgcatacatatattaaccaacaaccatcccaaaaaaaaaaggaaaatgaaactggaacaaatgtattgccaaagctgcaacgctaataccttttgcgcatcacttcgcaccagtgcatgcaagcaagctattcactttgcatacactggattcatattcggggttttgtgggaaaaaaaagactacagtgtttatttagccatcgatctccttcttagcgtgacaaaccctaaatcaaagtttagctaccgaaaagctaaaagctcagaaaagccaaatttgtatgggtaccaaaaagactagttttatagggtttttttgtagcttctagagtttaggtagctaataaaatcatcgaaaaattatcactaaattttttgtataagttgttgttgggttttttgttctaagtagttaatgatagtttttcaataacattattagtttactaaactcagaaaactataaaaaaaaccctacaatattagacttttctacttcccttataaacttagttttttacctttagcttacagaagctaaactaaaaggctagaatttgtttttatcttctggcttttaatgttaagaagctgcatggagcacaaaaattataccgtagtagattagattatagttgcattttaggtactacctgaaagattggcatgcgtagaattaaggccccgtttggtttggggtatatatgcagaatctgagatgatttttcctgagtacgtatatatgcaggaggcctacctggtgccgcggacgccggtggaggc

SEQ ID NO: 8464 - DNA, 718 bp, Zea mays
  Intron number 1 from transcript GRMZM2G454261_T01 (locus G RMZM2G454261) derived from phytozome v7.0 (chr-ID 10; pos 91652398 to 91653115 reverse strand)
gtcagtgatgcttctgaggcgatatcattcatttgtaacgatgttgttagctttggaggggatccttataagtaagtgatactttgacatttgtttgcaagtagtagtacttacaattgttctttgagcatctctactttagatcctgtattttgattgttaacttttaataaatgaatttatgatgaatctgtagaatctacttgatgggtcaatcagcaggagcacatatcgcgacctgcgctctcttacagcaagcaattaaggaatctaagtgagagaatacctattggaatgtggctcaaataaaagcatattttggtttatctggagggtgagaacttgaaagcctcggcatctgttttaatgtttgtaaatttacatttttaatcatatatcatattattaatcatttctcaatagtgccagcacataagataattttatctgataaagcactaaacatacttgcaccatgcttgaataatgaaatatgatatatgaaactgggtctagcccttcacttttagaaaaggctagacttcttcgatttcatcagactgaattttgcatcttggcaaataggaatataaaatgatctgtcaaacaaaacatactattgctaccctgtttctgctgtttcaaactgagatactaaggttgtgttgccaatcctacataacatatatacttattttctgtgctctgcagtctgacg

SEQ ID NO: 8465 - DNA, 987 bp, Zea mays
  Intron number 2 from transcript GRMZM2G002062_T01 (locus G RMZM2G002062) derived from phytozome v7.0 (chr-ID 4; pos 2 08973990 to 208974976)
agaaagagtgtctgatcattgtgaagaaagaggaggtagtaaaaactgttctttggagatgcttggtcatatttaaatcagtgcagagtgtctgatcattcatgcatgatcattaaggttagcacaaactacaaataatagtattggctagccatgactgatatctatgttgcgaattttaagctattaccattttctttactgaagtaggaaactaaagttgacaggaagtgtatagatgatttaggtttgccagtgcttctcatctaaggtaaatattgactattttccctaattccatttttctaataatcctactccctccatccaaaactgtaatccgttttgcctttctaggtatgtatcttttgttgtgcgcctaaagatatttctaggtatgtagcttttatctgtcttaactatattagtatgtttatttcctggtttgaggtactaaaaaacaattttgggttattattgatctaatattttttccggtgaaacaaacctgcatttgaacatcatttgctatgtttctaacaaggttactcctctttttatgctatgtttgtaacatcatttgctccactaaattttcatacaacttaggtcgccccttagatgggctcaaaataaggtggtttgaacacatttgaatgttgaaactttgagctgggggaaccctccctttctccatcgacactcctatcaccattgattcttctgaaagagctagctaactgactatctccttcaaattcattcaaaccaccttaatatgatggtatacttattcaaacgcatgagcaccctgccaaggagaattaagtggggctcctcttgttcaaaatgtaaagtgatactgcacgtagcgctttgcaaaaaattgaccattgagacaacgcggtttgatatttaaaccattaatcaagttgtgtttttgctttgttaggtcgatctcaccgtgcacctcgcctacgcccacca

SEQ ID NO: 8466 - DNA, 786 bp, Zea mays
  Intron number 1 from transcript GRMZM2G454176_T01 (locus G RMZM2G454176) derived from phytozome v7.0 (chr-ID 1; pos 2 89853984 to 289854769 reverse strand)
tgtttgattcagctgcgagctgtgaaaaagctgatgtgagctgtatgctgtaaaaaagttgtgagaaaaaaaactgaaagtcgtttggttcaagttggtgtgagttgtccactgtaaaataactgcatattgtttagatgcactttgtttgactgtctcttaatcagtatatctaattaaaaaccgatttcacatttgtgttcagtatatctaattaaaaaaccgatttcacatttgtgttcctgatatttttacaaataaatcaattttacaattccatttaaaaaattatagtaaaaatatttttttattttatttattatgacacttaattatttttaattctattttagtttttatgtgccacatttgtttgttaatataacgaacttggatgagtagcaaaagcagggtccaagctgctttcaaatttgtactacagaaaagctagttttttaaagtagatgtagaaaagctgaacccctttggtttaatttttgccttttcaaagcagaagccggttcaaaaggttgaatgaaacgcaccctatgactatttgatgtcataaatattgataaatttggtcaaacttcaggtagtttgactaaggagagaactataattgcattcttttcggggcggaggtagtacagtacttattatgtgtagtgtaggttggtcactgttttctgaaaatatccttttcctcacttgtactgtgctgaataactgaagcttatctcattacttttcatttcttgcaggaaccgcaaagagtcttgcata

SEQ ID NO: 8467 - DNA, 926 bp, Zea mays
  Intron number 3 from transcript GRMZM2G152708_T01 (locus G RMZM2G152708) derived from phytozome v7.0 (chr-ID 10; pos 108579949 to 108580874)
tcaagacttttcagaggtttgatcatctgcatgctgcttttagtcatcttgttgtttgtaatgcctctatgtttcctctgtacattggtaactatagggcaacatggttgttgaaattttggttggtgtttggaaacttattaagtttcatgtatttcaattgatcccataccgtttgtattatgtcatggaattgcaattttgattaatcttagctcacttgcatgtgtgaatagtttagtttttttagctctcttcctttcttagaaaaaacattaattggtactgcgttatcattagtattttagtttactgtaggaatccagattacacaattggggcatgtttggtagaacaaatgcttcttatgattctttatgggaagtgaatgtctgagagaagataatatatgtctaaaagtgattctctatgactactgtattttgatgacttgaaggtacgctagtcaatgggatgctccttgatcatgcacaataaatcttgggttgctattttaacactacataataatagataaagcttggagaattgaaagctgagctaactaaggtcaatgcaaacaatgaaaagttatagaggacctacaaggagctattagaatgccatactgctccccaaaaggtataactttctaaaagtattctgttggatcggatatagctttgatgcatatttggcatcataatatgcgtatcaatagagcaagggtggcaagttgccccatggaggaaggatgaccgtgacgtacacttcgcattcgacctcggcgagaacttgacctgctaatgtgagctcccgactctttgactctctccttcagttcctcgaggctcgagcccttgcgactgttgcatctgtagaaatcatgaatttatggcgtgaaattttttagttataaatttaac

SEQ ID NO: 8468 - DNA, 641 bp, Zea mays
  Intron number 2 from transcript GRMZM2G347339_T01 (locus G RMZM2G347339) derived from phytozome v7.0 (chr-ID 4; pos 2 11906658 to 211907298 reverse strand)
cttcgagtgaaaccagagctaactcttccagcaacgtatgtttgtaatttgtttctggttatctatggtaatttgttctcccattttttcatgtgttgtatgttagtgtgtctaatcatttcaaagcccttacaaatgccttactttaggctttcttcaagaatgtcatttttgtcactgaaaggtacctctaggtcccacatgtgaatgtcatctacttgctagaaattttgattttgtgatcaggaagcttattttgtaatacaactgaaagtgaagttcgttttataggacaagtggacaacataaaaataagaccctgaataattcacaacagaccaaatgattccttttgctttgtttgtttaccctttttgtgctcaatgcttggggttcacatacttaagccttttccctatttatggtgaaagccgggatacattctaatatgcagtttgaactcatacggcaaatagttctgtctataatgtttaattgtttagtttggagttttgcgctggttgaattgtttcacacttttttctatcaaattaatcaaacttgatatgtgcgagtatgaaaagtctttaattctttatatttcaggcctattgaagttgaacaatcgattctcgaggacc

SEQ ID NO: 8469 - DNA, 536 bp, Zea mays
  Intron number 2 from transcript GRMZM2G303810_T01 (locus G RMZM2G303810) derived from phytozome v7.0 (chr-ID 1; pos 4 441304 to 4441839 reverse strand)
acaggacgaagcaacttgagacaagcgtaagaagaacaggttggccttgtccggcaggaatcgcggccggggcctcccggaatgattggcacgtcgaccggccggccgggaacacgggccagtcggcgtccgcacgcccgtgcgcggacgccaggccgacagacagatcgaggctgcgcagcgcagggcaggacagcgccggccggccaccacccgtccgggtgggccatggactgcaacgtacgggtgtgggccattctccttggaggaagccggagtggaggccagagaaacaggcaggcagagatgggagtctggcgcggctccgtcgacagctcgtcaaatgtcgagttggaccgagtagggaaaaaaaaaacgttgggtcatttttttcgtttataagatgacaaaatgaatagatcttgttcgattatttgtttggttatttcaattcaaataaaccgattcaatatcacctaattcatatagatttatggtaaaaccaataagacctaaacaggattggagttcggttg

SEQ ID NO: 8470 - DNA, 1001 bp, Zea mays
  Intron number 1 from transcript GRMZM2G703866_T01 (locus G RMZM2G703866) derived from phytozome v7.0 (chr-ID 1; pos 1 97426616 to 197427616 reverse strand)
atcttcggcgggctcgaccactaataagtcataaggtgggctagggtttagtttttatggtggttgggcagagttttttttttacagtttgcatgcacgacgctgtttagggtcgctccatgctgtgtgcggcactgcggccgtgggaacagcaagaggatcatggatgcggccgagtcagggtgatgcgtctcgttggggtagattaatttttttggttgcttagttgttctcccctaattgacgcaactagttagtttctcgttgtccttgttagtaggttaatacattctttgattttaactctttcgataggttgaagttatttagttaatttaagatttgtcgtgccttttgtagtttaaaactttatgtgattttaagtcatttgatacttttcaagttattcagttaccattttatatctattttgactcgtaatttggattacaaattcgagtttgatatggtatgcacccaagacatccatgtttgctttcagtcatcctttcatagtcgtactttcgttgtacaatttaagtcttccatattattttttagtcattccataacattaagtcattctttgattttttttttcaagatagtttttatgctatgctcatctgatatgtctgtattttctttcatttgatcagaatcgatcagatattattggtgtcaatttctttgatatgttatatagtctaaacaaggtgcagtgcctattccgagttcgtttaggcattttctcctggcaggagtagtgatggccctttcaggcgatgatgaagtgattgtgtgaaggaaaacacctggataattattgtttttatgtggatatacagtgtgatgtaattatgtcgttttttgtggtattaatgtctgaaaataaatgtatttcgtatgcgatgatgtggaagatagctagggaatattggatatggtgattttggcgtgaacaacaacttagatggtgtgttgcgacgttgattcagaca

SEQ ID NO: 8471 - DNA, 458 bp, Zea mays
  Intron number 2 from transcript GRMZM2G061099_T01 (locus G RMZM2G061099) derived from phytozome v7.0 (chr-ID 1; pos 8 9287932 to 89288389)
ttgaggtaattttttctcgtaattgaataggtaaaataagccatttatagagttgcagttcatattacaatatcttattggttctaccatgtcataactaatgctggttttcctttagaatcatatacctgagtgttatattttttcttggattgggtgctggatgtgtctataatttatggattaattgctgtatattcagcaggttacaatcatgctatatgtttttttggtaagtgtagtttgatcaacacttcttgtatttagaagatagaccataccaattctagtttactaatcaaatgtactgtcaatctgtcacatgttaaaaaaaattatttggactgtgattgcaagtcgaataataatttggtgtgagtaggaccctattcactgacaagagaatttcttcttttcatgcaggtagttaattcagtagattcaactgtccctgagaa

SEQ ID NO: 8472 - DNA, 678 bp, Zea mays
  Intron number 2 from transcript GRMZM2G062969_T01 (locus G RMZM2G062969) derived from phytozome v7.0 (chr-ID 1; pos 6 2228537 to 62229214 reverse strand)
cagctggagctggaggtatgtaacatgttgtgttgatatatatgctttttaatgaaagttgtttccattttctattaatatctgtttctggaaatcttgtctcgcaaggaatcactattccctcagtcccaaaaatattaaggacttgtggtcccaagtcaaactatactaagtttataaaaaagaaaagtagtagttatgatagctattcttagaatagatccactatataatatacttgtacagtttatttctttgatcttgtagatgttaatattcttctctataagctgggtcaaacttaagacagtttgatttatgactagcaaaaagttcttatgtttagggatggagtatacttttgttgctaaggtagaggatttttaggcttaatttacgagcttcagctaaaagtcaggtgggaacggcatgaaaaagagtgccataattttgttcgcgttctccgttttatgttttcttcccaaagtatcttttcattcagtacactaactataactcctgttacttattaacgacaaagttgtatttgttgcatctgcatgtcgtgagatgctaaaataagtggtgctgggtatttgtgaaagaaagcttcttacactctctctgcttggcgagtaaaagttgtggatgctaaatgtacctttcataccgcaggac

SEQ ID NO: 8473 - DNA, 968 bp, Zea mays
  Intron number 1 from transcript GRMZM2G106308_T01 (locus G RMZM2G106308) derived from phytozome v7.0 (chr-ID 4; pos 1 37346246 to 137347213 reverse strand)
ccgacgacgcggaggacctgctcaacctcctcatcgtgagcctgctcctcctttagctcttgttctcctcccgttgattgttatgcatatgttaggactgcgcttctatgatgtgtcgtattcgcctgcgcgcttacggctgtttggatttggcattagtaggaaccgagtgaatgtcgtgcccttacctgttcgccatgattggttgggtcgcggatgaaatgctactaggcctggtgatttgctttaagttgtcttccaggctatgaaatctgtaaatttattttgttccaacaaaacaggatgtgtgttctccatgctggactgttgctacaaggagttatctgatttccttggaaccagtttaccttttatgttgtcttttgagacttggcttcttcttgaacttaaattttatattttttggagttcaaacgtggagtaattatctattggacattgaaaccgtgacgattttatttgtagtttttatggtcttgtttggtttgagaggaaactggaggtgttggcctcctagtatcttattgatttgattgaggtttttgactaatataggattctagttttgcattatcctagtttattcactgtgttttgttggctaggtggacgccaacgtggttttggagtcaacaaccatggttcaaatccccatttgtatataattttagcattgtttcaatttaaatgcaggggcacgatgacggtggaaactgtggaaccaggaaaactgatgctttaatataattttagcattttttagtttcatttttcttactgtacagagcaatttgccatggtttagggtttactggaaatgatgtactcatactgtttgagtaaatatgaagactttgatcttgctaactgacctacctaagcttgttcctcgaatcgtatgaagtcatcaggttggttgatggtttgttcatgcaggaagttgagga

SEQ ID NO: 8474 - DNA, 913 bp, Zea mays
  Intron number 1 from transcript GRMZM5G809663_T01 (locus G RMZM5G809663) derived from phytozome v7.0 (chr-ID 1; pos 1 06418171 to 106419083 reverse strand)
aagatcgctagggacgcgagggagtccatccaggagtgcgtctccgagttcatgtaacaccataaaagccatcaactaaaaataataaatttggttattatgttaaataaggtaataattttttaagtgtttaattatttatttgcactttgaatcattttctttgtatgcgcgtcggatgttttatagcaatgcttcttaaaagaaatacttgtaattaatatgataattaaataattattagtcttaaaataaatattgtatttatatataattttggtgaatttttatgaatttttgagctatctaaaaatgtatttcggaattagaaaaaaaagaaaaaaaacaaaaaccctcctaacctagccggcccaactaagggcccatcttctctacgcgcgcgcccctgctggcttccagccagccaagccgccgccgcccctactgtgttccctcttctctcccctaactctcttctctctctgctctcttcaacgcacagccgcccgaccgagctccctgcgccgtcgacgcccagcgcgcgccccaagccggtcgagccgcctaggctgcgctcgacgcccacgcccaaggccgagccgtcgaactccctgcgcatcaccgccgcgacgcccacgcgaccagcggccgagcccaagaccccgaccggcatcagcaccgcgcgacccgagcgccccggccgcgacggtccgcgcgccctgcgttgagccaggcggtcgaccaagccgacgagcccgacgtccgtgacatcaacgcgccgtggcacagtgcactcgccgtccgttcgtctcgcgcgttaatggagcatcaactcctccgtttcttcctcctcccaacgttatttttcatctctgcagggcgagtgacaagtgcgtcaaggagaggcgaaaga

SEQ ID NO: 8475 - DNA, 961 bp, Zea mays
  Intron number 2 from transcript GRMZM2G360529_T01 (locus G RMZM2G360529) derived from phytozome v7.0 (chr-ID 10; pos 138048870 to 138049830)
cgcaacaagttgcctgatccgttcttgctctcgtactttcttcgttctgtcaacccctatgaaacatagagcttttatgatcttctccacacgggacgggtattcatggatacaaaatactcgacagctagccattttaagataaagcgtggatggatgcggattgattatatattcttgtaaggacatatcggtattcatggatataatagtgggcacacattaagataatatgtggatggatagaaattgacgacggtcctgactttattcggcactagtatatgagtgtattgatgaaacgggtatatctagagcatcatgaatgcaactatgcgtatgcagagtgtttctcttttaaagagtagttttagtttttattgattgatgcacagatatgtgcagagtgtttctcttttatcttgagttttataagtcaagactgttttacaggtgtaccgtgtccatttgatgcttggttagttacgtttggttgcacccaactaaagtttagtccctgtcaaattgaatacttgaatgaaaattatgaatattaaatctagtttaataattataaaactaattacaagactaaaagacaagataaatttattaaatttaattaagcctatatttaacacttataattgatattcaaacatttaacgtgacacagaataatctttagtcatggtaaccaaacactatctgcttttacaaccgaagcgttgatcgttttgataagttttccaataaattatattgcagagtattttcccacacacacgagtcttttttttttgtaattgattaatattgaaaagtcagtgaaggaaatatttggttcatgtactagcgtcttttcttcaaacctgaataggaattatattgatttactgtgctttataaaagttaaattgttatgaaatcgcaggaacggtctgcagcaacgcaagaattc

SEQ ID NO: 8476 - DNA, 940 bp, Zea mays
  Intron number 1 from transcript GRMZM5G861422_T01 (locus G RMZM5G861422) derived from phytozome v7.0 (chr-ID 1; pos 2 64291426 to 264292365 reverse strand)
cacaacaagaagcaggagcaacatactgctaccaggtacagttaatcttcgtcttgaactttattcacctgacgcgtcgagcaggtcgagtaaggggatgtttggatccagtggctaaattttagctcgtgtcacatcaaaggtttgaacgctagatataagtattaaatatagttaaatttaaaaactatttacatagatgagtactaaacgatgagacaaattcattaaatctaattaatccataattaatgactagttactgtagcaacacattatctaatcatcgattaattaggcttgaaaatttcgtctcgtcgtttagtcccatctgcgtaattggttttttaattaaactatatttaatactttaaactagtgtcgaaacctttgatgtgatggggctaaaaattagcagacagatacaaacaccccctgttctcctctctctctttccgaggcttctctccagcttctctgccacacgcaaaaattggcaggcagccgtaatggcgaccacggcaccaatcctcgccgccgccccatcgccctgccattgcttttcctctttgtccgcgcagtaatggctcaacaagcgcagcacgcaattgcatctctcctctcctctcctctcaggcgcggttgtcgatgaccgacgtcccatcgcaattgcttctcccctatctacccccaatacataaccaagtgcttcgcatctcaaatgggtgctcggcgcagacggagcgccaggcttgcgaaacggaacgtatgattcaatctcgccgcgctgtggttctgctgctcatccacgaatctgagcggctgctagggtttagcttgaattttttttgtgaaaggggtttagcttgatattagccttgatgatttcacattggtaaatgtaggcgcctccaacgaatctgagcggcagctcatccag

SEQ ID NO: 8477 - DNA, 644 bp, Zea mays
  Intron number 1 from transcript AC185115.2_FGT005 (locus A C185115.2_FG005) derived from phytozome v7.0 (chr-ID 4; po s 17826234 to 17826877 reverse strand)
tactttcgagtctccctaccacttctacattcaaggtaatgccacatgtatgtgaatcgttcactacaattactttagatcaaatttacaaaatattggaataacaagatgcaaaagtggttaattaggtttctattttgtttcataatgccaatcttaaagaactgattgatgttaaaacgaccatgcctagttgtcatatgccagcatcatcgactcctaagatcatcgattttctctattgaatgtcaataaacttccctaaagactagtttggaaacaccactccccctatgggattagagggattgaggcggaaattagttcatttttcttcaaatccccttcattcctgaagagaatttaagtttcaaaactaggccctaagggtcaagcattcgtcggtgggtgttatggtactaacgctttagctgttaatgctacatgcctacatatatcacaaccataactagttttcctcaaacatgcaatgtggaagattgagtcaatgttgaccttagtgaattagcatgtttctagggtccttttaattactactgtagcatatgggctcggtatatcatctaagggcactactgagccaaatcttgttcctctttatgtttttaactgcagtggaatag

SEQ ID NO: 8478 - DNA, 272 bp, Zea mays
  Intron number 2 from transcript GRMZM2G166956_T01 (locus G RMZM2G166956) derived from phytozome v7.0 (chr-ID 10; pos 110836767 to 110837038 reverse strand)
ggacggacgtcatcagatttgatctctcacccagggtaagctcagtgttcctctttttattagctttgaatgtggtatgcatgtgtttagctaaatgtttggaatatgatcgctactggttttttgtgtgtttaatcaagtggtcatttagttttgagggtgtagggactttaggatctatttgtttgtctatcggagcaaagaaaatcataattcagatttgatttctttgtggttctttcagtgtttctttattctaaatttagtcaaaa

SEQ ID NO: 8479 - DNA, 676 bp, Zea mays
  Intron number 1 from transcript GRMZM5G840955_T01 (locus G RMZM5G840955) derived from phytozome v7.0 (chr-ID 4; pos 1 85694477 to 185695152)
tctagggtaatgtcttctcccctgcttatctcaaattacaatttattatcttagctgatcgaatgtatggtataatatgattcttagttatggaacagtatatcattgagatcctatattccactaggctcagaatcttcaactagttgttatacatgaaactcttaaacatagttacttggttcgtagcagctgtaaattcattcccatacatttgactagggattgttagactatgaatttgcaatcatagtttgcttttaaaagctcttgaccagtgttcttgttgaattaaaaaaaaactcggccagggagggtaaggtattatcttaatagaaggccacgacaacggtcccgactgagaaacccctgatttcttgttgaatgtacacaaatgacaaatttgacatgctcatattgggtccaggtccatgttatcctgattcagtcattatcagttgtattagttcattcttaaatatgtagagttattattattctgaatttccttgctgattcaaaggtgataaactgaagagtactaatcagtggaattttctacattcaatcgcatgtgtagcctatgaactttcctgacaaggcaagttgtttcctttgtttcttgtccttaatatgctacttaattgttgctgcagtgtcccagtgggtcaaggct

SEQ ID NO: 8480 - DNA, 712 bp, Zea mays
  Intron number 2 from transcript GRMZM2G052166_T05 (locus G RMZM2G052166) derived from phytozome v7.0 (chr-ID 10; pos 101732357 to 101733068)
aagtcaggttgcccgcccttgcttttgcccacccctcgttttgtcgtcgtgttcggtcgatttaggttcgatctgatcttattgtgtacctagtcagctgttatatcttgatgtttgaatttcattgaattgaaggaaaaaaagtgagggaattcccccattctgtataaaaaaataaaaaatgagggaatgagcacgtttgtacagtaattgttttgataagattcatcatccaatagtgctgtattagttgttccagttattcttggttgattagctaatgatattgttgaaatgattcgtcatctaagttttgaacacgttataccactaggaaatcttttgccgtacagaacttggatagatgtgtttttaaactgggattgaagttgaaatgagtaagatactctgatactttgcagctgtgctgtactcgtgttacatctacttcataaagagcacagacttgcatgtgtgtgctgctccatgctaactggagttgcagtttgtgtaatagtaggcacagaagttttaatttttactctggcgcaggaactaccagggcaaaacatagctccccagggctcctcaactcctgaaatttcttccattcactgacctggccacctttttttcatttgaaaccatctgttcatgtgccctgatgcccactgttatgtctgctcgagcatgtttagcgggattgtgattc

SEQ ID NO: 8481 - DNA, 988 bp, Zea mays
  Intron number 3 from transcript GRMZM2G052995_T02 (locus G RMZM2G052995) derived from phytozome v7.0 (chr-ID 4; pos 4 5669620 to 45670607)
agggctacgtccttaccataatccatatccgagaggtaaccttctgtgatgttataataaacacctccatattattctacatagcgagccacaacagaaatttttttgacaacattttttcacattctattcgatattaaattagtttatgaggtaaataattccaaattggtaaaagatgagttcaacattggcccattcttctcacagctgcaggcattagccaacagacctacatcttgcatatgtatttctcttgcatctacttacctctatggatctagcatatggctgcatatatgactgattatgacactgatatatatgtttcgatttccgatgaaatgttaccataacttttttgtcggtcatattcattgttgctagaattctagcagaacaagcatgacaataagcttcgctgctgactctgcagatatccacctgcaatatagtgataaataatagaacatttgtgagatgtcgtggtgccctatcatgctttctttgctttccttcaaattcttcctatgatatggctaacaaaatgaaatggtagattcaggtgacttcacaaccttttgatgtttaggttagaacagtgtgatggtcaagttgtaaaaatggttgcaaaaatgctgaatacatgttgaagaaatggttgcacatatgattgattctggaagaaatgaaatcactagagagaagaaaataggcgctggaatggtaataggaacttgaagtttgtccttttcagacttctacccagaaaatgattttgtttcgttttccttgcttaatattcctaaatttttgactgactaaattagtgctctattgaacactgaatgctgaatgactgacactggattattatttctcgtagcacagactctcgcgaagcgcgaacaatctactcgttcaaataaaaaccaatatgatatgtggtaacttcaccttggtttcatacaccttttcagttgaactg

SEQ ID NO: 8482 - DNA, 613 bp, Zea mays
  Intron number 3 from transcript GRMZM2G036764_T01 (locus G RMZM2G036764) derived from phytozome v7.0 (chr-ID 10; pos 11757804 to 11758416 reverse strand)
tcctccaaactgattctgtcacagtaagcacagattacagattctgtgaaccaaagtcaggtgaatggtcctaggaaaatctatccatcttcatcacaggctgctaggaacacatgtaaatattcattgttaagtaagcagctatttgaggcacacatgttttcagggagtacaatacattcaaatttacatttcgaatttcggtatttcccatacatcatacctttgtagtcactcaggctacagctaggcacaatagatgacgtacagagacaaaaaatcacagaacacataatgtagcaaagtggatgcatagttttgatctataatcagcattaaaatctatttacttgttttgtgttatgttttactcaatttagttacattgcattctggactacaaaaatacatgtgatgaaaaaaataaacagcaagccgagatgtctgggggaatatccattgccctttattgatacccaatgccttgtcttatctatttttggggggcagttaattgaatgcatcaaaggggaatgaaataaatgcagtgtgcttactgtgttaggaattcgacttactttaaaagatctctaacttcagaagaaaggtttaa

SEQ ID NO: 8483 - DNA, 982 bp, Zea mays
  Intron number 1 from transcript GRMZM2G465833_T01 (locus G RMZM2G465833) derived from phytozome v7.0 (chr-ID 10; pos 8085018 to 8085999)
aggctcgccgcccatttcggccggctcccgcacaggtgctgatccattacctcggcctgccgcatcctaggccttcgcttgccgtggtgtaggctttacatgccctggttgcggaaatctgtgctcattgtttcggtcaaggagggtagcgtgctcgtttcgggtttcagattttgggtgtcggcatggcgaagcttagtggtgagcttcgttttaggtgtgaatttttgtatcatgttgaccttttggttagcttccgtgctctcactgctgcttccgtgtttgatgtgctaagagactgttgtttgacttggcaattggatcggacatcactcggtactgtttgcttgaggactggatgaatttacaattttacactactttagtgttcgaacggtacctagcagccatgcctggctcgatgttgatctggtgtgctctgtgattaagctaacgttggaagtaaatggagtgagcagggtttcttagaatcatctgctggctcacacccttccggaaaaaaaggaaagctttcatcctcgttctgaactgttgtctttacctgtataaaaagtgaaattccaaagcgtctcttttagatctatagccgcaaaatttctcaagatagtaaatatgcttacaaacaaatatgttccagatcgtagcgtggattaacaattgcatactagcccttagtcttgtagttatcccttattcccttgtattgaacacatagtcagtcttatcccttagtcttgtagcttgcctctgtattcttcccgggtggggtagactggtagttcacttttatcatattcaaaggaagctggtagctgcagtctctgtttccacattaggattgctatatgacaattaattaattcttccgttgtcttacttgtataatcaattaatcatgaagctaacaataacattggttcttcttttgttttctcataccgtagctatcagctggatatca

SEQ ID NO: 8484 - DNA, 919 bp, Zea mays
  Intron number 1 from transcript GRMZM2G092085_T02 (locus G RMZM2G092085) derived from phytozome v7.0 (chr-ID 4; pos 1 63084756 to 163085674)
ccgcactccgttcactcctccgtggtcacacacaggtatgcgcatgcaggttaaggatacgcttggattgaagagtgtttaaatctcaaatagatcaaaaactcctacaatacatctcaatccactccaatccctctcattcctagattacccaaactaggcctaatagatatagtcgttggttagtattgtgtataaatgttcagactaatgaccagccaacagtttcatcttatgtacatagtccgactgagttaaaagtggcatggcgttgtggtgaaatcttgaagaggaacctgttgccatgagatagtcacacagtttgtaattaagcatattgatgcacatcttgtttcttgtgccatgctcaactgcatgtgtcgtatatggcttcatattatagattgttacttctgttttggccttttgggtccatttcttgtttgattccattatgagattgataagttaaccgtttcaaaccgattaacagggaggctcgattcattttttccgtttgcttgtgtgttagtataatagagctgaaatagtgttgtatatgtgtgttgtgaggacacttagtttgttcaacatacacaattgtttttaatctagtgaggcgagcttgaagaaaatagttgtatatgtagttattattttctcagtgaattactcgtgcacacaactcatccacataaatattggtttaataacacagatgatgagatgtgtgacatgttgttcaattctaagcactgaagtaaaatcagtgattttgtatgttgatttttgttagttttttaacatggttatgtgctcatgttttcccttgtgaattcattaattttactcagcacgtgactgcatttgtttgatctatcctgttgccattctgtgtttgccgcagagggtgacagac

SEQ ID NO: 8485 - DNA, 1056 bp, Zea mays
  Intron number 1 from transcript AC225800.2_FGT002 (locus A C225800.2_FG002) derived from phytozome v7.0 (chr-ID 1; po s 244245164 to 244246219 reverse strand)
gaagggccctttgatcaagtcctgggtgtccaaaggtatcgggttcatcgtatcgcggggaaggtgatggggcaaagcaatttgctgaagccactggctttacgaaacaattggggtacccttcatggtccattatttttgggggcagacaaaatggttatctatactgctgccctgacaacatggaaacagatgtgtgccgataatgttggcttttcgaagctggaagcaatgtatcaactatgtatgatgaagacttttctaattgtcttgattatactcatctcaaggtgaatttgttaacctttgttttttagcttcgggttgctttgacaaaaaaaaactcatcaattgcatctttgcagggcctattcctaggcaatgccttgaagaataggagaaaggttgagatcgaagctgctcaaaaagaaaaagtgtctgggctttggtttgattgcgaagaaaaggagaaagctttaaagatactggaaagggactttattgccagttggaccaaagtccagaggctcaaaagttcaaatgctgagcagaaaaaagcgcatcacattgctcggagttgagatggagcaaatgaaaaaagggatatgaatttgaaatgatgaagctgaggcaatcgtttgtcgaagtggttgtcaaccttggcagcgctcaagtaaagatgaatgatataaaggctgaaataaaccatgtaaggggcttgaatgaaaattatcgaatcttagtggccaactgtcatactctaggcaacaggtgctacaaagagatgctgaaaaccttctccgctgctagagccctgtccaaagaaataaacttttcagtttttgatttagaaggattaatgcgatgggtactcagcgagactcgtgcgttcaaagatgtcctcctaactcaagaagattattgcacttgaataggtgcccgaagcactgcttcggctctgctgaaagccgagtgcaaacacgtgaaggcctacacataccctgatttcaatgtatatgctgataatatttgaaggtcaactatcgaggcttcgga

SEQ ID NO: 8486 - DNA, 335 bp, Zea mays
  Intron number 2 from transcript GRMZM2G145996_T02 (locus G RMZM2G145996) derived from phytozome v7.0 (chr-ID 4; pos 2 34466994 to 234467328)
aaggtactagcccactgcttgccctcatatcgttacgctgtgagttcctgttattatccgttatgcgctgcaatcctctctaagtctctagtctcatgctagagatactattggaaaatcaacagtcgttttgaagtgctgtttgcaaaatttggctctagccaatgttactttctttccatcaaattgactatgtaaatataatgcatcttctcataaatttgtttttatttaacacagaatacgtggcacagattgttcatggtaactcactgcttaattatgttttgattggagtaggaaattcaaacgacactgcgtgaggaaatcaaaag

SEQ ID NO: 8487 - DNA, 691 bp, Zea mays
  Intron number 1 from transcript GRMZM2G114060_T01 (locus G RMZM2G114060) derived from phytozome v7.0 (chr-ID 1; pos 2 70745229 to 270745919 reverse strand)
atccaatgtaaggatgactgaactatggaatatcaactcatgaatacttatttatgcataacatattggtagatacctactgatcttgttgcttgttatatttctatgtgatgtgaatcatgcatatatgcttttgaagttaaagtatgcttgtagctgagtaatagttttgtgaactatgtgtatttaaaaaaacaattcaaacattttaatctccctccctcccatagtaatagaggttgcgctggagattggagagttatatatactcaacgcttaagcaatacaataataatccttccttttttgcttgatttgttgatttttcttatcctgtgctttattgctattctaggtgcatgatatttgtttttcgccaattgaaattgccaaagattttatgcaagcatagaccttagcttttgtacatgagtccaaaaagcggaaattcagagctttgagtcatgcagacaatttgacatcaaaagtttccccaacaataactattgattcttttgtaagctaacctggttcagcggttcaaggttctcccaattatcttacaccccaaagtaataaaggaatgactcagcctcagcctctttctcgcacaccatacaatagctcagttattcaaagatatattaaggttgcatgttgactttcttgcaattgatttttattcttagct

SEQ ID NO: 8488 - DNA, 812 bp, Zea mays
  Intron number 1 from transcript GRMZM2G569627_T01 (locus G RMZM2G569627) derived from phytozome v7.0 (chr-ID 1; pos 2 46924985 to 246925796)
gcctcgaggtcttcctcctgctcctcgactggaaggtgaattatgtcgcagattttccaactcactgttaagcctcatgcatgttttggttccatttttgttgttgaatctatgagatttatggacgcagattgatactaactggttgagttgttttgatggcagctcagactctgacgataatgtcttctcccctttgtttggattggacttaataacaactgtaggtttgctaattttgcacaataaacaattaaatggaatcaacatagaattattattcatgacccacacaatttatcttggagtacttgttctcgttccctcagatttcaatggttggcatattgatgatgtgatatcgatgtactaaatattgtatagcgggttgttgttagaggtagcagatcattaattctaaatttaagtatatatatcatgaataatgggtataaatagacatttaactgtactaaaaatataaagtcgcacatacttaaattgtgaaaaaatatgatgccatttaaaccatatgtatgttaagtgaattagaattattcgtttgtttcatattgtattcatacgctgtagctgcagttgtaggaggtcgctacgatcgctatttagtgccatgtgtgatatatatttagacatttgattgttaactcgcacaagatgtgaatcctcctttgacattctatagaaattttaattcaaccatcgaatagtgtgaaacataaatgattgctaattaatggtgttctttctttctttcgagtgctactccaaaattgtgtgttccttctccgggg

SEQ ID NO: 8489 - DNA, 958 bp, Zea mays
  Intron number 3 from transcript AC188000.3_FGT006 (locus A C188000.3_FG006) derived from phytozome v7.0 (chr-ID 10; p os 91719414 to 91720371)
gactggttgggagaactgagaagctatttgaggaggtaaaggatttatgtgtcaatcgttgttattgtcccaaatatggaagatgtactaactattagaggttcaaggtatcgagcacaacagcaggtaacctactaccatcattcagccatgaatgcgctccacggtgggttaaaagaaaatctccaaatgctttcactagcaggtcaaatagaggtaaaactggggcaggaaaaccgattccacaaacaactagatgataattagtacccatacagtcacagaattttagtcagcctacatgcaggtgcggggaaaaaacgcacacaatgacctggccctatcgaattgaatgcataagactaccaaggcgaattaactgggattgggtctgtagcgatgggaggtactccatgagctcacctcctgccgagactgggggccatccgccccgatccgagcaccgttaggactcgctacatcacaccattgggcctccctacgctgtcatccctacacgggcaagcagaagcggtcaagctcgttgcttcgatggggccccttagtgcagcgacactagacgtagtagaaggaaaggagtaggccgtgcttctcaccgctgcacctccaagattctttgagatcttcatccacggtcgcagttaggatggctaggggcgtggggagagtcgaggggtgccgccgatgccgagatttggatcttagccgagatgaacggccgccatcgatccaggtgaggaggtggctcctgctagcctcgctcatcgtcgagcagcatttgccgtgggttgcaattgcaaggcggcagcgaagcgcccgacgaggagcaccggacagcacggaggagaagcggtgggtcaggactatacggggggcatgggtggacagtgtaaaattgaatgacactttttgatattatttgtagaataaattttaa

SEQ ID NO: 8490 - DNA, 761 bp, Zea mays; identical to SEQ ID NO: 7254
  Intron number 1 from transcript GRMZM2G085691_T03 (locus G RMZM2G085691) derived from phytozome v7.0 (chr-ID 1; pos 2 686306 to 2687066)

SEQ ID NO: 8491 - DNA, 1025 bp, Zea mays
  Intron number 3 from transcript GRMZM2G110345_T01 (locus G RMZM2G110345) derived from phytozome v7.0 (chr-ID 1; pos 7 561606 to 7562630)
gaaagagactgtatgtttttggctcatattctggtcctacattcagttgcccttaaaacatgctcgcagctttaaataattggtgcggggcttctgccttctgcatctaacacttttatttacttcttgtgcttgagtaagaattcaactttaagcacaatttacaagttcctactaccttattatataactattatgtgtctgccagcatgagtttgtgttcgggttagctttgattttttgatgctaagttttaagcctttgtagcattaccttttgaattaaggtaatatagccatgaattttttttctcgaaaacgcaggagaactgcaccttattatattaagaagataggaaaaaaaatgcttgagaagcccaaatacaaaggtctacttacggaggccaaaaacacatatagtcatgaaaattattgagacgcttgaaaattctagcacgtacactggagcatgcaagctttcagttggcttcaacttcactgtagtcaatacagcatagatgtttgagactgtaagctcccaaagctaaacacccaagatggacaaaaaaaagaaaaactcgacctgcagggagtaagacagcctcgattattgttgagaagaccttttcatacaggtcgagaaaaccttcgaactcttgccccacccatacacagctactgtagcccatgtcaggaagaccacaattgggccaggccttagatctgtgctttggtgtgtgacaaacgagataatttctttaaacccagcctgacatttgctctctcgcggagtcaaactcaagacttgaggagtgctactcagaccaccgaagtaccgaaccaattcagctagaggtcctttcgtagtaatgctggacaaagagccattctttttcatcaaagacctaccacattatgcaagtttagtaatcttgttgttcagtttacttcaaatcttgataacaccgtgtaacattgttctgtgtggcagtggtgggagaaaagtgactggactggatataagga

SEQ ID NO: 8492 - DNA, 681 bp, Zea mays
  Intron number 4 from transcript GRMZM5G865999_T02 (locus G RMZM5G865999) derived from phytozome v7.0 (chr-ID 1; pos 2 67539314 to 267539994)
gacatattaaggtttggagacatgcacatactcattaaaccttctctcgttatactccgatttttttatttgatgtttcctagtgtaaatttacactatccaacgtcaaataaaaacaaatggaggtagtattttatttgtttgttgttagatacggcaaacgaaagtttgttcctcatgccttgcaaaggcaagctctaacttgtgttgtctagctggttgattttttttatgtatatatgttatgttcttgtcatcaaaatgcataatggtcacagctattggcatgtactggatttgtaataggagagaacacacaactattgaggataatcgttttaactttttagagatcatgatggatgtcagaatggtgcctctttgttttattttgaacttcacatactgaatataaggctatgcttattcttggatattttttcccttgatcaaaagcagcactttgttgtatttcacaaaaaaaagtaccaactgttttttaatgtttatttcccatgtcactaatttaatatccttttccttttatacttccatggatatgcaaattcatttatgttcttgatttgacatggtcacttgtactagtgtgttttctatgtgctgcttattaatgttatttatccagttgacagattttgggttgtccaaggttggtttgat

SEQ ID NO: 8493 - DNA, 677 bp, Zea mays
  Intron number 1 from transcript AC200409.4_FGT001 (locus A C200409.4_FG001) derived from phytozome v7.0 (chr-ID 4; po s 114452512 to 114453188 reverse strand)
gtggtcgagtcgcactttaaccggctgcagacgtttaaccagcctcatacttggcccgtaccagccaccgcctggctgcgagcgtgccctttcttggccatgcagacagaggaagatggaatatctcccctttttcttttttctttttctttttctttgtaaagaaaatatttattattatttttaaaccaaataaattataaaaactaatatatttgttttattttagcataataaaaatatgaattttaaataaaaccaattatgatttatgatatttttattaaaagattttcaagcaattgaattcaaatttgaatttgaattcaaacaaacaaaaacaatgcaccaacgtgaatgcatcaaaactctattgttttttaaaaccatccaaaagttgtttaatttgttgtatggccatattttattgattaataaaataaatcctctttttttacaagaacacaactagttttgttgctacattaattttatgtgatgggcttttaggtgttatagtgttttacattgcgaaacagttgaagatgtcgaagcgacacaaaaaatagaatttgagtgtcagctcggaaaacatgaccgagtgttgaatagtgaattgacttgagggctgagttagggactcgaccatgcaggactcagccgcagggcttggccca

SEQ ID NO: 8494 - DNA, 531 bp, Zea mays
  Intron number 1 from transcript GRMZM2G570044_T01 (locus G RMZM2G570044) derived from phytozome v7.0 (chr-ID 1; pos 4 1223089 to 41223619)
gctgttgcagcgaggtccgggccttcgtgggatttgtaagaatctctgcttcccacatgttcttactctgcgatctgatctagtttgatgtttgttttgtctggtcttcgattatgttaagaatcaatttatcatagacgaggtggtcaatcatgaatccattttataaatttggtgtaatgaactcattgctcatattattattaattattagcctataaatctatgatgaataaaatggtgatagatcaattaaaccaaacaaaaaaaagtaaggagtgataagttgatgtccaaacacaccgtaaatctatctctagcacgtaagcgttttttatctctcataaagggtggtctagtttcattccagaaaacaatttctagggacaaaaaaaagaagggacactccctgtttcagcttcttctctcaagcatgctgatttcttacattgtgtaaaggtgacgttgaagtcctttcaatactaatgatgtacatttcctttttttttgcagttcatactctacagtcgt

SEQ ID NO: 8495 - DNA, 853 bp, Zea mays
  Intron number 1 from transcript GRMZM2G443542_T01 (locus G RMZM2G443542) derived from phytozome v7.0 (chr-ID 1; pos 1 7323080 to 17323932 reverse strand)
ggagggacggcttggaggcctgataaaacaccaaggtgtgctgctgaggccgaacaatgagaagtctaagtctattgaatggggagaaaatccaagacataactattcactaaagctcattttgttcctaataactaatttgaagagaagataaatagccattcacatcatcttgataccatggtaacacaaggagtggtactaacgtttgaaaataagcactaaccgatgtacaggaaatcatgtgcacaatgaacatttcataagcagtataatgggaaaattattgagaaatggtttattgtttaagcaaaacaagtacaagtcagcatgttgtgttgtgcgcactccacgccgtggtccacgtcgcgaagtcggtcgggccgtgccgagaccttcctactcacgaggctcaccctgatggctgatcctcctccgctaccttgggtacgcatcaactccgctgctctcctggtgaagatgcatcaatggatcaatgtatgatgcatcaatgtgctaatttgaattgttgggaactcgtgcatttgcttggggtactgcaacctctacttggacttcggacaattttgcacttttgcttgtgctttgcttgctctcctgttgcacctacgtgctcaatgacatttgcaaatttgtctgagtagaaagaatgctcgtgttgaaaaaacagacaatttgtgtgacattttatatttatcatcatctaagttctaagtgatattttctagatataagttgattggaagtgtattcagacaaccttgtacgagcctacattcttttggccagtttattgtaataacttgttaaatttatgcaggataggctatag

SEQ ID NO: 8496 - DNA, 822 bp, Zea mays
  Intron number 1 from transcript GRMZM2G069594_T06 (locus G RMZM2G069594) derived from phytozome v7.0 (chr-ID 1; pos 1 96439923 to 196440744 reverse strand)
gaaggcaaacaagttgaagcaatctctccccccaggtaatcacagctttaattgacatattatttatgttctagtataagaacaccattctggcagtattgtgttgaattaccatccacgctgccgacggtctattcagttatctatttttgttggattgatgccgttttctttgtcttaattagccgttaattagccgtcccagtgaagataaaattttcggtccaaagatggtcgaagaatggttttagcttcaagccagctgacacgtcatcttgattaatgggtggcttgtggctaaaactgttttttagaaccatccatgatggccaataatagctatgagatctgagggacttgtatgatcacttcctttatcagcttccactctgaaccattttgttcttgtttgtgtttcctgtttgatcagtctctgtcccattgaagaaaatattatttgaccatagatgaatggttgattagttttagcttcaagcctctgttgtctctactctttggcatataggcttgtggttaaaaccagtcgactcttaagttcattgatgatgggtaatagctatgagatccgagggacaaaattacctgtgtctttttgatctaatcctaattgtgcttgtatctttggtcatctgttttgtgattacagtttgccttccatttgttgtaagccctgcccaacttgatctgtcaaattttgtctgacatttaacgcacgactccactatgaagttctgacttttttgatgcttaattaatgtcgattgttgcaggcttgagcgtccaggaggtttgattggatac

SEQ ID NO: 8497 - DNA, 837 bp, Zea mays
  Intron number 1 from transcript GRMZM2G374255_T01 (locus G RMZM2G374255) derived from phytozome v7.0 (chr-ID 4; pos 2 33359396 to 233360232 reverse strand)
cctccacgtacccgccgcagccgctctcaaggaccaacacgtttgcatggtcgtcaacacctgcttccgcgtcgtccactaggccgcggccaaaggtgaggtcttgcaatggtctcgcgccatgcgatgcgtgagctcgttcgatgtgttcttgcctcggcctcagacctatacccacgaatccaaaatctgatttgctactcaacccaacggtatgtagggttgcaaatattagcttcttgctctatatatcagatagaatggggtaggattcatacaattttttgagtggaagatcaactgacactcgtgttagttgtttacactagaatttttttatcaaggttattaaacctgacacaatttagggctaacttgtgtttgatgttttgcagcaagagtgaggtctatgatgcattgtcaatccaaggaatattatccataagcagtattgaaaaccccttaatacagaatgagtgtcctaaaggttttggtggcaactgataattttggagcaattttgtgtttctgttcctttacccacatagattgtagaatttgtgttcaggactctgtgtaaggaaatgttagactgtaatggcaaattttatctgcacattcttagggttgtaatatgggctaaagaaaattttcaggctaaataatatactttttgtacttacagttaaaatattattactaatgttgtgtgccacctgtgacttgtgaacttctttttccattatcggcaagtaatttgcctaacaaaagttctaatatatgtacttggatttacaatggtatatattgttcttacatttgtcatttgtcagtgtt

SEQ ID NO: 8498 - DNA, 967 bp, Zea mays
  Intron number 2 from transcript GRMZM2G040565_T02 (locus G RMZM2G040565) derived from phytozome v7.0 (chr-ID 1; pos 1 91591628 to 191592594 reverse strand)
tcctccatccccgacgcggcggcgccagcctgcaggtacggttcccttcccactccccaggatctatgtctccagttccccactccattgtccaatgtccacttcactgtccactccacggctccaatagccaatacacaataggacaataggtcaatatcggttcatctctacaggtactggactagagtcgaatgctaggcgactgctagctgctaggtaactctgtactagatctgttttgacaattggagcaatgattggtgatgtaactagcggcaacctggcagacattcttggatgcaaaatggttaagtaattcagctgcagcagttgataagtaaaatggttaccattattcatcctcacatctctttccatttgcatttatcacagaccatgcgatttgcagcagttgtaggcatttttggctggcttactgtatattgtgccaaggtatgctcctccattagagctattttcttccttcatcttctgactgccattttctagctgtaatactttccttcatctactgacatgaaggatgccatgatgctatatgctggaagagttttgctggggtattgtactggagttctttcctatgtggtgaacatctatagttctcaatatatgtacctaaatcttcattcttatgtttataaaccttttgtttaagcaatggaaacatgtcccactctcaaacattcttaaaaaagtttcatttatgcacaccacactctatgcactaacaactcctggggttataataacacatgtgcctttgtatatatctgaaatagcaccaaagggtatctgaggaggccttgcaacctcaaaccaggtcagagaaattggatctgaagtgcctcttattatttttatgtagtgaatcttagtaattaatatgggctcttttgaatatgcagttattcacctgttcagggtgttcagctgcttacat

SEQ ID NO: 8499 - DNA, 888 bp, Zea mays
  Intron number 3 from transcript GRMZM2G174284_T01 (locus G RMZM2G174284) derived from phytozome v7.0 (chr-ID 1; pos 5 1759576 to 51760463 reverse strand)
ataagaatcaaagggtagcccctcttttttccatctgttgtatcttatatgttgtgttctttatgattgatcatccgtgaactgttgttaggggagaagagaacataatgttgatacaatgtttctaatagtctaaaaggatgcaaagaattagattctatcgtccaataaatcatgcgcttagctcatgttctctgatagtctgatgctcaattttttttgccatgtctgtttaatcattttcagaacattgtactctctcatgctctcgtgtcaaaagaaatagatacagattaaatgtcagctttgaaatttgcaatctgtgttattgatctcatgaagtggaaagtttcacttagagtgccttgaagtatgaacacttgaatactattaatctctataaatgaaactttgactaaagtaaggatgctgtatggatggatttttctttagaaagcgcaactgtgcatcattccattaagaagaagaaaaggtttaaggtcctagaggaccagtacagcaaagcctccttacggggccaagtacaagcatatatgaacacatccatgatattgaatagaacaatttgattttggacttggggtcttgaaggtacaagagcaatatcctaattttagttactcatgtcagattattttacaaaagttcaacttctctgtgggacatctaatgatacagatcttggagagatgcatgtaaaagtgataatgtcattatatgttacttattccactcatctatggtctatgtattccaattaaaaagtccatctatataccactgcatgccattttttcctttatgttagtttcatgcataaccaatgaacatttgtaacttatctgaatcaacctctgcagttagaaa

SEQ ID NO: 8500 - DNA, 786 bp, Zea mays
  Intron number 2 from transcript GRMZM2G000973_T03 (locus G RMZM2G000973) derived from phytozome v7.0 (chr-ID 10; pos 133311742 to 133312527 reverse strand)
cgacctcgtcacccagacacaaggtgattcatgactctatttatatgttcagctgtcatacttgtgtgaacttcaattcttcagagtgcaagattggatctttttgacgagcagggctttgacagtaggatacctgatatcctgatcaactggaatgatctgtatatatgtattgaccctgagttagtaatggaataactaatctttgttcgttcattactaaatttagtttaacagtatcatatttgacaggctcattgcaccagtttatttttagagcaaggtagagcatatacttacaaaataaaagaaatgcagagtccaagtatcatggtttcatgtgtttacagaactgattaaactgcaaacgggttgaactttgaacctaaactttgactctgagtttcttgcaagttatttgtacaatgctttgctcattaccatgtttgatggaagttttcttggcacatacaaagacatctagtcttatgttgaaccaataatctataagatgctcaatttagctcttcttgcgtacatgctgtgacaatactgcttttgattctgtacagcttcagtggtccttgattggtggaaaaatgcatattgtactatgtatgttgaacaatgaagaaatgtttaatgtcgtggtgattttactctttacagtctgttgaatcttaattatcaattgaaagggcactctaccagtttgaaaatgattaagttgatctgttttcctcaattgacactgtttgggggatatgcagggcaaggacaataaag

SEQ ID NO: 8501 - DNA, 366 bp, Zea mays
  Intron number 1 from transcript GRMZM2G018673_T01 (locus G RMZM2G018673) derived from phytozome v7.0 (chr-ID 4; pos 2 25712595 to 225712960 reverse strand)
cagcacacgtctccctcttctgaaagaagctgcaggtaactagacaaaacttggatctgtaaactttgtgattcattatgcatgcggggtgtttaatttgcaagaagatcaaaacaatctctttgccgagcgtcagaaggtttaccgattgttttctgggttttgtcgagtaactgaagcactcgacagtcggcaaaacaactgtgtccggtagtgatatacaagatcagacaattatatttttttctcttcttgttattagatagtgcctatttagtttctgcagattaagagatgtcatctctagttcaactcatactcatataagtggcctgctgtaataatgaagcaggttttcgccggacc

SEQ ID NO: 8502 - DNA, 718 bp, Zea mays
  Intron number 1 from transcript GRMZM2G088974_T01 (locus G RMZM2G088974) derived from phytozome v7.0 (chr-ID 10; pos 15554285 to 15555002 reverse strand)
agaaggccgtcgccctagcggcccgcctctgccaggttacgtggtctgatccagatctccctttctgtttgtcgcctgttccttccggcatcctctcccttcggtagtttgttcgttggtacatttgctcgggcatactagacaaagtttgtgttcagagttttgtcggatggataagatttgtttagtttgtaaattcccgatgaatccgtgtgacttactgggtagaaggcagcccagttctttctgggaaagatgaatatatgcttggtaggaggaaatatacacgaaatgcattatgcttattgatcggccagattgaaaacacaatccctagctgaaactgagctctgaagcagttagctcaagttgcatcttctgatttttttttaacaaagacatcttttgaattgtcggagcaaccattggaggaatcatggcaagcttctagggttgagtccgtatatcttgggataaaaagatattacagaaatggggagtcattcatgacttatacctagtaggacactgttttatgtggtgattcagttggcatttgataccgagatcgagttgctgacaatcattgctctagtttctgtattttcttggacttgatgatcccaatttcccgttgtatttacttgtttcctcttcccctatgtttcccaatgtttcttcagagagtgcagcggagcattttgcactctgacattca

SEQ ID NO: 8503 - DNA, 1036 bp, Zea mays
  Intron number 2 from transcript GRMZM2G416142_T02 (locus G RMZM2G416142) derived from phytozome v7.0 (chr-ID 4; pos 1 27697044 to 127698079)
acaacaagcccatcaaactccagatttgggacacggtccgtcctgctcctctcttccgttcgttttttcctgccctcttcatggtgttgtttaggttgcgtacgaggttagcagtttcaagcaacgatggctgtaggaatttcgaattgtttcagaaacaacgcgaacatttttgggatccttaattgctgatgccatttatgttcctcttgcgttttgctgcactggcttgataatctagagatttttgaatcacagaccctggcagttctgcaacatccagccactttgtgcaaaattgtgttatcctcttgcataaggtcgtatatatgtctcggtcatactgctggcttaccaaaaaaaaatcccaaacttaggtcaccaactatcaaatcaaccagcatatgtcgaggtagtgacaaagcaccagactccaacaagctaacaggctttagtctagtctgattatatgttattaatccatgttttcgtatggaatactgctggcagtaccaaaagaaccagtctcgtgcgttctaaattgcaagtatgttgctgatttcattcatacttatcaatacaaacttaaggaaattatacagtgatgtaagaaaatatctcctcttagacaattggacctatatttatctcaacttagtgtaattgcaacacttctgtttgcaaagatatcttcggtaattgctccaatggtctggctacacgttttcaagaatttaacacttgtaagtttgtaaccagggtactgtaacatgtaaagcatttttattagcatttcccatattagttcgagtttcagaatctgttcatccttataattgtttggtttgttcatcatgtagtatgttcatgttattatttttatttttttgcttaggagtatggttttaatgaactacaaccacaacacattcaccactacttctgttgagtgtgatgtcatgaagcgttatattctcaattgattatgacttgaatttcaggctggccaagaatcattcagatctattactaggtc

SEQ ID NO: 8504 - DNA, 988 bp, Zea mays
  Intron number 2 from transcript GRMZM5G809546_T01 (locus G RMZM5G809546) derived from phytozome v7.0 (chr-ID 10; pos 52446126 to 52447113 reverse strand)
aagtagggagaaggcgtccgggcgaggagcagcaggttgccaattcagagctatttccttttcacttttatcaggactaatacttaggaacgattttggtggattttgcaataatgctgtgctatcgcactagttagttaggtttagtggtatgcttcattagcttctatactggtactcccttgccccaaaataactgatgttttatgtttgtcctatgccaaagcatttcaagtttgaccaaatttatacaaaatatcaacgttgaagataccagctaagtattattaaatttttatcactaaatatattttcttattatatatacctggtgtcataaatatcaatgttctgtcctataaatttagtcaaacataaaatggtttgacttaagacaaacataaaacatcagttattttggggtagggagagtagtaaattttgaagtgaatcttagtgaagcaaaacagtggtgctatgctacttgcgttgaagtgttgcaaaatcatataatcaaattaatgttgtggatagatgaaggagaaacatacttccatgttagttaagggaatagtgcagtgcagtttaaagcaaagctgatctatttggacttgacaagcccaaatatcctaaacagccttgaagacaaaagttagaacctgtatattgcatcaatttggatgtggttcatgataagtttcttaaaataccaacattcttttgacgaatcaataatgtatctcatatcatgcttaaattttacgattttcttcaaatttatctgctctagtatcttggcactgcatctttaactgctgattttttttaagtttttaacagctaggatcagttctgcagatggatttgctggaattcactttctttagccaatcagtatttgctgtttaaaatgtgtctcaaatctcaatccaagtacctttccttttgagcagctgcaattgaggatagctccattgacattggtgac

SEQ ID NO: 8505 - DNA, 660 bp, Zea mays
  Intron number 5 from transcript GRMZM2G177620_T01 (locus G RMZM2G177620) derived from phytozome v7.0 (chr-ID 10; pos 84788482 to 84789141 reverse strand)
tggtctaccccaaagcacaaggtatagaattactagttgcaatttgtgttttctactattgtcaacatgacattagacataaactatcttatgctttgagctatttccacttgtggtttgtacttaaatcaaaagattttgattttgattataatacccactttagaggataaattgttggatactattgttttctcaaaaaaatactggttttctcaagcatgtaggagtggtatgtgtctttaagttaaaaagagaaaactggtctgaaacacacacaaaataaataatataaacacttttttagttgctgtttgaacacaagggtgtatcctttacaactgtttgggtcattttcatgactcacttattagcttaacctccatatgcgaagctaaaaagaaagcaagtttggactgctctagtgtagacttaaaattccaaggcatatgaggttagaaacgtgtgtggtgccattgtttcttgagctacattttttgttcaaatgaatatgcaggaacataccttgttgtgctgttcaaaggaacacgcagtaacatacctagtattccaacaaaacataccttcttcaaaggaacaagctggaacataatttaatctatgtttctagttttacaagataatagttttataggacaa

SEQ ID NO: 8506 - DNA, 976 bp, Zea mays
  Intron number 2 from transcript GRMZM2G113228_T02 (locus G RMZM2G113228) derived from phytozome v7.0 (chr-ID 10; pos 5731218 to 5732193)
ggagaaaaaggttggagtttcttcagttataaaaggtatgcataaatcggaaggctacttgaagagataagttattgcatatacgtttaccatgctgcttttgttgttatgccatgtttcgtttttttttgcaagcctatacctattgacgtcagcaatgcttcatttaagttttgggctttgtgttactaacttactactaagatgaagtcactggattggaactttttttctgctagcatgtgatcaatcttgccacaaccacaagtgggatcttacatggtcaggatatgctgtggcattttcagtttcccatacataactatcatttgtaagctcattttttttaattatgtttgaaattagattgcatggaaaacagctatacacgtgcctaaatcttgacttgtggcttctgttgtaattctagcctaccccaacttgtttgggaccaaaagactttgttgttgttgctgttgtttggaattagattgcattgttcttggttcctctaattgtaatggtagccaaaaagccttagcgcagtggtaaaactgctgccctgtgactaggtggtcactggttcgagtcatgaaaaccgcctcttctcttgcaaatgcacgaaaagactgagtactataaacacaaactggtccgacccttccccggacccgcgcaagtgggagcacatgcaccgcgctgccctttttttaatgttagccaaaaagacgggctcattatagtcactgattaaaaacttatatgaatcttagttcttcattctgcacatctgtgcattttttcaacctaaattcttcactgttgcaccatgaaaaataagtgcattaggtccaggtttgttgacttcttattaagcattcatatctttcatttgattggtatctttcttatgtccatgtacgataagaaacccaaagtagtcatttgcgcagttggagctccagataactgggag

SEQ ID NO: 8507 - DNA, 326 bp, Zea mays
  Intron number 1 from transcript GRMZM2G704001_T01 (locus G RMZM2G704001) derived from phytozome v7.0 (chr-ID 1; pos 2 58216507 to 258216832)
tgtgaggcttgcgccttttatttggtgacggcaaggtgagatattttgcttccttctttgaattcatcaacttttctttgtccatgaccgagtccttcctaatttgtgacccctcgaacatttttctagagctcaattagagattaggaaagaaccggctcagtacttactacaatattatctttcaattgaaataagtcacttgttttttcttttggaaaattgtgtgctctgtcttaggggtgactcaaattagtggcaaggaagatcgctacattttaggctatgtatctgcttgctgctaatgcaggggtcgccctagagga

SEQ ID NO: 8508 - DNA, 734 bp, Zea mays
  Intron number 1 from transcript GRMZM2G038846_T04 (locus G RMZM2G038846) derived from phytozome v7.0 (chr-ID 10; pos 91359795 to 91360528 reverse strand)
cattctttcgattcttcagcttattcacctcgcaggtgcggtgcggtgggattctttttcattcccatatgttgttgctctttgtttgtgtgtcattttttttgtttggtgctatttttttatttaattattttgattcagcattgccgcggagaaaaacctgatttcatcattggttctggacttctggtctgtgcgtgaaattggattcacatcaagtttttgtttcctataatctgcacttctgatcaactcattttcttttctttgtttagctcgtttaattgtattctttcatgatttttattcttttccttctatagaaagttagaaacaacccttccatgatttctctgttctctctgcgttcatttttgaatatgtagcgctaggcgtggacggagcggcgtcgttcaggttcaccaacgcttgccagcacccggtgtgggtgggcgcgctccacggcgccagctcgccgccgctcgcaagctcgggcttctacctggcgcggtccgccacgtcccgcctggacgcgccgtcgtcagggacatggtccggcacgttctgggcgcgcacgggctgcgcggtcgattccgcaaccggccgcttctcctgcgccacggccgactgcggcacgggcgacgtcgcctgccagggccgcgggccggcgccgccggtctcgctcgtcgaggtcacgctcgcagcgccggggagcggcgggcaggacttctacg

SEQ ID NO: 8509 - DNA, 738 bp, Zea mays
  Intron number 3 from transcript GRMZM2G152901_T02 (locus G RMZM2G152901) derived from phytozome v7.0 (chr-ID 1; pos 2 36952322 to 236953059)
tctccacagtggtacgcaacaaaccatgttcttcgcacaatgtatataatttgatgaggcactgttcttagtgcctgtttggatcatagtgctaaagtttagcaatttgcttttagcatcttttaacacttctgtttggatctctaagtgcaaaagtttaactaaaaagtgtagtgctaaacttcagcacccaatagcagtttagctcctcaagtgccatgagatccaaacaagcccttagtagcttctggcacattgatcccaaagatagcttcgcacgttcttcctcctggtacctgcaaatcaagtagccaacccgcacagactcattccaccattctgatccggtcaagcaatcggtgcacgcactagaaaaactttccaatactggtggcctcgtgcccgtggaaacaaggagctgaccatgtccctccgttcttttttattaattatgatttaattcgaaaataaactagatatttgggaatagtactatcttctacgcaatcaaatagaagtagaaaagtagcacaaatgcagccaggcactttcggttagtttgcactctacttgcctaaagtcacctgacctaacctttctggtcagttacaaccagctagctttctgggaactttccagctctcaacacttcaacacgttgattctaaaattataaaattatagtattgcctatatcaaacaggtggtggggacaattggatacgcagctcctgaata

SEQ ID NO: 8510 - DNA, 903 bp, Zea mays
  Intron number 3 from transcript GRMZM2G318780_T02 (locus G RMZM2G318780) derived from phytozome v7.0 (chr-ID 1; pos 5 6790656 to 56791558 reverse strand)
tacctccgcttcaaggaggagcttgtcgacggccagtacgtgctgctttactccgcgcccccgttctctgctttgattttgcgtgcgtccctgttctcttaggccccgtttgtttcgttggaattgaattccattttaataattataatttagacaaaactaattaatttcatatatttatatatgtaatatatttgtatattattctaaatcatatgagaaagataattatatactacatttatgttatagcaaagcaaatagaatagtgtgctttaagttgtacatcggaaacatagcatgtaaagttatagaatcaatttccatctctcatcccatgaatttgagataaacctatatgataactttggaaagtggtggaatgtcatattctaaaaaattagcctattccattagtaagattccaattcctcaaaatgaaaggaaacaaacgggaccttagtaaacttgctctcaggcaactcagcagccgcgcttgctggggtccagtcaggttgacactccaattgagtaaacatggcacttttgcacacctttctttgaagagaaacttttgtacaccttccttttaatgtcaatacatgtttttggaggacaaacaaacgtaagctccctatcgttaataactttccgaccatattgtttcctagatttgatgtatgcaataagttagttgaagtaccttccaggattgcccggagctttgcttcgacacgttcctcgtacattttaagcaaacaaaactttttttttctcagactgttctcatgtttatccatacttttctttcgtcacttcgttataaagaacgtatttaaggccatgtttaagagtatatatcgcccaaaaaaaagttaaactgtatccaaaatggcaggcaca

SEQ ID NO: 8511 - DNA, 634 bp, Zea mays
  Intron number 1 from transcript GRMZM2G374088_T03 (locus G RMZM2G374088) derived from phytozome v7.0 (chr-ID 4; pos 2 39435327 to 239435960 reverse strand)
ttggattggttccggctgttgcttgctccaggaaggtgcgttttctcccatccttatgtggaactcgtgctcttttctcttttcatatcataccctttatcatcatcctcatcaagtcaacctttatttgatgctttactataacccctatccgtaccgtactagtttcactctgacttttgcttggattgtcccgtgctagcgcaggtgtccttgtccttctcatgctgttggctaattccaccgataagaaatggcctgccttgcaccaaggagccagttccttttaaatatttgataagtttgacttctcgtggagatcacattctctatttaggctggggcaggatgttaataagagaaacgatatatagctactggccttatgttgttttgctcgcttcactattttccggctgaatccatgagcatcctgtagactcttttaaagaaggcactatggttcgactagtttcctcgaaaagcctttgcagttttgcgtacctcatgtcggcttctccgtgtattgctcttgctgtatgattacttggtcggtgcagctcaaatctcctattacatgtatgtttttttcgctgcaggccctcttcatttgagacacatctgttaccgagcg

SEQ ID NO: 8512 - DNA, 926 bp, Zea mays
  Intron number 2 from transcript GRMZM2G017113_T01 (locus G RMZM2G017113) derived from phytozome v7.0 (chr-ID 4; pos 2 14651386 to 214652311 reverse strand)
aagtttgctttcgagctcgcccgattcatccccaggtgtgtttctaaataggatgagttgcagcaaaaatgggtcattagttgatgcttttcattgtacggtttatttatttgcagttagtcaatggaacaatgataaattgatataattagttattgctactgccgacaatattcaaaagatgacatggaataatactaattaattagttactgctgctgcaatgttttacaaaagaagttgcatttgtatgcaagaatcaaaagaaaggaacatatctactgttagtttacaagctttgcattttgatgatagcagtttataaaaaaaaacttggccggttcggtattaatgcctggggtcggcactcaatgatacacacaacccactgatggctaagaaaagaccgaaacattggtcctgtctgagaaaatctctgaaccctggcctcccatcagtaactggtcggtgtcattagtccactatgcaacggcccaaccggagggtggcacacatgacattgtaatccgagagcggatgaggcacaacgaggggattttttaatcaaactagaaaattcgcccctaaggggaatcaaacccgggacttggaggtgctactcgcaagcccgtaacgactaggctagaggccctttcgctgatagcagtttatgaagtaagttgtttacaatcttacaacacttgaagttgctaatgactccataccgcccatactcatgtatatagtatacttgctcaatgcttaacatcccttaagttttccttttggctgatgtatttgtttcattacaacaaatactgtgttatcagatcttgtttaattgagcaacatggtagaggggtattaacctcgttacatgccaactcacagtgtgaaagcatttgatcaccggcaaagtacgcttg

SEQ ID NO: 8513 - DNA, 600 bp, Zea mays
  Intron number 1 from transcript GRMZM2G330218_T01 (locus G RMZM2G330218) derived from phytozome v7.0 (chr-ID 1; pos 2 78509233 to 278509832)
aggtgaaaatttttactccgctggtcttagctcgcttcttgtgaaaaagacgcagcttttttccgcctttttttttctttcctttcttctttgagccgtccaaggttccgttttcttttcttttcttttctagagattgggtttctgctgcagttagttcgcgtgtcaaattcgggttcgattggcggcaggaagctgttaattgcatctaaccttcgcggcctttcggtttccacgtttggtaatgataggcccagttgtgagggaactggttcttaggatttatcaagtgcgttcaactgtcgggggttgacttgtcttctcttcttcacttccagtctcgcgagttggcatccaaacagctgcacatgtatagattctttttcgttgttttgggccttctgtcatgtttcttttgatcttctgcgtgtttgcttgatcatggaaaggggtagcgtgtatcgatcttgcattttgtgtgtgtgtgtgacacaacgcattgtgcatcttgttccttagatcttttaccttactcactgcagtgtcttaatcatttgatgggcaggtaatttctcgcgagcgcattcagcacagcaggtt

SEQ ID NO: 8514 - DNA, 631 bp, Zea mays
  Intron number 2 from transcript GRMZM2G330218_T01 (locus G RMZM2G330218) derived from phytozome v7.0 (chr-ID 1; pos 2 78510016 to 278510646)
gcttcattagtgcaggcagcaggcttgttaacttggtaattagtcaatgaaacccatactctttaatgacttcttttggccactgttagcctgtgtttgatataatgtagctgttcatttgtgcttccttccaaaagttccatattttgttctttattggagcatcaattttagatggcaatgtatacctgaacatcttcaaactgtctacacaatatgtctgcattgtttttgtgcttatgccagtagaattaacaattaacaagtagtatctgttcattactttagttcatgttttgtgccccatgaaattggtaatggaattgcaaattggagttagacatcatgctttgaaatgcacaaactgccacaataaagccgtgacatccagctgagtgaaactgtcttttcatgcatatactctcagtaatcatcactaaatttatctggaggagtttattgttctattgtaagctgccaatttctttgtttcttctgtcaatcaatgaatattgcacgcttgtcttttttccacatttaggttgatatttcagaacctttttctgtgatttattttattatacagttgagggtttgattcactagtctcttgcacagttttgcaacaagc

SEQ ID NO: 8515 - DNA, 479 bp, Zea mays
  Intron number 3 from transcript GRMZM2G478382_T01 (locus G RMZM2G478382) derived from phytozome v7.0 (chr-ID 10; pos 63802620 to 63803098)
ggagtggacttgtcagaagaagccctactgttaaggtacaaaaagtctaaaccctccacctctatttacagggtgtttgattccacccaactaaagtttagtctctgtcacatcgatcatttgaatgataattatgagtattaaatatagtttaattatgaaactaattacacagatgaagactaaaagacgagacaaatctagtaaacctaattaaggttatatttaatactcataattgatattcaaacacttgatgtgagtatgtgacacaaactaaactttagtcaggggaaccaaacaccagcttaatttcagtgcagggtaacaagtgtgtcgattctgcatcaaggcatgcatatttttcttgtttgcccttttatttattttaggattgccttgactaatattgtgagatattgccatcttttgtttatttacaagactctaagcaaggacaaatcagtcattaaggggct

SEQ ID NO: 8516 - DNA, 666 bp, Zea mays
  Intron number 1 from transcript AC196679.4_FGT001 (locus A C196679.4_FG001) derived from phytozome v7.0 (chr-ID 1; po s 178538759 to 178539424)
gcccaggtccaattattcaggtactactttgttttcattacctttggttgcacatgtttatacaggctgttaagaagaatgctcactctctttaatttcaggaaaaccagtcgttcaactctacctcacaagtgcctcaacctgtcaatgatcgaagaaagaagggggttgccaagcgtgagaagaactactccaatttgctgcctattgtttgctgaatgatgttggtaaatagctgaaataacataggaatgatatcagctcaattcccacttcccagagttttctatgcatattttcccccgaacgtccatcaaaagtatgtgtcatgccttttactataagaagatatcaagtgttgatgttacagataaaatacgagtaccagaatggtccaaacttactgtacagctcttatcgcctccttaatggaacgatcaaaatcagctgcacacaaaagaaatccaagattaagaaaaagacagttggtaaaaaaatgtcaattttattcaagtgttttgtgaatccagtcagaataaatattggaagcaacatgtagcagacaccacaaatattattgtgttgcagaaagaattgtcaacagcactggctcacaattaatggttaaatatagtagaaacacattaatttggatgcatttataga

SEQ ID NO: 8517 - DNA, 871 bp, Zea mays
  Intron number 1 from transcript GRMZM2G060451_T01 (locus G RMZM2G060451) derived from phytozome v7.0 (chr-ID 4; pos 2 38333813 to 238334683 reverse strand)
accgcgccttgcccctcccggtcgacttctacaaggtcaggctgtgagtcacacccgtgggtaatcgctggggacaaaaatgggggagccttgttagcagtagcaggggggaatagtgctcttacaaacgccgcatttcagtatccgctttgactgttccgtttctagtaggttagagcatctccaacaataaactctaaaatggagttttaaaaattgaaatagaaccgcatttagagtgtttaggacctcaatagaaatttctactccaacagttagggcttaaatagtgctatttatgaaataaatcatgttattaggaaataaatggttgaagattaagaagaaacgaggatagggctcaagtacatcgggtactatatttaggacctgagagattgagtcctatactcgtttgatgattttttataaaataaagccgctgttggaagagtgttttacgattagccctatatttaaaatagagccacatttagagcctctttttgagatgctcttatgaactatctagctggatatgacaccaggttcagtaagttccatattagatttcttgctaggctttggagcacacgagtctcatgaaaaaatgcatttgtcactgctttccaccatgtctgatggactaataccagtgttactagttatttgggtttcaaaaaatccatcgtatctggcaacctacatcgcaccttatttaatacggaatagacgatcttctgtagagagttgcactccaatggctgggataagcataataacctgcaatcttgcatgcttgattttgcgaagtgatctgatgggtgtctatatgctcagattcttggtgcggagccacatttcctaggcg

SEQ ID NO: 8518 - DNA, 897 bp, Zea mays
  Intron number 1 from transcript GRMZM2G447010_T01 (locus G RMZM2G447010) derived from phytozome v7.0 (chr-ID 1; pos 1 21465706 to 121466602 reverse strand)
cttctcagaatactatctcgaagcttcggtcaaaggtcatttagcttcatttcgatagtaccgagaaggagaagatgcttaagattttagaagaatacttaattgaaagccgaagtgaacttaaaaaaacaattgaaaagaaaactctattttggaagctaaaaatacaaagatgctaaaatattagagcttgaaaacataagggagcaataggctaagcgccttgaagagctcaaagacgagatgaagaacaatcttgcaacacatcaggctgaagttgaaaatttggaggaggaatgagttgaagcaagagtgaacttcgaattagaaaaggttaagaaatagatccttactgaggaaaaggcgggcatggaaaaaattgttggggaattacaaagctcaaaagaaatgtgctaatgagtagcgtttcgaaaaagttgttggggaaaaattgttagggaattactgaggaagaggggcgcttggaaatagctgaaagacttattcgcttctgttggtgccaacacaagcgtgaaaagctatattgatggtgatgctgctggtgccgttgcatggattgatggagaagttgacgcgtttaaagggatccttttagctaaagacgactattcttcatggatcagtgcccaaaacattgcttcggtccttgaaaaagctagttgtgatcatgtttaggctgtcagtaagcctgacttctccatctctcttgatgaagtgaggaatccgtctattgaagcgtcaggactggggaaaaagtagtttgccaacatttgaaatgttggtggaaaaaagatgtacattattaatactatgttgctattaatacttccttacattgtaggcggaaagggttgcgaagaaggttgcggccatcag

SEQ ID NO: 8519 - DNA, 989 bp, Zea mays
  Intron number 1 from transcript GRMZM2G028945_T03 (locus G RMZM2G028945) derived from phytozome v7.0 (chr-ID 10; pos 107763457 to 107764445)
ttgacaacaatactattgggtaagctaagctaatttcaatttaatctaatatctagtaccatatcaatattcaattgatttagaaataatcagtggtggattgagttcttttgacatgcacattgacacaaaattcatcttcttggctacttgtggattatatatttaatgatcttggacaagtaaatagtagctcttgagtatgtatgactgatatgttcacaattgacctttttcttggccataagtgtctcttcatatcactttaattttactatgttttttatgttttatttttattatgcagcagaacaatataggcacgtatgaagtagctttaaatgaaattgcgagatacattttctgttatgtggtaccgagaactggtggataatgtctttgatattctacctgttgaaactaacaattttgaaaattcacgtgctaaaatgacttcacagatttattatcctacctaaatcaaggactgttaaccaaaattgctggaaccttgtatttggtcatattttgggagcacaagttatttgaagattgcaagatctttttgggggttgggtaggtaggagtaatcaggctgctgccactgtaaattttgctgatcagtattgattgctatgctttattgatgatcatgcaatcggcgttggtgggcgtgtatgtacatgcactactttcactctatgacatgtggagcacataatacttgctcatgccatgtgacaagtatgaactttttaactaccacaagtgatcaaaggcacatcgttattactgcttgtgcaatattttataagctttacattttgtttcataatttcatattactatagagtaggtggtttctagtggcaattatttacctctgtagtaatccaagtttatcttactattttaacttatttgcattccatttcttcgggtctacacatacaggtatcagtcttgcttgcttggatcttttcaaactg

SEQ ID NO: 8520 - DNA, 828 bp, Zea mays
  Intron number 1 from transcript GRMZM5G873286_T02 (locus G RMZM5G873286) derived from phytozome v7.0 (chr-ID 1; pos 4 3063578 to 43064405 reverse strand)
gcgagctctgggccagactcgagcgatcttatcaggtagttcattgtatttcgccattcgtttttccattctttttgacgtccctgtgtgagacgatgctgtttgttcggccccggcgagcggagcggtgggagaggtatacgagatttgtgttgattcccccctcccccacagttttctcgatccatctcgctgaaacttggccgcgggtagatatcgtgtcgtcttgttcagatcgctggtttcccctcgacctcgacgtatattgggatgcttctattccacgcaaccgtgcgatcttgttgctcttggctctgtggccgtggattccatttctgcgtttggggaaagttcttttggctgctcactttgcgctgcacggcagcagtgtgaaggacttggttcttcagctactctagcgctttgatttgcttggggttactaacgattaagtgaatgaatcaagctgcggcatctgggaaagaattgatggcatctgggaaaaaattgatggcactaatcgaatctttctgttcgtgttcatcattaacccagtagattcgtttgtatctaccttctgccagtctactaggactacttagatagtttgattatttctgtataaaactcgtactatcttttatttaacacggaaataaacaatttgcttcttttctattaagaatagtttttcttctaccctattatcttcctgtttatcgctggctgatacgcgatgcactgtgcctttaattctgcttaatctggggaaactgacaacgatttgtaccagaggacacagattatcagctgattgtcacggaagat

SEQ ID NO: 8521 - DNA, 415 bp, Zea mays
  Intron number 2 from transcript GRMZM2G174699_T01 (locus G RMZM2G174699) derived from phytozome v7.0 (chr-ID 10; pos 92913941 to 92914355 reverse strand)
ggattacttctgccacaattttccaggtaatgcacatatactcccattaacccttttttatttggtttatgataaacacgcaagctagctgtatatatatgtgacagctagcaataagatgcagttaccagttaccactcaagaaaaaatgctcgtttatatagcaacgacgcagccttttttatatatataacaagctatggaggtgtttgaatccactaaattagtaaattcgtaccaaatgtaccatgttagctagtaaattgtactagcaatttttaatcaactaactattatctttaatgtatttaagcacccgtatttataagatgcagttttccgtgtaaccgccacctcttcttatttcttttctttttatgttgcatatcaatagagtggatattagacaagagca

SEQ ID NO: 8522 - DNA, 785 bp, Zea mays
  Intron number 1 from transcript GRMZM2G172427_T01 (locus G RMZM2G172427) derived from phytozome v7.0 (chr-ID 4; pos 1 60925151 to 160925935)
ctgtagcactttgggtgaaggtacatttttctttatttaaattcgttttggggttatatgagcaagtacttgtcatgtttcaggttccagaatctgtgcatttagttttagtaggtacaccatgtattattggggtggccaactcatagctctgttatgattttctaattgtagtcttagttgtagctttattccagttaaacaatggtatgcttgaatggtccatgtaaagtctcgttttctttattagtcctaaaaaaggtaacttgagatcgaaggttgaagccttaactaaaatggttagacgaggcttcttttcatatatgatcttagaatgaatactgtcccatgtcctattaaacatttttgtttcatgactcggatagaattttgtaatgtaaggattgtccccctaaaagtggtacccttgctttcttctgtttattcagctaaatattgtgtatttatataaagaagaaggggtatcttgggaccaaaataactagtttctgtacactgagctttaggtactgcaataatatgttctctttttgtgcataatgaagataatatatttgatacattggtgattctagtataatttactattgcaaaaatggaaaaggtgaaattttgttcactgagctacagctacccacaagattgctagtattcctaatatagttctgctacgttttttttgtggcagagaagtttttgttttttctaatgcctcctctgtgaatgtgttttatccttttcatgtgaaaacagtggagaggaaa

SEQ ID NO: 8523 - DNA, 594 bp, Zea mays
  Intron number 1 from transcript GRMZM2G101300_T01 (locus G RMZM2G101300) derived from phytozome v7.0 (chr-ID 1; pos 2 54754227 to 254754820 reverse strand)
agttgatagaaggcatccaagaatttgatcagaaggtttgtatctcaaaagcagaattcctattcttagattgcagtagcacctgttcaaacaatactgatttggagaaaattcatcccactgtcgatcgacttagtagacaagaatgacaattacaatagtttctcaaattatgtgtaactgtaactactacgtagatgtagccaaacattatttgatgattactcagctgatcacttaatgatacctattttgtagatatgatttgagaggagtttggataatctaaaagaacctatacatctagcattcaaagtcatgtttggattttcagaatgcccttatatccatgtatacaattgttcattgtttgtcctttttatctgtaatttctcttgtatcattacaaacagacagtatcaatactgattcgtaaataatgtgttgccatccacagaccacatgtttgatcctgacagtgattttagtttttactgttgacctcccatagttcctgacttcctgacatcgaccactgtatttttagttgattgactagcctgagggtggatacttgactgttgatttaccaat

SEQ ID NO: 8524 - DNA, 609 bp, Zea mays
  Intron number 1 from transcript GRMZM2G138425_T02 (locus G RMZM2G138425) derived from phytozome v7.0 (chr-ID 1; pos 1 95484438 to 195485046)
cggttggtttctctgcttggtctgtcaggtaggctggcgtgtggcgtccccctgattgatgtccaagtgaagtgatcttggtttggagttctgcaattgctcttgtcgtgctgggctctgctcagttacttgttgttctgcggtagcttggtcttgcttattccgatcgacaataaagatagcaaagctgttcttcgtgttcgtccaaaatctgtgcttttccctttcttgcgcttatagcagcctgcctgtgaagaagtccctccttcaatccgagctggggttcgccagtccgaatgcgattttgattttttggggttcatcttcaattttgtttgtttttagttaccttgatttatgtgtagcagcagtagtctctgtatttcatgatctatttgtttggtggtgattattgatgcaacgatagttggcttggctgctcacttcacttactatttctgaggtacccggtacaagttcaacaagctgacatattccttttatgaactgaatgaagtgatgctagctcatggcaagcaatagcattaactgagcccagctgagtggtgaagtatgtaatgcccgtcgatttgcttctgcaggactctg

SEQ ID NO: 8525 - DNA, 965 bp, Zea mays
  Intron number 1 from transcript AC199821.2_FGT003 (locus A C199821.2_FG003) derived from phytozome v7.0 (chr-ID 4; po s 196321522 to 196322486)
gcctttgcccattgacgcctgaggtaagccatcaagttttctattgtatcatcataggtccctgcgcttcaagcgcaatatcagtgcctctactgtacttatatagttgtacatttgagaggccattgtcatcccatacatgcagaattgagtattacatacatggaacatcactttaagtctgtgtggatattttatcatgtcatatgttaaatgcatgttgaaatacttgggaatggatgcaagttgtgtttgtggagaaagatatttgaaatgccatcacagacatcatgagagtattgtagataaatgtggatataaacaagttatgcaaatcaccgttcctctcttttacagttaactttgttcagctaggcctctctctttttccctgcatacacttttctttttctttttccttgtgtgtgtgtccactaaagttatataattttttagcctacactttgtggttctgttttcttcgttgatagcgataattgtacaacacataaactgcatttccaatttttcccttttagatattaaatttctttcaactcttttggggatatggaacttcagtctcttgtagcttgtgccttttcggttatagataaaacatcaacatgtgttcatgattaagtgttctttgtaggctaaatgcatacatcttgtttgaggtgagagcatctggtgatggaaattgtcaggtacaccaactcatgcccattctatttcagtatttctttgatacaacaacaacaataacaaagccttattgtcctaagaaacttatcaggctcattctatttgagaacaaaatcaaataaaacatttcctatcgaaaaagaacagatgaagtattcaggaacataattttctaaccattggtctaatattttttttcattcctaagaggcctgcatgctcatatgtgctgtttttctctttttgcagctcaagga

SEQ ID NO: 8526 - DNA, 245 bp, Zea mays; identical to SEQ ID NO: 8451
  Intron number 2 from transcript GRMZM2G104543_T01 (locus G RMZM2G104543) derived from phytozome v7.0 (chr-ID 4; pos 2 40178360 to 240178604 reverse strand)

SEQ ID NO: 8527 - DNA, 519 bp, Zea mays
  Intron number 1 from transcript GRMZM2G473792_T01 (locus G RMZM2G473792) derived from phytozome v7.0 (chr-ID 4; pos 1 48941546 to 148942064 reverse strand)
ggattcgccccctccacggcgtgcagcggattcaggcatctcctcccctccctcccacctgaagccttacctccatctattccattaaatatgcatgcaaaatctgaatatctgattgttttgatgtgataaaattctgttgcagttcttccttgttttacatatattatgataattgataacgaactatatgggggcaaaggtactacatatactgcatatatcagtgagttggttttggacaaagaagccatggatgccgcaaatgacgaagaagaaagatgggaaagagaaaagtatgagtaccataaagctattggtgttgacagaactttttcgaaattcaagaaacgattggatgcatatccccagcaatgctttagatagttaaacatttaatttggatagtatcatggcaacctgacttggtgtttgcagaacaatgtttggtttcttgtcctttttggtttgcacaacctgaattaaattttggcatgcaatatttctttaggtattctt

SEQ ID NO: 8528 - DNA, 771 bp, Zea mays
  Intron number 1 from transcript GRMZM2G163437_T01 (locus G RMZM2G163437) derived from phytozome v7.0 (chr-ID 1; pos 2 21648953 to 221649723)
gctcccagacctgcctcgaccccgacgccagcacggtatgccccgctgcccacctcactgcacgggaacgcggaggtttctcttggcgcgcctggacttctctcgcttgcggcttgcctctgatccgtcgggttgcgccttcgaggcgcatttgccgttcctgatgggagattgggacgcgcgcgcaaaagattgttttttaatctttatgaataacgcgttgctcatctagatgcgcagatcggcggctgggattgtcgccttctcatgtgcacgtgtctgctgcttagtgcagtattttctatttgtatgtattaggtaccgaaagaatgaagcaaagcaactttatgatgccagtagttgcgaggctcgtgtcgttaaataggagtacttgtaggagccactatccagtaataaattgatcaagatgttgtgagggctgtagttgttggtatttttggatcatgacttatttatttaatcgtttcttcttcccatataggatattagtttttgggtctgatgcagaaattatattgttgcatttatcctcgagtggcctctgttgtttgaacttgtctgtgtcccgtcttttaaatttgtcgtgatgcagaaattatgtttttagtttccaaggagtgctaatagattttgaatttcagagctgtcagtgtccatttctgatgttcactcttggctgtataccataataacacacatttgttggttggttcagagtgttcttggaatcattctcggaggtggtgctgg

SEQ ID NO: 8529 - DNA, 780 bp, Zea mays
  Intron number 1 from transcript AC217977.3_FGT003 (locus A C217977.3_FG003) derived from phytozome v7.0 (chr-ID 1; po s 220505679 to 220506458)
acggagggttgcgtgcgggtacgtacatccctcctactacctactagtaggtcgtttcgctgcatttttccaaatccgtatgctattctagtttgttttctgttttagttgggattaattttgtgctatcaatcggcaattttagagagggtttcctcttcctagtagactctagcctcatatggagtatatgcgttttgttgtgctagcttaaattggtttcgattgagtaagctaaatatacttggtttgtagttgtgaatgaagttgtgtttggatagaagtgtttggaaagaagctatccacgtgtccgaaccgtgatcagacatttttccttttagtgctctcaaaagcttttcatctctcctttctctttctttattcttttggtgacatcttgttgggtttcaactctaatctatttcaacttatttgagattaaaagactatgttgatgtatagttatgaatgaatccaacataataaaattgttttggttatgctgaattgtatcctagaaacatgattcatgttgcgaaactgaaataaattggcgatgatatattatgacagtggattgctaaatttgaactctttcatttatatgaggaactttctgacacactaggaatgccctttgcttggtgccaagctgaactaggccatgctgttcgtattctgggaagaaactgctgtggacattcctttcatactgtcccttttattattgtctatattgcactcagtaatttgacactttgcagagattaaaagaattac

SEQ ID NO: 8530 - DNA, 770 bp, Zea mays
  Intron number 1 from transcript GRMZM2G475897_T01 (locus G RMZM2G475897) derived from phytozome v7.0 (chr-ID 1; pos 1 80519667 to 180520436 reverse strand)
cactcacgtgaagttgtggttggatttgttaaccggtattctactcctttcttgccaccatcccttcttgttaaccactataggccttttatgcaccatctctttctgtttgtgctttttcggtttgaaaacatattttattcactgaggtttattctgtgatggttattttggggatgacaagtctcatcattgctcatatttgtattatgactagtcattactactttgtggtttgattgtcatccacttgcatttctgaatcttaccgtgttcttattcttcaaattggatgaaacaccatgacataatatttggtatcttctgtgctcttaatccttgttcagccatagcaaatatttacttgaaaactcaatcgtttaaaagaatcttaaccaacattgctggaatataaatcaaaaacctattattcacttgaattgttaatcacaatgtagttagatgtcatagatctgcatggggatacacatactactaagaatgctagtagagaagtacctgctctacaacttgcaatatgctatttgattttgttatttactctcggctggcaatatcttcatttctttgagctgctatcgtttttagtttcttattctttagattatgtcaaaaaatagcctaaactcaaaggagtgaattattttgacattttatattatgttataatctttaaatttagaattgggacatcaaaagtgtttgtaatattaggagtccttacatgttgtgaactaattttgcagtcc

SEQ ID NO: 8531 - DNA, 901 bp, Zea mays
  Intron number 1 from transcript GRMZM2G157384_T01 (locus G RMZM2G157384) derived from phytozome v7.0 (chr-ID 4; pos 1 95022274 to 195023174)
cgcgagaacccgctcttcgggccttcctccgccacgtacgcctcgtcactcctcgcgaattgcgatttcgctcctgtttctgcccaattgttggatccgatgcgaaattggggtttcaggaagggtctgtgacgggtccagtgttatgatttcaagcccgaggtcgcgttttggttgcggatttcaagtccaatcgctagtcatggttgttttttttaaaaggatagtccaatcgctagtcatggcttatagtcacccgcaatcttccatatctggttgccattttcttggtcgttttcaactcggtcgtttggaaatgggggatactgtgcaacggtgactatttatagatatttactataacgactaaagtactaaacgacgaaactactgcagattgctccccttcgtagcaagtacaatagatctgtatactgaaacatttgatttgcttaatacctagtacagggcaatgacaacacctgattcagtcagcatggaatcttctattctctagagatttgtctactgtcctacgtctacgtcccttgctggcagttaaaaattacagctagtacatttttgatagatgggctacattaatatttttctaatctaattctaagttataaatgaacagtttaagtaacccgtttatgttgctgcttgtggatttgtattcctactgttacctcatgactcctgcaaaatcatgcaaggtacggattttaaaaatctagctgaatagacgaatttgtctgttctagttgttccattccgtgggacagtttttagataccagtatcaaaccgggtccgcattcaacattcgcttcacattgtctatactaaagcacaccaatgttctgcttaagttccaatttttgtgcagcttggagaag

SEQ ID NO: 8532 - DNA, 1022 bp, Zea mays
  Intron number 2 from transcript GRMZM2G022308_T01 (locus G RMZM2G022308) derived from phytozome v7.0 (chr-ID 10; pos 107291997 to 107293018 reverse strand)
ccgacgccgctggtattcggcccatcgtctggaaggtccgaggatcaccccatgatcttctcaattcactgcgtaactgcatttataccctgaccgagtgcttctctatcactccctagctagagaaatggcattgcctatgttgatgacccctgtactagtttcaaccattcatgaagttataggtataactgtataagtggtctatgttgacgaagtaaggtttttgcatgctttcaatcagtagtctatgttgactcacagtcacagtgtcctcacatgtcattatgataggggtgtcaaatcttgaaaggcctgtgaattgggtcccaaatatcaaaatctctcaggtcaaatggatgagataaatcacacctcagtgtgcaagtttcttctgatttagaacactttgtgtttttcaaggtttattttgtgtgtgcttctgatgtttttattttcacataaattctatcctatttgctttttttcttgtttgcccgttgctgaagaactgctcagcacttggtttgatattattcaagcactctgttagctgggttgatcataattccatttgtttttagttcagtgtatattttaagcttaataataagaagagcagaggcataatggcagtactacatcatgatattgaggtctactgattctgcagaaactgcagccacatattttagcacctcagcgattatgagaattttgttttctgtgcttggacttttgtcagtttgtcatgtcttttttattacttgtgttgaatcgtatttcattgcatgacttcttttggaactgtgatgtaatgactttgatttttgatggataacttctgtttgtgattcagtaaaacaaaatctcagaacaaactgctagtgtttaggtaaactggatggacatttgcctggtcttgtaggatggtgggtagttatggtctacaaattttctccatgttctgtacactacaaatttatttgacttttttgatagttagcagcttctcttgggat

SEQ ID NO: 8533 - DNA, 469 bp, Zea mays
  Intron number 1 from transcript GRMZM2G702478_T01 (locus G RMZM2G702478) derived from phytozome v7.0 (chr-ID 4; pos 7 5548638 to 75549106 reverse strand)
tggaaaaatttgaggagaaacgccttagtgacctggtattagctaacgccttttgtgaatctcccctttcataaaaagaagcccctttgaattattattttgtcaacaatgcaaccttttgtgaatctcccctttcataaaaagaagcccctttgaattattattttgtcaacaatgaaatcttccttttctattgtgtactctctgtttgttcaatgttatccttagactaaaatgtagatgtactcttgtatataatacaaggttgcagcgatacaattgcaatcatatatacttccttctatgcttgaggacacaaattgaagcctgaagggttgtcatcgactaaatttggttgtatgtttctttcattcttttttggaactcggaatgtttcaagcctgtagaaagatgaagcatggaaagtgaatgtacacatccacgattgtgatcttgaacagggctatct

SEQ ID NO: 8534 - DNA, 1019 bp, Zea mays
  Intron number 1 from transcript GRMZM2G099074_T02 (locus G RMZM2G099074) derived from phytozome v7.0 (chr-ID 10; pos 2231055 to 2232073 reverse strand)
cgcgctgttcactgctgtctccgacagggaccctggtacctacctatgccgcgatgcttgcaactctctcccctcttagctctagtctttctccatcttctcttcgcatctgttccatggaaagccgagagattctgatatttgccatcagcaacaaacaggtttgtaaaattgccattagacccacatttcatagacccagctggacccacaattcataaacacagtggtaattataacaagaagacaacgttgtgagtggcaaaaatccaattatctcgtttgtgaagcgggcagaatgctcctcccagctgacaactaattaccgtggcaatgctgtttgtttcgtcgggggaaaagagtgctagttcggtccccatatgattttgttaggcaatgctgctgtatacaaagtctcatgctgcttctatcttcctttgcctcaaaaaaaggctgcctttcccaatattaacttctaagcattctgtgtagacattcttttcttttttctttgttggcctaagtcatcattccttatttattttggcctcttcttgacctgctcgtgcccacaatataaatctgtttacaagtgaatgatgtaccttgaacaaactatttagtggatttttttgtttgtttgatccagaagtagctacacttactttcacacctaaggtagatctatgaaatttttactgtctgtttcctgatcacctgagccggtcagaatttcttcagagttttggtaaaaacagcgaaatcaattcaaagttgcattatagaattgcctgaaacagtggtcttgattccacatggtatttgaatcaatcagcccgactaacacctggttgccaacttggctgaatcatatacctgataccagttaccagttatagaagagagtccatagcctatgtgacgcaagcttctcttgattcatttgaccaaatgcctactttccagccacttatttgatgtcatatcattacttgcagccactcaccaacaactgttca

SEQ ID NO: 8535 - DNA, 512 bp, Zea mays
  Intron number 1 from transcript GRMZM2G177373_T02 (locus G RMZM2G177373) derived from phytozome v7.0 (chr-ID 10; pos 144552596 to 144553107)
tcacacaagggcaagatccaggtgcacagggacgagcagagcattgccttcgcctctgtatctacatctgtcagcacgaacatatgagctgctaggtatcctaatctttttccatgtctatctatccctcacccatgtggatattgtgcccgtgttttgatggcggcttagaatcttgttgaagcagtcgttctgtattccctcctttcaaaagcaaatcttgagaataacaggtaaagaagtcccgaagaggagcaaaatcattgattggatgtgggcttacatccaaaatgtgaccgtttctaaagggtgcataaggaatcttacggtgataagcttagacctatttgctgtttggaatactacggcatagaagaagcaatggtgcaattaaacagtttatttaaaagattataaagttggagcaaacttttagctgtagcatacatcttctatcagatttatcacaattttctttgctgaaaaattactctttccaggttatagaggat

SEQ ID NO: 8536 - DNA, 641 bp, Zea mays
  Intron number 2 from transcript GRMZM2G491462_T01 (locus G RMZM2G491462) derived from phytozome v7.0 (chr-ID 1; pos 3 00226292 to 300226932)
ggtggtgttgggggtctgcttcgtcgccgaaggtcctgtaagaaaaaacaccttcggaagatcagcacaggcaaatataacgcgaaggtgtaagccgaagctatcatccagggagcttcggcatagcaacatgtcttgagatgaagggttgcaccgacgcaaagaggaaaagactaatcagcccgtgataatttgtgtcatgattgtaaatagttgaagaggacataaatgtaattttgaccgggctgcgtcccgtgcctataaataggtgaacagtacccatgtactgttcacgctgacttgtaatcactcgcacgtcgctcttggattttcaccttctgtaaagccgaaggtacaaatgttatttgatatcattaatgtttgtttacgattatataatgagaatataaataatctgatgatttaacatggttatttatgttctttaccgtgtttcatatgcctataatttcattagtacatattgagatgatgaaggtatgttcttcatgaccttcgttcgaagatcattatatcttaagagagataatgcttcgaaggacgaaggtatttaaccattaacttttgtgttgccttgttcttgactcatagtatttgagaacaagtcccgaacattgggg

SEQ ID NO: 8537 - DNA, 321 bp, Zea mays
  Intron number 1 from transcript AC155624.2_FGT006 (locus A C155624.2_FG006) derived from phytozome v7.0 (chr-ID 1; po s 8265116 to 8265436)
agcacgaagttgacagtggagttctcaggtaaaaggtgagctcctttttcttctccctccccatccgtccaccattgttaagcttcagctgtcacctcttgtcccttgacatgtttctgccgcctacactggacgacgcttgatgcatacgagatgatgagttggccgcaagttttcttggatcccagcatacgatacgatccaccagctcacccgcacacacaaattattgactttttttttagctcgctttgatttggttgcatccgttgtttccgttaagcagggaggaaggaagaggctgaaagggcggcggagaga

SEQ ID NO: 8538 - DNA, 806 bp, Zea mays
  Intron number 1 from transcript GRMZM2G163796_T01 (locus G RMZM2G163796) derived from phytozome v7.0 (chr-ID 1; pos 2 56521232 to 256522037 reverse strand)
tgcgtgaaaatcacccggtgaggttaacttccctgggttaattagccagtagctaccaaactagaacctgttgtacaacctcaatctgctacgcctcacatctaattggggtaatggtactttcctcatgtttatgaccaaaccagtaacctctccaaaaaaagttgagtttttttttaccagcagtaactcattgtctcgtggctgcatgaacaacaccacaccgtctgcatataatgagagcctctgcccccactcaataaaggctgcagcagaccaagctcagccttcaaaaccaaggagttcaagacatccataaccaagataaaacgcataggggatagaggatccccctgcctaaggcccacataggtggtagattaagtcccctagttccccattgacaagaacacgggtggagaaagaacacaataacttggacaagctgttgcaccaaatgggaccaaagcctagttgcctcaacagttccataaaaaaggccaagagacggagtcaaaacccttactaatatcaagcatgaggagcactctggcttctgaatatgaagcactttggcagtttgtcgccctaacatgaaattaccatgtataccccttccttttacaaacgcgctttgatttatcttcgcgaagctgtggattaggcatatggtgcgataatctttaacttccaaagcatcaaccgacttgggcaatagagtgacatatgctgagttgataggatggtttcatgggtttgttaatttgctgctcatgttttctttatgatacagaataagttaagtg

SEQ ID NO: 8539 - DNA, 975 bp, Zea mays
  Intron number 1 from transcript GRMZM2G131969_T01 (locus G RMZM2G131969) derived from phytozome v7.0 (chr-ID 10; pos 132174988 to 132175962)
gacgttcttctcaccgtacgtcgccgagggattaggtggctcctcgtttctctctctccggattcattttttttcagctcggttccacgatctttgaattttgaaacagccccttttcaattcggtgtccttttgacgtcttaatatacggcgggccgcggggggtgatgcattgctcgcctactgctgctacaccagcagccagaaggcaggcactcgcgccccggtgttttctttagttttttttttcccgacggcacaacttgttgcggccgatccaccccaaaaaaaataacgcctttttcccctaggcgaaaagtattccggttggccgtacgttacggcaagttgcactgcggttccgatgttgattattggtccccagtccccactctcccctgcgaacgtttgaaggataaaaccacttgttttgcttgtttcgctcaccagtgttcgttcgtcgtgctttgtgctgtgcggccgcgttcaggctgcggggacgggggagcaggggtagtggcagcggtcccgttctctgctgctggtggaggctttcggttccgggcgcgggcggtgtggttttctgtggtctcgagaatcccggaaagggagcgagcgcaaaggtgagagggcttctattgattttctttccgctctctctctctctggttgtgcttgcgtacaagttacaatctccagtgctacccctttttttgccggaacatttctctctcgaaatccgttgtatgatatgatgacgaggaaaccccaaaaaatagaagaaagaattccaaaaccctccctctcctgttcagtatcttctgcggctccgccgtggattcttcgtgcggtggattgctttcttccatcttcgtcgtcgcatttttttttgtgtttggcggtgggttcctgatgtcgaagtgaattcatcatgcatgcgtggtgcagataaactaagcagggcgctgcacgagg

SEQ ID NO: 8540 - DNA, 855 bp, Zea mays
  Intron number 2 from transcript GRMZM2G072682_T02 (locus G RMZM2G072682) derived from phytozome v7.0 (chr-ID 1; pos 2 80829774 to 280830628)
tgacgccgtcggcgacctcgcactcgctctcgaaggttgggtgctcgatcctttttgtcactctgtgctattccgtgctgtttcagcgttgctgcttgcgttccttctgttagtctctttatttcctgagcaccaactgttcgataaaaatcgtagcgctatgctggcgctgcaaacagttctgttgtgcgcacaagttgtctgatggagtaacctactgagtttcagttggagtacgatggcccttagatttttcgtttaatctacacacaccttaagttataaacatacatcgagtcagtgtgtgtaatgttgatacacaatttagactgaccacctttctctcttcctcttggcagcttatgaatctacatctcataagctgggtttcattcagcaaaggtctccagttactacagtacgttgatctcagcctttagttgtgtggtggtattggacactgtttacttcaatctaattgatacagattttcttttgtaaatactttttggttgggacaaggaaaatgaatgaagcattagcgccagtgtgccacagtatctgataactatattccatctttctttgttaaattacacgaagaaattactttgctttgtgttgttaacttcagactatgcgacttgcaaacttatatgtcataactaatttcttttgtagatctatattctttgattgaacatgactttgtcaaaggaagcaagatagctattgcactttcaagcaaagttacattgttaatttttagtaccttcagtttagtcttgtggtctcagtgcatataattcctgaatatttcgtgactatgtcattttttcgttgccaatgtaggga

SEQ ID NO: 8541 - DNA, 599 bp, Zea mays
  Intron number 3 from transcript GRMZM2G063492_T01 (locus G RMZM2G063492) derived from phytozome v7.0 (chr-ID 10; pos 89983062 to 89983660 reverse strand)
ccgggtgagtctgcttagtaccaccgtggtttttgtgtcttaggggttgtttggtttatagggactaaacattagtccctccactttattccattttagttcataaattgttaaatagggaaactaaaatagagttttagtttctatatttagtaatttagagactaaaatggaataaaattgagggactaaaaattagtccctagaaaccaaacaaccccttagatttccttccggagccgggtattatcttcactataaaacccatttaaacaactgctttcctcaagtacaaagttgtctttgtgttctccagggttgtatcaggggcttatagggacccttgtataactaaataattcaaattatgagtaagcaccactttgtttaaacatttgtttttctgaacttggcaaactatttcagtaatttaggctaacagaactgtgctagactatcgaaggaatcccgtaaaacattttgtgtggtttgtataaaatccaaagctacatttcatgaaagtaatgaagtataccttttgtaaatgtttctccacattatcaggtttcaagtaaagaaaaagcaattcttccgcaact

SEQ ID NO: 8542 - DNA, 1022 bp, Zea mays
  Intron number 1 from transcript GRMZM2G158197_T01 (locus G RMZM2G158197) derived from phytozome v7.0 (chr-ID 1; pos 4 4327364 to 44328385)
catcgtcgccgcagtctcattcgtcacgctcctaggtaaccgctgatctcgcgcccaccgctcttctctgcgtcagcaccgctacacaccgcgctggcgtgactcgtctctgcctccagcggagcgtgcaaatgtggtttctggcgtcccgcaacaggctatatgggtttttgtctcgtatttgttcttttgtggggatggatctaacggactgtggagaatcgggaataagcgcgcagtttctgttgagggttttattttgagttttggattgtaatctctctcatctgtgagcagatatctagtagcctgtagtacgtttcactgtcgaattggttgaaaaaacgtgatatttgcagccatacattttcagaccctcggatccatgactagtttgcttgggcaatgttgtgttgacaagaaaaaaaaccccacaactacactactgctttatgtgtattctgggtttgtgtttgatccactgaatcagtgcgatggtcaaggatgccactagtcaattgttttaccttttgagttccttctcccggaatgggacaagggcgactgcttgaccctatttcattcacatttatacagatggtttgtctagtgtgtctggtttaagtaaccgtctagttctcatttttagtccgatttactctgtcactgatttcttacgtacattttgtgagcagtttggttcattgtggaccaaagcttcttacttgagaactgcaacatgtcagtttatatatttttcgaataatattatggatttaagttgacttcattcttgatatcctcatgttatgaatttatggccatcggttataaacacaatgcttcatctatccagtagtgccaaaatgttcatacctgattgactcagttatgcattagacatccattttgtcagtgcactgtggtcagttgatgcacattacagtttgtccatgtaaggatcagtgcaccactttaattgcttaatgagaatgttctctatgcagttttaggtgctggga

SEQ ID NO: 8543 - DNA, 975 bp, Zea mays
  Intron number 2 from transcript GRMZM2G171022_T01 (locus G RMZM2G171022) derived from phytozome v7.0 (chr-ID 1; pos 7 4046986 to 74047960 reverse strand)
agactgggatattttgcatacacagaggatcatctgtaagttaaatcttctgaaatctggatccaacatttgtaccatactggtgaatatccttgctttacttttgagtcatgtttgaattaacctttctttccccaccatgcaatagttccgtttgatgaactcacgggaatggtgatgctcattttctaaaggaccggtcccctttttgtttaatttccaaaggtaccatgattactaaataatgatttattagaaattaatgactgatggggtcaagatgtgtgaaactgttaagagcttgagatctgctgattgaccacacccaaaagggaaaatgaaggtggtcttttgaagatttgatttactttgtaaaagggcataattttgtgataactgggaatcattcctcaacaatactgataaaacttcaagtttttccttgatgttgaactgctacctccatgcctccattgtgccacagtggatatccatttggtgctctgtccctatcatctagttgtggtgatggggttcaggcattccctagtcgaaccccctcgctcacccacccaccctggttggaagactccgttgtgattatccataacttttggttgaccttacatctctaattatcgtatttcatggaatgtgtatgctattcgtactgggacatatatataaagcagtgagccagtgaccactgttccatgctctactgaagtgcccttctatgttttcccatgtttatcatttttctgcaatcaattagtgtattacagtgaaagtgaagtactaaaattaggagtattggtaccacttctttctgtgctcatgaattagtttattttggcaatttaatgaggcttgtctcatgtctgattacttcttctgtttctttccctggaatcttgcctcttccaggtgtagaggacattcagttttctccagttctccagttcctggatagca

SEQ ID NO: 8544 - DNA, 843 bp, Zea mays
  Intron number 2 from transcript GRMZM2G491688_T01 (locus G RMZM2G491688) derived from phytozome v7.0 (chr-ID 4; pos 3 1377725 to 31378567 reverse strand)
tcaagatacagtggcctaatagttggtttcaacatgtaagaattagcgatataccttctgatcaccgaatttcgctttgtaaacgcggggcctaacgacccctcacaaataagactgtcaggaccgaagctgcctgttgcacctgaaggtctgccaccgtctatgcatgtattgttatggaaccaactggtgtgggaataatagcaatatttggattcatgttccattttaggttggagtctgcctcaaatttagaacttaccttttgtggttgatcaaatacaccatagccattggatcgaaatcctggtcatatggagtcgccaccatagccatacttcatcaagtttttgatcttcgtatttttctttttttcttgtttttattgcctgagctccatgtttttggttttgcttttgagtctgtggctgttgttgtggttctgatttgtggggcttaaggaagccatcgcctttgagagaaccagatggcttcttgctcatgccatctcagttcagttgcgggcatagggaatcgtcatcctctctgctttgtcccatccttcacatagtgtcctactatgagatggcagatgagtttttgaacaaatccttttcttttaattccttttttcagtgagtagagccacatttttttcaggaactaaggatgcaggcactcgaaagacataggaatccagtgtccctgtaatttgtaatagtttctaaggggagacaaacaatacaattggtttatcactttgtatcttaattaaatgcaccttgccttctaagcattaatttgctgtcatcaatttgtgcaggcatacgtggagtaggaaat

SEQ ID NO: 8545 - DNA, 664 bp, Zea mays
  Intron number 3 from transcript GRMZM2G011355_T02 (locus G RMZM2G011355) derived from phytozome v7.0 (chr-ID 10; pos 13634538 to 13635201 reverse strand)
gcctggactggctgtccagcaacattgcgagcaaggtatacatatggcttgtttgtctccagtaaatatatttgttcgatctggaaatagtttttccattttaccttttcccctatgcatagcctgtttgaagcactgtttctcactactaaatcaacttgatatgattcctcccttttctgcacatgtaggcttgaatatcaaatgcgaactgactaggagctccggatgtatcatggaaacttaggacagaatcgcctctgcaacctgttaggtgtcttctaccggcacaatatattttttgtttggaatatgtaatgatgttacggttcaacgtttattctaccctactatactgttggatgttctttgggcctgtttcattttgcacaaggattggagttccaatatcatgctacattttaaattcgtaccccatcgcaaattttaggatgtataccaaattataggatattccgacattttttggagagtccgagcatcttgagttggatcaaatttatatcataaaacatttatgatactaaaaagtatcgttatttttttattagttatatttttagtgtatctatttggtgtcatgaaactgtgtttttttgtaattttagttaaatttgaggtactgactccctaaaaaatttgg

SEQ ID NO: 8546 - DNA, 935 bp, Zea mays
  Intron number 1 from transcript GRMZM2G035594_T03 (locus G RMZM2G035594) derived from phytozome v7.0 (chr-ID 1; pos 2 41356988 to 241357922)
ccagcaacaagccggagccactcctctcggaaccggtgaacccttctcccagccccagcgttgcctagttatttgtaccgatcttttgtggacagttccagtagtggagtgaggactgttcctgtagcgtggacttgtggttccatcaaaatggctacgatgttttgctcgtatatatcaaactaaaactgtttctagcttaatgtgcggttggtttaggtttgccaaagttagaacttagggctatcaagactcgtctcatgtgagtcttaggatgttatgcaattattatgtgaagtgaagcatgttcgctgacaattattatagatgcaggggcggagccagagtattgagccaccagggtcacacgtctagtataatgattttttgtttgcttagaagagtgatttgatatttttacagctgatttatagtggaatttggaaaggttgtcgaggtcagctgactgacaaatacatgtagctctgcccctgattagattttcttcataatgtttatgagattgttttcttcaagtggtatcaaatagaaaaaaagaagactggaaaggaattgtcttgtttgtgcactgaagcatttatccttggttagagctggaacatattaggagatgtttccctttttctagccttatgggttgatgagtgtggtagatttatgacaagggcctgtatgagggctctggcatgctgctataaatcaattctcagaattggatttactggtttatgaaattttcaggataaaataagaggccaagtgctactcattgctagacattgcccgcttcagagataaaaacatgattacatgatttgttttttttattgttgagcgtttgttccttgacgctttcagacattttattttaatatgcaggatctggagtcaggtctgtatcttgtgtcaacgcc

SEQ ID NO: 8547 - DNA, 833 bp, Zea mays
  Intron number 1 from transcript GRMZM2G043749_T03 (locus G RMZM2G043749) derived from phytozome v7.0 (chr-ID 10; pos 66014410 to 66015242)
gcccgtggtggaattcgtttggtctggttgttgcggtaacagccttccaccccccccccccccccccccccctccccccgacacttctgctttgagtgctgggctgcagcacctgatgcttaggatatccagggtgccgatccgaatcgcagcctcaacgtgggcaaagcactggacccgcagtatctaccgctgccgtttcttgcccgtagtttgtagtaaaaattacatgttgttgccccttgcccgcccggggagttctgctcgtactgcatcatcagaggtgacaggtactttgactctggcgctacggtaaacgggtaaagaacagtgacttgtagttactgtgtcatggaatggaaccgccgtacttggattgtttgcaggatcgaattgagcttggatggaatgaccaatctatttttcagtgtgttactctgttggcagtgcttgttcgcaacctattttcatacgaagtttctacttgcttcgttgaaaaagtaagcgatgtcaaaaggtgtaaaaacgttgaaatcgtgttggttcttgtcactgtagggatatgttctggatatgttctggatatttcgatattggagggtgccattaacaaattgatgagtttgacctccctactgttaccagtttgtatgactgcataactgttgtactgtcatgttctggatatgtttctctatgaccgccactaccattaatggtccttcagtgtcatctctacttttttgttgaatgatgaatgaatggctcacagacatcatttggttttattgcttgtagggggaccacagaagcattagctgggtgaactcttt

SEQ ID NO: 8548 - DNA, 1013 bp, Zea mays
  Intron number 2 from transcript GRMZM2G038384_T02 (locus G RMZM2G038384) derived from phytozome v7.0 (chr-ID 10; pos 147449139 to 147450151)
ttcttctgggccaagtctgcgtcgctgctcaacaggtggggttagcctgacctagctgcttgttccctagagcaaatatatctgagatctgatatcgaatcattcgctcttttgctttggttgttttgttggcgtggtgcttggcggggagtagtttgtgacggactgctacaattggataatatctgtcagtgtgggtgtagcccattcctttcttcgagtagctcactaccaaaatactgtatggcttagtccttagtgattttaagcatcttacgtgttgatttcacatttcagtatatgttgtatcgttaatgcttattaataatctggacttagtccttaagaggagctgtcgtcattcgttagggcttcatttatcttctaagtaagcagaggatcctctattttatcctttttccgcgagcatgtccatttcaccttcatcacattagtaaatagtaatcatgtactatcactataaggacatggtcccttctctgcaaaggaaaggcttggtttatcccattaacataataacggctggatactctaatccactagcatgtgtcatttgccaccatagcctatagtaatgttgtactgtccgttgtacaaggcaggcctaggtgtttctgttattactctgtactgaggggctctatgcgactatgcctctatttttgtcttttgagttttcatgttggccataatccatattctgcttcagtaactcgtagcactaagtcattgcgtatgatctgttaacttgataggagttaattgcatttgaattttaagcaatgtaatcatatttcctcactgctcagaattcatatggtcttcgttttgcaatgtccctaattgatatttcgatttttgtgattttgtgtgatattttgtgttcagcaatgtaactaggctatgcgtcgtccattcagagtggtgcactaaatgagttttatggttcctctgcaggcctcttccacctcttcctaatcttgaggtctcag

SEQ ID NO: 8549 - DNA, 659 bp, Zea mays
  Intron number 3 from transcript GRMZM5G895188_T01 (locus G RMZM5G895188) derived from phytozome v7.0 (chr-ID 1; pos 2 32653041 to 232653699)
ccttaacaagtatgtttttcttttgtcagtttcttgactttgtaatctgttttttaggtaaatgcactagtgagagccctttgcgatatagtgtgtgtgcgcgcgcgtgtttgtaaatgaaaagattcaaaacaacttgtaaaacctaaaacaaaactgaaggctaaaagtgataaggaatcctatttaattttaggggggcggggtgcagacccagtgctagagactccttcatgagtggggtctgtggaagtgataaaccgaggcaagccttcctcgtaaatgcagagaggctgcttcaaacacgtgatcttgtgactcagtgagactgttttcaccgttgcaccaggcctgccatcgacctatttaactttgtgcagaaattaattcttgtgttaaaagtattttctaggactataaaaaacacttccacgtgttataataatcctcttttttagattggatggagtatcttccctccaaatacattcatgtgttgaaaacaatgttgtagtgatattacgaggaaatgtgcaacattggcccttgagttagtgatttagtttacttatcagtcttctacattctgacctatgctctgggattctttattcttgttttcagaatataaactttgggaagaagaaattgagaagtgg

SEQ ID NO: 8550 - DNA, 644 bp, Zea mays; identical to SEQ ID NO: 5707
  Intron number 1 from transcript GRMZM2G106420_T02 (locus G RMZM2G106420) derived from phytozome v7.0 (chr-ID 4; pos 2 677090 to 2677733 reverse strand)

SEQ ID NO: 8551 - DNA, 425 bp, Zea mays
  Intron number 1 from transcript GRMZM5G850023_T01 (locus G RMZM5G850023) derived from phytozome v7.0 (chr-ID 1; pos 2 15201861 to 215202285)
tcctcgccggagctgctccgctgccgcgctgtcaggtactgtgtgctactccgtttccgtggctttggaaaagttgtacatacagtacttacgtttcaagtttccattttgacttgctgtggaggaaaagggaaaggtgctgttttttttcgatctgaagtgaacggattgattatgcttgcgtggtgccacctgctacgatctagcaattaataataagttcgctaaaagtctctgccttttttaaaatttgaggtagaacttggtcttgaagaagacagaatgaaaacttgtgactggcaattaagtggttgcgggagcaagtaattctaatggaagtttgggcttttcattttatttttacatttaattaactattgagctgagtttttattgatttggtttgtacaaatgcaggcgagcag

SEQ ID NO: 8552 - DNA, 926 bp, Zea mays
  Intron number 3 from transcript GRMZM2G104522_T01 (locus G RMZM2G104522) derived from phytozome v7.0 (chr-ID 4; pos 2 40188559 to 240189484)
agtgggcttgtgaattgtttcaggtatcacttcgagtttcaggatttttttttaaataattgaatctatatataccattaaaagattgcaactttagatatataccattggctccacatgtcattgactcatctgaacccacacgggtgagatagcaatggtatatatctaaaattgtaatcttttattggtttcgttgttaatccgctgatggagcttcgtgttggtaaattgcctctgtgttacgacttacaaggagtgctataactgtgttgggtctagcacgtccaatggagcagctggggactgatagtaacttggcttcactctgtgtttggttttgtatcgcttcaaaactttgtgccccatttctgtgagagcctacttatagttatagcccacggctgaccttggagcaataaccagtgaatcttcaaaaatctgtgtctgacgcttctgtaaccttcgaatctcagaccacactggatataatcaataatttttatgtttgatacttacataacacttccaaactctatccatattggatgatagcttgcagcttccatttgtagacatgaaatttgtcatttgtcaatacttggaagctgactaaatccagaggaaaaaaatcctaatcgctgttatcaatgtactggcatataatatcatgttaccttttgctctactcaactgtgatatttttgagcactgcaatgttaatgtgatatcatttttttcatggtggaagtatctctgttaacttatctatgtgtaaacttgtgaacctggcatctgtactttttagtcttcacagctatttgccatgttatgtgcacaactatcacaggagataatgaaacatattcatatctttctcttctcgtttaggaaactctttctgattctggagaagttcatagttg

SEQ ID NO: 8553 - DNA, 1051 bp, Zea mays
  Intron number 3 from transcript GRMZM2G158087_T01 (locus G RMZM2G158087) derived from phytozome v7.0 (chr-ID 1; pos 1 32217918 to 132218968 reverse strand)
gtttgcagaactttaacataaacccacttaatttggtatttcttgaaatctgccctcagtcacgcacctcaccgccaagcgcagccacaccaccgaggtgatcaacctgtcaaagtttgtgttcaggtagtctttgttcttgttcattagtagtagttacttcaaatcaagattctgaacattttttcctctctgttcaaaacaaccctgtgaatacattacacattcaaatgtctgcattctaggacattttctaccagataaaatacatttagattttccagtaacattaactaggactgtgatttttttgaactgatccaatcttgccgcacccatttttttgtgctgtgaatttggtatgaggagattggtgctgctagagatgtcacagtttcaggggcaagcccagattggttcgtgtctcaagggtaggaatatttgtggatcaaaaatttggtgccgtgatggaaactaattgagctgtgagttcatatgatagggctaagctgacttactggaccaccctacctgcatggtcacccatggtcatcgagatgtaccaacaggcgacatgaccgccgcccgtcgacgtcaagatgtgagagcatcggttgcagccatggcccctcagggtggttgcgtctgtcccagtgactcacataaggatggtggtggcgccgccgaacggtgagtttgtcaacttcactgtggagtgcgactggatgctcgtcggcaagtcctatgtgcccgggctatccaccaatcgtgcgaggaggagattggatgccaaggagattgtccatttcgcctttccttcataagagaagatctatgacgggttaaagatgactgccaagaaggcgctggctctagcacagattgttcgcttctccaccaaacgagccggagaggttttactcaaatcatcttatgatgcgcgtttactcttgaatattgttcaagcgaatgaattctttgttcgaatttgctctgtcccattctctatgatgtggttgtagattgggaagctgcccccaaagtggacgca

SEQ ID NO: 8554 - DNA, 1013 bp, Zea mays
  Intron number 2 from transcript GRMZM2G349794_T01 (locus G RMZM2G349794) derived from phytozome v7.0 (chr-ID 1; pos 1 29557871 to 129558883 reverse strand)
cccaggtaattcataaatagtagacgcatatctgttcctgattgtttagtttttttaaatgtataatgcacttgcctctttgattttacttttactccctgcatccgaccatgtttgttttctgaaaagtgcccatatttgattgtcctgattctaattttcaggggctacaaaaggttctttcggtgtactgctcttgaacaattagattttcttaaagatgattgcttcaagataaaccatattgtgggtgttgtagtataacatatggattattctaggccacattcaatagaggttccagagcctgacataggctatcattttggaacgctttaagatactcagtgtagatgttatttttagtgtagcaggagagaagtttcatgcccataaattagtattggttgtccatctcccttttttagatttgattttttcgaccatgaattgggtggagagaagaatgaaactgatacgatgacttaaatcaaagagatcgttattgataacatggatcgtgtagtgttcagtatatctttatattttggtgttaatgtcatccattcatttccctgtcgaacaaactttgtgaggggcttgtttgattagacattaggaaattccactttcgctttgatgcatgatttacctaggcttggtatggcaagtgcttgcatgcttgccaaaattctgcggtgccctctcgttccagagtaaattgcacgtacgatatggctcttttgttattcttagcataaatgtgatagtactgtgcaaaaaacagtactgatggttgtggttattggattatgagtgatgataactctctaaacataagtcatttcttacttatgtttgctctgtcagtaaattttgtgagtatattttagctcgatcaatatattgtgtactattttttaacttcgcccatttgttgcatggtggtgttagtgcctaaataggtctgtcgagctgtgtataactctgtctgaatgtagggtcagtagaat

SEQ ID NO: 8555 - DNA, 787 bp, Zea mays
  Intron number 1 from transcript GRMZM2G106552_T01 (locus G RMZM2G106552) derived from phytozome v7.0 (chr-ID 1; pos 2 57325500 to 257326286 reverse strand)
cctccactcccgcgcagggcggcgctgcgcagtgaggttcgcgccgcccaccgcgtggtgttctgttccctgaggatcggaacccgccgtgtcgaacgaacgtgtggtcatccatcgttgccccgtttgagcatatcaatccccgttgggtcgtgtttttcgggtctgagtggatttttggcttttgatctttttttttccggatttgagtcgggttttggatcaaaatcatggttcatacccgctatagattgtcgtggatcaaaaattaatagtcgggtcaaaaaatttcgtatagatcgatcgggttgggtccaattttgagttgtcgacacgttttggttggacgatggatcgatggtagaggttgccggacttgaaagactttgatcggatcagtaatcgcaggacgggccatttgtcttcgaaggtcaacgcacttacacgagtgtcgataaggtttacggcggtaagggtacggtgtttgatttttagggtttaatttttagtttctctatctcattctattttaatcttaaaattactaaatacaaaaattttaattttattatttagtaagttagaaactaaaatataatagaatgaaagataagccaatttggctcactgcttgggtgaggtaagcgatgagctgtgcctcacatctcatgtgacggcaatacagcataggccagccggatcgttatcttccctaggcgactaggccccctctccaagcatcggttttgcaggtcaaaaggtaaccagctccgccggcctcggagac

SEQ ID NO: 8556 - DNA, 669 bp, Zea mays
  Intron number 2 from transcript GRMZM2G040422_T01 (locus G RMZM2G040422) derived from phytozome v7.0 (chr-ID 4; pos 1 51014760 to 151015428)
tactgctggtgtcacaggtttgcccactaatcttgattgcattttgcttcacttatctatggatttatggttctgtactacaattctaaaacctgtttttgagttggatcgtttagctgtattccccaagagcttttttacttaagtatctgggacatgagagaacatagttttgtttacaataatgcaaccattacatcttttttatcacagccttgttatagcagaatatggctaaacgagtgaaccataatatacttcattcgatgctttattaattgttatagcagtatgcaatgcatatatatagcatactcataattggagtagcaaaccatcttacttattgtttagagtgagaaaactatagacaacagaacattttgtctacaagatgacaatgtgctcgtggctgtgctcctttttttgtgctttttagttgaaatctggtgctacttaaatctaactaatttctcagcacacaacttgccttctgttgcactattttctgagcacataattgactgtctctgcctttctgtttctaggtccttaatgctttgttcaacctttgcaaaattaataaaagaagacaggaacaagcaaccgaaaatggaatcatccctcacttgatgaaatttgtcatgtcagactcacctctgcggcagt

SEQ ID NO: 8557 - DNA, 537 bp, Zea mays
  Intron number 1 from transcript GRMZM2G036543_T04 (locus G RMZM2G036543) derived from phytozome v7.0 (chr-ID 1; pos 7 4266879 to 74267415 reverse strand)
aggaacttgtggaactattggggcatcattcaccagtgcgtacagacttcaaatttggacttccagttttcttttctggatcttcgtttcattctttatatattttttctcctgtttagtgcatactgtagtcttctaattttacagcttacgctatgctgtcgacaaactatactaaaataggaagcaaaacagggtattctttgttataacaaatatttgtgttggtgattattatttcaaaagcaataaactaacttgactgcggtcataatttaaaattctcttcagtctttctacaggtcttggtccagtcaaatcaaagactagttgattagccatctttccatgcttatttctattgagctcataactatcatgtgcaatatatctgtgtgcatatatcaacaaatgaaattttaatatatctgtgtgcatatatctttatgttttagtgtttctgttcctgtttctaagctcaccgctgtttctttgactttgtagatcccagtaacttatgctgggggtgtgtcaaca

SEQ ID NO: 8558 - DNA, 885 bp, Zea mays
  Intron number 2 from transcript GRMZM2G108032_T01 (locus G RMZM2G108032) derived from phytozome v7.0 (chr-ID 1; pos 3 3122122 to 33123006)
gctggtacgattactccgcctacaccgacgtaagtctccatgcaccgaatgaagcattcttttttcttccagaatcgccaagcttttatctgcacacgtcatgcatgagtaacacccagcagcaaatgcaagttcgtttcgttcattattaaccgttcaaactatatgcgtgtatctctgatggttcttgcatctttatcaaacacaccatttcacccgggtgaccactaaataaccaatgcggtcggcagcagagagagccggggaagatggcgaagctcaaagccgccattgttgggaccacaaaacaaatgcttcctcttccccacaaggccacaaatccacaatgcacatgatcctccctcactctctccggtccgtccggccggccactccagttttgttcccatgcgtgcgctgggacacctcagcgcccccaccagtacagtacctaccacactaccagagatgctagcagccaatagacattatcacacggagcgagcaagtgacaagtactatactactacacttctcgtcttctcgatagtattctaagctccatctggaatggttgcaagcatcgtgatcatcatgtccctctttaatttatcaagccctgcacgcgcgcggctaacatgcggttctgggccgaccaagtgaccaactaacgcagcgcaagcaacagtgagccttcgcgtcgcgcgcgtgtcatctgtcgctgtcacgtccacacctatcatacgcttgagctttgatagaataaaataaactatgcgcggcgcagaacatgaacaacagagtagagcgcggcgtgcgctaactccaggtttatttgcgtggcgtccagtgcaggggccagccggagccggcgctgtacaacgg

SEQ ID NO: 8559 - DNA, 984 bp, Zea mays
  Intron number 1 from transcript GRMZM2G012416_T04 (locus G RMZM2G012416) derived from phytozome v7.0 (chr-ID 4; pos 2 04054337 to 204055320)
aggtacggatcggccatggatctttgcttctgcttctcgtagcaccgtgcctagcggatctgtagagcctgtcgcggcacttcgatcgaccgcgaaccggatttttggttcggagctttggtggtggatttccggttcttggaagttaggattttgactggattcggcgcgagggtcggttcgatgggctccggttgatcggagcttctgtggtggattttgggttgttggaagttcgagttttgagtggattctgcgcgagggtcgcttcgatggggtcctggagcttaggtagtggattttgggttgttggaaggtaggattcttagtggattcggcgtcaggctcggctggatcgagctgatggtattgtagccgtctaggttcccgatgacttagctttaatgattcgcgatgagtagagcttttggctttgggaaattatggtcgcccgcgatgagttgaccttttggctttgggtaaattatggtggtttgaggcgttaccaagctattttgctagtagtgttggttcctcgattccttgcaataagatctggcgaagctccgttccttctgcatgacgattacttttattttattgatctgacaaagtgctagcccttcaaatacacgcattccagtgggtgccttggaataacattcgatttcttccttaggatttggaatgttgagttgggacttcggagtatcatgtggctgtttgatgttacagaattttttcagtttggtacagaaaaataaaacatttttaaagcaggtttttttgatgagctctgttgttgatcttatgagtcgacaaatgaattgaattagttttgataacagtagcatatagttgctgtcatgatttatttctagtaaacagtgtttcttttaggcagtccatgtgacaggttttaacttctatcctcttctttcctgtgcagctcgaaggagaagcccactcttgggtaagactctt

SEQ ID NO: 8560 - DNA, 866 bp, Zea mays
  Intron number 2 from transcript GRMZM2G012416_T04 (locus G RMZM2G012416) derived from phytozome v7.0 (chr-ID 4; pos 2 04055275 to 204056140)
ttcctgtgcagctcgaaggagaagcccactcttgggtaagactcttgtgcttatacgattactgaaatgtgactattttccatgttggtcttaaacaagttggacattttaataatcatttatgtttgttcaaatgttaccaggagtcactgatttttccaactgatgtccctgtttagcgatgcttatttttccaaactgttgaatggagttcatgtatttattaaatacagtacaaagaaacttaacatgtatgttgaaatgggatgcctgaattttcctgcatggatgcagcattatctgatggtgtgtcttctataattttattgacacattttgtgttaattgttgtgccgatgctattaatgtattacattaatattctgattgttgattttgctgcaatagaagcaattgcagcattctgttgagtgttgactgccctttctatattgagacattgtcacaattatttcagctaaacttgccaaggttctttattcgggcatgaaatttgatgtcattgttatacttacagctcctgttgccaatgcttctactattatgcttgctattactaatacctttgctattttatcacttccttttatcatggggttcaacttttgtgcaccttgtttgttgctgtttgttatactttcatcaaatggttctcactataagtctagacttatcaggtttttttggtgcttggtcataacatagaaatgtttatgtttatactgtattggtagaacttatttggagagtttgcatggcagtattgcatgttcatgtaatccactttattttcctcaattattattgcagaggcacgcggattaagacccgcaagcggaatattg

SEQ ID NO: 8561 - DNA, 971 bp, Zea mays
  Intron number 1 from transcript GRMZM2G006870_T01 (locus G RMZM2G006870) derived from phytozome v7.0 (chr-ID 10; pos 85708882 to 85709852 reverse strand)
ggattcggtggttttctcgacctgcgtgtgagaaggtcttatccttagatagtgtttggttgaggagccaagtagaacggagtcgttccatccctgattctaagaacgagccgctctgttctgtgtttggtaatctggaacggagcggctctgttttttgtttggttgcagagtgaacggaacggagcgtgactgtgagagcgggatggaaacggagcggctccgtctagttgattttttggagcggaatggttccggatctgagaagaatattccctaattggagctattccgttctagttcctttgtaaccaaacagcaacaaaactgggacagaatggttccgttctacttgacttttcaaccaaacacttcctaatataatgtcgtgtaggtcaaatgattttgtaaggttcatgtagcatacatgtgataatttatgatgtttatgtagcatttggtatttatgtttttcctacttctttattttactgtaaatagttatttgtattttccaccttgtattgtttattttgtatattccatatatacgtacgtacgatggtcaattagtatgtatgtgatgttctatgatgcatattagtgtgttcaggtattctatggtatatttgttttttatatttattttactttggttactggtttttattacattctttgttttgtttttacttagttttctctattgtgttggcttttttctatattttatgagatggctaatgttatattttggtgtggaatgttattcttgttagagtgggatatctttttctttgatttcaatggtctctgatacgagttattaacataaattttcatgcatgacttaaacaaggtttatatggcatagtgatggataacgactctctggcttgtgtgatactagtatttctcttcacttcttttgcacaggagcggctggagcgaaactatacggattggtccag

SEQ ID NO: 8562 - DNA, 784 bp, Zea mays
  Intron number 1 from transcript GRMZM2G122064_T01 (locus G RMZM2G122064) derived from phytozome v7.0 (chr-ID 1; pos 2 07603027 to 207603810 reverse strand)
gagtggggctatcctgtccggatttctcctcgtgctgcatgggtcgcttcaaaatggggaataattgttggctacttgatatttcccaacaacgattcgcgcacttattcccaaaattatgctgttctggtagcacagtggaagtggtagtttgttcggtactattattcttataagatttgctttagtctcttagattaaaaaaaagctaatttgtttgctgttcaagtgctctgcaccagttactaggtgcttctctacgctttgatctagttaagtcttgcgcagcagctcgcagtatcaggcgcaaagttctggctcacttgcagtgctatttgtgtgaaatgtagatggaatgtttgttcaattcattgtaagaactataggagcattttagcctatgggcagtggtagcctggtagagttctaaaccgtgtcatctgaaactgtgtcatgaatgacatttcataatgttggttcgttaacttggcattgattgctgaaatcttgaatttgataccttgagcttttgtgctagtagttgctgatatgctagattttgggttgtattgatacatttgcagtaaccaatgaagtactacgccttagctattaaggctagcattgcagttcattgtttgttttcagaatgaaagtcagtagctgtggtcaagttgtatctttggtatgttacaataacgcagaacatggaatcatcagctaacttcaacttattatttcttctctagtacatttcattctaggggtggaattaaatctccgt

SEQ ID NO: 8563 - DNA, 739 bp, Zea mays
  Intron number 2 from transcript GRMZM2G126957_T02 (locus G RMZM2G126957) derived from phytozome v7.0 (chr-ID 10; pos 142465310 to 142466048)
cctttgtggagttggcggaggcgagcaggtaaacagatatgcatatatcagggtccatgattttttgcatggcgtagctgatacctgggaacaaagccctggagtctggagaacgtgaactgcgtgacatgaggcaccgttaatttatcatcttacctttttttgactgcctgtttggtgggtgaacgtggtcgtcggatcggatgcgatgtttgctggggccgcgatcatgcgtcacccagtgattattccaggcaggcacttggcaagattgcctatttcttctctggaccacgatttatggtggccataattgttctcaaaacgttgctgccacaccagatccgcttggatttctggacacccccaataaatgattactgttaatccagtggatcagaaaatgacgtctctcttgttttctttgtttttctcctttgtccgtctgctttttgctcttgttctgctgctctaatcaggtggcttccatcctaatccgagtgtactcaacaaggttgagggagagactttggatacccattactgttagggagtcggtctagctacattcgtgataggccaataagttggagtttaatacgtaattcagatgtctatatctttaggaatctcttagtttctgcctaagatgtgggaatctatcaggaattcagctaattcaatgcgggctacttgccacaaaggttaatttttaggtaccagatcatctgatttctca

SEQ ID NO: 8564 - DNA, 951 bp, Zea mays
  Intron number 1 from transcript GRMZM2G001300_T01 (locus G RMZM2G001300) derived from phytozome v7.0 (chr-ID 1; pos 1 68335846 to 168336796 reverse strand)
gaggtgttcaccaacagccaaatttgattcaggtttcccttttgaacatatcaattcctctgaattgaatttcagtctccaatccagaagatttcatgtgtttttaatgtgattttacagtcgatgctgcagtttggtttggtgattgatgtgtattgtttctgctgtgtaggaatcagtggaagggtgtggtggaggatgcgcggagggatgggagcaacgggcactggcctctaagatggaggtgagcattggaggcatgtgtatttccttgcatatgcatcgaaatattttggtccttgaatttcattagattagaatacttgctactctttgatcatctgatgctcagaagcaagttccttatagattgttcctcttcgcttgtttatatgcctccagtttttttgtggtggagtgtgattccgatcccataatgctgtagaaaaagaatatgttaccacaatttctgcatgtcctgtttttatgagccattgtcacttcggaaatggaagctgcttttatggtcatttcattacatgtttattttttatgatattatgacacattgctgtttttcaagtaaacctaatttgttttaaattgttcacgagactattcttcctgttgtatccatatcttgagttcttgacatacatgtaatgttagctaagagtgctacttgtgcggttgtgcctttcattctttatgcttatttttgttgtgcatgagtagcaattttaagactggtatattgttttatatttctaggacaagactctggtaaggaaaagattgatatcaagcaacaacactcgtgtcaaggcagagtctggcacctgttaacgatgatgagtttagtgcaacctcagatcatgctttgtatctgtaactggtagaaacaaagttgttccaacatcatccattgccgatgatttgtcagaggttgac

SEQ ID NO: 8565 - DNA, 923 bp, Zea mays
  Intron number 2 from transcript GRMZM2G044834_T01 (locus G RMZM2G044834) derived from phytozome v7.0 (chr-ID 4; pos 1 59828792 to 159829714 reverse strand)
cgtttgaaggtactgatcagttctttacactttatttgtcatgttattttgtctttctctatctgtaattctaccagattttcatggtattagattgttaaacgatattgaaaataagcattgtagtgagcctaatgttactcacaagatgcttcctgcacatattcttaggagactgtttctagttaaatatagcaatatcatatctcagctgaaagggtagggcacaaacaaaactaagtagcaactgtgtaagagaaattatccttagttgttggtctcttcctaagatataaggttcatcatgttctgcttttgcttataagttttattatagttctaaaagtagaattgatcttaggaatttacccttttggcagaatggcaatttatccagtcctgaattttaatgaaccaattttctgttgctggtatttttaatgtgcaaaaaatgctcacaattattttaatgttgcttgaggtatgtgaaagtcatcctacatatgtttttacatgatatgagttagtttcaggctagaactagaaatgtggagtctgtgtagtcgctcccagttatgcctccagcttctgttagggtttgattttttacaggagacattgtttctgatttccctcagtcatctttatttggtcgaatgtatcttcagttcaaccatgggatatacatattgcacaaccatctattgtgttgcaatgactaatctccatgagctaaggtcactccgaatgatggaactgtttaggatatgttaaatgttgcatggcgatagttactgctaatctcttgcattttagggaaaatactggatgcctcttgatgtattcagaactaatggtttctatggtgcttcagtgttctaataacttcaatgctatttgtcaaaacttagaaatatcaagtg

SEQ ID NO: 8566 - DNA, 858 bp, Zea mays
  Intron number 2 from transcript GRMZM2G007399_T01 (locus G RMZM2G007399) derived from phytozome v7.0 (chr-ID 1; pos 2 79679229 to 279680086)
atcaattagtgaaaatagctgaggtatgtttgaagctgctctgtgttgaaacgtcctgtcatcgtgttttcctatgccacttaatctagtgctttaaatggcataatgcaatggttgcaagtcttacgagctgtcacttgattatgtattcagaattcagatgctgcattactttaatctatttaaatggcacaagtttatcggtccattggcattattgtttgcatctactatgtcagctttagagtcaccctagagttgttgatggcaagttcatatgttatttcgacatcttttagttggaccttaatagcatactgtcgtagccttggttgtactgaaagttgactgaatgtaaacattacttaaagattagcttgttgatattgttgatttatggatactgacataccagtggcatgtgtcgccctgtatatttactgcaaagtttatatatttataaaccataaactcaaatgtattctactagtccaattttcatgagcgatggctagagtattaaaaaaatgtctagatatcgcggtatcttctatgtactacctgtgttcgttgccattattgcatcatgtccttgtgttgctttcgagttcattgtgattggctaccgcatcttgtatatgtggtgtgccacagtttcagttgtgatgttgaatacaccctaaaggtcctaaaccctagacattttagctgcacaattttttttctgatcccctactgcatttcctgaagaaagggttgtttgaaagcatttaatgtcttatttgtttgtatgatacatgcaatatgtgttactgttctgcaggttcttggcacaggagacctgtataactaccttga

SEQ ID NO: 8567 - DNA, 717 bp, Zea mays
  Intron number 1 from transcript GRMZM2G090156_T01 (locus G RMZM2G090156) derived from phytozome v7.0 (chr-ID 4; pos 2 38167508 to 238168224 reverse strand)
gcgtcaactggttggtgtcactggctcccccacctccctttactctgccaccttcggctctttccatgaaccctagcatgcttaggcacggtcgcgaaaagaaaatgagccctaacataatcccctgtgccgaatttgctgctgtctgtgattgtacgctccattatgcccatggaacccatgaaaccaacaagtactgtgatggttgtatgagtatgaagcttcaattgttttactttgtctactttcagtatttgggattaatccgttccaaactgttgatgtcacacacttactctaccaactgataacagagaacgggaacatcttacattttggttagaattcaacattgacttctaggtttcacctactattacatatttacatccatgctgcattgcactgtttcattcattatgcttcttatttgcatattttgtgcttcaatgtttcagtaaatatttatcactgctagtaaaggagggtagactgtttgatgtagaaaatacttgtctggccacactaaaattaacttttgttcttacaaaatacacaaaaatgaagaaaggtttagtttaaaaaatccatcaaagtctatatgctgcacgcacactgttcgctctatgctttggaggtgattttcatccagtctagttatgctacacaattgtttaaacacaattttaatcttagctactgttaggtggattccag

SEQ ID NO: 8568 - DNA, 723 bp, Zea mays
  Intron number 3 from transcript GRMZM2G103292_T06 (locus G RMZM2G103292) derived from phytozome v7.0 (chr-ID 1; pos 1 3449242 to 13449964 reverse strand)
aagttcagtacgatagtgcaaacagagagcatcaggtactccttaggttcctattgacgttgaattgtcctaatgaggttcatctaatgttacttatccatgttctattacgaactgtatgtgtgctattttcccacaattttctaatcaaaatattcagcacaaaaggatgacctcgtatatgggatattcaattgagtgtccatgaaatttgacaaaactagaaaattgaaaaaactagcaggcctgtagatctgagcaaatgatatgaagtacatgtaattactttctcaaaacgtagattagcttttttgcaaggactttagttgaaaattggaaaatctaacatgcatgtagatctgagcagacgatatgaagtacatgttgtttctttcacaaaatgtagatgagcttttttgcatggacttcagttgttatgttgctcctcgttaacactaaaacttaacctgctcgagttacaattatacatctcaatccagatcagccttttcattgttctggttctgctcatttatcctttctggtcacataaattcttgccatttaacaccagcactaaagaagatagggagagttcaatgcatgatgtttgatttgttgacactggaagaggcgactaattgaggccgttgtcattgccaccggtgtgcacacattctttgtcaaggctgcatatcttgtcgattcaacaaaccaagttgg

SEQ ID NO: 8569 - DNA, 959 bp, Zea mays
  Intron number 1 from transcript GRMZM2G143522_T03 (locus G RMZM2G143522) derived from phytozome v7.0 (chr-ID 4; pos 2 34888283 to 234889241)
tagagcgtgcgctaggcgagggggtgagtgcgtgaccgagatagaggctgcgacaacctccccggccaccttgccatctccatcgtcctcggggccaatgctggtagaggcactttggttcctggatgacctacaaggaatgggagatggtgggtaagcgtggggtgtagatccttccaggctcagatcgatttcttcgttcgctggtgagttacctaggcaagctgaacgggatggttcaagagcgcgcaagatcgatctaacaaaataactcagatctgtttgtgtgtcagctcgacaaacagatctgagtgtcagctcgacaaactcatgcttgttgtcggcacctaaaaaatagtgaagcgggtaatgatgtcaatttggtcttgcatccaactatttcaataaatgaaaatacagtacatgtcatagctgcattctgggtgccatcctcgatcatggaaaacaacattctctatcaaattatatctcctcatgtaagcagatgtagcctcttcttctgtagtgtgattagtttgaacattgatacagaattaaacatgcagtaggctattattctcttttatgcaggatggtgctcaaattttgaaaaatagaggtaggtgatccaattatattttactaccatggttcattgagaggcttgcttgtggacattccttttgtggtattttttctatatattgctattgactcatgtcataaatcagttagttatattttgctttgttgatggaactccatgaggtgacaacataatgtttcatttgcaaatttaggtgaaagtgaaggttgtttgcccctcataatgttccatgaaaccgaacaacagtcaaactgttagttgtgagttatataggatctgtttattttcctattttcatttctctgattttactacacatctttttccccacccattccaggagcattcctta

SEQ ID NO: 8570 - DNA, 711 bp, Zea mays
  Intron number 1 from transcript GRMZM2G323899_T01 (locus G RMZM2G323899) derived from phytozome v7.0 (chr-ID 1; pos 2 63918031 to 263918741 reverse strand)
atcttcacagccatcctcgaccatactttctcaaggtaaagcttatcgtatctgtttagtcgagctatgtacgttagtttgtgccaagttaggaatgaaactaatggtttgttttctttgcttgtttatttccatttcgttctacctgtatatgacgggtcacctaaagttgaaacgacacagactgcagagtctgccgaatagacacaaactgacactctgctcacctgaaactaggcaactttataaacaaaaagtataaaaattgcatgaaactatactgatcgaaactaaactagtcaaattgagtaatgattagtgcatatggaaaaaggactaaactcatactctgcaaacatgctgcacaaactacaccagaaatttagcagaacatatgctaaaagaggctaatatgcatcatttgtccagaacaccatatgttgcacacatgttgcacacaaaactagtgtctatcttggaaaattacttgaagaaaccacaacattatagctcaggtagatattcagaatatgttccagccatattaaagactcggtcacattacactgggaggggccatactagcgtttaggccataatattacagtttaaaggcatttttcccatctatagaacaagcatttcccccttctgactgagtaggtttcttttttagtgcagctcttttcactgcaccctctccccatcaac

SEQ ID NO: 8571 - DNA, 544 bp, Zea mays
  Intron number 1 from transcript GRMZM5G845163_T01 (locus G RMZM5G845163) derived from phytozome v7.0 (chr-ID 10; pos 84595576 to 84596119)
agattgctggctccaaggcttatcagcaagggaaggtaagaggaattcacatttgattgttccgttgtcctgtttaacgccagcatgatgcattttttaatgtcctatctttaaacgactgtggcagctagtataaattgatggcatgtgctgtctcatggcgcatatgcaaaacttttccaagatgcctttgtctgtaaatataccctatattttttagaaaaaggaatagttccggcatctgcgcgcacacaaccaaattcttataaatttgccctaaatggcacttgcattccatttcctttaaaaagtataaatatttgaagaggcgagatgcagtcaaacataactatatcagtaaatgagatgttcaattcgtaacaatggggtgtgagtacaacttatgctgaatgctcaacaaatactcgctactgcaatttgtggcggaagctggaattccccatggcaaacctactatgttatcatgttttttctttttttccatttgcttcagctgaagatattttaaatgaattgcagatct

SEQ ID NO: 8572 - DNA, 858 bp, Zea mays
  Intron number 2 from transcript GRMZM5G845163_T01 (locus G RMZM5G845163) derived from phytozome v7.0 (chr-ID 10; pos 84596183 to 84597040)
ttcttgacctctgtgctgccccaggtaaattatcatatcaatatttttttattggagcattgttttcttagtgttaaatggatacaataatgacaaatgtgatgtgcttgtttaatgaactgcatgggtgccacagtgtaaaagaacaactttaatgcattaccattaccataagagcatgaagtcagttccagggtgattgatctttggttagggaacatttgatcctgacatcctgttttatctattgggccacatgttctatttttttgatcggaaaaggctataggggaaatccctacagcaacaaattatattaaatcaaaataaacgaactgtacaaagagcaaagagcaaaaggagaaagagaagaaccaaagaaaaaagccaaatgttccatttgtatgaactacctgtagtttcagctatccttattaaacgataggctgtaacatgcagttttgtgttttctccagtaatacctgttgcatccttcatgtatttctaaacttcactctgagaagtggatggtacctgtgaaacttgaggctgcagctatgtagtctttctaaaatctttttgtctattatattattgttatagaatcatctattacatttctaaagactgctggcgtatgattttccatatctagtgacacccagatgcattcctgttttctttgaactattacatcttcaatttaaacatgtacaattgttttcttaaaataatggagcatcttgctatcagtcttgtagcttctgttaggtttttcctttttgtgatatttatgttattcactatgctgacaatgctgatatatgatatattggtatgcaaggtgcaaagctttgc

SEQ ID NO: 8573 - DNA, 746 bp, Zea mays
  Intron number 4 from transcript GRMZM5G845163_T01 (locus G RMZM5G845163) derived from phytozome v7.0 (chr-ID 10; pos 84597566 to 84598311)
acaaggtatccctttataatctcatagcatattagcatcttttacttgacgtgcggggataagatagcccccgaatattgtattaagaaaaagaccttctcacacaggtcgagcaaaccaccgaacccctgccccacacatacacagcggcattgaagcccatgtgagaacgaccgcgaccggggccgagccttaggtctgtgctttggcgtgggacagacgagaggatttttttaaccacagcctgaaattcgctcccacggagagtcaaacccaggacctgaggactaggagtgctacttagaccacctaaccaactcagctagaggccctttcacatattattagcatcttttgcttggactatagcatattagctcccttttcttggttaaatgtgcttaggattatttgaattgaagagcagttgtggttcactggtttggtaaatggtaacacttaaggcctagtttgggtaactctagtattgactccaatccacatgtattgacgtggattggggtttaacttaaactaatttacaccctaatccacctcgtcacatgtggattgtggtcaatactagagtacccaaacaaagcctaagttattatcttcatctgctgtggtgcaaatatctttagtgatgactaataaattttattgtaacaacctgtagcaagcagcatgcacatgcttctcactttattagttcatttgaatgaaacatatgcaggtcctagtgg

SEQ ID NO: 8574 - DNA, 985 bp, Zea mays
  Intron number 1 from transcript GRMZM5G806738_T01 (locus G RMZM5G806738) derived from phytozome v7.0 (chr-ID 1; pos 2 82404122 to 282405106)
catcgttggatcgtgtggggtggacaccatacgtattttgtggtgtgggagtggtacaatgcgccatttgagaaggccttaaatactattgtcttcgtccaaatgagtttgtctttttgggtttgtactaagtcaatcattatcaactttaaccggttgtaccagatgtgtcattaggttttacaacataaaagtaaaaattttattatgacttgaactatcataatatgtaattgttttagtttaaaataatttaacttgatatatattgttggtcaaagtttaaaatagtttgactacaaacctagaaagacaaactcatgtggagggagtagcaacaaatgaagctcagccacgtgagaaaactagtcaagagaataaaccaatcgtatatatttataaccattgtttaaaaaaagaagggagattaacaaaggaccggagaaatttattagaggaaagaaaatttaattgactatgcaatagaagtactaggctagctggaagagttcagttcaaaaccgtgcattggaaacatgaacggcggcacgtgccctaaataagaatcatgtagcataggtataaatcaaacggtctcataatctcatatagtcaccataaacaaatggtaacagtggctcttatcatctgctgagtaaaaccgtagtgcttgggaatcgggatgcaatcgactaaaggtagtattatatttaaataatatgagtttgcgctttttcacaacaaatggtcccatggtctagtggttaggacattggactctgaatccagtaacccgagttcaaatctcggtgggacctcattttttgtattttgttccctctcatccacaattttttttaccattacgaaggaatataaaacggtgctgctcctgatgtgggtctgcaacaaagtttttttagacatttgcaaacaaaattgtttttcagacatcttcaaacaaaattgagtttgcgaggcttaa

SEQ ID NO: 8575 - DNA, 709 bp, Zea mays
  Intron number 7 from transcript GRMZM5G821128_T01 (locus G RMZM5G821128) derived from phytozome v7.0 (chr-ID 4; pos 2 14009175 to 214009883 reverse strand)
cgccgtctgccccggcctgtcccaagcttcagtaggtacatatatgcatgcacagagttttccggtcggacttggtatggaataagtatcatttgtttttttatacagaaatgtagcttgtaaactattagtaaagttaaatacaagttttgttctgaaccaggacatagcactctgtaacaaattcgtcgcattttcgttccttccgctgatcaaatgccttcgttcccagtggttcttgtagagcggttgtgtcgtccgagcgttgatctgaaccagcgcagtttatcagggacgtagcagtgagttggtgagctctctcggctcatagaagccctaccttttctgattttcttcgagcatgggctgaaatgtcaactattgggccaaaggttatagagaactcatagatttgatggctaaacataaaagcgacttagaaggattcaagttagatgtatacggaagtggtgaggactcgcaataagttcaatccactgtcatgaggttagatttgagtctcaattttttcaagggaagggatcatgctgataattcactccatgggtacgtatcaaactagaaactttaaggcaattgtcaaagatagttaattatgtattccacttttttttgttgattactgatgctgccatttgctgtttatatttttttaggtacaaagttttcaaaaatccgagcattagtg

SEQ ID NO: 8576 - DNA, 925 bp, Zea mays
  Intron number 5 from transcript GRMZM2G024811_T02 (locus G RMZM2G024811) derived from phytozome v7.0 (chr-ID 10; pos 120116557 to 120117481)
gcatacaatcagggtaggggcaaaagttcaggtaaggcactaccactacatattcttccattgcccatttgccttgtcaattgtcatatgacctgtgaaacaatgcacataggatatctctgtgaatgtcaattgtattttgtgatgcctccctggtcattattctgaaccgtagaacttggtctatctctactcgtgttttttcacctttcataggatcactgccattggttaattgttaggtgtgctatttcccttttttgtatcaccgctgttaatgtaaggttataggttgaaagttacaaagcagaacagtgaaccacagtccacagctatgatatgggaattgtacttgcatatgcccttgaataattgacgagagtaaatgtaatattgattttaagtttggttaagggtgtgtagcaaatagctttatgaataactgatgaaaataaatgtagtattgatttgaagtttgtatataaaacatatcaatggaagatggctgttgtgaattattaattgtcagcgtggaacttcttatgaagcttatttcatgtgtcatgaaccttcttttaatacactctaaaatgttacaggacttatgcatgctgttattgcaggacgttttagttattctataccttttcacgtttagttggttcgagcacgtcccattggcattgaagttatctcgtcacattaaagaaatacttcattaccatgcattcatttagtttgaatttcacttctcattggcatcaaaattaccccaaagtcatacaccttaggtgctggccaacatatttttaatggattttcttactcataatgaattttgcagttgttattgaggaaattgaagaggatgacaaggctgctgttgctgaagtgcagaagggattgaagaagcaaagccgtgaaa

SEQ ID NO: 8577 - DNA, 748 bp, Zea mays
  Intron number 1 from transcript GRMZM2G145978_T01 (locus G RMZM2G145978) derived from phytozome v7.0 (chr-ID 4; pos 2 34470301 to 234471048)
ggttagttttgctcatttagatccgcttgctatatattttgcgcattcgttacttctggtaagtgtaaacaggtcgatgatgggcactagtgaaaatcctctgctatgccctcaaggtggccctcttcctcgataggtaatttggtgtcatggcttcgcccctcttcttctcttctcctgcattgatcgaggtcgctaatgtgcaatggccccattctgtagggtgcttgtcatgcctccaaagatctgccttagttcaatgcacaatacaaaggggtccttcattcaagcaattgcacactgttttttgtcgagtcaaaaaaatatcctaataatacttaaactccacgtctttgcaggtgggaaagggttcttgtgcaatggaatcgttatatgatatcaacctcatatcaagaattgtacttgtttttttggataatccatgatcatggtacaagataatatcaaggagtacaaaactcggtgaggctggcttggtggtgcatgtgcaaggggttagcagagctgacctcaaacaaaatttgaattattgtagtgctctcctctcataaaccgcacagtaagtcctcctgcttggtaaggaataaggatgcttgttccttgagagtctatacatgatacctacacccaaagaaatagcttaattttatagcaatggttaatcatttctatcatgtaatgcattgaattcgggtataaactttaatcatcattacagttcaggttt

SEQ ID NO: 8578 - DNA, 747 bp, Zea mays
  Intron number 1 from transcript AC183521.2_FGT006 (locus A C183521.2_FG006) derived from phytozome v7.0 (chr-ID 4; po s 41241326 to 41242072 reverse strand)
ctatcctgtggaggtctgtcctaaaatctgattcgccatggatttaatgtgacataagcacaattaattgtcaaaagagcttacttatgatgaatgtggacagagctatttgtcatgtcaggacaaggtaacttggcttcaatagacctgtgaacaagtggctagcattgctaccgtgagcattcatgacctcattttcttctatgttatttttcacactgcggagaactgtacgactgtacaagagcttcctactctcgtatggcttccattttggcatcggtagactcattccgggcgtaattagatcgacagcctcagttgacagcttgggattgtatatgcaaattcactacccttggtttcattagttgatttgagtagaattggtgatttttgcatgctgatgaaaatgtcatgagaaggaattatgcgaaggccagattcatgtttacatgatgttgcttttgatgttaaagctttcactttctcgattcttgttagattgaactatctgtgataatgaactgacaagatctaaaatatttagagcttacaatcatttttctgacctcctagaattagttgaatatattgactatctattttgtatttgtcgagaaactgtcctagatctcaattaattggcatattatgccaaatatgtcgtcacgttatgaatacacatatcagggatatatgcttccatttttgaatgactaactatctttatgcaggttcttcccg

SEQ ID NO: 8579 - DNA, 463 bp, Zea mays
  Intron number 2 from transcript GRMZM2G046966_T02 (locus G RMZM2G046966) derived from phytozome v7.0 (chr-ID 1; pos 2 69029138 to 269029600 reverse strand)
ccaggtaaaagcaatattctgctgcattactggtggaaaaacttttccgtgcatcatggtaacttcaaaagaaatttaggttggtgttgtgatgacatcattgttctggaggagtgagtctttccagtttctacactcttttcagtatattttgtttttggatatttaattggacgaactttggcattgcccagttatgtctatggttaatgaagttggcataagcaatcaaaacatagttatgacttttctgagaaacatcagggattaggaactaagtacgcaacttaaaaaatactataatatgttgctataagaggacgaaaatggatgcccaatggaaaatatgaacaaatatgcatgcttcaaaggaagtaaggaacaaagaagatctcacatatataatctctcttatggattgtactggttactgaagttcctaacatttgtctatatgcagtac

SEQ ID NO: 8580 - DNA, 813 bp, Zea mays
  Intron number 1 from transcript AC203004.3_FGT004 (locus A C203004.3_FG004) derived from phytozome v7.0 (chr-ID 1; po s 153567484 to 153568296)
gcacaaggtaatgcctttgtcgtccttacgaatgtaatttcgaaggtattgtgtcgacccagctatgagctactttcttgtgttgaacatgcgcaatggtggtaggagtacagacaatggaagagaatacacaacaagaatttgttcttatgaacaacaacaatgtgctttcagaaaagctaagaaacttcaagacagtctagaccctaataaaccattttgttaagtccatggttcgatcacatgtgtccagctgcttttgacttataagctcgaagatattctagaatttgtttaaccaatttgtgagaaaagttaaggatcatttttctaatgaagggtattttcattatgctttacaatggccttcctacaggctttaatgtcccagtatacatgtatatatttattttttaatgtcccagtatacatgtatatatttattttccctacaaccattttatttagatatacaaaacctttaatgcacgatgctctctgaactgacggcttaacaccacatgggatctaatatatatgcataataccttgcttgctagaatgagttcaatgtatgttccctgaatttaagatctatgatctgcaattttactcattgtcatcaatttctaaatgtcccagtatacatgtatatatttattttctaaaaagactgctcacaaagcctaaatttatgggacttgtcgatgactcggtcttatgttaatctaatatttaatgcatattttctctggaataaaagctacacgtgttatttattgacgtttagctgaggctttacagactactgac

SEQ ID NO: 8581 - DNA, 652 bp, Zea mays
  Intron number 2 from transcript AC203004.3_FGT004 (locus A C203004.3_FG004) derived from phytozome v7.0 (chr-ID 1; po s 153568343 to 153568994)
tggatcctaagcaggaaaataacaagttagtaaaagtatggcagtagtatataatagcctttttctcagttattttgtaattgccacgtcgtcacatatattcaaattttgaatgccaattgccaacgtattgaaggattttgtcacttcggttcaatatttcaatttataagaaagttgaggatcgagttactcgtgtagttttagcactgccagtttaaccggtacacactattttttaccgtttgatttatttctgtaatctccatgtatctatatagggtcacaactcactataagcaaaagaattcagccagcaacagtcacagattcatgattatgcaattcaatttcttgaatataacaatagaacagttgattctcttgtgtttcctgaagctccaccaactccggacaggctgaatgactttagagtcttgaaagttcttatcacctctcaagtaaaattttgaaacattttgtgtttcatgattgatttccttaactttcatgatttaccccaacgagcacttatggaaatagtttatctggtttgccagacagggacttgcacaaatagctatgcaatcgtattatgatattttcttaatttttaggaaagtatcttctatactgtagaaacacttggtgt

SEQ ID NO: 8582 - DNA, 783 bp, Zea mays
  Intron number 1 from transcript AC196066.3_FGT003 (locus A C196066.3_FG003) derived from phytozome v7.0 (chr-ID 1; po s 248460715 to 248461497 reverse strand)
cagaaacttctatcacgacgctttggccttggaaggtgcgtgcaacaagtctccggagatccatcttcttccttgttgttgacatagtaattgctatgcaaatgcgaatgaaccatgcttccagtttcgctaccactttggttcactgagctacgtggtaggatattgagagattttgaatacatagatgagaagattggtattagtatagtgtcactgctaagagaggatgctgcaatcaatagagaggtggcgcctcacaagtgatcagctaaggtagtgtcttatgggtaccttgtatcaactactatacccattccacatgggtaagggtggtaatgggctctaaattttacactataaaatttaatgatcggatcatattaggatcagactctatttattaggatcatattaagaaacatttgagtcgtgatccattaccatccctacacatgggtgattatgccatcaagttaggataatgatagattatgcgtgtttatacgaacaaagcaaactgatgtgcactagcttaggctgttgggttgggtggtgacatgtgtgatttgaggatgtggtggcagatggcaccaaataaagcaaagtggagtgatgtgatagatttgtctcacttagtggtgacgttatccacagcatgagtttgtatttgaaaagcgatgtcactgctgggattgtgctgaaggacatgaagaaaccattattgctccttttttttgttggatagaggggtgagcagcaggcatcactgagcgacaagct

SEQ ID NO: 8583 - DNA, 1003 bp, Zea mays
  Intron number 1 from transcript GRMZM2G007074_T01 (locus G RMZM2G007074) derived from phytozome v7.0 (chr-ID 10; pos 75599192 to 75600194 reverse strand)
gatcgcagtctattcgcgacacgcaacgaatacaaacaagcacaatcaaacatatacttgcataagaacattacaccatacaagataaaatattataaaagcgagcaatataaaatagagagcgcttctacggttacgcgaggaaaagaaacgcgaaagttggagctacggtcgaggggttagcgcgtttacactaagcaagtattaattagaatacttaattcagcgtaactatattaatcactatttatgaaatataaattaaaacaacttagttttgactaactcactattttaatcatggatgattaaataaacaactaattaactgacatgagtgattataagtgaacggtttaatatcgtgtgcggacaacgcgtgatacgagcgaacgacgcaaccagacgcacgaacagcacgccgacgacgagagccacacgtgcgaacgacgtgcaagaacaacgtgcgacccacgcgaataacgcgtgagacttacgagagtcgctgacagatatcgtgtttatactaaacacttattaattaaaacattatgggaattttgtcaagtgcatgcaggtggggcccactgacgatttcttactttcttccacctaatcaaacggatggctggccagagcgcgggggccttcatccatggcgcagccgcacaagcatggaacgcacgagggggagggctggctagagcagggactaggggctttgattggtcggagcgagcgactgccgtagctggggacgcgggcaacgacgcacgacgtgagcgggtggccaatgacgaagttgtggctgcgcatgaccagcggagacacggaacgatgcggccacgacggttcggccagcgaacgacatggagtggagccgcgacgcgtagcaaggatcaggcgtggctgggcgcgctgcatagagtaaccaccatggctaaaatgagagaacgagaagcagggcatggccttaccttaggcggcgcaggatgtcacggcc

SEQ ID NO: 8584 - DNA, 865 bp, Zea mays
  Intron number 2 from transcript GRMZM2G014004_T02 (locus G RMZM2G014004) derived from phytozome v7.0 (chr-ID 4; pos 1 96544500 to 196545364 reverse strand)
atcgcgtccttcgccggcgacgatcaccgacaagggtatcgcaccgtttcccttccgtttctgcaggcacccgaaccctaacataagctatttggctacatttattccgatctgatctagctacaataaaccaatatacgccctttaatgcccccacccctcagggtgtacgcaacgtactcagtaacatctttagttggatatttcaatggtggtgactcggttgatgttttgcaataacttggtgctaagcttactttgcactggagtgcttgattgttaattagtagaatttagaaaacgctggtgattttgctgttttcttctctacacatcccttgcttttgttactttttgtcatttctctagtcatgtcaacaaaggattcggtaaacttgaaattgaagttggtaacaagaactgatgtcaaggattgtcaccctgatgactggcgtgggccttttggtgacatggttctggattttctaatgttgaaaatatacttcctacctaagtaacttgaattcgctacagtgtgggagctttggtttacagaaaattatgctttagctccttgtgaggattttgatgtcatattattggtcaacctcagccttatccatgaatgatttatgatacaatattatggcaatgtttccatcgtgttttcaattctatggtgatggtaaatggaaaggtgggagcatgttgttcatcaataaccaactgaagatcccctttgttgtttttggttataatgcatatagtttactactttgcttcctcttttgaacggtagtctgtaagcatatgtgtgcgattcaatgtaatcatcttttgtatgacaccctttttgtaagtacag

SEQ ID NO: 8585 - DNA, 925 bp, Zea mays
  Intron number 1 from transcript GRMZM2G086788_T03 (locus G RMZM2G086788) derived from phytozome v7.0 (chr-ID 1; pos 6 1294149 to 61295073 reverse strand)
gcgtccatctccccttccctccatcacccttggtacgctatgcgcctatgctccctcttcctgcacatcgcctctgcttcttctcaatagtcaatagccttccctcgcgcggcctcgggcacgggatctcttggacacataaatcgctgaaattttcttctctgccgacctttgctgagggctgaggcgcaccaagtgcggactgcgtcgtgttttttttctttcaaaaagccggcgaaaaaagggaatccgtcaaatgcagccatcaatcttatcgcatttactattaaccgcaggaagtcgcaggcacatttgttcacaccaaatctagcttgggatggcattggcaatactatatatctcaagtagtcaattggggtaccgatttggatgcgtttagttctcagtcttagctatcttcaacagtttaaccatactcatccctatatttagacttcattctacaaaacagtgtgaaacgtgttttgaatgaccatatgagtaaagtactggacacgatcttaacttttagccctgtaacctcacaaaacacgatatgatattaatgacaaatgccagtaagttgttcctcttagcactgtttactgtataacctcatgatcatgataccttgggtttgtagttacaaggttcaaaatgtgaagtttagacttttgctatttgctattttgtctttggaagtttagagtttagaccccatcggcccatctttccagttggcagcaaatcttgtgctaagcattcatgttttaattccattttgatgtaatgaagtcttcgcagcaaacttatgcattattgtttattagcaagccttgtttcctcttctaaatttcaacatgcaaattttctttctctaaataaaccagcaattctagaactggcttccttggaaagacacacg

SEQ ID NO: 8586 - DNA, 421 bp, Zea mays
  Intron number 1 from transcript GRMZM2G038846_T01 (locus G RMZM2G038846) derived from phytozome v7.0 (chr-ID 10; pos 91360108 to 91360528 reverse strand)
cattctttcgattcttcagcttattcacctcgcaggtgcggtgcggtgggattctttttcattcccatatgttgttgctctttgtttgtgtgtcattttttttgtttggtgctatttttttatttaattattttgattcagcattgccgcggagaaaaacctgatttcatcattggttctggacttctggtctgtgcgtgaaattggattcacatcaagtttttgtttcctataatctgcacttctgatcaactcattttcttttctttgtttagctcgtttaattgtattctttcatgatttttattcttttccttctatagaaagttagaaacaacccttccatgatttctctgttctctctgcgttcatttttgaatatgtagcgctaggcgtggacggagcggcgtcgttcaggttc

SEQ ID NO: 8587 - DNA, 534 bp, Zea mays
  Intron number 1 from transcript GRMZM2G112122_T01 (locus G RMZM2G112122) derived from phytozome v7.0 (chr-ID 4; pos 1 53583039 to 153583572 reverse strand)
tctacaacatcaaggattatctcgtcattcataaggtaccccgctctacaacatcaagcttatctcgtcatttagattatgtaggctatatgcaaatattcgttatacattggttggattgcacccaatattctacttcttgtttaaaaatttgatgctttcgttccaacttttatttttatactttctcatagtctgccattattgattaaaggtcacttttaagagctattgtcatattgattttcctcattatctatcttttttagagttaaaggcattttcttcagtctttcactattaagacacaatttcatgctgcaaagatattcaattgatgatattgatgacgatatataagggatatcactcttgagccacataagcttgatgaagagattgttgaatctaatcttgagcttgaagcaaacttcgtacagtataactatgatgatcgaccacaaaaggtacttcattctcttgccacaaacatgtttagcgacaagggagatgagctgctaagtctgtttttac

SEQ ID NO: 8588 - DNA, 755 bp, Zea mays
  Intron number 4 from transcript GRMZM2G106647_T03 (locus G RMZM2G106647) derived from phytozome v7.0 (chr-ID 10; pos 148856795 to 148857549 reverse strand)
aacttcacattgccttcttttgagagctacgtaaggtactactgtactactaattctgcatttttgaattatggttttgaaacatgtatttttcagaccatatagttgttcgtaaagttatattgaatacagacacgcgcagcgcgtgcactatactagtttgcagtaatcatcttgggctttctggtcaataacctccttgccacccaaacttttgattacatgtcgctgggctgcggtaacaacaggacccggggagcacggctttccaccggcgacacttctgctgcgccgcggggcagaggcaggcacagccactctctttctcctcctcctaggagaaacggggagaggcattgtcttgaaactgtttcagccatgtttactaggccctgacaaacaaatgttccaaataagaaatacttgaatgtgttctgatgaaatgtgctgtttttgatttgtcaataatgcatcaagccaatattttcctgccatgttttctgatgcccgctacatgttcagtgtgtttactgtacccttttctttcttttcttttgtttgcatataatgtttgccgacttcagtttacccagtgttgacggtgctgcatgcaggttccaaatttgaaactgacaggtcctagccgtgctgttctgctggtggatcctgtgactattgaggctgacctgaaagttaaaggccgtactgaatctgaggataaacacttgagctttctagcagtgccattcttggtc

SEQ ID NO: 8589 - DNA, 968 bp, Zea mays
  Intron number 2 from transcript GRMZM2G166713_T01 (locus G RMZM2G166713) derived from phytozome v7.0 (chr-ID 4; pos 1 65922212 to 165923179 reverse strand)
gaggaggagtgctcgcccaaggagatctgtgacaagtgagtcagcagggagcagtccccctgaactctcttagtttggaaccatcttagttttcataaaccggtttctaaaaaaaccgtgtgcttccaaacatgctcttattcatgatcctgccagttctgtgcattattatatcttcattggttataatttgattagaacttgattatcatatcttgtttataggcatttgaccttttcttaaaaccgctggtttttactttgtctttgggcctgtttggttcactttttttctaatcagtttttctgaaaatctggctgtggaaagaatctggctgtggagagaatctgagtattattacgattacgtgtggaggaagataaagttgttcataaggctcaggatctagaaagtgacggattcctactattacaacgactcaatcgattatgtgtttatgttgattttggatggtttttgctcaacgaattttatagaagctggctaaaaagctgagcgtttggcagtccgcagcagcttttggtggccagaagctgccagaagctgaaacaaacagggcctttattgtacagtgtacgcatgaagtattctgttcatacggaagatgcattgcttgttgagatgcatatcacataaaaaaaggggaaaacacttccttccttcttttttgaaacactcttatgaacacacgaacatacacatgcacctataaggactttggagacactaggctaatcttgagattgacgaagtcactatacgtgtctactaataagtggtcgaaaatgtgaggtcctgtttgaggtcagagacttaaaccttcttgtttttgcataggaacgaaaagagatttgaaccttgcatcacaaagaacctatgtagttgtagttggggaaaaggctttcttcatataaaccttttcttgctgatgaaaactgcaggtacc

SEQ ID NO: 8590 - DNA, 966 bp, Zea mays
  Intron number 3 from transcript GRMZM2G161934_T01 (locus G RMZM2G161934) derived from phytozome v7.0 (chr-ID 10; pos 144234586 to 144235551 reverse strand)
ataaattctcaggtaaggtttgttcttgatattagtgttgttattgttcttggattagatacttgcctgattgctggttcttacctgctaatcattgcctcagtcgatgggttctagataatacaacctaatcgtggctcaaagaagctgcaaaagcttatcattgacatgtcagataaagaggctgatgctaaactgccgagtattattcctacagtggtacttgctaaactctctatcggcacatgcaccggaatgctcacggtgttttggtttcttggtttctgtagcttgtaatggttagtcccatgttgtaatgcttgcagcatttacttttatgtttctattaatggtcaaccatcactactgtgatcacaaaactttattgatgaactaaaaaatatctgaaaagagtacccctcttctgccaactgcaacaaacctataagatgtttctgcttaaaaggtgtcattctactatgacagtctttggtgaccgcatcaatggacccatcgaattaaagtttaaccgtcctacataggcatttttttaaagaaaccattccacataaacatgaagggaaccttttctgtcatttgtgtgattctatcctctctttatttgataagagacaaaaatcaaacataatatgttggcatatcctcataggtgtccactaacttgttgaaaatgttattcttaattttttttgcagaatatagatacttttcttggatttctgaacttctttgacttaatatttgttaagaagttttttagttctggtagaccgtgaaaggcaaatatgtagtggcataactgtaaattttcatggccgacctatattagctcgtccagcaaagtttgatacatataattcatagtgtttttcccataaatagataaactatttaaccctggttctgagatatcattgacttgatttgctgtgggatacagcttcc

SEQ ID NO: 8591 - DNA, 958 bp, Zea mays
  Intron number 2 from transcript GRMZM2G068577_T01 (locus G RMZM2G068577) derived from phytozome v7.0 (chr-ID 1; pos 1 78421043 to 178422000)
caattgtgaaaatggtttcatggtcaatctttgttttaaattgctcctgctctaacaaatcatgtttccaagagaaataggaggagcagatcagtccaaggagccttaatagccaatggatgggtaaatggtctctctgggagccttccggcgcaggtgttgtttgagtttctgttggtctgggatttactccaaaaggtgcaactgtagctgtagcctaatgttgaggaccagcaccggtggctgccgtcttccttggggctgtattcggccagttctgcttataagtgcttccatggtggtgcaacaacctttgagccagctaaaagaatttggaagacttgggctcctccgtattacaaatatttcatttggcttgcatctctcaaccgatgttggacggctgatcggttagcccctcatggcatggatcacccagttagatgtcctatgtgtgactagcaggatgagaaagtgcaacacattctggtggcttgtgtctttatgagggaggtatggtttagaactctaagcaggctgggactgcaacatcttactcccacgtctgatgcagcagtgtttcaggattggtggagagaggcagaaagaaatgtgtctaagcaaaagaaaaaaggttttaactctattctgagtttagtagcatggcggatttggaagcatagaaatgcgcgtgtgtttgacaatgcttccccaaacattcacacaattttgctgaccatccatgatgaggccttactatggggccttgctagggctgctgctcttagacaggtttggcagtagttggatgtgtattctcatcttttcctttttcttttccctttttctctttttcttgggtgctttctaggcaccttgtactaggtcttttctagaccttttttcctaacttcttaatataattatacgtggttctcccacgtgttcgagaaaaaaa

SEQ ID NO: 8592 - DNA, 877 bp, Zea mays
  Intron number 9 from transcript GRMZM2G124636_T01 (locus G RMZM2G124636) derived from phytozome v7.0 (chr-ID 1; pos 2 80189990 to 280190866)
tgctcggcaagactgacttccttaggccagacgtacgattcttgcccccgtcttcttatctatactgcttatcatttctaatccatccatcggcttaatgtttcttgatttctctatattttttctccttgtctagattttgcttttgcatttctatgacatattaacttagaaatttcactaacaatttaccattcagtgaatctatttgaggcttgcttcagtctaaagcactcttagctagatcttttcctttccaccgtagaatatttagaatgagctgctgctccaccaattcttttgcagcctccttgcttgactcatgatgaaaaccaagacgtaatatgccacaaacctaatagagtaaacatgtaatgtgtagaataatatctaaattggcagttgtaagagtcggcgcaattagcaagtttgctagtttggaattgtgcatacaaactgaggtagatgttctatttgcagtaccttactagattgtttatggtgcactttaggtatgagtaaaacaagaaaccttaacagaaaaggtgcctacatggacttattttggaatcaaaaggattgtgatatccatatgaaatacacgaaccataatcaatttcgaaggaacatggcttcctacatagaaagatggatttttcagtgtaaaaagaaatgcagctgtttgttatgcctttgactgtgaaacttatcacatggataaacatataccttcattttctctcattttagctatttatgcttctcctggtgtgattttagatacaaatgtattaacatatatacaaaccaggttgttcactagagaaaattttaatcgctttcatctggtgttcttattataggatcccataaccag

SEQ ID NO: 8593 - DNA, 860 bp, Zea mays
  Intron number 10 from transcript GRMZM2G124636_T01 (locus GRMZM2G124636) derived from phytozome v7.0 (chr-ID 1; pos 280190870 to 280191729)
gacagccacaaagaaaaggtacatgcattattcctaagaaactaggactgcttagggtcggagtgaggaggtttgtctcaactagatctcatttgctcttccttgtttgatcggaacaaaaaaactgcatcgatgtgatatacacatggtcatgtttttaaataattataagtctgagcatctccaaaagatcccaaaaaaatcacctcttaaaaatagttttaagagcagcataaaacaattttggcttgcattttctgtgttacctccaacagtatacctaaatataattgtaaaattaaacagaacatggtttcttcagcccatatgtgttcacatgcaaaaaaatggaagggtaagaactagagttcaattgtaatcatgctcgaaggatgaaggtagcatatttctatacgtgaatggagttccagtttaatttaaagattcaagttcactacaacaagatcttacagtactgagcccatttgactttccttgagaaatagccagtgcttttttggtctgcgagttcttgcacttggttaatcaactgtgtcacctgatcttctacttatttgcgcaagaaggtcaaagtcacttttgaagctattagttcagaacacacaacatctagctaaatacatcacctgtttgaagtaattgattgtattcttgatatcatctttattcttgaatgtcatttgtgccagttcatttcttgtgctgcaaaccaacctgatatcgtcaattcatttaatctctcaatctcagtttcctttctttttgtttcacattgaagctccctaattgttgcttctcgatgtgtagtggcctgattagctacaagaagctcttgttcc

SEQ ID NO: 8594 - DNA, 653 bp, Zea mays
  Intron number 15 from transcript GRMZM2G124636_T01 (locus GRMZM2G124636) derived from phytozome v7.0 (chr-ID 1; pos 280193494 to 280194146)
cagcaactgaagtccttaaagagtaaatatatcttcccttatccatatgatactctttgtgtctcaaaatacttgaccttataggatttcaatttcaacccaaaatacttgacatatgacatgcacctttatcttctcctaacacacatttttctttttgtgtaatatgcatatatttttctagaaaaatgcttgtttatgttacgtgctgaaatttatgtgaactgagccatgaagaggatccacacttctgtattcagcataaatttcttggttttgtacacaatgtctcattctctttttctttgaaacctaactgtgaacatgctaccattaaatgtctttcaacgagttggttgccagctggttttctagctatctcgttttcatagttttgattttgttccatcatattcagtttattccttaaatagtttacgattcttagtacaatgttcataagggtatctgcttaaatttgcctcaaattagtgatacattgcatagtcgctttggctggctcttagaagtaaccatctggctaccatagtaccatcaggaaatgtgttcctgccttcctgattgtgtatttcccttaagtgatactaggtactgacatgtgaaaattttacagaaagcaaccaaaagactgt

SEQ ID NO: 8595 - DNA, 654 bp, Zea mays; identical to SEQ ID NO: 6980
  Intron number 2 from transcript GRMZM2G472614_T01 (locus G RMZM2G472614) derived from phytozome v7.0 (chr-ID 10; pos 94950069 to 94950722)

SEQ ID NO: 8596 - DNA, 351 bp, Zea mays
  Intron number 1 from transcript AC196475.3_FGT005 (locus A C196475.3_FG005) derived from phytozome v7.0 (chr-ID 4; po s 32243304 to 32243654)
gcaccaccgagcctgagttcgagtccggcgagcaggtatgaagctattattctcggtgcagcttatggttgtcaagttctctagtgttagtatctgtacagagatgtgtgctttgtacttgagaacttaagtttgtcttggataaatataacatagtagtctgttcactgaagaatgtgcccctaaacactagtttgatttctggtggttaaaagaattgagttctaatcatcttcacaattagttctgtacagtataagcacatagtaaatgatttttttgtgttgtgtctcatggcaaatgtttactaaaatcacctggtgcttgtgtatctgattttccagggtggtt

SEQ ID NO: 8597 - DNA, 701 bp, Zea mays
  Intron number 2 from transcript GRMZM2G156207_T01 (locus G RMZM2G156207) derived from phytozome v7.0 (chr-ID 4; pos 3 7963428 to 37964128 reverse strand)
attggttttgcggttgctcatcatttgaattttgagtatgccactttctagtcgatgtcgattagaaccaatcatatatgatttagcataatatgtcttggaacactactgaatttttatatgctacatatgctatggtgaaagtacggtagcaaacttcatcccaaacattgttgagtgtgcactgtaagcaattgaagtagtacacggtataaagtgagagctgaatacaatcttcttggctcatgggttcctttatcatgtcaattatttgattgctctttgtcatcattgcaaaacatactttgtataatatatggctttttcattttttggcatattggtgttcttttcttttaagtgtgtagatagcctaaaggtccattagtccagggtttgcacagatgtctctgactctctgcctcacttgtatatacctcatttcttataattgagttgtacagcctgaagatattttttctgtgatccaaacctgaccacttatatttttgtttgtattcttttatatcagatgtagaaacttgttcatttatttgtgatctatgtgctaaagattatgattaagataaagcatttactgcatgaaagaattaatcacttaacgtggttgtttgacttggaactgatactgattgtcacttgcagttcttccaaggcagtagaagtattggaggcatacg

SEQ ID NO: 8598 - DNA, 459 bp, Zea mays
  Intron number 1 from transcript GRMZM2G053231_T02 (locus G RMZM2G053231) derived from phytozome v7.0 (chr-ID 1; pos 1 96222631 to 196223089)
tcgggagtcggggtggaagaggaggtggctgcaaggtgaccatttgagatctgcaactcttgttgatgttagttgtggtactaaccttaacaaaaagtaactctcaacactcctctcatttctcaaacacgtataggacaaaacagttagtggtataaaatggaagttatggatgaattgttctttctacgttcatgcttttaatccgtgaatattataggtaaatagctattttattctttgaattttgcaggaactattagaagttttctggagaagcaaaaagacaaaaattatggtattgttttttgtactgggccatcatctaacatacagatatgcaaacgatacttaaactgaaccctagaacgtgtattaccttttagttcttcatcagcttcttgtaagcaattatacaatgcaggttgctcccactgtatttccctctagacaagcagg

SEQ ID NO: 8599 - DNA, 762 bp, Zea mays
  Intron number 2 from transcript GRMZM2G079889_T01 (locus G RMZM2G079889) derived from phytozome v7.0 (chr-ID 1; pos 3 1430304 to 31431065 reverse strand)
ctttttcatcctaggtaatttttttggcagatgcatataccagaaaacttacgatgcataatttggcatgctcatattctgttaccaacagcatccttctgtttgatatatgattacattaataatctcaactatccattgttaatgagtaatatgtgattcaatcagcagttgtgctgaggaggtaaacttttaacatgttcacctcttcttacgagtgcttagatagtttcacatacctaggattctctattggcagtttgcaagcatcgtgctacagaataaaaaaaatcatttagggcttctttgttgggaacgtatctggtgcaaaccaacccctctgtgcaaccgtgcaaatttctaatctgggccacatgatgttgatccaagaaacacagggcgtggataattttacacttaaccacactttttcaaatcccccctcccccacttgggtcaacatcatgtgattcagattaaaagtttgcacggttacacggaggggttggtttgcaccagatacgttcccttctttatttcaccgttaatccatgtggattggctgatattgagtcggtttaaatccatagcaagttaaaattcatctcaatccattagccagaacagtcagagtcaaactgcaacatgtttcaagactaacccatactacagatatatatggtaaattgaagcattcttgcactttataaatacagaaacaagttttgccaagtttcagcgttgctggtcttctgacaggga

SEQ ID NO: 8600 - DNA, 659 bp, Zea mays
  Intron number 1 from transcript GRMZM2G079889_T01 (locus G RMZM2G079889) derived from phytozome v7.0 (chr-ID 1; pos 3 1431130 to 31431788 reverse strand)
gggaccaagaagctctcctccttccacttccacaggtgaagtccccctaacaatctctgtagccggtctgtgagattcttagactagtttagaagctgtattcctattttaccaagagaaaatgaactaattttccttggaaaatagaaatcccatagaaaaatggggttcctaaactagtctttagtgttcctttccgggaaaattcttgcttgaggaattcatccctcgagtccaagtcaaaacttgtaaggcagttcagagttcttcagtttctgtgtatgaattgatgccatgttttctgctcaagaaaaattgtgataccatgttttgtatgttgttgttatttgatgctctcctaaattcggagttcagataagtggagtggaaaattggaatgcccagaataaacgcgaagatctatttccatagggatttgttgaacacctaccgttaattcttaacgcttttgtccatgttgggaagattgatgtgaagcacttaagtgcctttttttttcttcctcttacttttttggatgataaaaacagcagcactgctacagcgttatggaagatgagtatatgtaaaccatttaggtaatttaagcctaagtgctagtgttatcttttagcaggatgttggcctttacacaggtg

SEQ ID NO: 8601 - DNA, 491 bp, Zea mays
  Intron number 1 from transcript GRMZM5G844739_T01 (locus G RMZM5G844739) derived from phytozome v7.0 (chr-ID 1; pos 1 93161070 to 193161560)
aaaaactggtactctgaagctgcagcgaaccaaaccttgtcaactaaaagcatatgttctgtatacactccagattagatgtttgaacacagtacttcaatcaaaacagatgtcactatcactgctcgtgctgctaattcattgcatgatgaatctttgaagcttttcttatttgacaatcttttctgaaataatcattactgcaggtccagttgttttttcgagcttctactgctgcttgaagtttttaacatgatttttcctagaagattctgtcatcaatagccatttgtttgttgggaaagagaggcataataattattttacctctttatacaaaaatgcacatgtcatatcctgtttggtgtgtgagataatgaaaaagaactaattcatagtaatctgtaagcttgattgcgaacaaaaataatatggttgaatgtgaacatacaagaataatttacacatttctgtattttgccagatttcag

SEQ ID NO: 8602 - DNA, 343 bp, Zea mays
  Intron number 2 from transcript GRMZM5G844739_T01 (locus G RMZM5G844739) derived from phytozome v7.0 (chr-ID 1; pos 1 93161627 to 193161969)
aggaaccccaaatatctgcccttaaatctggagtggtaagataactgatttcatttttcttttcccacccacagttcatataattgtactgaatattgaatattgattaagttatgaacttttgatatcgttgcataccaaaccattaccataccacttcttttttcacggatttcacttaatggaaactcaatgtttctttactatataggacatgtaatgtaactgtgtccccagtcagtctttgacagttaatttgtgtaaaaacatactgttggctgaccctgtattcattttttggggtttgtggttgcaggatatagtcataggaactcctggtcgt

SEQ ID NO: 8603 - DNA, 957 bp, Zea mays
  Intron number 1 from transcript GRMZM2G105256_T01 (locus G RMZM2G105256) derived from phytozome v7.0 (chr-ID 1; pos 2 46187182 to 246188138)
ggagagttctgttttctttatcagaaggtgtttttctacatttgttgaactaatctcgaccgcgaccgccgctgggatgcccacaacatagcagaaggtgttttttcttcttctgaatcttcctctatctgtcagttctgttttcttttcctacatttgttgaactaatctctgatgcagctcaaatggcacattcatcaactggaaaaggccaagaaaaattcatccccggtcaagcttaatcatggcgacattatatcattatcatcacctcctcatgacggtaatatcctatgaataattctgattcattcatactgggtttactggggtaggtattcattacgcactgtgtgctactattgttctctgtgttcagttcatcataatgtttctgtggcattttattactgctatgttgtgattgatgtttcaaatcttctattcaagttgtatgttgcttttgcagacaattcctttgtatttatctaccgggaaatgcaatcagtcgtgtagagaatggggctcccattcttaaaaggaagtcaggtgaggagtttctatcttattgtttggtgatcatgactactccctccatccaaaaagaatgcaattgtaggtttgggacaagtcaaacttcctttagttcgatcaagtttgtagaaaataatagaaatatttatatttccaaaataggtttactatgaatttatctggtgatacttatttgacatcataaatattagtactttgttgtatgaatttggtcaaacttgaatttgtttgattacttgaagtgacaattgcattcatttttggaacagaggcagtatgttacaagttttgatagttatcatcgtttgatggtcatgctatgctacaagttttgatatgtgcactgttattttgtttgattctgaagtggagggtggttctggaagtaagaggttaaagggt

SEQ ID NO: 8604 - DNA, 864 bp, Zea mays
  Intron number 1 from transcript GRMZM2G180909_T01 (locus G RMZM2G180909) derived from phytozome v7.0 (chr-ID 1; pos 9 4872800 to 94873663)
tcctcgagggacctgtcggcgccaccgagcgtatcgtgagtagcgctacttttgctgatgcttaatgggtttatgtcttctctgacgcgaaaggatgttaacaaattcaaaattaggatgctttgtactgtgaattattgaggttgcttggtattgtgagctgattttattgttattgttattgttatttatattttacctgtctgagctggcgataaatatgagatgcactcgctatgtttttgtgaaaaaaagaatgttgggatgggcatgagttcaaaaatatctcagcagtggagtggtgtaattgactctccgtggtactgcaagtgttttctgatttggttattatgtaaacagataggacattaggacgggagtggaaatcttctgatggttggaaattctggtcaatctatgcatcagtgttgtttctgtgtgatatttagtgtgtgttgtatttgttatgatgattgtaaatatgggaaaaactgtatatattcatatatcagaatgtttaatgctagtacaggagacagttatttacagaggagggtatgataatgtgagccttcaatatgcttttatgcttatatatgctgtgcagcacatgtagagatttaccatatggccagttggatgataatggtggatggtagctgtcttttcttttggcacaattaagcaggataactatcttcattgtgtttgtctcttggatgaatttaaatatgacattggatagcgccttttcactattctgttaatatagtatcatgtttcatggtctctttggatttcactgaatcatggatgtcggatattccaggttttggtttctggaaaagaagatccagacttgga

SEQ ID NO: 8605 - DNA, 873 bp, Zea mays
  Intron number 4 from transcript GRMZM2G414244_T01 (locus G RMZM2G414244) derived from phytozome v7.0 (chr-ID 1; pos 9 7114538 to 97115410 reverse strand)
gcctcaaatcatcaggtaaattacttctctactatttgagttaactgatgctatctatttatttgtttatagccgaacaagttgttatctatggatctctctaccccatacttccatggacaccggctgctacaactgaagccaagtactactgcatatatgttgtttgagctagatgttgcttcacacctgcttctgctagctggtaccaaacactgcatatatgctgcttcacgcctgcagaactgatggtgaattctatgtgtctgaactgaattgtatgaactcaggtgatgcttttgtgtgaatggaataagtgtgcgaaactgagaagaacagattgtgtgcataaccgtttgggctaaccgtgtgatagtttgtctgcgtaatacttgtccgaaaaactgattcgactgtctaacaattcgaaagattgtctgcataacagttgtctgacacactgagaaactgaaaagcatcacctgagttcattggttccttggttcaaggtttgttttattggagcatacatttacataaaattagaatggcaattccatacacaactcacgagctacttgcagcaattgtttagttcttaattatattaatattatccgatcatatttcagagcgttagttctgtaggcgaggtgcttgagacaaggaaaagtagggagtcaaaatcatgatgaatgttgtcatcttgaaacatccctaagttaaaaacattgtcaggggttagcctttttgcctttgtatcagtttttaattgtttcttattgagacttgtttggtataacaaaacctggtgatgtcttgatgaattgcaaattagttgtgtggagcctgcttgggtagagtgaacaaagt

SEQ ID NO: 8606 - DNA, 678 bp, Zea mays
  Intron number 2 from transcript GRMZM5G879825_T01 (locus G RMZM5G879825) derived from phytozome v7.0 (chr-ID 10; pos 96348687 to 96349364)
acagtcttgggttgaaatatgtaagcagacatatatgcccgataacttttgactaacatactaatattagaaagatgagatgttcatatttgtgctttgttaggtggaagattataatgggaaattggtggactgcatggaaggtgaaacactgacatgcagttctttatttcaccatgagtcatagaacaaacaacatatgtgccatctgtggagtctttgttttatcacctaagcaacgagcaatgtttatttgttaccaaaaaagcactttctgtatcttcatggaccacgatacttggcaaattggtatgtaggttttattttagaatttaatcattttaaggtttggtgtaaatgtaaaaccagacaaatgtttttggattttttacaagtagatagcttgttttcaacatacttggctacacaacaaaatcccaatgtatatgttggttcatatttgccagttccttttttcggcatatttgtcagatacccgtaggacccacgatgccgcgtgtgcagcagcagcaggacaccccgccgcggggaggcgccaccccaagaagcgtcgtcgcagggacatggattccccatcactaactctgacccctaatgcatcatgctggtcatcctcattcaggccgctgcggcggagtgcgcgacaggtgaaggcag

SEQ ID NO: 8607 - DNA, 847 bp, Zea mays
  Intron number 2 from transcript GRMZM2G078200_T01 (locus G RMZM2G078200) derived from phytozome v7.0 (chr-ID 1; pos 2 87889291 to 287890137)
gcgaccttggcggagcgccctccgcgaaggccgaggtcagcgcgcgaccctgctgcctcagcttcatctcgttccttcgccatcctagattcattccatgcttaaacactgaatgatgtgcggctgacacactgattcgtcgttcgtccgcatctggcgagatctcgcgtggactacctcacgaaggtggatattattcaggatgaagtttagcatgtaaaatctgagaaattgtccgatggcactcctgagtttcatttgaacatgtgaatgaaaaaaaaaactcagctgcataggctgaatttgttaaggctgtatatattattccaaaagcactggagttaactataacaggagtaatcttgttcattaaccctgtttttcttttaattcatgtcttggactataggttgagatagtgtgtaatctgacatgagagggttgaattgagctactgaacacatgaaccgtattgtaaattgtatcagcataagagtatttctgatttggaactatgataaaaaaaagtaaccactaaagtcttacaagagaaaatgcaagtgtgctatgatgccatgatttgacaaaaaacctttgagtttgtatcagactgtgtgagtacttcaaaaggagggaatgcctaagtgtaaatgctaaaccattggtgaccaacgtttagccattattcagggtaaaaggaaatgtagacaggcaaaacatccgtttaaacgggttaaatggccatttaggtgaacagcgcatctaatttgcaatgtactgaagttttagaactgagtcttgtcattcatcacttatcagaatttactcttctcttgaattttgcagg

SEQ ID NO: 8608 - DNA, 693 bp, Zea mays
  Intron number 1 from transcript GRMZM2G005630_T01 (locus G RMZM2G005630) derived from phytozome v7.0 (chr-ID 1; pos 7 4731926 to 74732618 reverse strand)
tcggccctttcgcgctggggactagcgcccaccaggtatgctcgccccttctcttccttcctgctgttcgaaacccactcactacctctaatgtatgctattcctattcggatctgacacaattacatgtatatacacttcaatttcttctgcaaaaaaactacaaaataaattatcgggtgtatatgtgcgcaccatgtcatacgctggggctgggtccgcccctgcgagcagcagtgtagctgaaacatatcgaaactggtattttggtacactagttgacttgctagtttaattatcttctgattgttagtttcgatgtttgattaatccatgataaatagcatccatgataaatagcgctatggtaggtcctgtggttgggaggctgccgaccagggtccaaatcctggcgtgcacgaaaaaggtccctcgctgtgtaactgtctactgaggtatacgtgctgcaagagcgtcctgtgcagccagttttcagggcctattcccgacctgcagtcgatgaaatttctggctttctgccttcgtgataccaatcccctaggggtcgagttttttttaaagaaattatacataacatctcaaacgtggtactgatctgctgcaggagcaagattgaagccttgaagggctatatagggttgggcacggttgacctgatcgactgaaactgaa

SEQ ID NO: 8609 - DNA, 852 bp, Zea mays
  Intron number 1 from transcript GRMZM2G135186_T01 (locus G RMZM2G135186) derived from phytozome v7.0 (chr-ID 4; pos 1 63768787 to 163769638)
ttggagttcattcagatcggtgattcctgcgtcgggtaagggcggttgatactctcctagttcatctatacttgagatctactccgtttctccataggtgtgtgcgtcgcagtggatttaatgctccgtttttcctggagccttggaatatttagatctttatggagtctttttagatcgtgagataattggttggtaatcaggtaagtgggaagaaaaaattgtcgtattttgaccgctgttttgtcatagtgtcggtgccgcgttagatctgtctgttatgagccgtggatggcgatctgacggcaggcgcccgtctcattagtacttggataactaccattgtttcagttttttttcagttcttgaaagtactgagtaatagagtgcacacctatacttttgacatgctatgatgttcttcgctggttttgtaattagatttgtaaatcatggtaatctttgaatgttaaattttctgaactgtttgagcatgctacaatgggctgtcttgctgtaaattttattgattcatttttatgcatctgttctattttgatgattgttgtcaaaactagagttatggaacatgaaaaatataaatgtgtatgtttgtatagttgcattcattgtttatttctgtctaatagtttatctgttagtgtttgcacggaggctctctgcttcagttagatgtgtctagctttgatttgttcttactctatattgaaactgtaaaatatactcatccttttttgcacaggtgcggaggtcttattttgtttctctttatgtaatgtcctaagttttgtgtgttgacattatgttgcagccaacagttttgaggtggta

SEQ ID NO: 8610 - DNA, 704 bp, Zea mays; identical to SEQ ID NO: 7307
  Intron number 2 from transcript GRMZM2G041305_T01 (locus G RMZM2G041305) derived from phytozome v7.0 (chr-ID 10; pos 89349089 to 89349792)

SEQ ID NO: 8611 - DNA, 509 bp, Zea mays
  Intron number 1 from transcript GRMZM2G025127_T01 (locus G RMZM2G025127) derived from phytozome v7.0 (chr-ID 4; pos 2 39725842 to 239726350)
tcgggtggccgaggatttcaggccgtctagcccaggtgagggcctgcatcaatcaagcacccggccgctttgttttgtttttcccttctttgtcgtcttctttctcctctagcttttcatccgattcttccgattcatggatcctgaggctggggcggcctgtcctggtcgaggaagctttcctgccttctgctaaattttgtttcttgcaagtttcattctgaagttccactagctaaagatgcatgccttgtttagatcctagattaagatttcttgtcccttgaatgtatcatggcttgtttagaggccggggcagcacttctccggtctcaatttttgttcttcacttctatttatttcatcagagattcgcggtttttatccactagcaagggtgggaaaaggctagcttttttttcctgaactctctacgttcttcactaatccccaccctaatcagtaaccacgcttacgaatcgtttcctaatcgtgtgacagggacaaca

SEQ ID NO: 8612 - DNA, 1019 bp, Zea mays
  Intron number 1 from transcript GRMZM2G328608_T01 (locus G RMZM2G328608) derived from phytozome v7.0 (chr-ID 10; pos 22722423 to 22723441 reverse strand)
caaggtgagggtcagcagagcacgcagcagccgctggagacgatcggtcggcccatccacccaccccacccggtcagcaacctttatttatttatttattaaaaacaaatactctgcatggagtatttatctattgctgcataggaaccttcacacatcaaacatgtagtaagtacctcatactcttggtcaagagcaaagaaaacagcacccattccttcctcaccacactaaaaaattagtcatccctttagtcagtcgatgctagaaaatagagcagatctcttgagtgccattgaaaactatacccatcttttatctgccgtccaaaaataaaattagacggacaatttatttttctttatatataaaccgagttttcagttcaaattttgttggttagtagctaatgctataacttagcctataaaaatatattatgatttttatagttatttgataagtttagagaacaagaacaaagaaaacaaagacatccattgctatgtctaaaatcaagaaggtaaaaaggaaagactttgttgctatgtttgaagcaaaaaaaagcaggaaagaaagaccttcattgtcatgtttcaagcaataaggtagaaaaaagaaaaacattcattgaaaactagtacagacttttcatctcctttgagcaaagaaaacaacactcgttccttctccgccacactcaaaaaccagtcatcccttcattaccactagtatctccattgtgccacactgccagctttaatgttagtggttgttagtcgatgctagaaaatagagcagatcccttgagtgccattgaaaactatacacatcctttatctatcgtccaaaaataaaattagacgaacaatttatttttctttacatataaaccgagtttccagttcaattctattggttagtagctaatgctataacttagtctataaaaatatattatggtttttatagttgttttgataggtttaaagaacaataacaaagaaaagaaagacatt

SEQ ID NO: 8613 - DNA, 1053 bp, Zea mays
  Intron number 2 from transcript AC191330.3_FGT009 (locus A C191330.3_FG009) derived from phytozome v7.0 (chr-ID 1; po s 7059308 to 7060360 reverse strand)
gtcaattcggaggccattttgaggttataagtgccaatatgttttatattctactcatcccaggttcgtgtatttggccactctgcatcaaattattttttataattatattttactttttcctattgtccgggtcaaaatatatgaattatatatttttgtgtgctggttgaatgggtcaatgcggaggcaccagtagaggcgcatcgtcacggagctagacgtccgcatcgactccaggttccaacaatggacctactgctccctaccctctactaaccaggaaatggccgactcagacaaccccattttgtttgtttgttttgatccttttcttcacagaatttacagtggagatccctgggctcattggattacgtaggcacaggtgtcggcatactgttcgtcgtccaagtctctagaatcgatgcatcgaagaaaagattgtgtaagcattcgtagctagataggtcatatatcttcaattctgacagtaacatgatcactaggagtagaattatctttatctaggattccatgcattattatgttgaatgaaaatttgaaagtctttgctggaaatagcagctgctcagttttcgcttgtagttgtatgtagatatgcaaaaggaagagtttaaatcatatactttaaagacaaagtacatgtgctctttgtatatgcattaaactgaccttgttcaatcctgtagtaatgaggtccttacagtcatctaaaattttcttctgaagtttgagatcttcttttaaagtacactgaattcctaacacagtaagcgcactgcattttttctattttgcaagttcacattaaatagttagctgcaaaaaatagctaacaaaggacattgagtattacaaagaggcaatggtcatgcccccaaacataatgacatgctgttttttgtttgagcagaagtatttttgtagtccacaatgcaatgtccaaaccaaaatgagtaaaatgttttctgtgattttttgtttctacctgtaggtcatctattgtgtctagctatagcctgagtgact

SEQ ID NO: 8614 - DNA, 750 bp, Zea mays
  Intron number 1 from transcript GRMZM2G137918_T01 (locus G RMZM2G137918) derived from phytozome v7.0 (chr-ID 10; pos 127908169 to 127908918)
gactacaccaataaaaaaggttaatgcttccatacctaatgggttgtagttcaaaaattgaggttccttcctttgttttccttcatacaatcttgattggctgcttctgctgtaagctaaagtaattgttccatttatgaacaaattgtccctatgcatattctcatgtttttcttttgatttattttagaaaatggtttagagatcgaggaagtcactcgtgagaaagtgaatttcttagaagagcttttgagcagcacataatttgcttaccaattagcggatctgatgacttcagcaaaagcatatgtcatccttgcaaagagcatgataatctttcgcttgcatgggagcttagttcgcagataaggaattgccaaagattgttctctaaaggggcagttagtgggagagcaatcacttgctttagttagtaatttaaaaactttggactccaatcagttatgtatagtagaatcaaatgtcagttaacataaacataaggggtcttcccatgacatgatatgttagcatggatgtccatcgaggctgtgatgcactctgcatttgttttattcatgtataactgtaatcatattatagttttttttgggaaatgtttgctctatacccgatcatattctaaagccaccattgagtctcaacctgtcttacttaacatttgtagtcacctatctgtgtgtagagctgcactagctgttcttattgtcaggttctgttggtgagaac

SEQ ID NO: 8615 - DNA, 903 bp, Zea mays
  Intron number 3 from transcript GRMZM2G301512_T01 (locus G RMZM2G301512) derived from phytozome v7.0 (chr-ID 4; pos 2 30484974 to 230485876 reverse strand)
gtgctcggctcggcgtccttccgctggtttcggaggtgagtttttgtttttcatttttaagggtttatatgtttacttgtttagcaatggaagaaatcgagcgttttagctcaatcaccatcgtccgtcgttcgtccacaagctccgatccacggagacacccctgacggtgtccacacgtgttgatgcccctgcattccgcggcaggagcaggataggttcctcgagcgtccactgctggttctgctgccgcctccatggttaccttgtgtccgtgtctcctatagtcctatcttacccggccggcctcctctggcaacctccaacaccctagccggcggtagccccagtgccccactgccaccgctaggccggcctgccgccatgggtccgctctaaagtctatagtcgtcgagttcaaatgaattccaatcccgaatccgagctctaacttcgtcagtaacggaactgaagaagctgatgaaatctaagaatgtcagaaaaacacaacaccagataggacagatatattacggagagctggcttatgtgcctatatatgtaaacatggataagaccaacccttccaaccttatccccaatccaaacaaacccttacttttgggtgcactttcttctagtgctggcttccacatttgatttactgtctttgttcttctctgttggttttagaaatgtttttctcgttgtacagtaactgtatctaactaattcagagcctgcatgataattccgctctgctgtttttacaaatttgtatttaataatttgtcacctctgcttataccgattgacaaagctatttatatgtatatatcgtaatttttgcagtaaggcatcaattgtcgcattgtccattttgcagggcgctgagcatcccag

SEQ ID NO: 8616 - DNA, 730 bp, Zea mays
  Intron number 1 from transcript GRMZM2G040369_T02 (locus G RMZM2G040369) derived from phytozome v7.0 (chr-ID 1; pos 2 96477931 to 296478660)
cgagcagcagctgccaccgacgcacgcagaccggggtaaatggactacgagccagtttcttctctgtcacctctcccttacgctcctactgccgattatccttagtccaattgcctgtctgtctggcacctgtagccttgtaggattgtggacgggatcctgtcctcattccctagtcgaatcgtctgtttggtcacttgtaagattgtggacgggatccagccctttaggatatatgatagttttattaatttcctgccatgtgcccgtttcatgttttctgaatttttttgattctccatatccgcatcctcttggtacagagtccatatccgtgcatagatatggtatgctatgcaagcgcttcgagcccaaattgcttttagttgattttttcgcgtctgttactttaatggtattttattcttaaagaatatcctaattctagatcttggattaacgaggttgcatcatctgttcaactaagatacatcatacgtggttttcagttcactttgttcttagcatttttattaaatttctgaaatggttaataatttccatgtctctttggttcatgacaactatgttggttcattactttttgctaccgatcagtgtcgaagtttttcagtttagttattttctcatgttttctatttaaatcttactgatatgcgaacctccaatggcaggaataaatattggtattggtagtgtgatatctata

SEQ ID NO: 8617 - DNA, 682 bp, Zea mays
  Intron number 2 from transcript GRMZM2G040369_T02 (locus G RMZM2G040369) derived from phytozome v7.0 (chr-ID 1; pos 2 96478756 to 296479437)
tggaccgtatgttcagaacactgctctgtagcatatatatacatgcattgcttaacgttttcaagcctttttatgtgtagacttaatttgctccaatatttgagctctgtactgtacctgactgctaatacttctattcatgctgcattgtctactatagtcaatatatcccatgtatgaaataggcttattttttttgtcttgtagttaatgtattggttttatctaggtgttgtgttattggttcattctactttaaattgtaatgtactagtgtgttattaacttctgtgttttcaatatttaagctttgtatttacagccattgtttcttttcttgctgcaaattttattttaggcctacttaactacgtaagtctagatatttgacccatgtaggaaatgggcttatccttttgtcatcttgtacctaatatactggttctctaggcattgttgtgtatggagtatctgttaactgtatactctagattgtaatctattaatgtttttgttatcttttgatttggttgtctgtcccttaatactttaatgctctatgacgcacatgttgaagttgctggtgatgttctctaggcttatctttttgtcatcttgtacctgatgctattattacttctttgcaggcaagtctacgcttacagattcccttgtggcagct

SEQ ID NO: 8618 - DNA, 402 bp, Zea mays
  Intron number 1 from transcript GRMZM5G855094_T01 (locus G RMZM5G855094) derived from phytozome v7.0 (chr-ID 4; pos 3 4567263 to 34567664)
tgaatatttaaaggaactgatagagaggtaaactttctctctttttctctacagaagtacccatttgtttaatcattcttcatagtggttttgttgtaccggtacaaatttaaagtggcacttctaagttatattattcacactaactgcaccactttttttgaaatcaacaagaatagaaactcatgttatggtcttgtcatttgataataaattgggatagtagatgaaaccttggacaattgaaccatccaaaagaaagtcacatttgagttgaaccttgggtagttcaactgttcatctactgaatcataatctgttttgaggtactaaatcaatctcctactctacctagaattctcgttgatacaatttcgattttgcagatacaatcaatctcaa

SEQ ID NO: 8619 - DNA, 431 bp, Zea mays
  Intron number 3 from transcript GRMZM2G010056_T01 (locus G RMZM2G010056) derived from phytozome v7.0 (chr-ID 4; pos 1 2048928 to 12049358 reverse strand)
gattcttcaaggtttgttcattcttttgatgattctgtgcattttgatccttgtacttcttgaagtggtcagtatacaaacaagtagcccagcattccctgtgttcttccaatattttttgttctgcttgctccttagtagctgagcaaattatttaagtttgtctaaaatccttattttttataaaattttctttcctgtcacattcaaatatgtctctgctggtggtgtatagattgcttatatctgttctatttaattggttgttcaaaaaaagttgcatgacatccctactatggtaggaaatttctgatatcatttagatttagacatctgccattttgtaattctatactttgtatgcagagccatacttcataagctattcttctttattgaactttatgtttctgtaggcaaagtcattgtgg

SEQ ID NO: 8620 - DNA, 784 bp, Zea mays
  Intron number 3 from transcript GRMZM2G459746_T01 (locus G RMZM2G459746) derived from phytozome v7.0 (chr-ID 4; pos 9 5602156 to 95602939 reverse strand)
gggtttttggaagcaggagtcgttgcatcacattggtgagtacttaatttgattcaataccccttagctttttgctcatttccatgcaaagaatgctctttggctgcaaaaatccacatgttattgcggggaaattttgtgcatttaataacattttatgcgtgactaagggctagtttgaatccactagagctaataattagttgtctaaaaaattgctagtagaattagctagctaacaaataactagctaactattagctaatttactaaaaatagctaatagttcaactattagctatattgtttggatgtctatagagctaattttagcagctaactattatctctagtgcattcaaacagggcctaaataacataaataatttgtttgcttgtgatgaatatgattttagctttttaccctaactttatcaggaatagaaggctttgtttttgttgttgtcgtgttggacatgttttattgcacttttcatttgttgtttatgtatttatagtctcaagccattgttttgtgttcaccttgggttgcaatggatttatgacatatttgatgtccaggttatcctttgatatgcaattggttgcgctagtttctaccttattattcctttttacttatttggcactcctgtcgtactctctctttgttctcacaatggttcatgcattttgttgttcattatcaagatgtcttctcaaaggcaagctgtttctattgttgtcagggagcaagtcagttgcatcttctccaattgaaaag

SEQ ID NO: 8621 - DNA, 642 bp, Zea mays
  Intron number 1 from transcript GRMZM2G459746_T01 (locus G RMZM2G459746) derived from phytozome v7.0 (chr-ID 4; pos 9 5603229 to 95603870 reverse strand)
aagaggaggaggtggtggcagcaggcaccgatctggtgagcccccactcgctttccgttctctacatggatggtttctgtttgggatgtttcaattttgggaaattttgaaagctctcgtataagtcgttttgtttcgtgggtgtccttgcttgctgtatgtaacctgagcttgaattcggggtctgacaattattttgggttgtgttctgccgggaattcctcgttttattttgatggtttctttgatcactagggacttgctggtttggagctcgtagagcccgaggcgcattaaattttacatcttctgtgctgtcgtattgggggaaattaaacatttctctcaaatttgtgggattcgcactctggtttgtcaaacctactggttctgattcagaagtattgactttggaagctcacacgagctaaaatccgcctttttctctgctgccctgtggctcggttgtcatggattgacagatttctgcccgtaaaattgctcctattcgtcatgttaacccctcgacacttcatcttttccgcaagttttattaattttgcgttgatcctgggcaattgagatacggtgctgttgtctaggtttgtgcctaacacgttatatggtctggacgcctgcagg

SEQ ID NO: 8622 - DNA, 907 bp, Zea mays
  Intron number 1 from transcript GRMZM2G395354_T01 (locus G RMZM2G395354) derived from phytozome v7.0 (chr-ID 1; pos 2 85520006 to 285520912)
taggtaagtccatctgaatcatttggtactagatgtctagtactggtgtagatgtaatgtaaaacctagggtgacaagactaatgtgtgtgttgtattgtcaaaagtcatcaatatgtgctttgcaagcactaatataagcattctggtattttgtgtacctgtccttacatgtattagcgatggatgtggcatctgtgatgtacattgcctacatattgaggaaccaaaatattgaagtctcaccatgttcatgggctttggttacgcacatgttgcgaattcaattaatgatcaggcttgaggccatcagggcttgaactagtgcttgtattttttagcacattcctcactgtagttttgttttcttcttaaggaggaactttatttgacccccattctgtattgtttactacttctgaccaaatatataggtaaaaatattaatatttatgacaccaaataagtatagtatgaaagtatatggacaaacccaatgttggagcctcccatatgaatggggtctggggaaggaataaatgaggcaagtcttacccttgcattttgcagagcgtcgaacccaaggcctttggcccagtggaaaggcacaccactgcaccatatctatccttcatagtacgaagatgtatctcataaaaatctagtggtgcttattttatattataaatatttgtattgtttatagttaatcaaacgcaagacactttaacttggtagtgtgctagaattggattttttgtcgactgagggagtaccatatcgtcttatggataccacttcatgtttctatataatgtgtgagtagttcattctttgtttatggttggaggcttactgaaaaattgtccatggatgtgattggcagctggcaatccacctccaaaacc

SEQ ID NO: 8623 - DNA, 838 bp, Zea mays
  Intron number 2 from transcript GRMZM2G107395_T01 (locus G RMZM2G107395) derived from phytozome v7.0 (chr-ID 1; pos 2 2283898 to 22284735)
gctcgccggaccgcgcctgctcgctggccaagcaggttccccttctccccttctcctggtgatttgagggatgacatgctgttttatgattaggttaattgtgtctgtgccattataattttctatgttttgatatatgccactaaacttcttaaggttgcaaaagtgccattaaacttttaattaagtctgaaatagaccattgtctacgatttagtctcaaacagacccacccaccagtatattttcatatttctctttctacccttgcccttgcttttacgaacacgacaccgattttgctatttttattcagaaacagaagatttttgctatggtcacaattggttattctattgtggacaattcatgatttgtacatgtgtgttgcaattttggttcctagttctgctcagatggtagcatgttactctgttggactgtttcttcacaagatttcactaggcgttgctcaccagcaaggctctgacgactgggtaacaacaaaacaacaatcatgttgaagaagacgtgatgcattcgtaacagtaattgtgttcgtaactggtgagacccaaagagaagtgatgccttcgtaacagcaaaataacaattgtgttcgggcaatgatacaaagggaaatacgaaaaaatacatgtatagtggtgggtctgtttggaactaaaccgcagacaatggtttattttagatttgattaaaagtttaatggcatatttgcaagcttaaaaagtttagtggcacatatcaaaacatagaaaattataatggcacatacccaattaacccatgattttagggctttggttccaggcattcg

SEQ ID NO: 8624 - DNA, 738 bp, Zea mays
  Intron number 1 from transcript GRMZM2G163807_T01 (locus G RMZM2G163807) derived from phytozome v7.0 (chr-ID 1; pos 2 56562268 to 256563005)
cacaacgatcggctaagaaccctgtagactcacaggtacaaacatttttactaacgccatgtccttacaaattttgtgatgatttacatgtttttaattacaaatgcttgttgctatgtattgttagctataaacattccatggattacattatgcttccaattactcagggcgattctatggattggtcagttcctgagcatgtttccgtagtttgtagcttatttgcagaacaagttcaaaagggtaatcggccaaacactcatttgaatgtcgtgggttatgccgaagtgtcttctaggttttttcagataaatgggattgaattatctaagactcaactaaagaacaaatggaaaaactaaaatgtgacttaaccgcatggagaaaactgatgaggaggcaaacagacacgggttgggatcacttgagacagaccattgaaatggaccctgagtggtggaggaagatcaaggcggttagtaatcacttgagacagaacattgtcatctcaacttgtaattatgctaaaattacataattggtctgtaattattttctaggaaatcccagggtgtgcaaagtttaagaaaggtcctctacagaacgaggcagatctttccaagatgttcgataaaattacaaatgaagagaatgaccattggaatcctatgacagagaaccctatcataccaaaaaatcatgagcctataattaatcttgaatctgattttgcag

SEQ ID NO: 8625 - DNA, 861 bp, Zea mays
  Intron number 1 from transcript GRMZM2G007997_T01 (locus G RMZM2G007997) derived from phytozome v7.0 (chr-ID 1; pos 2 78586934 to 278587794)
gctagggcaaggacacgcacagacattggtggtaagtgacttcaagttcttcacgcgtttattgttttgctgtagagacattttaggtaatcagatcagttccctctattctcatttttatggcttaaacattagtatttgttggtcgcaagtttttttttaccattgtaccagagcatgatcgggcttttgaattaccatgcgatgtagaggcatgcttgtgcatatggttgcataaaaaaattcagaataggactagtaaccataaaagcaattttcaggttcataataataacagaacaattcagatagttgcatagcagttcataaattactataaacaatcgatggcaaagaaatgaccgatcataatcattcaagtcgtcattacaatttcaccagtcaaggctaccattaacattcaccgatcaaactttggaagggttctctgatgatccaaatgcagttaacacacaaccatgcagtacaaacagtgtgtggctgctgcacgcaggcccattatatattctgtactgagcaccaatagttactttacaactgtttcctactatgttccaccaatcgtcatgttgttagcacggtgggaagggaagagggttcagagagtagaattccaatattttatctagttcaacagaattccaattagtttacttgctgcaattagttcagtagttgtgtcctattcacttgctacaattagttaacaggacttgcagcaattagttcacttgctgcaacactcatattttgttgcgttcagcaggcatgccctagttaacagaagaacactcatattttgtctatttaatgtttgtttagaagaaccaattactgagt

SEQ ID NO: 8626 - DNA, 823 bp, Zea mays
  Intron number 1 from transcript GRMZM2G078832_T01 (locus G RMZM2G078832) derived from phytozome v7.0 (chr-ID 4; pos 2 31731312 to 231732134 reverse strand)
tgcattactttcaagcctaattctcatcttgacaggtttgtaccggtcaattccatttgaatgacagtgtgtttcagttttgtataaaatatatcttcagacagactaatctcacatccatttcctgtattgaactgaatataagttctggagatgtttctcaggttgatgcttatttccagtaccaaactattttttttctcatcctaaattaaagctctaagtgtccgatggccataatcactgatactacattaatcatttgcttaattatctgttttgtcaagcattggaactacagaatagttttctgctgctacttttacttgtagtctttggatcttcattgttgcctaattcaaaatgaccaagagtaacactgcttgttgaattgcaaggatttgatatagttttgtttcagtattatatgtgaaatcgatttgctagtttattaggtttgacatgttgcattcattttgcgctatgtctgtggaattttgcactgtggaaatttgtttcctacggtctgcccatttcttttttggttgtgaaaatagaaggtgagagtaggagcaaacctgtctgacttgtgcatatttggatggagtgaggcttagttttggtttttctgtttggcgttttactatgttaggaatggcgcaggcttgtggcataaactgttaactggtcaagtctttatgatgtcttgttcagtatcattcgtgaactccatggttttctgagttagtacagttttgttgataatatgccattctactgtgttgcaggaagcacacagtttttggcaagcttgttgttggaa

SEQ ID NO: 8627 - DNA, 456 bp, Zea mays
  Intron number 1 from transcript GRMZM2G016487_T01 (locus G RMZM2G016487) derived from phytozome v7.0 (chr-ID 10; pos 130231206 to 130231661 reverse strand)
gatagtgatcaaactggagaagctaatttgagggggtatgttctatctgttctcataatagctgtcttgatctcttttacgactggaataactagttcatttcatgctatagccgttttgagtgctgatatgagctgaaacattttaatattgtcttctcttataaaagtctaaaacatgtcaatatggcttatgtaagaaatgatagtgaatgaactgatatacgtacagtatagttagcttgattgacaaggattacgttgaaacccaactgattgctttagaaggcaatttttttgtccattcgactttgctcagcaaggtaccttatatattattatgaaatgaatactttgtttttctggtcaatatactgttggagaaccaacatgtcttacttctgttatatctgctgttgcagggttgatcttagtactgctggaacttatctaaaca

SEQ ID NO: 8628 - DNA, 568 bp, Zea mays
  Intron number 1 from transcript GRMZM2G073956_T01 (locus G RMZM2G073956) derived from phytozome v7.0 (chr-ID 4; pos 2 25054435 to 225055002)
tcgacctcctccagtttggctccaacacctccgaggtaattgtcatcacgactgggcacttcgctttcctccactcatgtaggtctcgttgccaaatcctttaatcctgttgatgcattgtaattgcccaccaaactactaataagggaaagaaaaacaatcacttgtcgccactgtcgttcaggaatcaggattcatctcttctcccatgtaatttaaaccagatagttagctctacttgtagcaaaatcagcacaatatttgtgtgctatttattttacccctgtacgatttagtattgactttcgatttttttggggaagttcacgggggatccccacctgaatgttttgatgtcatgtagtcttatttatgttttttctaaatgcattttgttttccttattttgccatgcagcttgataaccaccataatcagttggtttaggtataatttacaataatcttgacctctacatgttactctttgttagagatgtagaaatttcagaattacaaattgattttagtcacttttagtagtttgatgtgtgatcagttggtgttga

SEQ ID NO: 8629 - DNA, 488 bp, Zea mays
  Intron number 2 from transcript AC216188.3_FGT003 (locus A C216188.3_FG003) derived from phytozome v7.0 (chr-ID 1; po s 63741493 to 63741980)
ttcgtcggcttgcagggtcagtatcgttcatctgcctaattgttcattacatcttattcttacatataatgttgaattgcttgtctccattgattgtgcaaagtaccatacacacagtagaagatgcatgtcttcgttcagtgtttatttccacacacctggaatgaaacaataggtgtttgtttgataaatcattagcaacaaattatgtagttatttctttttcatgtttaaattgggcgtatttgtcactgatgattatatgttgaggcctttatttcaaatgtttggggctgcctatttttcaggggtgtttgaatctcgaaatggtatagagaagcattctcttttgctttcggatgtccattcaaacagcttgtctcttccaatcgcgtcgctctgccatccaatgtaccttggccttctttgcttttgctatggtgcaatttgcagaggacgacagaagaccgaaagcattcgatcgcccg

SEQ ID NO: 8630 - DNA, 979 bp, Zea mays
  Intron number 1 from transcript AC185226.4_FGT001 (locus A C185226.4_FG001) derived from phytozome v7.0 (chr-ID 4; po s 162585922 to 162586900 reverse strand)
cgtggctgaacaattgagggagaggtgtctccgcctcactaacccagattcttccgcaccaccatagaggacatcgaccttcccctgttggcaagcgtctcaaaccgccgtcgcgactattcgccgccatgcgcctttgcaggtagcggggcaagaataaccgagggagaggaggcgctgctgccggtgatgcgtggctgacagctgagggagaggaggcgctcctgatcccgactttagttttgtattggttgttggcaaataatttgtcagatattaaggtcgatgataatatatgtgttgctcgttttcatgtaatcggtgtgcgctgatattttatcgagttatgtgccgtcgcaagacatgggcattgtactaggtagattacaagcattaccatttttctatttaaagtacgtcctttgtcaccaactcgtacttcctggagttggttccatgacacatttaactaccctgcttctattaatttgatgctagactattgttccaagtttattttcattaattgtcatttatgggactataattgattttttgtttttcgacacccgcattattctgatattttttacttttgtataaaggcatgatgaggtaatttgtgcactgtcaattaaagttcaatctgtaccctattccttctacaacacttagtgtattcttatttgtgctcttgtcctagtttagtgaagccttttaatttaaaaagtttgtctttgtgattttggtattagcgtattgttgagttacttctattgtaattaatatggattggtatggctacaaaactgttaggagcttatcattttcttgcaatgtatacttgcttggtcaagtcttatatgaatttcttggcaagtttgttttaatttcaatccttccaaagcttacccctgctatccgtaccccaggtatgttcacaacaatattttctttagttttgctgtcgacgccgact

SEQ ID NO: 8631 - DNA, 757 bp, Zea mays; identical to SEQ ID NO: 6681
  Intron number 1 from transcript GRMZM2G125556_T02 (locus G RMZM2G125556) derived from phytozome v7.0 (chr-ID 4; pos 1 42197974 to 142198730)

SEQ ID NO: 8632 - DNA, 708 bp, Zea mays
  Intron number 1 from transcript GRMZM2G043503_T01 (locus G RMZM2G043503) derived from phytozome v7.0 (chr-ID 1; pos 1 45050008 to 145050715)
gtgtttaacaggtaagaacactagagtctaaatcaacggcacattgtccctttcgctttcgacccatgctccacgcgcgctcttgtgcttgacaacacatctctgtgtatccatcctgatcaaagcaacagttggcatctgtcaatttttaaacccataaattgcctgtactgttgcccacttttttataacttgaggatttaggctgggattatgtgagatgtgaccgacctgttttgggaaatatttgtgcaggtctgctagcttttgtttatcacatagacgcagttaatgcttaatccttagagctgcatataaccaagtggtgcttacctggatttgaggacctctgatgcttgtttatctcaagtgagccttttgagtcttcatgtttcgttgaagaacatcattacatgcactatccatttggcaaaattaatagcaatttgtatttcttctctgttttaggagtgctggtcggttcctgttggctataagatattcagatagtgtatgcctgtccaactgaagtaggcgttcacagaggaaatacaaattgctattaatttgtttcgttgtttttccctgatccgtaatttgattttagatgcagtactcgcaatccaacctatttgggatgcagtactcgcgcaagcgctacttcgtgctcgaggacgccgcgcttcgctgcttcaagtctgcgccgtc

SEQ ID NO: 8633 - DNA, 256 bp, Zea mays
  Intron number 6 from transcript GRMZM2G128074_T01 (locus G RMZM2G128074) derived from phytozome v7.0 (chr-ID 10; pos 139981172 to 139981427 reverse strand)
aaaccaactgcagtaattatcgtatcatctgataggtaatgaagagtccatgctttgatgacattatttgtcttgtctaaaacatgcagtttgtggagtgctacagcagttcttttgctaaacaggaatatcaatgtctcttggttgatagttaaaatgaaaaaatggtttgaagttgtgacaagaaagaataggactatgtttgctaacaatgtattggcatttttactttcagctctggcgccataccatctgt

SEQ ID NO: 8634 - DNA, 617 bp, Zea mays
  Intron number 1 from transcript GRMZM2G369014_T01 (locus G RMZM2G369014) derived from phytozome v7.0 (chr-ID 1; pos 8 324233 to 8324849 reverse strand)
aaggtgaattagaaagattgtccagggtcggttaggctctgttttctgtaactatagcaaaccaacctcattcgaagtgcacaacccatgttttgagatttgaaataccaagctacaatactatttactatgtccacttttcgtgttcatcccttgcaaggaaagcccgtttatatcttatcaaataaccttaatggctcatcgcggaagatccaaagccatgtctgagtatactaacatagatgagtacatattgaaccaaaactctctgattggcctgagacaattggttcactttccagctaaagaattgaccagctattcatataatgataggagaggggcaatacatgcatgcctcggactcttggtttgtgacctgcagacctggtgactcaatgagacagctgtcaccgcttcaccgggcctgcctttcagctataatattaatttaattttcactgacaaattcaagtacttcaatgtatagcagtttgtaggaacagaaaaatctttgtttggtattctggcaatgagtgtcaaatttgtagcatgtttttgttgaggtttgtagcatatattttttctccacagataagtcaagccagttgttggag

SEQ ID NO: 8635 - DNA, 629 bp, Zea mays
  Intron number 4 from transcript AC177897.2_FGT036 (locus A C177897.2_FG036) derived from phytozome v7.0 (chr-ID 1; po s 260004711 to 260005339)
ttaaggtaagatgaattgagtaatgagcactgattacctgagcaaagtagcaaacagttactgtatttgtagccaatatctgataatttcctattatttaagctgcccaagaattgccataacgcttttgtgaagtgtctagcatggtctaacttggtactaacctagcaagatcaaccacccaagttcctatcccctgttactcccaatgatcaatgaataactaactacccctccacctccagtcaaacaacttatgaattaacgatgacaagcatcaagcaagcagtacctttcttgctggaatggccaaagtaaagttgttgagcacttggacgtctgggcgggatgggtatttgaagcttacatgcctgaaatctatgttgccatcaactttttctataagcacgcctgaaagttatttgttgccactttcagttcttcatatgaaatgaaccttgtgctggtggggcaaagaagagactccactgcagaaactgcatctggtgtcctttgtttgtttggttgtataaagaactatgaggttaaacgtgcgataacgtgtttttaaaaataccaggaaagaacctaaacaatttgtttgtttgttttttggtttcaggttgact

SEQ ID NO: 8636 - DNA, 653 bp, Zea mays
  Intron number 2 from transcript GRMZM2G360847_T01 (locus G RMZM2G360847) derived from phytozome v7.0 (chr-ID 1; pos 7 2399152 to 72399804)
tgacggagtttggatttcacataaaaaatgtaggtccagttgatgtttaatgtgcctgaactgcagttacagtcataaagctcaaacaatcttgagcatttggttttacattatattctctggtttctgttttttctgatttgtgttctgatgatgcaaacgcttccattttttatgttgctcctgcacaagatttcctgcacaaccaactgttttttgaattctttttgttatttgatccagggagtggacacaatcaggctcttgcgcaagtatcccctgaatttactacctgtagtttcgaaatggacttacccaaaaaaatatttgcactaagaatatttatgtttgtttagttggtctagacaaaccacaagatcagtttaagcattgcttccaaatgccattaaatatttatcttgactgaaaattcgcacacaagaatagtaatattctatgaccaagtgactgtagtatgaagaagcatgtgtcattttcctgattaatttagctggttcaactctgttggggtcccaagtcttggccagaacttgatgtaattaaactcctttagacaattgagtacctttctatgtggatttacatatccctttgcttatttaataacttctgcaaaatttgaatcctaggca

SEQ ID NO: 8637 - DNA, 668 bp, Zea mays
  Intron number 2 from transcript GRMZM2G128605_T01 (locus G RMZM2G128605) derived from phytozome v7.0 (chr-ID 1; pos 2 10640572 to 210641239)
gttcttcggcgggtactgcaactgctcataccgttagtcttagtgaacctctcttggtgttcttaggtttacctatagctattatttatctgtagctattatctactgggtttctttcttggtgttgataatttgttggagattaggcatttgatttcctttacaaaataggtttagtttgaaattgcggccaaagcaatgttttcatgtggtttcatcaattttagtttctatatttacatgtgtttgattgtcccttgccctcgtttagatagagatttctatcaagagtatagaaagttggtgcctgacaactagctgcttgcattcatccaccccctatagtttcaatttacagctgagttctttcttcagattgcagagctgagaacaccttgaagctaggagatgtcatccagtaccatgaatgtggttaccgcattctctataagaagcgggcaccgatccatgtgcagtaccagcaaacttcccattttctatgactccaaggtccgctcaactgcattacctgttgtgacatgtttaatgcatgcacattctttctatttctctatcaaaggaattgctttgtatcatctccatagatctgttaagcatgctccaaaaggatttgatcttttaatcaattatcttctaatgaaggcctt

SEQ ID NO: 8638 - DNA, 695 bp, Zea mays
  Intron number 1 from transcript GRMZM2G440363_T01 (locus G RMZM2G440363) derived from phytozome v7.0 (chr-ID 1; pos 2 2980032 to 22980726)
aggataagaacaagtaagttgtttgagatagccttacaaatgtgagagtgtgaggatgagatagctacctaaaattgaatcggttctttatctatatcaatgtgtacttcattagtttaaactttgtaaaactcaaccaactaaatcacccatatacccataaattccattaaatcaccaaacaaattgtacttaaacttaacacactatcaaaataaacaattaggatcggtggataaccctatctcacttactcaaattcgatgggcaatattattttgatcatctcttatccctatcctccctagtgaccctgtcgcctccccatccatcacatcccagatgtctctcctactcactcgcgtcgtcgtcgtcgccaccataaacctctcccctcacgttgtcgtcgaccctcccttccgtgagaccattgtgttattacaaactatatgctagttatagaatacttccactaaatctcagatctatggtaaaagcatttagttttacgtggcaccttaagatccatgcaaccaaattttgattgtaaatatctatttcacgtttgataggttttacatgttaataatatgttattagtcttcattattcttatgcatgggttttacatctctactactctatatgttaacagtgtaggcgtgcacactgccgcgttctgccagccccgcccc

SEQ ID NO: 8639 - DNA, 700 bp, Zea mays
  Intron number 1 from transcript GRMZM2G142379_T02 (locus G RMZM2G142379) derived from phytozome v7.0 (chr-ID 4; pos 2 20906468 to 220907167)
cctctttggcgcctcgttcacctaccttgtagctggtgagtcgcaatctcgttcccggtggcactgatgtgatttttgttagaactatatgtggtatactagataggtcgatgtatttattagcttttctgtattggacattgggtttgtattgacaattgtaggtattgattgcaacttaaagatagtttgtgtgtgtaatagaacatcatgtgtctcgtttgtcttgctttaccatgtgaatttgtttttttaatgctggttgcatatgtggcctaaatgggcatgaggtctcaatttgtctacggaatatttgatgaactttgctatgacatgtgtgttagagaagctgttttatgtgtaggcaggtgaggatattttgtagatatttatgctgcagtagttttatgtgtttcgtttgtatattttgtatagtcggtacatattggtagctcatatatgctttgtattaggctatctccagcagcttacccatccccatacccatattcaaacttcactctgcgaacagtgcaaaacagtgcttttgggtagactgctgcagacggtcttagacatttttttgtcactcgtgcctttttcttggtagataagaatgtcattgacaaaaacccttaaaattcattttctccttctctatttaaacattgaagtattaaaccagtacatacttacagga

SEQ ID NO: 8640 - DNA, 681 bp, Zea mays
  Intron number 5 from transcript GRMZM5G888387_T01 (locus G RMZM5G888387) derived from phytozome v7.0 (chr-ID 10; pos 98287082 to 98287762)
attcccaagggcataccacattgggtttagtcgttagttatgccattgaactaatgatgcctttttggcacaattttattgaattgattgtgatgtgctatttgttaactatgtttattctagctttgctagattttcaccttcatggtatgagcagtataaacaaaataataatggtttcatggataatccttaaacggatcagtgctcccctcatcagttatataacaaactgagggtgctcgagatattatgtatattactaacgatcattttgatgatactggatttctctttacttagttcactaaagctagattgcttgtttttcctgttgatagaacagttcccatgtgcaattatggatagtttgaagttatataacaaactgagggtgctcgagataatatatatagtactaacgatcaatttgatgattctgaacttctcttcactgaagcagattgcttgttttccctgttgacataatagttcccatgtgcaattaacaagattctacgccatgttcatttgttcataccatttttatcaattttatttcttttactttgtaatctttttgtgataatgtaaaatttatttatttttttaagtatgaatagttgtgacttatctatactactctataaggatgtaaggagggcgtccacaggctacgcc

SEQ ID NO: 8641 - DNA, 770 bp, Zea mays
  Intron number 5 from transcript GRMZM2G073371_T01 (locus G RMZM2G073371) derived from phytozome v7.0 (chr-ID 10; pos 54102929 to 54103698 reverse strand)
aggtaagaattcagtactttgatgcattgcacctagcacatatatatcttaatcacgtacttcaatgcaggaaacagggacactgtttagtttctttgtgctttttcccagctatcgagtaaccattaatagtagaaattaatggaaattcaattcatattcataggtttgtagtgctctctcatggtacaacaaaactttttcttggaaaactagtacatgacaaaacagaatactagtattgagattgatgttcatgcaccatgagatttcaggttacatggaggttttatgtaaaggttttctttttcctattttagctaaggccagggagtcgtgcgtgcccaaggcttaacctgccactgaactgagatgacaattagaggctgccgctgtcacattagtagcacttggttgatctttattggcaaggaatgctgatataaagcacccagtccctcacaaactaaataaaacaaaaaagcatcctacctttagctagttcttgcatccactatacttagggcttgtttggatgcccatgtattaactacctttagctagttgatgcgatgttcttgcatccactacactcaggcccatagaggatggctaatggtccagttatcttcctttttgtcacctcttgtaaaagcaaacatttatatcttctatcatgttattcagtgtgcaatttttacgagtttgatcccttgttttccatccactgaataggcattcttcggatacatcggaacaaatcctgctgg

SEQ ID NO: 8642 - DNA, 988 bp, Zea mays
  Intron number 1 from transcript GRMZM5G814441_T01 (locus G RMZM5G814441) derived from phytozome v7.0 (chr-ID 1; pos 1 95772996 to 195773983 reverse strand)
ccgaggggcccaagctgccctgcgttggggacaaggtgaggttctcacttgtctacgatcggttattggctagcccgccttgtggtggaacgggtctccatcgcactttattgtttttacagacttgcactgatctagtgcaaattctagtcgtggccgtctgtaccgctctggggggatcagacagtgcagcggcgcagttgagtgttggttacttggtgttcaagttgtgctggtaagcatgaatgatgtggatatggagatgattggtagtgttttgttctagtctaggacgaaaaggtggttattgctcaaaaggtgtgatttgggtgagaaccttgcatttacttctcctttagattggactcgcatatttgttgatagggaactactcgacagtgaaactggttcaccatattcttgtaacaagtgaattgaagaatttgtcccataagttggccaaacaccacagggttcccactaaagtatgctattcctttttaagttcagaaagtgtcaaatacagttatctgtaggaggaggtggctaatcttggagttttttagcatatgaaatagtatgttaagaacttaagattgatctggtatttaagtcgacactctgatttgagcttgtttgtaccaggattaagttgggttgtgtgttgcttatgctgtttatgctcacctgttggttggtgttatctgtaggatgcaccaagttagtaggtggtctgtttgaactggatggaaactgctgttctcatgtcacatttcaataaaatcggagagtgccttgtttctggttatatataaaaaagtgcatattgtgatgatggttaaacaccttttttgaatgatgaaaaacgtttctgagttattacgaaggctaacatgttctggttaccatggtggtttccatactaattattatacatcgtgtaaatgttgcaggagcctctttcctcttcagcagccgagtttcagtc

SEQ ID NO: 8643 - DNA, 1053 bp, Zea mays
  Intron number 1 from transcript GRMZM2G031660_T01 (locus G RMZM2G031660) derived from phytozome v7.0 (chr-ID 10; pos 130303680 to 130304732 reverse strand)
cgttcctcttcggcaccgccacctcctcgtaccaggtacacacgcgtaggccggtgagccgaccgactgcctcggtggtctatctcctcacacacgccgctcgcagtcgcatcgcaggagcagccctccccttttgcttccctccgtctctcgccggttgccgcgcatgcaaggcgcctggttggttggccagttggcctccctccgattagatcctgcctgcggtggtgaaggatggttcttcgactcgtccccgtctcgagaaaacgacgcgggctaacgtcctcctacctgtttcccgggctgcggtccgcgcaaccttatactgggccctcttgggctccacctagtcacaggcccaagtaaccgagcctaccttatttcaaacaccacctttaactaatcattccttgctatcttatctctctgagactagctccaacaagggactctaaagagttctataccctaaatatagaggatcgaatggtcctctacgccctccagcaacgtcctctaaacggttctctaaatttagaggacgctgctggattctctatatatagagttcctctaaacgatcttctatccatttgaatactttaaataaccggtttagcaaaactaaaatatgtacaatacatttgagagtatgacaaatacgtatgtacaaaaaataaaaataaaaaatgtttctaatatagatatttgagtatagaggacgtgatttagaggacgttgttggagaggaaggagatatagagtgtgaaatcttttagaggagactgtaaaggacggatatagaggatgaatatagaggacgttgctggagacagcctgattgatctgctgatggtaacgactattatctaagataagacggatattacgcacgaatgtcatggagagtacagagcaaacaaaccaaacaaaacaaaacaaaatgcatggtcatcaacttggcagctatcgaggtcggtcgatgtgatcatgtgatcttctcttcactttggtatagatcgaaggcgcgtacctcgagggcaacaagagctt

SEQ ID NO: 8644 - DNA, 929 bp, Zea mays
  Intron number 1 from transcript GRMZM2G135617_T01 (locus G RMZM2G135617) derived from phytozome v7.0 (chr-ID 1; pos 1 94729370 to 194730298)
aatccaccgaggtatacacacaactgctcttgtatgtatactgtatatactattgctcatgccgtttaaatttctgcactgttttttattaaaaaaattgattttgtgtttgtatgattgtgacttttgaggatgatgttcttattctcgtctacggtttggtactttggtctgcaactctgcgtgttgattgatcttcctctttagtattttcctatcaatatcaaaatcattttatttattcatttattcatacttttaataatcgcagatggttttttgggttgttggatcggtgtattattatccctccacgaattctaatatatacatatcagatttacatccgcttttcccaatcgctcctaggattccgctttattatattgacaaacactcgtaggattccactggattattctcagtcagtcacttaggattgagtatactgtgtgttgctagcttacttgtggatccgacgagttcatgtacagtatttccaaacttagattacctgtgccacaaatcctttctgacacaccaattcgtatctttcacctgaggaaagaattctagttcatattgttctgcacatggccgctgtgatctcctttattctttgcccttattcctaccaccgcctctttgatgctgtccaaagaagacgaacagtccttttagattcctctctcctttcggtaaaagctatatggaatccttgattcctacatgctgcctcatcatgatgcttcactaattactatacagactcctcctcttaatcaacttctcgagttggattttttcctagtaatgataagcgttgcaaattcatcgatcttgactgttgcttgtttgccaaatgctcgtcgcctattgtgctgtttcttgcagagtggtcatcgacaacgactcgtgtggcaacgcaa

SEQ ID NO: 8645 - DNA, 662 bp, Zea mays
  Intron number 1 from transcript GRMZM2G080906_T01 (locus G RMZM2G080906) derived from phytozome v7.0 (chr-ID 4; pos 3 1664980 to 31665641)
taaccaaccagagaaaaattactgggagaggaaatgtatgagaggaaataagctagtggggctcaacgtcataggcacaaagaaaaggaaaaggatggggagagagttggtgcacgtggggtggacttgccctcggacggttgattttttttatttcttttttcttcttttatttatttatttcgaaattcctttttcacataagttattcgaaatatatgaataaatatatgtctttctaaatatgaaaatttataataatttgaaataataatatttccaaataaaatattcaataaatatttttaggtaaatttctattattaattaagttgggcttcacaaaaagagaataaattaaatagtaacactcttttaactcaatcaacaataaacaaaattaatgctccaacatgtgatacaacaatcaaaaaaaccttttagagtttcattaatacatctaatctctacaactattaagacccaagtgtagaccgcccccgccgctacccaacacccccccacccacgctgccgcacgcctgccagcccccgcgcaaccccacgcccgccgcgaaatccgccgcccgccgcgaaatccgccgccgcgcatctcgcacgccctcagacccactcgccctcagacccactccccagggatcg

SEQ ID NO: 8646 - DNA, 1003 bp, Zea mays
  Intron number 3 from transcript GRMZM2G094988_T02 (locus G RMZM2G094988) derived from phytozome v7.0 (chr-ID 1; pos 2 36449561 to 236450563)
actggttagttgccttttgtttttgatgtgcacctttgctttattcaaccttgtgagtcataggtcaaatagcgaaagggcctctaacgtaatggttaaggcttccgagtagcatctccaggtcctggttcgatccctaacttcgggcttggttaaaaaaatcccctcgctgtgtcccacccgttcttgggttatgtcctgcgcgccaccctcccgctgggccgttgtagagtgggcagaatggattttatcagtcgaaaccatgattcggtctcttcttaatttaatatcgggagggcggtctttccctaccggccgagtttttttagctataggtcaaatgcatatcaattagctgtatagggtaagtaatatcattttgttttaaacttttgtggatttaacatatgttttctagttgaacgcagcttcattcaagatgaaaatctgccttcggtatgaactgattgtatggatgccaacctatgcaccactagtccgggacattctctgttgttatgttccctaataataaagagtgccagctttgatgttctgttagaactttgaagtttcatttgatacttgtcctttggataagtagtcaaacattgtagtgaatatgggtagcaatagcacaactggaggtggaaagtatgttggttaagtaagaattaggtagcaatagcacaactggaagtgggaagtatgttggttaagtaagaattaggtagcaatagcacaactggaagtgggaagtatgttggttaagtaagaattaggtagcaatagcaacaggcaacagctacatttcatgccatggttacagctttgcatgttcaattggctctcttggacagttgtgtatacaacttgtggatctttatgcatatttaatctaaactcttgtagttttgcttagactcatttaatcactaaggtttatctcactttttttcttcctcaaggctttgaggacaggttccagagagaagcaaatctg

SEQ ID NO: 8647 - DNA, 498 bp, Zea mays
  Intron number 2 from transcript GRMZM2G490598_T01 (locus G RMZM2G490598) derived from phytozome v7.0 (chr-ID 10; pos 5403014 to 5403511)
tcaacggacactctttttctctttgtctatcagaggttggtctcagactaatcttcttcgatgagtaccttgatgtgtatacatgccatttctttgatcagtacgtgaatgaggatgctatgtttctgtctcagaattcaaacttgtgagaacttaaatagcaaagacaagaaaattctaggcatactttgctttaagccatttgaaaagctctccataattttggttcccatttcatctgaaaacaaacctcgacaatgtcttgtatttttggtgacctttttattccttgctaaacaaataccttgctgattgttttgttattgcatctgtatcaattctctcttggaaagatattatttcttgtaaggcaaaatacattttggttccttatcgtgcgttgattttactgttccttgatattgcatagatatcgttagctatgttgatgttacaacgaaccatctcattccagattctgaaacttgctgagaggga

SEQ ID NO: 8648 - DNA, 704 bp, Zea mays
  Intron number 3 from transcript AC204611.4_FGT001 (locus A C204611.4_FG001) derived from phytozome v7.0 (chr-ID 4; po s 18118348 to 18119051 reverse strand)
ctggtaggcagagcctgtcgttgtggttaccattatcattagttaattcattattactacaactataatggtttttaaatcatgccgtagccggtcttaattcttctggttcaaattgtttaaccataggggtttggtttgggactaaaattaattatcctgtgtcacatcggatgcttaaatgtttattatgagtactaaatataataaacattggcgctgcatcggccatgcagcgccgagggatgcttaaatgtcacatcggcgctgcatggccgtacttggttttttaagttagtactacaaagctttgggataaactattgggtgatttggaacattgatatggaggactaacgaggtgcaagtggtagaacttgagtgtgacacggtgatttatttatttattttcttttttgtaataaaagccatagcatagtcatttgaccctttattaatcgaccctacacgagaacaaaataaatgacaaaaaaaatccagatggactttgagcttctaatttaagctgatccacgtatctgcacaagcacgccaattaggcccagcccaacaggggctgcgctcagacttgtcaccctgcatgccgcatgtactgtactgtacaagcacgcccgaaataacatgggttatatttacattacatggcagattggcgagagctacccgttcttccggagcagcta

SEQ ID NO: 8649 - DNA, 759 bp, Zea mays
  Intron number 1 from transcript GRMZM2G537479_T01 (locus G RMZM2G537479) derived from phytozome v7.0 (chr-ID 4; pos 2 16617457 to 216618215 reverse strand)
tcagagtcatttgggtccgtaagttgttttactaattttgttcactaccttaatgaatagatatattggggttgtaattttaatacttgctcagttggtcccatcctggtagcgatagaaacgctagtgagctgtttatgatctcaatacgtctcatttgactatgttttcctttctttgttgtatagttcttttttctctgagaattttatatgttcatgatctgtagctgagcaagtttgtttgttcctctatgttttaacgatgcaagatatattaataacctgctagcaggaagcctgttattgataatgtctagattcaaattggctccttcgggttcatattcatgcagtgtagttcatatacgtgttgatatgtggtccatggtagtgttgggcaatctggatgcaagctggaataatgtgattgtttctgtttttgtgattgttcatatactttgtttgacttggtgtttcctgtgtaaagcttcttctactggcatttatgaaagaatatgaaaatggttttctatgaatcggtatcacttgtatcagttcagattttatgagcctcaatgcattactggttagtgcaaactagctgtataaattttatctactaattgtttttaactagattaatcttgaactctgtacaaataaacttcaaggttttaagtacctgtttgtgtggcaggttttttctttttagaaacccttgtttaaagctgaaagttaaatacttttctttttagaa

SEQ ID NO: 8650 - DNA, 503 bp, Zea mays
  Intron number 1 from transcript GRMZM2G435684_T01 (locus G RMZM2G435684) derived from phytozome v7.0 (chr-ID 4; pos 1 53407180 to 153407682 reverse strand)
gcattcggcatcacgatctcgtgaaagatcgtgaggttagtcgtctatccatgctctcgctcccaccgtgaaaggttgccctgcgcgtttattattagggctagagatttccgccgagatagtttcgttttcgaataatcaatccttttctcttcatatgtttttctgtgcaaactaaaattgtcgaacaaaaaaaagattgatttgatctgttcttctcggactattcgccattgaatcattgatcgattttgttgatctctattacaactgaggtaatggatcatgatctaaatatttctttataagttgttaaatatctaaattattttttattcaaaaatggatagaaatatgatccgatcctaattcgattcgattcttaaattttatagtgtaaatatgatcattgtccctcctaattacaacatgcttgttctcaaattcatgttctctactttattttaggcattctcctgaagttattaggctcagttggactg

SEQ ID NO: 8651 - DNA, 887 bp, Zea mays
  Intron number 1 from transcript GRMZM2G003762_T01 (locus G RMZM2G003762) derived from phytozome v7.0 (chr-ID 10; pos 4674805 to 4675691 reverse strand)
tactcccacaccaaccaggcgctcctccgccccaggtacgtacgttcgtgtacggggctgcatactgctttgctgctggcaggcactgccgccccctagctacgagtattattattattacttgtcggatctgtgttggatctcgtgtgctcaagcaagccgagactgagttcttctagtagttcttcctctcgcaagctaagagcgactgaaaaggacacagttccattccatccttcccctcacctttatttagctcttctcggtttaaaataactaaattttagtcagttcggtttatcttacggatccaaccagagccaccattttgtctttggaaaaaatagaattccttagaagaaaaatagagttttccccactactggatctggttcttctcgtgtaaattaatacgtcaggatgtatttattgtctgcatacgaaactgagcgtcgtcagtttctaactgaccggatgggatgactctcaggcaggcagggcacagagaggagttgggttggtgatgtgtcgcatcacatcatcacagggacgagattggaattaaaagctacgccgatacaacgtttgatttgaccttgcaatttttttagtagtaataataataaaaaaaaacacgaaattctgcccaccatgacagttacaggccgctcggttcggtagcaagtgagtgagtgagtgagagtgggtggcagggtgggtggtggtagtccgtgggccctggctcggcacaaagcccacacagatctcgcactagatagacggggggaggggggccatgatttgtgggccgtgattcctccaacaagggcgttattatgcatgcggcggcaggtcgttcgcggccaaggacgaggtgttctgcctgt

SEQ ID NO: 8652 - DNA, 482 bp, Zea mays
  Intron number 1 from transcript GRMZM2G330436_T01 (locus G RMZM2G330436) derived from phytozome v7.0 (chr-ID 1; pos 5 18379 to 518860 reverse strand)
cattatctaatagagctgagcaaatatacgagcaggtatgatgttttattgtcccattatactgttttgattaagttcaatggaatgctattttttgcttatatttttgttacgcttatgcaatcggtgtgctgttggtatgtcaaatatgttttgccatacatctcatgcataaataagcatccaactattgaggcaatttgagttcacttggatcagtgaattgccttctctacgttgtaagctaaaactttctgggctttgaggtgtactgaaatttatttttatgtgatttaccaaacatttccagctcctttgcttctcaagtgtgagggagatggaaaagggtgacactttctgcgtttcatagagctcttcattcagtgtgttatttacgtcgtttggtgttaagtttttcttttgcagtaactccttttggaccttctggcatttgtgcctttgtctgttgtcattcagtaggt

SEQ ID NO: 8653 - DNA, 600 bp, Zea mays
  Intron number 1 from transcript GRMZM2G301087_T01 (locus G RMZM2G301087) derived from phytozome v7.0 (chr-ID 1; pos 2 74723707 to 274724306)
acgaaccggatctggaagcgaacctaagctgcgcggtaagaactctgttgctgatctgatgcgattcgctggtggcgtggctggctgttccggctgctgggttactgcttgctttcgcagtgaatttgttcgtttttttgtttttgttagttctggtgagtgttctttttcttcctttcctgaatcctgatcgtttgagaagatggctttttggagggtgagttcttgcttgcgattctgcagttcttgcttggctcctgagatggaccgattgttcgtggcatctttttttttattattattatttagaaaggggatgttcgcgatatctttagtaattgtgttgttcatggaaattccttggggtggagatgaagtgaaactattttctcgtcttgctgtttcccatacccaaactagctcaactctgtgcatcaaaagctacagatttccttgaggccgtagattgattggcatgctgatatcggcatagctcgtctccctcagcatacctttccattttcttcaggaaaggccgtttgattcggtttcttgtccatggcccataggtttgtcattgaaaacagtgcgaagagtgag

SEQ ID NO: 8654 - DNA, 613 bp, Zea mays
  Intron number 2 from transcript GRMZM2G364160_T01 (locus G RMZM2G364160) derived from phytozome v7.0 (chr-ID 4; pos 1 72542531 to 172543143 reverse strand)
aggctcttgacattgcctttgagataactcagaaggtaaggatcattattaataagctatccctaatggcattaactaataaagggtcagctctgcccactatgcaacatcccccaggacggaaggtagcccacatatagtttccataacacaagtgtggatgaagcacaacgaggagattttttaactgagcatagcaattgcaaggattacaggcgtgctgtgtttactttttctttgaattgcagacattctttttgttggctgcctgcacttacctgaacacatttgcattgtagtgttttgttattggaatcatgttatagtttgtgttacgtactgctatgtaacaatgatttgttttttctgttcatggtaccattgacttcagatttgaatctcgtctgtatatgtatgcagtgccattttaattgagtttcatggattttgtcttcattatcttatgtttgtgatgcaaccctgcttcctttgcaggaggcgtactctcatcttcccaaaatctctagcaaggaaacacatccaaagatagcacaagttccgctggaacgacaaaaatatgatatgacacttcttgtgctaaagtgcacagggc

SEQ ID NO: 8655 - DNA, 886 bp, Zea mays
  Intron number 1 from transcript GRMZM2G019325_T01 (locus G RMZM2G019325) derived from phytozome v7.0 (chr-ID 10; pos 142068085 to 142068970)
gcggaacaggtaatgctctttctgggctacttcccttgtacggcctctgcttagccgctcgccgtcgctagctcagcccagtttggtacgcgattcgcgttcgcgtagataggtttgcttgtccctgatctggtttggtctcatgtggttgtgtctgcggctgctggtgtgtttgtgtttgggtttgtcgggatctatcggttcaatattatcgtgttgttgcattttttatcagcgtgtcggggtttgcaaatgggtagaatctaatctgatcatgtagtcaaccgtttgagttgtactacatgtgctgtaatcttaatctctttagttccattgtatgcggttttagccttttaggacaagactctgggacttgttggcgggataaacccagaacgggcggtcacactctaggggtcacataggatgataggaagaggtgaatgtggtttatgacccctggtttatggaaaacacgatttgtggttaaattgggcaatctctggtctctgcagagaagtgttaaaactgatatatactcacggttactggcagctcggaccctccatacttgtgttttgaaaatagaataatgatgttggttatatgctggtttcctttatggatgatacagtgtcagttctagtttctaggtttagtgcgtacttctgatctgatgcatctatagaagtaagtattgtcacactgattgtctgatgataatggagcacaacacttactgcagttgtcagggattttcctagttttttttatttatctgtgtataacctattccagtagtttccaactagttgcaaagttctaatgttttctatctacccattttacagactgagaaggctttcctcaagcagcctaaggtgtt

SEQ ID NO: 8656 - DNA, 1003 bp, Zea mays
  Intron number 6 from transcript GRMZM2G056350_T02 (locus G RMZM2G056350) derived from phytozome v7.0 (chr-ID 4; pos 7 7011737 to 77012739 reverse strand)
gcacttgttgagccagagaaagttcatcctaaattgtaaggctctctaagtgcctattagatttgactactatattctgtttgtttttgcgcttatccttataatatgggagaagtagaattgattttccatgtagtctgggttttaattattcagataagcttgtggtgtgagaagacatgggcacaaatgcatttgatgtgacattggttatcagaagtgacttttagcttttcaaaaagcacatatatctgttgaaattaaaacgtaacatggacttctgaaacaaatactaaaacatttagttggttgagatgataataaccagtgttaatatttttgtgttaacaaaaaatacggcttgaatttcttacactttgcatgtatgactttgtgcaccaatcaactaggtgcctgagttgtcaagtcgacgttatgtacttgcattggatgggtgtatatgtttgtcttggatgatgggactgcaacttcaaataaaaaactagagcttagggaataaagttttagatgaggacataatctgacattttaaggaagtgttctggtatccttgttctttttatgtgcttgcttgatatggaacctagcactttagctgtagtctgtacagaaatatagttgcatatctatttaaactttgttgatgtacttgctctgatcacaaatataagttcatcgagggttgtctcaacttaattttttaatgttcgactcccaatatctaaaattttatatatttagcactaggtttgtattaccatattcattacgaaaatatttctcatttaataagactattttataagatattgataatcaaagtgtcattggattgtagccctgatgactgttgtccaaaacttaatggatttatatttgtgatctgaggaagtagctcagagttgtgcatgctgtctgtttctttgtttttgtctagactttaaaattggattgaaatgcttttggcctcaattttgtacag

SEQ ID NO: 8657 - DNA, 851 bp, Zea mays
  Intron number 6 from transcript GRMZM2G447145_T03 (locus G RMZM2G447145) derived from phytozome v7.0 (chr-ID 1; pos 2 46692784 to 246693634 reverse strand)
tggagaaacttaattatcgtatgctatatttgccgttgtattctatgtttcttgttatagatcttcctactgaacgcttgttccttgttcaggctttgtttcaagtttcatttctcctcactctcaacttcaagggaataagcctcctgcagttgaaaaatgatgatccagcacatgcagataaagtgaaaaataccttcatattcaacacatttgttttctgccaggttctgcgttttagcttttgcttataaaagaagtttctgccttttgtctaatgcgactccagagctttatgcaacaaatgcagtagtggcctgacatgtgtaattttgtcttcttaggtgttcaacgaattcaattcgtgtaaaccagatgagctgaatgtattcaagggcatttcagagaaccatctgtttattggcatcatagctataacagttgtactccaggtagaatctctagaatgagtttcctttcttaactaagataaattgatttaggtctaagaaactgttttagatcacctggactttgccacgaataccttttatcagaaaatggggggaacgataaaggatgctggaaaatgaaatatattattatagctaataaattggctttcctggaggaactaggatttggacccagccaagtggccaagtgtatggaagaatcgtgtcgtggcacagacgaccagctgcttgactctccctcttctgtctgatcacatttgtacgcaagatatagatagtactactatacagtggagtcttcttgcagtttgtctattttacacaactgacatagtcttcaggtatctcattgtctgttcttatttagttatatta

SEQ ID NO: 8658 - DNA, 678 bp, Zea mays; identical to SEQ ID NO: 7075
  Intron number 3 from transcript GRMZM2G351577_T02 (locus G RMZM2G351577) derived from phytozome v7.0 (chr-ID 10; pos 147836676 to 147837353 reverse strand)

SEQ ID NO: 8659 - DNA, 904 bp, Zea mays
  Intron number 1 from transcript GRMZM2G567890_T01 (locus G RMZM2G567890) derived from phytozome v7.0 (chr-ID 1; pos 1 72643492 to 172644395)
cgtgggcagagacttccgcggcataacccaccgtgagtttcacttctacgaattcgcggtacttagggcattacaatttaccctgggatttggcgtttgggtgctgggtgcccaggagtgttctcgccagagcttgcggcggcatggtctgtgcgggcggctcgagtgctactcccgcgtggagaagattagttaatcaggaccgtcggtcagatcggatggctggcgtttaagatcgatcgggtctgttggatcttgatccaaaggccacgtcgggagccggtccacttcggagtgtattaaatcttggcgctcggttctgatccaactgtccagcgggctaataccccttcggtcggtggttttaaaaaagagaccccgcacaaaatagaaatcaacccgcagtccatcacaggtttaatctgagtctgggaaaatttatgggttaacccccaaactcttcagtattcttgtgcgcgatccagtgagtggttaaaaaggaataaaaaaatatagaaaatgaatttttatattaaaatcatcctagaaacttgtttaaatcataataaatccattttaatccctttttgatccattccagttgcgttaatttggtattaatattgtttatcaactggtaactctgtttattcatgaaacatagactaaaattattcatttggcttaatctgtatctaccactaaataactttagaaaatcataactcgataaccgtaactccgaatttagtgattctttttcctacgatctcgtgagtacgtgtagaatattattatatcgtatgatctcatgtttggtgtgatgttaatttctcctgtactatgtttgtttgtatttttgcgagtaaacgagcaagccactgaggacctaggtgtttagcag

SEQ ID NO: 8660 - DNA, 797 bp, Zea mays
  Intron number 2 from transcript GRMZM2G005251_T05 (locus G RMZM2G005251) derived from phytozome v7.0 (chr-ID 4; pos 8 5024796 to 85025592 reverse strand)
attgagtaagcttttgtccagtgattctcaatgctttgccactttatgtttgctgctcatgaaaatcctctttgtaccttatgggtggtgtgtggacaattttttttgtttgtttgttaacgagcttagctaatagctccaattttgttgtgaaccatattaccatatcgttcccaactgaacatgaatgcttacactactgcagactttgatgaaatggttttttttgtaatgtaacatgacatcaaatttgtcaaatgaagacaaattttgcatatttgttcacagttataaatcaaacccaacagagaagctttcaatatgtactaagttgccaattaagggcagtaccctgttggtcagttaattattggctttgatgttctagctggtactaatttttgttttcatatgataattttataataagatccgtcatgccaaccagttggtggtggtgtctaccaaagtagcatatagtgattgtcttatgtgaggtcatttatatagccatctatgtccttaatagatatcacaagatttacttgtgggctttttgacaaacaattagatatggtgttttttcaagtcgtatatgctatctgagtatctgaccttttcctgccccccttcattgctcgttttcatgcaactgcctgcccttaaagttgcatgcagtatagaacttggagaggcagaggcatgtcaattatactaatacaacgttactgaccatgttttcctcttgctggaacagcccagaaggcattgaaacactctgttctcaccttgaagtt

SEQ ID NO: 8661 - DNA, 851 bp, Zea mays
  Intron number 3 from transcript GRMZM2G047715_T01 (locus G RMZM2G047715) derived from phytozome v7.0 (chr-ID 4; pos 1 21562936 to 121563786 reverse strand)
aggatagcttcaaggcgcacagcacactgaccccagtatgtgtcaaccctgttgtgtttactgcattttactgtatctgtggaacatgttagtgcccttgacagcatgttaagggagtgaatctattctagataagggggtccaatccacaaatttggtgcaataaactcatttctcgtattattactaactattagcattattagcctatagggaataaaatgatgatgaatatgatcaactaattccattttttcacaaaccaaacaagaaagtgagcaacgagaagatgatagactctctcattccttaaaacaaacacggctataagtttctaataaagagttgacaaggctgcagcataacgaggaaagtaattatagagtaggacttgaaagattaattggtagcggtgcatgtacaccaccacgtacagattgttcttgtgattgctgcatgaccgttgatcttatatatatggtcaccaaggaacagtattcagttctttttgattgcagattagagatatcgacatagctatagctcggttattcatattctatatagatttgatggaattaaaaaaattataaaagaagattttgacttgtttggaattgaaatccatttaatctcatctaatctaaatagattgagagcaaacgaaggcctagtatataacggtccttgatgggaagttttttgtaagaatcaagggcttgcactagctcttgcatgtatgagcaaagaattattcgtcaaataatacatctagctagatgagaaaagtgggtttttttttcttttttggcacagaaacagaagagtgatttagcgaagcggctgaaact

SEQ ID NO: 8662 - DNA, 676 bp, Zea mays
  Intron number 1 from transcript GRMZM2G068697_T01 (locus G RMZM2G068697) derived from phytozome v7.0 (chr-ID 10; pos 10112464 to 10113139)
accagaatttgtcacctgtcacaacagcttctcaggtaattgtgttgaatttgtgatctattttatgtttcttgtgatttttattcccttgactatgtgagacaccatttttattccgctgaacatctagatctgtaattgagcttgcgcgcgcgtttcatgatttcattataatatgtggtcgagcgagcagcaacatttgagttgagaagaatacatgacacccgtgtcaactaaccgcatcattttttagttgatggtacattctgctcgaacatttttggatccacggttttcgtgtagtgtcgtctggcagctaaaaacgggcctaatgacctctaatacaggattcgctcgccttacttaagaacttagaagaaatggttcagcatgatacaagttttatttttttgtttcgctttgcggattatttgccctgggctggagagtgggaattgaggggaaaatatatgtcgttactcgtgatgtactccctcattcgttaagaaattcaccagaactctgacttggccgacgcatatattcatcacgtatacacgcacatgtgtgtgttcttgccaaaattcgcacgttagttatgtaagtatgtgttcatttcgaatgtatttataaaggggactatgcatttctaatgattgatattttgcaggttctt

SEQ ID NO: 8663 - DNA, 651 bp, Zea mays
  Intron number 2 from transcript GRMZM2G366584_T01 (locus G RMZM2G366584) derived from phytozome v7.0 (chr-ID 1; pos 2 52814816 to 252815466 reverse strand)
gcacggtaatggagaatttcttgatgccatcaataattttagtatttcctttctaatataatttaggtctgaagtctgattgatagtgaacatgttttttcctctgtaatttgattaattctctgataccaaatttggtctttcattctggttatattaactagacagagactgtatagtttaagtgttcaaaacttctaaattgcatctaatgtaaaaaaagtagatgtgacaccttattttgactggcgaaagggcttctagcgtaatggttaaggcttccgagtaccacctccaggtcccgggttcgatccccctcgggggcgaatttttggcttagttaaaaaaatcctctcgctttgccccgcccgctcccgggttacgtcctgcgcgccaccctccggctggaccgttgcagagtgggcgatgatggcccgctagtgatggggccagggttcggagattttatcggccgggaccatgtttcggtctcttcttaatatataataccgggagggtggtttttccctccacggacgagacaccttgttttgactgcagtgccttttatgttttgttttcctatttgatgctcttgtcataaaacatgacaatttgttttcatctcgcaggccttatcacagcatcaat

SEQ ID NO: 8664 - DNA, 1038 bp, Zea mays
  Intron number 1 from transcript GRMZM2G366584_T01 (locus G RMZM2G366584) derived from phytozome v7.0 (chr-ID 1; pos 2 52816334 to 252817371 reverse strand)
ggcgaccgtcatcctccgccgtcgcgctctacggggttcgttcctactcacacgccccccgccggggtgtgccgcttttgtctcaagtgctaaaaggatttgggatcataattatgtatccacgggttacgggtgggctgacgattgacatatgcaagccgtttttttttttttttgttagctcgtcttcccgggttacttcatgttgtctgtaatggccaatttcgctgggttcatcggttcgagttttgggcttcgtctttatgggggaggttagggtttaggatgaaccgcgattgatgcatgcattgtcatgtaaacggtttgcatgacttgatgactgcatagaattttttccatgcttctgcagtctccggtctcagaactagtgttttcccttccactgatgtatgtggtcatgtgggacattgccttgcattttggtggtccaccgcgcgaatcaaagcatttctcacagttttcagtttttgaaactttcagtgctcctacgaattatttatagggttctggcggcacaatcggaagtgacttagttgtgtttcaggagccaggaggggatgtttcggttaattgactctgcaaattgtttggaaatgcagctctttctattgaaacttaaggtttagatccgtgtcgtgcagctgttgctcttcttctcctatctgtgcattgactgctgtctagttcgtcagcgtatgaattttcatattgaaacggattatgaccgctatctcctacaaatgcaaatcatgtgagtaaataggttttatgtgggtgctttatgttgaaagtgcctgctttagatctactagcaatattaggccctcgcttgcactgcttgtagagtccggtctaccccaaccaatattatcaaatatgactgtgtgtcgtcgtaatacacaagcattgcacgtactagtaagattgttatttcatggttaagttttttgagtcttgagtttctaaggttttacatttacaggactctcctatcttcgatttcgttgatagtctatc

SEQ ID NO: 8665 - DNA, 1045 bp, Zea mays
  Intron number 3 from transcript GRMZM2G070639_T02 (locus G RMZM2G070639) derived from phytozome v7.0 (chr-ID 4; pos 2 9169486 to 29170530 reverse strand)
gtcgctacatctccgctataccatcagcttagctggtgagtcgggctgtgttcatacgaactgaatatgggtaaaatgacttatccacattgcacatgttgttcgctgccgaatatctgttatttctagcgactgttaagtgttgaaagaagtagatatatagtacgcacatgtgatggatgatgggtactgctctagtactctagagctaggtcgtcctgccgactgccgtatagcttagtgttttgatatcctgattcctggtttacaataccatgcgacatgcgctctgagtttgtatgttgcgagaagaaacttgaatactgtatttgctgagttgtctagaattgcattttgagaacactacaatgaattttgattttggaataacaatcagctagtttgtcaaataagagttactgatttcatagtaggaatttggtcaaactagagagggacttacccgtgtcgagagaatatcctagacttcggcttttttaggcatgccaatttttattcaaaatctgaactcctacggtaaatttcaaaattcaggaccatgtcatttactggatgtagcaattgcattttcagaaatttcagcatggtgacattgtaggcaaatatgaaggatctgttccataaaaaaagcataaagcaaggtccgtacaccttaaattgcttggaagtaccattattatttttcttggaggtgtcatcacgctaatgatgctgggatttttattttgaggatgttctgtcgggcaagtcaatttttctagcaaatgggtccgcgagatgtttctagtttctcaaaaatatcctcctccttattcgtccttcctgccaattttcatcagaacagaataattaaatgttgtaacggcatgcattgttacagttccttggaacactgatagaggcagcttctcgtttcatgtttttttgtttttgtttttttacacacagtattcaatccctacctggctgattcttgtttgtttaatcttgatcaggtgctgttgtccacatcaattgaggtcac

SEQ ID NO: 8666 - DNA, 615 bp, Zea mays
  Intron number 1 from transcript GRMZM2G077317_T01 (locus G RMZM2G077317) derived from phytozome v7.0 (chr-ID 10; pos 80388454 to 80389068)
acctcaccgtggagcccctcggccgaccgcagaaggttcgtacttgtcgctaccacctctgcctcgacccatctctctccttcgtgttctctggctgtctgaaagttttcgatttagaccaccggggaaaaagtttttggtttggaaatttttacgtgggttttctctctctctctctctagtttcacctcactcatggtcatgggtttgtaagatcttgatcctacggggaaaatgatttatcctttgttttatcttcttcgtggtcggatggtcgcttaattcgtttgcggtttctttgtcctaaaaatgattcgtaacgctagctcgcgttcctccggaaataaatctgtcgtcgatgctgcaatgattcttttgtggtcgtgatacacgcgcgtgttctccacttctttggagaaattttatttgattctggcacatttcttgcaccgtgtgcttgtttaaagatcactcttttgtgaaccatttcaaaggccaaagacgcataagtttttttttcttcttcaaacaatcaatatgcatgagatgcgttttcttttcttttgtttttcttgttcaggtgattgcgataaacaaccagttcccgggtcctct

SEQ ID NO: 8667 - DNA, 576 bp, Zea mays
  Intron number 1 from transcript AC210005.3_FGT003 (locus A C210005.3_FG003) derived from phytozome v7.0 (chr-ID 1; po s 176424650 to 176425225 reverse strand)
ggttaaggtgggttttttttggcctggtcggcgacaggtatggccgttttttttcttttcttttccttttctaatttgtttctttttagtttcaattcaaattctaagaaaaaatgcatcatccaataatgaccgagcatgtaaattcgaattttgtactatttattcatttaccttattcacttatccaaatgcttttaaatatataattcatatatacaaacaatatatacaaacaatatatacaaacataataccactttgcgtgtgtggttcaactaaaagtgcaccaatattcattacttatttattttaatagaagatactttttaaggaataatccctattaagagacattttaaactaaacatttttagaacatttatggatatcttaactcatataaggatcttcttattcatttcttgaaactcacaaactgaatttttgaaactaacattattttaatattactatctatttttagaaggggtgaattcctaagtgtaaatattcatcagggtcactttactttggtttagaaagattttactaatcccaaaatcaggatattgg

SEQ ID NO: 8668 - DNA, 886 bp, Zea mays
  Intron number 1 from transcript GRMZM2G125943_T01 (locus G RMZM2G125943) derived from phytozome v7.0 (chr-ID 4; pos 1 67380564 to 167381449)
tcaactacgataagtccccttccgctatcgaccaggttcgtcaccattcgcccccctcttctccgccattgctcttgtagattgctatgccacggtatcaattggcagttggtttagcaatagcggaccccgagatcctacacattgttctgtgggttgtctcttttctttaaaggagcaaacagaaaaaaaaggggagaaatagagatatagagatgcgttgttgtttgttgacgcttaccgtcgtttagcacgccatgattgctgtggttggctgggacaggtgctgttcatagtcttgtggaaagaaaaaaaatgtccattcctgcggcggttaggcggggattttttaggcttattggagacgtagctgaactgaactgttgggttggtggcacattgtttgttcatagagtgattagtgtgttcgctgcaaaaccatctgggggttactttgacatccattggggtgtgctcttttgccaaccttttgattccttgtttattctgagaaaggtccctgtcgcagagattaaattatgttagaagctgctttctgcctctcttttcttttgcttagattattgatcctcaaagccgtcctttcctgcatctacacttcgtttctcttccccccctttttttttgtcgatttacctatagtttaggcgtgcagtgtcatgggcccatgttatttgaagacgtgctcgtttttgcatacaatgaccaatcttattcgttgcatcattacttttggtaaatcaacaagatgtcttcttctgattcttgcaatttatagcatattattgtccagtattctattttggcttaataattaatgtccgacacaggacacttttgcaaaatacacggcaaggacatcatt

SEQ ID NO: 8669 - DNA, 708 bp, Zea mays
  Intron number 1 from transcript GRMZM2G165383_T03 (locus G RMZM2G165383) derived from phytozome v7.0 (chr-ID 4; pos 4 852079 to 4852786)
cgcccagccaacagcgactgcctgactggtgagaggtgagccagttcttctgattcaagagctacatattgtttttatttttatgttttttgaacaaaataattctttacacgtccactgttagcaatttagctccgccttctccccaacccaaatttgatcccctcgcgccgtcatcttcactgccggcgccggcacgggcacggaattgagacgaggacggtacgataattccggaggggagtattgtgggcccacacctgttccctagcgcccagtaggtgaattgagagactgttctctgggaccaacgcgggtaggtgtggccgtgcgagtgggtgcgtgggtcccgggcaacaacaacagctgacggcacaaagttgccaccaccagcgcttggtctgggtctgggatttccacgagcagcgcaacggcgttcgttccttcgattcttctaatctcctaacccaggtgagttcgtgatccatttttttgtcctggttcccccccccccccccccacccccaccggggccattccctttccctatggattttcaacgttaacgatcaagcgaggagatttccagtctgtgtgtttgggcgtgaggtgtttgatgctttgtgccagttattagagctttcattacccatcttatccctgttgtcgtcccaacttcaggtcgcctcctctgatctgcaggtgcgc

SEQ ID NO: 8670 - DNA, 727 bp, Zea mays
  Intron number 2 from transcript GRMZM2G040078_T01 (locus G RMZM2G040078) derived from phytozome v7.0 (chr-ID 10; pos 89545470 to 89546196 reverse strand)
tgcatcgacggacgaggagggtgacacagattcaggttagttaccagctactgaatctgttgttattgctatctttgtcacatagaaattcattacgatcattctataaaatttacaatgtaaaattcttatagaagtgcctgtaatttaatcagttttgagtttgagggaggcctaaagatcaaagtattccagagaccacttgttttgttccttatgttaaaggtagaacttcacttttagagttttgtaaagtgttctggagctctggtttgaacataatgaagaattgcacctgattttcttttatatatactacacttatttctaagaaatgcttagtttattagatttaattttttttggtcttcttagtgaaacttaatattagagtgaacacactaaccagtccaacccaaaagcttaaactaatagaaggaggtggataattcacttgtattatattccaacacccccctcacgttgagcctctcttgggtctcagacgtggaataagtgcgagcaacaattattttatttaattgtgctagccaggattcgaactcgtgagctttggctctgatatcatattagagtgaaggcactaaccagtccaacccaaaatatttagctgaaaggaggaggtggacaattcacttgtattatattccaacacttaattttttttctaatgccaacatatgtgcaacatctaggtcaccttcat

SEQ ID NO: 8671 - DNA, 698 bp, Zea mays
  Intron number 1 from transcript GRMZM2G378949_T02 (locus G RMZM2G378949) derived from phytozome v7.0 (chr-ID 4; pos 9 6426812 to 96427509)
attggttttgcggttgctcatcatttgaattctgagtatgccactttctagtcgatgtcgataagaaccaatcatatatgatttagcataatatgtcttggaacactactaaatttttatatgctacatatgctatggtgaaagtacggtagcaaacttcatcccaaacattgttgagtgtgcactgtaagcaattgaagtagtacacggtataaagtgcgagctgaatacaatcttcttggatcatgggttcctttatcatgtcaattatttgattgctctttgtcatcattgcaaaacatactttgtataatatatggctttttcattttttggcatattggtgttcttttcttttaagtgtgtagatagcctaaaggtccattagtccagggtttgcacagatgtctctgactctctgcctcacttgtatatacctcatttcttataattgagttgtatagcctgaagatattttttctgtgatccaaacctgaccacttatatttttgtttgtattcttttatatcagatgtagaaacttgttcatttatttgtgatctatgtgctaaagattatgattaagataaagcatttactgcatgaaagaattaatcacttaacgtggttgtttgacttggaactgatactgattgtcacttgcagttcttccaaggcagtagaagtattggaggcat

SEQ ID NO: 8672 - DNA, 515 bp, Zea mays
  Intron number 1 from transcript AC198699.3_FGT004 (locus A C198699.3_FG004) derived from phytozome v7.0 (chr-ID 10; p os 18734118 to 18734632)
gaggcagtggcggtcgcatcaaaggaggaaaaagggtagcaagacgaggaccacaaggtgagagaatttcatttcctagatcgacttgcttctaccacaaggtgagataatgatctcctaatcaatgcgtcactcggacaccataaatttaaagtttctctgattttgttcttcacctacagttctatgattttgtgaaattgaagttaaaggatcgatattttggtggtgtttaacaatggaatgtattacttgtcatatgatgaaattgttgtcaaaatatctgaccaatgggacttgatttggttgatttgttggtaaagcttgtggagtttacaactgttttatgctgctgctatttttcaattcagagtagttatttttgacaaaagcattgtgacatgtatttcagtttagagaaaataaaaaacaacaatgtagatgtatatggacttgggggtttgattattcatggtgcagctgcaactttaggtcgacagtagcagcaacattgt

SEQ ID NO: 8673 - DNA, 1045 bp, Zea mays
  Intron number 3 from transcript AC198699.3_FGT004 (locus A C198699.3_FG004) derived from phytozome v7.0 (chr-ID 10; p os 18734915 to 18735959)
tgaacatcttgaaccttgatttggggtatacctttattgagaggagttcatatttgaaggttgcacatatccctgtttgccaatgaatctatcatgaattatttttgactaacaatcaccttttcatttttttctcgaatacgcaggaagggtgtgtatcattatattaaaggataggggaaaaggcctaaggcctggaacaaacaggacacaacacacaccagactcatacaacaaaaacacaccaaacacacacacacatacacataccagccacacacaacacaccaccaccacaacatacaaagaggctaaaaaaccttccttcctctaaccaggataaaaaagagagctcatgttcttggatcctacaaaaaaccacatccgcatctcatctttgaaaccatcctctaaggtagaaaggcaaggctgagctccataaaaaattacacctatttatctgcttccaaaggcactaagccccaaggatgaccacactattaaagccctttcttttgcttttaggaatcctagctaaagccttcctccaccattcaacaaaataggaatatcttctctaaggagccacagtagagagaccggttggagttaatatattataccaaaactgacttgtgaaaatgcaatttgatagaatatgttgcgcagtttcatcttcttgatcgcatagaacacaatttttaggataatcaagaccccgttttttgagtctgtcagctgtccaacacaatttccagcggactgcacagattccatttagtctacattcagttaccaatagttcatgctaacacctagacactgcatacagttgatggacattatactaacaccctgacactgcatatagtttacaacacctaaacatgacattttctttattgttttggagtcattttccttgcacatggcttctccacgactggtggtgaatatagatggcttctccatgactggtggtgaagtagtggcatcttcaacatttgtagtcttgggctattatcaaaaccaaagcttgctgaca

SEQ ID NO: 8674 - DNA, 982 bp, Zea mays
  Intron number 1 from transcript GRMZM2G410191_T01 (locus G RMZM2G410191) derived from phytozome v7.0 (chr-ID 10; pos 125833968 to 125834949 reverse strand)
gataaagcagtatgctgcaagatgcacctaatatcgagcacatccaataatccatacctttacacttttaatactaccatttttagctttgtattgaaatgctgcttcggctatcagtttgagagcacttacaagagaggaaggggaggtagaggggcagagggaagagcagagcagcgcatccagagagggaagcagtgccttagaaaacaaagtatcatttgtttacgttattggcgatacacaaatcacatgcgtctgaatatatgatgtttgtgccctttgtagtgttcctaacattttgcacaatcaagaaattgattaaaaagatgagctctgtttagggcttgtcaatatctagacaagtttttgctattatcagtgtagtgctcaataagtatgttgttactagcaaggtattaccaaatgttaaacctggttagccatcatgaaatcaaaatcatcctaaatcatttagcttctggttagccatagtattgatccaactttgcatctagcttagccaacaaatgggaggatttttttgtggttacacattcattcgtgcacaaggataaattcaaattctctatcaagattcatatagaaactcacctcattatgcctattttcttccaagagcttctgagtaaaacattagagatctgttacaaaaggcttgtcgtactgctttctctttgtattcattgatgagatctgttacaaaaggcttgtcgatagctaaatgtgtatgtatcagtttcttgcttgcttttttatctgggaaatttatctaacaattaccctgaatatgtcagcttgtaattactttgaatatggtcagatctcctaataaaataggacatttataactagatttgtttatgcatctctgcttattttctttccaatgttgaattatatgaactggctattaatctgatttaatctccattctctttgcagaaggaaggcggtgttc

SEQ ID NO: 8675 - DNA, 907 bp, Zea mays
  Intron number 2 from transcript GRMZM2G067299_T03 (locus G RMZM2G067299) derived from phytozome v7.0 (chr-ID 10; pos 146652422 to 146653328 reverse strand)
ttatcctcagctacaccggctcgtcgccctccgtaagcgctgagtaggttcttactgagtgtgcacgcatcgatcacttgattttaggggctcaatgtgtgattcacgggtgccgccattcgagctccagatccagtaccgctcgagcaagtgataaaacatggagcagggacgatcacgtggtcacttgaaaattatgtgaggtccggggcgacgatgtacggcgccccggatctgacaaattaagctttcgttgcttttccatgattgtgcattttgtgagcatgcactgaatatgatggatatgtttggaggaagcattattccaatttgatgataatggtgttatttacacttgttttcagcttggcaaggtactgcggctcaagaagattctaaaaaacaagtcgcagcgggcaccaagttgtattgtattctcaagtcatgagcaactcctgtggggccatatcccagaactggttgagtcggtcaaacaagattgcttggctcaagcctatgcagtgcatgttatgagccaacacctgggtgccaatcatgtcgatggtggggtatggttcagattcagttcatttatgtcctgttattgtgattttgattggtaacatattgacaacctcgacacttggggtcagattcagttcacttatggaagaaattggagaattgtgataatttatctataatcacccctactgaaatagaaataacatggcatcaatgtgcatgctattggattttgacacgaatatgctttattctatcatatgttggtaattccagcaggcagcaggcactactctttggatccacgtgacttgacaaagaaatcatgccatctttccacaatgcaggtccgtgtacgtgtttctagggattttctggagct

SEQ ID NO: 8676 - DNA, 683 bp, Zea mays
  Intron number 1 from transcript AC225191.2_FGT007 (locus A C225191.2_FG007) derived from phytozome v7.0 (chr-ID 10; p os 126853576 to 126854258)
ggcaaatcttgcagttgctggtaatcacattacaggtacaaagtctgcactctcacaccttgatgaatctgtgagtggatcagtcagatttggggatggctcaactattaaaatatgtggtttgcgagctctagttgttcagggaaagcaaaatcagcacaaagtcttcacaagtgtttattacatcccacaactgaagagtaatataataagtcttggtcatattgaagagggtggatgtgatattagactgtttaatgggaggttgagtgtactagatcctgaaaataacctgctaatcagtgcacctcgcactggtaacaggctgtacactctgaaactagatgctgattcagatctcaaaagggactagaattgtttcatgcagatttgtgtgggcagatcagaccaaagacagttggtggaaaatcctacttcctgcttgtagtagatgattacagcaggtatatgtgggtagatctgttgaacacaaaggatcaggcattggcatcactacagaagataaaacaaagagctgaaattgggaggtattctggggagaagcagtaacaactgaagtggggtggaattgggacagtgatgaaaatgttcagcaagctgacagaatctggtccttgtgaattccagtttcagtacactgtgcctggtcaggtgttgcagca

SEQ ID NO: 8677 - DNA, 484 bp, Zea mays
  Intron number 2 from transcript GRMZM2G015741_T02 (locus G RMZM2G015741) derived from phytozome v7.0 (chr-ID 1; pos 2 5692008 to 25692491)
ttagttcaacaacgcgaaaaggaaatccaatttcggtaagactttgtctgatctccatgcgtctcgtggtggccgccttacccatttttctagttctagtaatgtggtttgggtcccaggggtctcttcctatcgatccccatattctggaggcagtcaagggaagtttcgtacggcagggggtgcttacaatttgccggctcctggggttcgatatgcccgttttcattattattctggcagccaaaatattctataaaatactgttttggttgtggggaatttgactatgtccgggacatacaacaatattgttttcgatgtaaggaaccttacgaaaattccaattgaaaacaatattgtttttatttatgcagctgttttttgagtatgggaaacgtcctcggttcttcgattcattttccgatcggtaatatttcctggtgtaggtttctcataggaaaccgaggcccaccaaccgtat

SEQ ID NO: 8678 - DNA, 888 bp, Zea mays
  Intron number 1 from transcript GRMZM2G043749_T02 (locus G RMZM2G043749) derived from phytozome v7.0 (chr-ID 10; pos 66014355 to 66015242)
ttgttcctctgagcgacggcgagtcggcgaccgaggtggggttccgagcgccccagcccgtggtggaattcgtttggtctggttgttgcggtaacagccttccaccccccccccccccccccccccctccccccgacacttctgctttgagtgctgggctgcagcacctgatgcttaggatatccagggtgccgatccgaatcgcagcctcaacgtgggcaaagcactggacccgcagtatctaccgctgccgtttcttgcccgtagtttgtagtaaaaattacatgttgttgccccttgcccgcccggggagttctgctcgtactgcatcatcagaggtgacaggtactttgactctggcgctacggtaaacgggtaaagaacagtgacttgtagttactgtgtcatggaatggaaccgccgtacttggattgtttgcaggatcgaattgagcttggatggaatgaccaatctatttttcagtgtgttactctgttggcagtgcttgttcgcaacctattttcatacgaagtttctacttgcttcgttgaaaaagtaagcgatgtcaaaaggtgtaaaaacgttgaaatcgtgttggttcttgtcactgtagggatatgttctggatatgttctggatatttcgatattggagggtgccattaacaaattgatgagtttgacctccctactgttaccagtttgtatgactgcataactgttgtactgtcatgttctggatatgtttctctatgaccgccactaccattaatggtccttcagtgtcatctctacttttttgttgaatgatgaatgaatggctcacagacatcatttggttttattgcttgtagggggaccacagaagcattagctgggtgaactcttt

SEQ ID NO: 8679 - DNA, 667 bp, Zea mays
  Intron number 1 from transcript GRMZM2G153476_T02 (locus G RMZM2G153476) derived from phytozome v7.0 (chr-ID 1; pos 2 65175952 to 265176618)
ggggccgcagctcctccgcatccttccccgctaaggttagtgccgccttctgctatacccctatacccccctgcgtccagggagcttgtctgattggggtgtcttgtttttctaaccctgtacggccttgttggaatggggtgtaaattagttttttagtttcactctaatctatatcaatacatattgattgtgctgaatacgagagtatccaaaaacaaggcctacttgggatggtcgtgtcaggagcgttggaaggatggtcttctgtgaactgctaattttcaatacattggtaggaaatggcgcgtgttggttcatgcatatgaattttctagcgcattgtcagtaatgctagtgtttcatggtacagcagtatgactgattctagtagcaaagaaaaggatgtttctttagacttttgatgtggatctgaaattctgaacctgattataggagctgttgtttattatcgctgttgcattgtgcgcacagcctgaatacgacacaaacatgaacttcgatacatcattaatttatccccatctgaatgacccttcatacccaggctcatgttggtggtttattttgcggtttttgattgtgctgtatgttgggtggcctgacagaagggaggaatcggtcacggtggcttgcggatcgagtg

SEQ ID NO: 8680 - DNA, 655 bp, Zea mays
  Intron number 2 from transcript GRMZM2G173317_T03 (locus G RMZM2G173317) derived from phytozome v7.0 (chr-ID 4; pos 1 4349377 to 14350031)
aaattggttagttttctttcaggatttatattatgatttatcagtgttcaacgtaattaatgattgatagaaggatcctgataacttataatctttagacatttaaatattctgaaattagtaatgttctcattatagattggcctgcaacctcatacttcttcctcatggccaaaaaagaaaaagaaaagaaaagaagtccgttagaaacatgttatctgcactggttatttgttattggcagaggtatttgctatgttatttagtagggctggtacaaatgattgtttcaaaattactttgatgaaatcattcaattttgaatgaatgtcaactgttattgggtttggctctgcagattagattgctcaaaatgggttaatttaagttgacattgattagttaattttgactgaagcacgttgaaatctttattggtttaatttacaacactattaatgtgctaacaaatttctcaaatcgaactgttgagacttgagagttgttcaatcgttcaccaaactgttctatattacaactaacgcctctactctagcacttttttatcttctgtggtgcattcattggcgattaacagttttgaagtttatggtgacatattggcatgtttaatttttttgtttcagccatcaaa

SEQ ID NO: 8681 - DNA, 621 bp, Zea mays; identical to SEQ ID NO: 7540
  Intron number 1 from transcript GRMZM2G038165_T01 (locus G RMZM2G038165) derived from phytozome v7.0 (chr-ID 1; pos 2 6119825 to 26120445)

SEQ ID NO: 8682 - DNA, 952 bp, Zea mays
  Intron number 3 from transcript GRMZM2G041310_T03 (locus G RMZM2G041310) derived from phytozome v7.0 (chr-ID 4; pos 2 36167709 to 236168660)
ctgaccacggagtcgacgacgagcttcggagagaggttccgaccagtattctcctgtatttgttactacttactagctgtgtaaaattgtatttgagtaatcgggcttaatcgttactggaggcgagaagtgctgaaaattgaatcagacagtctctttactgccaccggttgttgtccgttacgtttttagatactcaattcaggtttatgattttacagcatgcttccgattatcatgcagaaggttcaaaccgatgtgtagtgtgtcatctaggtttagctggcaggtgactatctggacgaagctatgacccctgtttgactcatagctgaccatcattttaaccatagtataagctgcaccaagaagacaacatttgccgataagaaagacagagtttatgttttcttttatgaaactggaatttctgctacaatcaaattgccactgacctgtgtaaattagtagaagcacatccctataagtatttttttttgtcgacatgcatgtagaaactgatcaaagctctatttttagttcgtgttaagactgaatgtagcgcatcctcccactggaggtgatttcctcaccgtacaaataacgggatactctacatatgttcatgtgtgcacagtcaattcaatttcaacttctaaagaaaaaaaaaacccaaggcattgtgaatgaaaacacaataagatttggcgtgtttgttgcatgtgagtacctatctctttttgagaatacttggtctatatacatgtgagatttataggaaaacatatctttaaatgtttaacgaaggtatattggttaatatgcataatcactattatctttcagcttttgtaattctgctgtattttgaagtctcatgcaaaaaaaaaacatatctcattaaaacgtgttctatggaattccatgacaatcaggcaaattatctcaaatc

SEQ ID NO: 8683 - DNA, 785 bp, Zea mays
  Intron number 1 from transcript GRMZM2G090313_T01 (locus G RMZM2G090313) derived from phytozome v7.0 (chr-ID 10; pos 137905169 to 137905953)
atcagtttgacacattacaccaacaagtccaacaggtaaatgtgctgattgctgaagatgtacatggaccatgcacttttaataagcaaaccaatgtggtaataccacttatgtttgatataggtcaaattatcaaccagaaaaggcacattaatgagtgcttatcattcactgatcgcagttaatcttcagtaaagttgtctttgcagtgtatgaatatatatatgtatatatattttgttttttcaagaagaaatgtttggtgaatctgtaaccagctaacctgaaccttcttattttgttagtgacaagttcccttttattttacatgaggttcatgtttgcttcataggttatatcctccactcctttggtgctaatgcatacttctatctaccatcatgtagagcctctgtcaacaaatacatttacctaattgttgattatttgtttgttgctggtctttgtcataacatttgcactgtatttcctaatagacagtgctgcagctgtttggttgcatttttcagtatactattttatattaaatgtgaattgatgcctattttattgtacagtcacaagcctttttctctacaagttcaatgaaatttgaatatatccacaatgagtttctcttagtcaaatgtcttgattatttttttgcacgccaagtgatctagtggctccttggtgacttctactctagatgtatgttcaatacaaaacctcactccgtggtctgaaaatgtcaacatttttcaggccgttccgtttcttgttgg

SEQ ID NO: 8684 - DNA, 924 bp, Zea mays
  Intron number 1 from transcript GRMZM2G336824_T01 (locus G RMZM2G336824) derived from phytozome v7.0 (chr-ID 1; pos 6 6388566 to 66389489)
agagtattccacctgcaaccgctgttttcctcaaggtaccatccgtcgtcactgctgactgctccctcctccatggctccatttctcaatgtgtttgcattttgagatccatggtcaaacttcaaagttttgactatcgttttgtcttgtcttgggcgagatgcctctcccgtccaaaaataatttaaaattttattttacagtatagagtaacgatatctataacaccgaacatgcatactataaaaatatattttatgatgtatcaatgatactaataataatgctatattttaaaagatttgttcaaataaaatagtttgactttagaacaactctataattttattcagactatgttttgtagggatttagatataaatcccctcataaaatattttgggtaatcaattagaatcagtttataaaaccgttttgtttgtgtgggtggattcctatttccacaaaatgcattttatataaacaatcgtataaatgaaaataagcttcaaaaaaattctgaacttcgagtggacaagaaaaaatttaaatataccctattatattttgttgcacttagaaaatcataatttaagaaaactatgatcactagtgtatagcaaacactgaatcgtcccgaaactagtctaggaacttttgacatatatgtatatagtgcaaaatagaagagtcctttcaaatgtttctagaacaaaacactatgcaacacttctatttaatttggcagcgattctaatgttccaatattaccaaatgaacccttaatttgggacgaaaaaagtagaagtaaatagttctaacatcataaacatacatgttattatctttgaatccaaacaccaagaacccttttgttcatcatctatcaattaacttgatgaaatctatgccagaaaactctac

SEQ ID NO: 8685 - DNA, 692 bp, Zea mays
  Intron number 1 from transcript AC233898.1_FGT004 (locus A C233898.1_FG004) derived from phytozome v7.0 (chr-ID 10; p os 10394254 to 10394945)
ccctctccgcctcggcctcgtggcgccgcaccgtgagcgttgcctgccgctcccggttctttgcttgctgcgggcaaagatttcgggttctcacgtgccttttgtctgcttcttcgcccaaaaaaaactcccggtctcttcacggggcgaatttcagcacgcttttcctgcttccgctctgcaaattcataggatgcgtcggcaatgtgttcttgtttcgtcgggtcgtgttcttgtcgtgagttttagctcaacataaaacaaatgcttcttgtttctcgggccgccctgtgtttcttttctcgccagttggattctggtgcgcatttgttcagtatcttattatcttatttaacaattagtatttcttcgatgctcaatagatcaatttactcgcaagtagcaaactgtctcatagctgtatactttgttaaacaaggaacctaatgcttgcagtttaagcctctttgttccaaacaagacaggcttcgaaatcggataccatcacctggaagtcaatcagtaaacttctgttattcagtttttttaataacaaaataggccttacgttcacatgtaggttaccttattgcattgcctcgttttgtccgttgtgggaattaatctttgatcatttatcagatgattttgctcttaaaattaacaaattatcgttttgtcatatgcagcta

SEQ ID NO: 8686 - DNA, 571 bp, Zea mays
  Intron number 1 from transcript GRMZM2G178906_T01 (locus G RMZM2G178906) derived from phytozome v7.0 (chr-ID 10; pos 112685933 to 112686503 reverse strand)
gaccattatcgcctccttgataggtaacttttcatgaactttagtttcctttatcttcttgagcattcacatcattttgttcgaaagtaggctcctcatttttcacgaaggtgtttcattaattttgtcttattttgcaatcattaacttttctgcagctttagttctttacattggttaactccatcctcctaataatattgtaaacatcaggagatctatgtccttgagaatgtagaatttgtctcgctcatacgaatctgtagctgttgagttaaagcattaaagcacaagccattgtattaagttttgattgggattgtaactgggaccttgggaagacaataaagaaactatgaattgacatgcacgctaaaggagattcaacttagatatgctaccccccccctttcatttcctatatattctgcattttgaaacaatatctagcaagatccttactttattcttattgtggatatggaagttccgtatctcgtaccatgcacatgttttggttaccgatgaaacatcaacatgtgttcactattaagagttctttgtaggctaa

SEQ ID NO: 8687 - DNA, 796 bp, Zea mays
  Intron number 1 from transcript GRMZM2G344187_T01 (locus G RMZM2G344187) derived from phytozome v7.0 (chr-ID 1; pos 2 41295044 to 241295839 reverse strand)
tcaagcacaaggcacggaagacggcgacacagagcgtgagagtcggcggcgtgggcaagcccatcaagctgaccaggcccggggtgggtgagttccaggcggagaacgacacaggcagcttcggcgtggagatgcggctggacacggtgctccagtacaagggccggtcccaccccaccttcacgcctcctcgcgtcgtcgcaaccgccccccgaccgatcgacccctccccctcggcgcggcgaggcgcaggtgaggctcgtcctgttccgcggcttcttctgctttggtaattttcttcttccccaacgccatcgtccccagcgagcggcctcacaacagcactaaccagggagggagccctgtccgttcccgtcgtccccagcgagcggcctcacaacagcagtaacccaacctcttcacgctcttccgggactgggggtggcgggatcctcagctgctaactccaaccccctttgatttagtttcttaataattaaaaacgtgataaatatgtccccctccctctgttccccttcctcccccgtgcaattcccacggccgctgcatccagttagttgcgttgtgtattagggaactccacgcgggaggtcacatctgctcgtctcatttatatctttctttccttcatgtgtaattaactgattgtttcttcaagacaggagatttgttcctcttcttgcttctctttttccaagagattgatagctattgtagtgttgtgtacttgtgtgtgctttgaagaatatttgtaggagtggagaagttcaattgg

SEQ ID NO: 8688 - DNA, 718 bp, Zea mays
  Intron number 1 from transcript GRMZM2G329119_T01 (locus G RMZM2G329119) derived from phytozome v7.0 (chr-ID 10; pos 115716687 to 115717404 reverse strand)
cttcacaggtatagatatcattgtcataaacatactgggttgtcccaaaacattaggctacacatatttcaaaatccaaactttgttatcttcgactaacaattagtctaattatatggaaagtttctgctacaatagtgattacattggatttgtatagaaatattttatagcaatcaaacctttgttagcacaaatgatatatgtaaaagagaaatccgtgggcaaagtatgaccttgaggactgcatcaagccaaaccgcaccttatactctaagccatatggaccacccgctcgatccgcccctgtgaccgacttgggcgattaattgcgattgatccaaaccgacttggacgattaatcacgactaatcttgattaatcagacgacttgaaaacagtggttgttggctccaaacccatatccacactcacctagccaacagaacacacatatctctgtgttttatactctatacttataaatggaaattgtatcaacatacggacatggacactttgctagtaagatattatttgccagtaccatgtttatattacattatagtaacattttattctatatttattttgcacagctttcatcattattaatacaattgtggtcaaataagatatagtgacttaattgtcttatcaggaaattgtgaatttattactctgtggagaggctgttccaaatgtatttgatggcaag

SEQ ID NO: 8689 - DNA, 954 bp, Zea mays
  Intron number 1 from transcript GRMZM2G402817_T01 (locus G RMZM2G402817) derived from phytozome v7.0 (chr-ID 1; pos 2 25927379 to 225928332 reverse strand)
ggagctcgccttccgcgtcgtcagcgtgagcgcctcttcctttgattctcttctactatctgtgttgttcataatcctcataacaatgcaccgaactatatataatgtacatcactagatgttttcgatggatgcccccagttggttagttgcatcatttctcatttgtttgactctgtccactgtaaaattttgtgttcagaatatggttttttacctgttcccactcatggtgtgtttgaaaaaggaaagttctttgtagtttttggattctagctggatttggatctaaattactaacgatttgagttcctattccgtggtctaaacaggcactgcatttctatgtaagcaattttgatcagggtatcctgtttattcattttcattctactttccagttttttgttcttctttgtcccttttgtggttgacactgatgacgtgatgcgggtgtagtcccacttatctattctgttaagtaatgttttctaattgcttgaactttcctgtgtctgtgtaacattcaggtactatatattttagttctcttgtaaactggtaggagaaataatccgctcacatttcatttcaattgaaatggaaaaaaacacgagttgattctgatgtcttatggtccacgatcaatcataggaactaaatctctgtatccatcttcctcttagtatggactaagtttaccttcctgacaataacatattaccttgtgatgatgagtattgaataacaacgtactaaatgaacaatataatttccttgtcaagtcaatcagaacattttgttttttattttagctttgaagatgtgatcccttggcaactttgtgtatatttcttttgagctgatttcatcttttcaagcaagtctcatcttccttctccatatttcttcggcacaggatattaacaaaggcccaaagaacaaaccatcaat

SEQ ID NO: 8690 - DNA, 422 bp, Zea mays
  Intron number 2 from transcript GRMZM2G068525_T01 (locus G RMZM2G068525) derived from phytozome v7.0 (chr-ID 1; pos 1 78417485 to 178417906)
ctaacattcttcttgacttcaaatttgaatataaggtatgctctgagtttttcttttctgttctagagttaatagctgtctgtttttgttaactgaaaatgtatttatcacacaatgcttatataaaccacttgattaagttatattatgttaggacattttggcagtccactaattatatctggtttgatgttgttataaagtgatctctgctatctaatctattttggtggccgtaaagttttgcttgcttgaaatttgatcacattagttgaattttgtctataaccacatcagatgagaaattatacagccttcttgcttaaatgtacagaccaccgtttaattttttgaactttattttatctaacaattgtctctctacaggttgctgactttggacttgcaaagttcactactga

SEQ ID NO: 8691 - DNA, 372 bp, Zea mays
  Intron number 1 from transcript GRMZM2G149932_T01 (locus G RMZM2G149932) derived from phytozome v7.0 (chr-ID 10; pos 147539900 to 147540271 reverse strand)
gtccagcggccgggatcacatcttcgtcctgacaggtatgaggtatccagatgttatcaacaattttgatccttggagtgcaagcttgtgaaggtgtccgataatcctatatgctttctcggcatcagttatatattgtgtacttgtgactataactggccatgcatgtgtatacatgcaaatcttaatagttatgttaatgcaactgttaccatggttgactgaggttttcctgcaaaaatccaaatatgttttagtgtgatgtgttctgtttatgtgttgctgaagatttatctgcgtaccagcttattgttcttttgcgtgctcaggttatgttaaatactgaagcattctttgacagaccctgtggct

SEQ ID NO: 8692 - DNA, 842 bp, Zea mays
  Intron number 2 from transcript GRMZM2G122148_T03 (locus G RMZM2G122148) derived from phytozome v7.0 (chr-ID 1; pos 2 95060718 to 295061559)
agtatcaggagagagtccacgacttccctgacgtatgacttccacgattcggccgtcttggctcgcatatgtaggaacggtgctcctctggaatccggaaaggcccgggtcttgaagcacagtattatctaggtttcttgccttctcgggtttcagtttggattttcctaatattagagaatggatgaacaagtaatacctagatgggcagaaacgagtaaagaatattttggtatttcgacgtgctgtgttctttttccactgaggcacttacattatgttatgcaaaacgcagcagctatggttcagtttagtaatcctccaattgttaaactacggacagcttagcttccccatgaagtatgttgcgccaaactctgcaaagtataataatgaataagaaacagagtggttgttaattcagtacgaagcatacttactatcatgatcctgtaatgggcagaggaagatttttatatcgttaaatatttgggctggactaattgatgttcatatttggttaggggcttagcatacttttcaaaagtatatgtatctggctatctgttgcttgctcaatatgctgctacattcttggatgcacttgaattttagcctacgttagagttcatggtgctgtgtcagtaaatccacatgcttaaattaaaatggagtggctatttcagttctactatatcaaaggttgcttggcttataactattgttcaacaaaagtgatgtgagtttattgatttcattttcattatggtcatttcttattgcattattatatttttctcaatctaggttgagccattacgcagtgaaagctgctgacttgt

SEQ ID NO: 8693 - DNA, 865 bp, Zea mays; identical to SEQ ID NO: 8584
  Intron number 2 from transcript GRMZM2G014004_T01 (locus G RMZM2G014004) derived from phytozome v7.0 (chr-ID 4; pos 1 96544500 to 196545364 reverse strand)

SEQ ID NO: 8694 - DNA, 332 bp, Zea mays
  Intron number 1 from transcript GRMZM2G149932_T02 (locus G RMZM2G149932) derived from phytozome v7.0 (chr-ID 10; pos 147539940 to 147540271 reverse strand)
gtccagcggccgggatcacatcttcgtcctgacaggtatgaggtatccagatgttatcaacaattttgatccttggagtgcaagcttgtgaaggtgtccgataatcctatatgctttctcggcatcagttatatattgtgtacttgtgactataactggccatgcatgtgtatacatgcaaatcttaatagttatgttaatgcaactgttaccatggttgactgaggttttcctgcaaaaatccaaatatgttttagtgtgatgtgttctgtttatgtgttgctgaagatttatctgcgtaccagcttattgttcttttgcgtgctcaggtt

SEQ ID NO: 8695 - DNA, 854 bp, Zea mays
  Intron number 1 from transcript GRMZM2G129563_T01 (locus G RMZM2G129563) derived from phytozome v7.0 (chr-ID 1; pos 1 81500938 to 181501791 reverse strand)
gagaataaggtactccagcccttcctttgtctcgctgtggttctatgcagccatggcggtgggctagggagagttagttttccaacgatatatatctggatgtcggttggacttgtgttctcccacgactaatctggtgaaggcgacgacgatgagttcgatgacgtactcggcggcgccaatttcatcatgtttgcatgtggagttttagcagtttactcctcttttgcaaaagtgatgggtatgaggatgacggtggtgaatggtgagatggccatgttcgttcagaccggagtttgtttctgtggcatatccatttgggatgatgatcctagatggtggaatttatggctttttcaaggtttcttgtctcccatcaatggagttggagtagtttggtttatttttgtaatgagaggatgtaacatgctttaggcgccattcggttgttacggattggtggatcggaacgattcctaaccggattgtttctctaatttatataaactttgattagctagaacgattccgggtgcaatcggcacaaacgaacaagccttcgtatcagtgaatttttctttgccacaaaaagtatcttgttgtttgtacagcagcattttcaaaggtctaggaatgtgtccatacctgaaaaagcagagtagcttccctgcccaagcaatgtgttcgttctacaatcctgcaacactatgtattattagatttaatctaaaacactcaatttactgaagatgattgttaatgtatgccataacaattatatataaactattggtttctaactcccatccttttttttgttttcagcagggggcaatcttagggagcacctacac

SEQ ID NO: 8696 - DNA, 618 bp, Zea mays
  Intron number 3 from transcript AC193625.3_FGT010 (locus A C193625.3_FG010) derived from phytozome v7.0 (chr-ID 4; po s 12109046 to 12109663 reverse strand)
gaagctcagtgccgctggggccccaccagtgaaaggtgctcttgttgttcttcctagcgtatgtaaaggagataaattcacatgtactacatatagttgtgccttttatatgatatgttcttgagtaactgaacacaattcctgtcatgttgctcatcaatgatgtaatgctttctggaagtaccaggtgttgcattaggtaaaattttctattagttttcttcctcaataaaagggtttagcttgttacaactaaattatttcttacatccttttttcgtgtccatatattttgcctttctttagttgttagtttacctttaggacatcttgctcaaaacttggaatctttcttgtgttaaaaagacacaattgcttttattatcttaactaaatcttaatattcagatgccactaaagtataaatgttttcttttgatttattgacatcatattgaaagagctctttaccactttaaatttgcaccgtattcaaagacatacatgacattttctttgtttattaataactactaatcttcagaatcaaaggtactatcaaagcatgaatttcctcctaaattattgtcttcgttgaaaatatcaggacatctcagg

SEQ ID NO: 8697 - DNA, 620 bp, Zea mays
  Intron number 1 from transcript GRMZM2G458689_T01 (locus G RMZM2G458689) derived from phytozome v7.0 (chr-ID 1; pos 4 1533398 to 41534017 reverse strand)
tcctctgaatctcgcccacacaatgtaagaactaattctactatgaaggaactataaccttaatacaattttacagttttatcaacctaaaacgttgaaagttcgcgaacatcaaaaaatgaagtctgttggtgtacaaactgaattgaatgggtggatgaaaaaaagaagaaggtccatttgcttccttttgttatcattgatagcttccaagattcagcaatgatgctatcctttcttggtaacatatgaagccacacgtgtttactttatagcattttttgtgttttttttgttatgatatgctaaatttcatttatttggtatgatattattctaacagcctaaaaaggcacaaatgctatatgcagcttaacacctgtgtagcgctcttttaacatcgattttacaggaaagatacatgaatagaggaaaaaacaaacaaggccttgaagtagtccagtttttgcggacgttaatgttgatggccaactgttttttttctgcatcaacaatccatggcacaaatgcattgtttacatattctaatgcaacgagtatgattcacattgttaatctaaacaggtgaacatcggattactgccatcaaagcgacaaaa

SEQ ID NO: 8698 - DNA, 833 bp, Zea mays
  Intron number 2 from transcript GRMZM2G076087_T01 (locus G RMZM2G076087) derived from phytozome v7.0 (chr-ID 4; pos 1 86848512 to 186849344 reverse strand)
cgcagaatcgcgtcatcgtcgagggcaagaacttggtaatatgctgttttttgttcgttccgtttgtttagtccgactgtccgagtgtggaatcgatgcagaaggtagccgtttttggttacatacgactggttgtatgcctgtatggatttaatcaaacctaccaatctgtaatagtgtgatctaggtattcattgaaattatcagaccattacaattgaaaggtggtgcattataaattgatgtgaacttttcggagttcagactagtgttgcagctgcaatcatggttttaatattgttttgtaagtgattagatgatgcccagcctttatcctgttgcactgcttcgagtctgatcgtacgagtctgtcttgtgaatatgtatagtttatttgattgcacaagacagtaaaagtgtaatttcttcttgtacatactgcaatgtcctttttcatgctttgctgattctctttgtggcatgtgcttaccatataagcagttacatattgacataacaccatctaagtttctagctgaattaacacattcaataacccaatttatttctgatgtggaactctgctgagatgaataccccaaagaagaatgtagaaactgtactttttaaaatatttcgaagatcattatatgtttattaaacatatgttgaaattttgcttgtttgttctgagtactgtcaactgcacccagcaactgtcattttcatcgtatctgtcttgtcatgccctcatgctcatcaggaattccataaacatttgaactactgccattttaggtcaagaaacacattaagcaaggggaagggcacac

SEQ ID NO: 8699 - DNA, 728 bp, Zea mays
  Intron number 1 from transcript GRMZM2G389769_T01 (locus G RMZM2G389769) derived from phytozome v7.0 (chr-ID 1; pos 1 4497441 to 14498168 reverse strand)
agatcgcccgagctgcagcaaaagatcccaataaggtaatttccttatcgctaatgaactaattgttatatacacgatcctatgcccttatattacctttaaaaatagggaaaaaaatgttaacttcaatgcttggagttggagataattgaatcacgaaaacagaaatgtgccaataaaggctatcctactagaataatgcagtccaattcaatctatcaggtaatgcaattccaaatagaggataaatgatctaaagtttgagaaaatcatgtcgcctctttattttggcattatgtgctactggccagttcatccagcagtctgattggccgggtaccattacaacaacactattctttgctccttgacacagcattcacaaaataatcattgtccattcagggagagacaaaaatgtaaatcacaatgaaaagtaaattctacaaaaatgttggattaataatgatagaacccaaacattcattacaacacattctgaagcatgacaaagatggcagtgatacttatggggtgtttggtttctagtgactaatttttagtccctccattttatttcattttagtccctaaagtgttggattaataatttttagtttccatatttgataatttagtaactaaaatataataaaatggaggaactaaaatttagtcctagaaaccaaatacctccttaaccatggtattaggccattcacctctgt

SEQ ID NO: 8700 - DNA, 1002 bp, Zea mays
  Intron number 2 from transcript GRMZM2G306945_T01 (locus G RMZM2G306945) derived from phytozome v7.0 (chr-ID 1; pos 6 4876784 to 64877785 reverse strand)
cagggtgaaccgttccaaatctgataaagcatgggtagcgcaagcagatatgcagggtttttcctgcgatattatgtttactggtgagtgaataacttttttgtttcaaccgtggtcttgaaatattggcttgctattgggcacgactagaaacaacaataatttgagtactagcattagcatatctttttatttgaaaagattataatagaggcagggtagaaacattgaattcaaatatttaatatttgaaaatgtgttagccgtgctaaatggtagtatttctgtttaagttcacatgatgccttactttttatttttctttacctggaactacagaagcttcgtttttacagataagggatctcattactggttaggtgatttagagatatttaaaaggaaattgtcacatatgatatacatatattaccatccacagctttgtttgtttacctggtagttaatctatgtatgtagttttccagttctgtttgtgcgcttgtcctgtcttcatatttgctatctcattctaaggtgcgactttgagagaggacagtgtatgtacccaagttgaatgtcataatttagattgtttttttgtattccagtgccgttagtactttctattcgatttagatgtcgataattaggatcttgtttatgcttcattgtggccataagcatactgatgtatttcacggatagactgagcattgatgtaagacagtttctatcgaggaatctttttgttttcttctaaagtttgtgtgccagtatctgctccactgactggaacaaattcattggtccaacagattggatcattagactgatctcaactccttgtttagtttgtatcgccaactgttatataccatattgggcactaaatccaaagcttcgatttatatgtgatgaagtgttcttgtatatccagtctgatttgtaattgtattactactcaatctctgaacagataaggagctagatataattgag

SEQ ID NO: 8701 - DNA, 745 bp, Zea mays
  Intron number 1 from transcript GRMZM2G078052_T04 (locus G RMZM2G078052) derived from phytozome v7.0 (chr-ID 1; pos 4 1862906 to 41863650 reverse strand)
agtgttccggctgattccactggcgacgattcgaggtaaggaattagctagtagccaaaaacaccaacatcaagttactatcaagcttgcactggcaaccatataaagttaatgagttattgttggtcccaacaatgttgagctgtgagtcacgagagggattttgatattagtcaaggctccagaagtattgtctagtggtactgcttgctttatgtggatggaagttaagctgcctgcctgctgctgtatgtttacttgggttgctggataccagtcacaataattgttccaggccttagatttaaaaagcagggtggcttcatatttgttttggactgcgttgatgttattcttattcagtgcaaagatctagagatacagagtggcatatccacagtctgatactctgattaagttacaattatctatctagtggctgaagatccagggatacagatatctatctagtgactatcttgtttctgttattactctgtactgagtggctttatgcctctatttttgtctgttgatgttggtcatcgttcatattctacttcagtatcttgaaacgtaagtcattatgtatgatctggtaacttgacagtagtaattgcatttgaattttaagaaatgtaatcaagtttcctcattgctcaaaattgatatggtcttcattttgcaatgtctctaattggtatttattttttctgtgattttgcatgatattttgtgatcagca

SEQ ID NO: 8702 - DNA, 731 bp, Zea mays
  Intron number 3 from transcript GRMZM2G388070_T01 (locus G RMZM2G388070) derived from phytozome v7.0 (chr-ID 4; pos 7 0765162 to 70765892 reverse strand)
ggactgccagaaacaagccttgctattatacctaggtatggaaatatataacctacacaagccaccttgtgtttttctttttaagttttatatacaaatttttaagaaaatgtcaagatgctctggaacaaaatagcctgaaagacagaaatacatagggagtccccagactggtgcaattttcgtcttcaattgtgacgtgataaatctagctgtaactggacatgatttcacagaaaataatatgttggattcaacaggggacaacgaaccatatcctgaaatataatgttactgctcaggaagacttagccaaaagtatgcctgaagactgaccttgtagttaacgtagaattattcacttctttgacatggctagcaaaagtttgaaacaaagattcaagcataaggaacttgtagaagtaagcatctacgtcaactttaattacctttcaaatagtcgatttgatttgttgatgctgaaaaggtgaaaccagcaagcaggactttacatgatttttacttttctagaatcaaaatttgacattggttttctttgtcatgatagaactttcccactgcatgctttgactatggtaattgtacatgcatttttttatgtacttaaattaaaaggtacacagaacctaaccaaaactatcagagtaatctgcttccgtctgctgcactatacagagctggaggtacgcaacgccttcctaggatcatag

SEQ ID NO: 8703 - DNA, 912 bp, Zea mays
  Intron number 1 from transcript GRMZM2G415785_T01 (locus G RMZM2G415785) derived from phytozome v7.0 (chr-ID 1; pos 1 99407504 to 199408415)
cttcttctacatctggatcgtctgcctcacctcctgtgggtatttggctcctttttttatttttctagttcttagcaagtggtatgtagcacgtagacaaagatctaggcccggggtcgatcagtgaaggttggactgtgtgttacatcaaaaaaaaaaagttggactgtgtggattccggcatcttgtcatatccaatccgaaaaatcattcactaaaacatgtaggagtaagttttcgtggtttagtcggactcctggcacaatcgcatctgcagaggcgattcagcggcctgatactctgatgaatgggcttagccatgctgatgcaaacataacaatcttttctgtttgctgtgccgttgttgcatgcacctaagttattcgataaatgccaatgagtgtttctcaagtgatggaccattaattggtcctgtcaacagtccatggcaagcattttagttgagaagtaataaaagaaaatttgctacattagtgcaaggaggcagtacaaccggtagtagtccgcacttgtggtgaataattgataatactccataccgtctatcggaacatgttgcaaaacttgaggaaaatggtacatttccaggtcaatgactccgaggaatgcatattgcattgttttcgccattgtcaaattttctaatcacacttgactttttccctacattttccagtgcatatattttcattatgtgtttatccttgtttctggaaaattatataccatggtattgttatagaataaatttatagaacatttgctattgaattgcataggcactgatctattcgtcttgccacatcaaattagttctatttgttgttgaataacccctcatttttgtccatcccagctctgccaatccagtcgctattcccttatatatac

SEQ ID NO: 8704 - DNA, 700 bp, Zea mays
  Intron number 3 from transcript GRMZM2G079891_T01 (locus G RMZM2G079891) derived from phytozome v7.0 (chr-ID 1; pos 1 858755 to 1859454 reverse strand)
tggtacaaggagaaacataccaaagttcgaggtaagacactggatcatttgaactttctagcgttgtttagtttcatatttctgccatcatgcatacttaaattgtgaaatgtgtatatgtagttcttaacatatgttaagtagcatgtggttttagttttttaccctcttctaaattgggatatagtctttccgtacctttatgattgaggttatagcagttttttgtgctcaaattaacaaaaaagtatagaataaccacatgcttctattaaacctgcctttttctactttgcaacttaaattaattctcctaaaatgcatacatttgcattgttcaaaactataaatttgtcgattgttccactatttaagatacatttttagatactgtgattgatctcattaaaccatgttggtttctacaaccaacttaacagtcaaggaaaatttacattggtaccggacgcagctggtggctactagggcacgccatgagcaaacacagccagcttagtgacttgatatcttgcaataactctattggtgctctctagagttattgcagcatatcaacttagattggattctctctttgttgttctactatcttcacttagttcagccacatgtcgttcataatgaaatagctttggttattgcagaacttttggtagacatagcgggtcctagtttggcc

SEQ ID NO: 8705 - DNA, 734 bp, Zea mays
  Intron number 2 from transcript GRMZM2G476902_T01 (locus G RMZM2G476902) derived from phytozome v7.0 (chr-ID 4; pos 1 85774569 to 185775302 reverse strand)
attatttgtcaggtgttcctagaaagctctcagaggtcagaattgttctttgatttgacaggtgaaaattatggatcctttctttaccatctattacttatacagaaaatatgttataattctggcaaccttacatgatagtgtcattggtgttcactgctaaactgcgcagctgttatgtctgccaatcaaagattcatgcatttagtggaatgatactaatactgttcctgtcatttcctggcagtgatacactggtgcacaggacctattattttctttattgtttttgtgagttttttaagttttttgtgctagctcttagcatgtttggaagcattgtttgtttttaattatctggtcagtgttcatgcaattagtaagtagcataggcacataggttctggttacctcttgctgttgacaattgacatcacgattcctgttatgataaaaaattttctgttcaaatatcaaacagatctgacatgaaatttcttgaagtatttgactgagcaatcttatgtttgttatgttttctttgtcatataattttttccctttggattatgaaatcctcaatgaccggttataatttggaagaccagttataagctggaaggtggtaaaattgagatatactcggcttatttgccgttgcacggtaccatgtaatttagttacatgctgttatatcagccactacctctgttccttagagaggtgcatagcca

SEQ ID NO: 8706 - DNA, 597 bp, Zea mays
  Intron number 2 from transcript GRMZM2G382247_T01 (locus G RMZM2G382247) derived from phytozome v7.0 (chr-ID 10; pos 18512570 to 18513166)
aacgtaaaacccaaagatattcatgtaattcagataatcatttgcaaattcaaataagtcgtcacacatggagaaacatagactgaattagcccaaaaatttcaggtacatacttatcttatggaagaagtcatggtcagattggactgaattagcccaaaaaaatcaagcaaaccatgcttgtccctctgaggtggtctctgttctattggatcttatggaattggatgctgcaggctttgaaagcagtgacatgcaagaaactgatagtttgtcttttaaccactcatgaaaactatcatgctgaaactttcagagaagtaaccaaggttgctgcttagtgtactaaagtctgtaattgaaatgattgacgccaaggaagatctcgcagatttgtgacaagtaagggataccatatgagtatgggaaaggatgcttggaggagcgctaagagcagttggaggagatcagaaaggtgaagccaactcaagtttgtatatttgagatcagaaatgttatttgcatatcgaatcttgttgatgtctgtcgcgagcagggtctgctaatgattaactacaggttgtatatttgagtgtg

SEQ ID NO: 8707 - DNA, 968 bp, Zea mays
  Intron number 4 from transcript GRMZM2G170313_T03 (locus G RMZM2G170313) derived from phytozome v7.0 (chr-ID 4; pos 1 78467029 to 178467996)
ggggacgggcagatccagatttgaagagtatagcggttagtttctcgaatgctatttttagaagacctgctcgaattatttcatgcatgttttacttttacaacacttgttcaaatccttctcctaaaatatgtttaaccatgtatgctgagaaaagggcaacccgaagtagaaagttgtgccttcctcctatagttccttcttcctgtgaattcttcccaagtaagcttgagttttcagtgatgcaactctgcttaaaatgcaattcaccaacatttagtaataggctaatagcaatatctaattaagtcttgattcacgagagttcatctggaacattcctgatggatcattaccccatgcctacgaattacagaaaattaaaatttaccgtgccacacttgaatggaaatggcctggtctggacaagaaaattttaacctgtctgtaaaacttcttgatgcatttaaacacatagttgtgaacgatgttggtccaatacaaatacaatgatatagaactaaggtgctgtttggtccgtgtaattgtaacgtattccgatttcagctgtaagtgtttccatcttattttgtttggtgccggccgcctgtgtaatcggatacaaagtaatcagatacgggacatatacttttgttaccgctccttcggctctgtaatccgatttcagctatttgactttgttagtgacgtgaaccaaacaaaatccgttttcgcttacgctgaatcaaatcacagtgtcatctgattccattgacgttagtacgttacccctccgtggctggaaccaaacaccacctaattctttggtgatatatgtgcagttgtattttacatttacttctactatatacccaccaataataagcagtgagaagccatttttttttaacacccgggacctgctcgtcaatgtatatgcataactaacgcggatgttttcattgcag

SEQ ID NO: 8708 - DNA, 845 bp, Zea mays
  Intron number 2 from transcript GRMZM2G129907_T01 (locus G RMZM2G129907) derived from phytozome v7.0 (chr-ID 10; pos 1718515 to 1719359)
ccttgttgaaggatttgccaacagaagtgaaggttagtagtaactatctgttttctggcttacagcttcacactttgatggttcttcaattaatagactaggtatgtgtccgtgtgttgtcacgaggtgggagaccgtggggagcgacgcctaggctacaaatatatttttgtttatttctaaacaccaagatacgtgtggtccggtggttagtcccaaatttctagaacagagaggtgtgggttcgagtgctcgtttttgcactgttttttgtgggcgctgggcgtggggagggtgaagccgtggtagcaccagatgcctacattagattcttaatagagtagtatagattagaacagtctgcttgtcactctttaggttgtgcgtacaactttcttagctatttagcctgggattgctaaatttacttgtaattggatgctgggactattctttatgttcgttcgggttttcagttaattgtgctatgtttaccttaccaagttaccatactaaccccgcagcaacttgactgcctgtcatgtgtcctggcgtataaccaactagttcatctatctttttcgaggtagttaatcctcatgtactaagcattcaatttttgcttccttcattttcatacataaaagtattaataccatccacaaaacttggagtgtttcagttcatgaaagtttcttaatgtaatgttcagcttattgtacttactagcatctgcaatttctgcatcagaaaggaaatggtcatttgctacttgagtttggactagtgcaaaagatgtcttatttatcttatcatccttttgcagcctgtgagtttgaatcgaa

SEQ ID NO: 8709 - DNA, 616 bp, Zea mays
  Intron number 3 from transcript GRMZM5G836588_T01 (locus G RMZM5G836588) derived from phytozome v7.0 (chr-ID 1; pos 2 36818319 to 236818934 reverse strand)
cctacgatctgcctgcaaggtaagctgggcctatgttatttgtatttacacttattggaaaaatgtatatatgtgttcgccttggacacctaagctataacatttagtatgtgttatgtggttctgcaatgacggctgtgcccctttacattaaacgatttaaagttcgcagcttcatgtttccttcaaatctctagcagtgagggcaacacaagcgtttctgcttatggagtcacaacaggggttgttttgcctgttttttttatctgaatcttctgatgtagcactagtgtgattgttgtttctgattaagcaaagtatacaccttcttgtgcctgtgttgcacaaaacactgcataccacaccctgattcactttatataacaagagctgttgttgaacccatataacttgttacttcaagcaagcgcggtggccagtattgctagtaattgaagatttagtgaaagtctaacttcgctgaagctagcggttgaacactcaaagatttactcatccaacatgttgttctgtggttgtctgtattcttagttatgctaagatgcatgtatcaattgattatgcaggaaggtcatccataccgtgggccccaaat

SEQ ID NO: 8710 - DNA, 1001 bp, Zea mays
  Intron number 2 from transcript AC210727.4_FGT002 (locus A C210727.4_FG002) derived from phytozome v7.0 (chr-ID 10; p os 35332480 to 35333480)
tcattgtaatcatcatcattgtcatcctcaataaggtaatcctcttcctcaagtgcactgaactgatgatcaatgtgtttctgctccacagcgagcctaacatgtggctctacagcctcaagggacttgactcccttactaaacaaatttagttggttcacaagacaattgttttaccaaattagtttccagatagattgccacaaagaagaaaaggagataacttctaagtgatcagatgtgcacttatgcagcatgatgccgagcagcttgtgtgaaaagacttcggaactgtccttgcttcaattacttcaactggaataggaaaagagtcgcttcctcttgataatcttcctgggcttgtttaaatggatctgatgctccattatcacctttagcatccttagaccatcccctttcgttcttcgtgtttatcattaatttgtatgattctctgaaaggagtattggaacttcaaattcacgtcaacaaaacaaaaaaggtgaattttgtgtaaatactatacctctattcatcacatttgtgcttcatttcctgcgatgggaaatactctactaatcacacataattgtgtgatgggcataaaactaaagctcttaaaagaataaatacttttcagtcaagaaataaatgcatagaccagtagcatacataaataaactggatgcaaatagaaatttgattgtgcttatcaagcaagaccatgtttgcttggcatgccacactccttttgataaacctaagatactgtaattatacttgaaaagtgtgagcctatttataaacaagaaccagtattacatttgtcaaagattcagcatgagaaaaaagttcactcgagcatgccctttgaaatgtataaattattaattaaatacaaataaatcctatttatttttgaaagatgattgtgatagcctattttgtatattctttgaaatgtagttgcctctcagtggtaaacatagaacaaatagacc

SEQ ID NO: 8711 - DNA, 782 bp, Zea mays
  Intron number 2 from transcript GRMZM2G026249_T01 (locus G RMZM2G026249) derived from phytozome v7.0 (chr-ID 1; pos 2 22523250 to 222524031 reverse strand)
agagctgggagctggcagctctcactaattttcaggtatggcagttgtgctagtctgctagtgaaaatgcaaatgcacatgtgctagtctgcttgtgaaaatgcagatgcagatgcaaatggaagttgtgctagtttgctacagctgcagatgtgctagtgaaaatgcagttggcgatatcagtgttttcagaagcccagtttggtatggctgccagattttcagacagctgccagttctagcacatctgcaatttcagtttggtatggctgcttcagtccaatttagttggcttcagttatttttagttagcttcagttagtcctagtctaatcgtgttagcttcagttcagttatcttcagtttttccctagtcctagttcagttagctgcagttagtccctggtcagtaatttctgaagtagcaagattctgaaaatgcagttcctgtatgtttctgaaaaccgagcagacagaaccgagcagtccaattctgaaaatgcagttcatgtattcctctttcctacatttcaaacataccctgagagtagggtccatgttctacatggtagcatttcttctctttttgaagatagattacacgtttaacactttcctgaatacctcataacttaattcaggtaaattactgctatgtagtaattatttgattttgtctttactcttcaaggaccgagcaactgaaatcttcaagaaaattattcagttgctagcttataaactgataaaaattgcagaggcgtttctgttcaactctcgga

SEQ ID NO: 8712 - DNA, 852 bp, Zea mays
  Intron number 2 from transcript GRMZM2G082696_T03 (locus G RMZM2G082696) derived from phytozome v7.0 (chr-ID 1; pos 2 55734955 to 255735806)
gtgggttcttggttcatttctgaaaaaaacaaaaggttcggcttttcttgcttttagtgttgaatcgctcgatgacaacaaatgtgattctcttttcctcagatagatcagtatttgttagccctttgtgccaatgtcaatccatcctagacaaaggcgtgagttcttcgcgcctctcccaaaaggcatttatctggtcaacattcgtttcccctgctcggtttgaagttttgaacaccaagcggatgtctcgtagttcattcgtaaataagcacaatggtcaatggattatgttgatttttttatccttcttagtcaactcctcactttggttaggattcggatcttttgagttcgtgttaagcctcgactatgaaacataaatagttcttccactttcggcttgctcagtcaagatggaagttttgacattaattggactgaactctccgaggtcagtgctgttggttgttattgcaacattccttagttattgcttattaggtaaattcatagtgttggccaggttcaccaggtagctgcttgcatcaaaatttcgttttactgttagataaaggtctggtcaattcttggtcgttgtcaagtatgtctgttaccgaattttggcaatgctgattattcactatgcaaaaaattggcacctctgaactctgatgtttccggcttcatggaatttccagcatagaactcagatacagccaattttaagttttttattattttacaagaattgtcaagaactttttttgttgccggaaagtttgggtaagataccattattatcttactattgcagctgccaaatcttcagtgacatatttgttactacct

SEQ ID NO: 8713 - DNA, 608 bp, Zea mays
  Intron number 4 from transcript GRMZM2G082696_T03 (locus G RMZM2G082696) derived from phytozome v7.0 (chr-ID 1; pos 2 55737429 to 255738036)
agacaactgtaaggtcccgtttgttttattttattttgaggaattggaatcttactaatggaatagactatttttttaggacgtgacatttcaccactttttaaagttatcatataagtctatctcaaatttcatggagtgagagatggaaattgattctatagatttgtatactatttttccgatgtacaacttatagcacacttttatacttgcttcgctataacataaatgtagtatataaatatctctctcatatgatttaggataatatacaaatatattacatatataaatatatgaacttaattagttttgtctaaattataattattaaaatggaattgaattccaactaaacaaacggggcctaacagtttttattgtataaaaagtagattcaaacttttctttagttgattgatttcggtattggcgttctctgtgttttttttcttttgctgtgttgtttaggtttttatgtcttcaagcatgtaaattatctgtaaagtttaatctgaaaaataggcattccatgtttaaaatgctttatctgttacatatcaaatgcaggatttgtgcatacagcattcaatttcttctacgag

SEQ ID NO: 8714 - DNA, 1031 bp, Zea mays
  Intron number 2 from transcript GRMZM2G531052_T01 (locus G RMZM2G531052) derived from phytozome v7.0 (chr-ID 10; pos 71742521 to 71743551 reverse strand)
caacacatcaaggtcccatccctctccctctctcacgctcatgcttctactcgacccctccatgccccaacgatccctctctgccccttcgcccaagcggccagctgcggctcctcaccgaacgccaacagcccccagcggctgtattttcatcccaatcttgtagcccagcagtagcaaaaaaatgactcaagctcccttgttcttttaggatcaacagcaacaacagactaacacttgtagttacgtgactccactaatagtggtttacatcagctggagggttaatgtagcacttttcattggatcaagggtcaagcagtagtatgttgttctgttttgatttctacaatgtaatttagttttaatcgtcgcttaccattacaatgtagcttgaatagcaggcttggatattttaatgtcattgcctaatgtgttagtttgcctttgtcgtgcttgtgctgttgtgcaagctggagctttggccagtagatggcagggcagtagctatggcaatatgctttatttaattattctttgcaatattatttgcttgatcaaaataatttttttagatggtgagaaaacgtaatcgacctttgcctccataaaggctatagacacttatcacaactgttgtgaaattattttgcattacatagcctcccaccgtggctatgagaatgagattcaacttttggatataccaaaatcgtacagaattcgatatgataaaatatgtaaagatcccaacacatgtttcctccttctaccatagattattcaacgataagtgcatatctcaattttctgtgatctcaagtgtctgtcctgatctctgtagttgtagaagttgaaagaaacgcgaaggaaatcgtaagcatgtgaggtaaattctgcagctaatatttttcctttttagtgcctatacaaaaccatttacctttactgcattatctaaataagtttgccatgttgatagttggatagcctatttttctttgcaggttttgtttattctttcggctacc

SEQ ID NO: 8715 - DNA, 687 bp, Zea mays
  Intron number 2 from transcript GRMZM5G855776_T01 (locus G RMZM5G855776) derived from phytozome v7.0 (chr-ID 1; pos 1 17703970 to 117704656 reverse strand)
aagtaactcaaccagttgcaggaaattactatccggtaaggaaagcagcctcataagcaggaaattactatccttgttaaatattttctgccatgagcagaactattggcgaacagtgcactgcttaagccttgttcggttatttccaatatatatgaattggatgagattgaaaaaaatgaagaagaagtttaacttgtttgggattcaaacccatccaatctcactcaatccacatgtattgagagctaaccgaacaaacccttatatgggtgtctggtgctgtatagttgataataactgagccacgcataaataaggaaaggacgatttacgttgggcctataatgactttttaagcccagtccagtaatcccaccaggcagtagatttggaccaccttaggctaggcttgggctttggacggcccactcgtgactttaacattgacaaataattcaaatttatgtttaggactgcgccaaaaattttggggcttatgatcattcctgtacaaaaaaaagttttagaggcgagcagaccaaattttctcaagtagacatagaattcggtttctactatctttttgcgcagttaaatatgtccttttttgtgtaaagaaagacagtagttcgaaaatctaggagtgttctgacaggttgactctccaggtgaacctaggagtgt

SEQ ID NO: 8716 - DNA, 743 bp, Zea mays
  Intron number 1 from transcript AC190609.3_FGT002 (locus A C190609.3_FG002) derived from phytozome v7.0 (chr-ID 4; po s 194341420 to 194342162 reverse strand)
agagctcggcgattcccaggtcccgcgagaaggtaactatccctgaatcccttcttcctcggtcctccttccgtgattagcccatcagttcgtcccatccatgttctgaaaccgcgtcatgagttgttgctgggtaacaagttacttgtccggttgtataggtgatgagaaagatttctagaccgcgttcttgctgtgaccttttagtggattgctattgcgctagagattggtcagattaggtctttgtgttgctggcatccccgtgttgattgacgggcccaatcaatgttacttgtgctatggttttgtacaatctccgtgtaagttgttccggctttggattattacgtcttttgatgccatttggctctttataattgcacacagcgtacttcgacattatgctgtgcttgtagttataagaatccatatttcgaagtgtaatggcagattaagagcttaaattataaaaaaagacccaacagttgtaattttgttgggtaagtaatgaaatccagtttttaccactgcgcgaaaaaaaagatccaacattgtagacccaattgtatataaactaccactgtaagttagcttagcatgtgcgtgggtgtttgttttcttagtagtggcaatggttttttgtcatcttgttagtgttttgtagctcactgtcaagtgtcaacctttctcttagctttttttaatcatttttaaaataaatctgcagccgaagcagatct

SEQ ID NO: 8717 - DNA, 691 bp, Zea mays
  Intron number 4 from transcript GRMZM2G318958_T01 (locus G RMZM2G318958) derived from phytozome v7.0 (chr-ID 4; pos 1 08973364 to 108974054 reverse strand)
ggcagcttgtgcatcgggctactcttcaccaacaggtaccctcatcctcccccttcttgtggctcttgatttggtgttttcaaactgtcttcgtggtttgttcttgcaaaatcacataacacatggtcacaaatacactgacatcaatctgtcgtgacatgcctttatttgctagacaaaatcgttttatcccgtgtgtttgtagagcgggcaacccacctcccgctaacaacacagccacaatggcagtgcactgcgccctgtgctttttcactctcgtcgagcttgctcaacgactgggtcatctacaattgagtgaccaaataaaatcagtaaagttgcaaaagagcattacatccatatttttacataaaacatgttaccaaagacattattgtatttaggcgttaaacaacatgtatcttgcaaatttgccatcatccaggcttaatctttgattcaaatgggccaaacaaaatcatgtgactgccaacaaaatcctggcactgccatctctttttggggggtggggtcatgttttaacattcttcttacagtctgactgagtatatcctcgaaatttgaacaatttaagcttgaatttaaattgtgcatataaaaatatgtggtgattttagtttaaatctattgtgcagtttactttatacaccagaaccaaagaaactgtgcg

SEQ ID NO: 8718 - DNA, 991 bp, Zea mays
  Intron number 4 from transcript GRMZM2G172338_T01 (locus G RMZM2G172338) derived from phytozome v7.0 (chr-ID 10; pos 76325334 to 76326324 reverse strand)
aaccaacatccagaaatacttctactatccataaggttctttgctacctcatacctcatcttcccagatttcatggtataatgcaaacattgataatatttattgaattaaagaagatatcacgatgctttaactcagttcaggatgatatcatgatgtaagttcactgtaatcccctcattgtggtttattattttcgactcttggacccctaagaagcttatcatgttcctatatatgatagtagcacacatggtgctcaattatttttgcatcatcaacatgagtccaccacaattgtttttctgaaatgctatcttattgttcatcattttcagttcaatgttgcatatgagctatatttcatttcaagctactgaaacttcttcatgaaaatatctaattatcatagtgatacttaattaaatcaaggacctagtagagttgaagctgggaatggtttgggtcaaaccggatggcgtggatcggtttttgtatctaggttgatgtagtttgggtggggatggttagagaagaggcacatctctggtttggctcagagcaacatgttaaataggcttgtccaatgtgtaatggtacttcaacattagtgcaattcagtgcagatcggtgcagatcagtgttgtaatttggttggttgtctggatgcaccaagacatgcaattcagtgcagatcggttttggggagagagagtggtttggagttgagtacggtattgttccagcctatacacattcagtagcacatccagttcttagactgtttcgtcaggggcaattgatctcgcagggatttccaacaacaatgatattgttgttaatttgattcttgtgtagaattggctacctccatttaaatttatgcacgtgtacaatatagaacatcatgaaacattaatgttgttgatcactaacttgtattgttttcttttcagtttcgaagctgcaagatttgtacagaatccgaaga

SEQ ID NO: 8719 - DNA, 948 bp, Zea mays
  Intron number 2 from transcript GRMZM2G074079_T01 (locus G RMZM2G074079) derived from phytozome v7.0 (chr-ID 4; pos 1 20223203 to 120224150 reverse strand)
ttacgaagagggcaggtattccatgatgtttactcctgccaggagactatgtatccctccaaaaaaaagttgtcactgtttcattgttttgcttccatgtactatttagcttccagagatgcatgtatatatatatctcaagaactgctactagagcactaaaatgttgaaaacaattattatggtggtggacataatacagctaaagacatgttcatctattatcattgttcacatattttccaaaaatagtatttactactttcaaattcatctaaccatacagtttgattatatcccttctagatgaaaaaaattctaatattcgtagagatttcctgcatgtcatgattctgaatgcttcctcttctatctctccagcatatatatttggagccattctgcctgcttttatggtcgcaggaatttacttctttgatcacagcgtagattcacagttggcacagcaaaaggagtataatttgaagaagccttctgcctaccactataacattttggtccttggattcgtggtatgtggcacatgagtctgtcatacaaattgtttatttagagtgttcatttggttgtaagtttaacctcagtttcttgggatctcaatcacattcgtcagaccaagtgtgacaatctgtttgtcttccaactatagtagaaatgatacagatgcttggtctgtgtttttagttcagatattatggctgtttagttagtttcttttctcacggtattaaatgtcagtcctactctacggtttgcttggtatccctccatctaatggagtgcttcatcagtctcccatgcacacaaaaagtcttgatgtccttaagaggcaagttggtgaaattcaaatcgattcatgtggtttgctaacctaatcaactttcctcatacatttccatctcttaagttcagttgctaagcaaaaag

SEQ ID NO: 8720 - DNA, 715 bp, Zea mays
  Intron number 2 from transcript AC207024.3_FGT002 (locus A C207024.3_FG002) derived from phytozome v7.0 (chr-ID 1; po s 291780640 to 291781354 reverse strand)
tctcgcttttcataatctggttttaggtaagggaggttagtttcttggttgataagaaaccgcaaatccagtctttgtaaactgagatataaactgatatgtttagaaccatattaatttttataaactaattctttaaaaactgagtgctttaaacagacccttaataaaacaatatacgtacaacgattatcttttgagccgtctcagaaatctacatcgtattgcaccacatgaaactgaccatcttcaacagtgccctatctttaatacgaaagtccaacttataaaaaacattttcaacaatattctattttacaaaattctatcaaaaaaaatataggactgcaaagtgacttaaatatactataccttggattagtaatataatttattctctaaaatatatgatttagggtccaaccgttagagaccgtttttagtgtcctaaacactctaataatgtagtattttgatttttcccactattataatgtaatatgacatacttgtcctaagtatattacctttttttttcaaattatcgtttactttaatgttgtcccaagccaaacttcgcttttttacgaaatctatgaaaaatataagagtagattagtatatgtttcattttttgtgacatgttttaaaaagaatacttatttggggttataggtgttaatatattttctaaaaagattatggtggtaatagg

SEQ ID NO: 8721 - DNA, 595 bp, Zea mays
  Intron number 1 from transcript GRMZM2G139654_T01 (locus G RMZM2G139654) derived from phytozome v7.0 (chr-ID 4; pos 2 33895962 to 233896556 reverse strand)
tccgccatcggcatctctgtccttggtgcggcaaggtgagtcagcaaacgactccacatcatgtctcttggtcttctattcattttgtcgagaggtgagagaactgcttcgcacctacgttactgctgaagatccagccagcacacacagacaccatcggcgaagaagaggccagagagaggatgatactggccgtgctcttcgccaactccgatggaaacaccaggaggatggttcgtttgagttaggggagaagacgtgtcgcagccgcctcaagtaaattagtggtcggtctcccttgccatggagacgtgaaagcattagcggtcggcaccagccttcttggctagctaatcttcatcgtacccatcagttttttgagaaatttttcttgcatatatataattgttgttgcttggtttgtgggggcaagaactgtaagcacaaccctgaaatacatatacaagctaggagctttataccggcagagaaaaggatgtgatcatgcaatataatggcaaatctgatggtttttattagagtgggtgtttctttagtagcttgaacttggttacagctgtagcaaatctgacgg

SEQ ID NO: 8722 - DNA, 1002 bp, Zea mays
  Intron number 2 from transcript GRMZM2G067114_T01 (locus G RMZM2G067114) derived from phytozome v7.0 (chr-ID 4; pos 1 36070276 to 136071277)
caattcagaactcaatcaagacaggacagtaagttccgtgtcttcgttaatcgcctttatattaaactgatgattagatatgcgctctaggctctcgcacgcctaggccgctaggacctctgctctttttatcaattccttgtacataaaataaaaggggtagcattctcctaaaagaaaataattctgtcatgttttaagccatgtttacagggactatccagtttcataacattatctcgcataaaaaaaacagcagccaacattacatgaagctcaaacatttgtttcatcagaaaaattgggtacatgttccgacaaactaccacccgtaaactgactgaatgccctatgaaaccaaataaagaatgttgcaggttacaacaccattgatgagcaatgtgaaagaatcgtttccaaccaatgcatgtaaagaatgtaccatgaaattattatacagggcaggcttgctcttcaacgaagggcagttagaaatccgcggcaggaacttcactcggcgatgctggcatgcttgttgaagatggcacgagggatgttctcttcttcttgcgggcccagcatagccggtcaattttccttttgcttctcaggttaaaagagacctctatacagttggtccagggtaacaagtgatttattggcttcaatcttggagcttcgtggtgcatgggcgaatactctcgcaactgcacttgcggtgctacagtggcaagaatgctttgaattgggttctttatttggctgcccaggtatccctggcagttcactgcttcgcaatggcacttcactttctctccaaaatgcacaaacctaccaaaaaacaaataatagctgctcaaaccaaacagtagtgttatttggcctctaaacttaatataatccttgtccaataaaaaactgagaactgtgccaacttctgggtgagcagtatatctgagagccaagaccaacaaaaattttatcttggtttcaggcgggtaa

SEQ ID NO: 8723 - DNA, 947 bp, Zea mays
  Intron number 2 from transcript GRMZM2G099366_T01 (locus G RMZM2G099366) derived from phytozome v7.0 (chr-ID 1; pos 1 79595162 to 179596108 reverse strand)
ggccgcctactacggcgacatccgccgcctcaagggtacgtgctgcctgctgcgtacgccccctctccagccctccgccacggctcaggggttttgccttttgcgttaggggaagtgttactgtcagattaaggggtttgatcatttacaatgatgactgatcgatcgatgtttgtgctgtgttgggacttacctgattccaagcgtatggcttggtgcatctccatcacaaattgcactgcgccatcacagcgtatggtttgatcatcgcacggaaatgaaatggacaaatttgttagttcttgtacggataatcattggtttccatgtatgcccttcaaggaactgcgaacaaaagcattttatttggagtagcactgtagctattgaaatttaaaacttattccccagaaaccatttatttactatacattctgtgaccatctgttttttcatatgtttcttcagggcgtcctgaaatagccaaattcttgctttctaaaggagttcgtgttgatgtggaatcaagtgtcttgaccccactgattattgctacctttagaggatatctagtatcgtgaagattttattggagcacggtgcagatgtatgtgctaattgtaactcttatttttatttgctctggaacctgcacggttcactgctctcccacattgttcccggttgtattctcagtttctctgaactactgatgtgtgaccctgatcaaagatatgggtaactggacacccagacataagcagctatgatgttctaaaattcaaacagtaggacattaggaacatatacacttcaataatatactattgttttttttccatctgaaattctctgcttctctagtgcgttttttttcttttggcattgatattgatttttcggttcttgcagcccaacgagctttgattgataaagttacaccatta

SEQ ID NO: 8724 - DNA, 622 bp, Zea mays
  Intron number 1 from transcript GRMZM2G339018_T01 (locus G RMZM2G339018) derived from phytozome v7.0 (chr-ID 4; pos 2 36158240 to 236158861)
gaagggaaggtaatgcagttgtgtctctacgagaaagaaggcagcaagagcggcaatagaaccgatgagcaagctgcaagcacgctgattctgaagtgtctacagaccttgagaacagaagtacgtaccaatgtcttgtaatatgagttcctaggtattgcatgctagtcaatctgctccaccaaagattttggagtgtaggattcggtctatgggccatcatttgttcaggacaattggtgacccagttgagaaagccatatttgtaaagccacataagctaatttgtattctaatatgttggtcgagccatattttctaacttaatcttaggcatggcgatagcctagataactctgtctctccctaaaaaagtacagttccaagaaattgatgtgcgacataatgacagctaaggaagcgccacacgaccacacctaatctgaaaagtccacttgaattatttgagtgtgtcatatcttatctctgtttttcttttcattcccttgttctttttccaagaataccatgaatgagataatatacatgcaggtgcatcagaaacagaccctatttctttggttaatgcaggtgtaaatcagggccctcacaggaaaggcac

SEQ ID NO: 8725 - DNA, 263 bp, Zea mays; identical to SEQ ID NO: 6052
  Intron number 1 from transcript GRMZM5G827810_T01 (locus G RMZM5G827810) derived from phytozome v7.0 (chr-ID 1; pos 9 667959 to 9668221)

SEQ ID NO: 8726 - DNA, 924 bp, Zea mays
  Intron number 1 from transcript GRMZM2G175141_T05 (locus G RMZM2G175141) derived from phytozome v7.0 (chr-ID 1; pos 1 97074043 to 197074966 reverse strand)
cagaatagcgacattttacgctcctgcacataattgtaagtcatctacttccttcttaattttgtggatctgatgtattagttatcctcaaacagtcaaaaaaaatatctcgaaacttatcctcaaacactgttatgtttagctattccttctaggcatcactgttatgtttagctatttctttttttctcaaacacgcaacatatcattatattaagacgaaagaaaattctaggcagttaggctcatttgatggtttattacctcttgaaggaaatcggctacattctttctgtcagggcatttgaatcccatactttcaaagaagtccgtagcattttctcgaggaccatgatacacaatttgcccctcacataaaagtataatgtcgtcaaataattccaatgtctcaggaggtggttgcagcaaggaaataaccattgtgagatccatcaaatgggccatctgttggagaaacttcatgatctcaaatgtcgtggagctatctagacctgttgatatatcatccataaagaagcaccttgctagaccaaccagcatctcccctgcattaaacaacatcacgttaatgtatgccaacttaggttaggttccagttaactatatctttactctgttccttattctaatattctggttagttaagcattcaattttagagctactcattattcgttatcatgaagattcctgccctggtaagaaccttttgcgttcttgaggtggtggaatgtcagttaatgtggctttgtttcagattgaagtgtgtgcttccagtggcagctaaataaatcctatagctatgtattttacaatcagccatgataggaatgcttaccaattgtggctcttttcttttgccctccagatattcctctcctcatctcgtctcctactagggta

SEQ ID NO: 8727 - DNA, 812 bp, Zea mays
  Intron number 1 from transcript GRMZM2G418294_T01 (locus G RMZM2G418294) derived from phytozome v7.0 (chr-ID 1; pos 8 2378135 to 82378946)
agcgtcctctacttcgatccgctctacgaggtactggatccgccgctaatacacttctatcctgtgatctgcgctgctagattccagttgccagttttgttgttctagggttcaaatgccgttgggcgccgtgacccgtgagcattattagttaacgtgatctgaaatttctgaaaatgtgttagcagatgattgctcactagtttcctgcgtcctttcatgtaaaggtgatctgccttttgacttctagtgtatcatcacacgcctacttgtagatttagtgctattattgtcttttctgcctcgttgttggcattagttgaacttctggcatgattttgtttataccgattgatttctggcaaccagtatgctggagttttaatacttctttcaaaatatatatggatctgaatgcgctgtgtctctgggtttgttggaactcctagtcaaacactttgatagcttgactcttttttctaccttcccacaagattttaacttgaaaaatatacattcaaatgaccatataaaaacatatgttgccataagtaagtcatattcagttaatcagtttgatttggtttaaaaaatcaaatcagtttggctatatatcctcagttccggtactttttactgcaaatttcattttcataatattgctcagttgtataagtcttcatggtgtttctgggttactggcacatgtaatattggcgatgaagttaaagcatgatatagatctgaccttgttaattgtaatgacattatgtgaaggttactgggaaagtaaagcgtccttctattgtatt

SEQ ID NO: 8728 - DNA, 175 bp, Zea mays
  Intron number 1 from transcript GRMZM2G017557_T01 (locus G RMZM2G017557) derived from phytozome v7.0 (chr-ID 4; pos 1 1916798 to 11916972 reverse strand)
agagcattccaccagcagacgccgtactgttgaaggtacgttctcttctagtactattattcagtgattaagtctccagcaaaatttggtgctcatcaactctattatcttttgagcattccatctcaaaaaggtgttcatcaaattttgttttttttcttccagtcggtcttgc

SEQ ID NO: 8729 - DNA, 863 bp, Zea mays
  Intron number 1 from transcript GRMZM2G145578_T01 (locus G RMZM2G145578) derived from phytozome v7.0 (chr-ID 10; pos 17169539 to 17170401 reverse strand)
acgccaactacgccacctgctcccgcctcaccaaggcaagccctcctctagtctccccgtcccctatcctagatcctagataggccgccgccgctaacagggctagcgctggtgggaccgctgccgcgccgtcccgggcgtaggtctggtctgcaactgatgattaagtatctctgtggtgatgcagagcaggccttggtcctgcacctggttgttcacttgtttgtgttaacatagcagttttgtattttggatggtgggaattgtgatgtcggaaacacaatttgttcaccactgatgcagcctatagtgaaagaggataaatgaatgctacatttgatactctcatgcgggatatgcaaaatttccttcaaattataaacatgaacacgaagacgagtacttgtcgatgaatcttgctggttagaacgttatgctgcttttactgtgtcaaccatagtttgattgagcacacatgcatggcgtccgaagataagcacaattgtcaatgtcatacttcaacagcgtggtgcaaccagctttttttggtggtagaaggacagctaatcaacctgcaaaagatggagccatacacaatgttgtgtttctgatattgacagacctgttggcaatacggctgacagttcttagtccttaggacatgagtagcctcattgtactgcacatatttataccttactgtattttcaatatggttttcttaagtcgttgtgttgcttctattgctccaggttttgatatatgaataatgctgagtagacagactaacatggaagcttatataatctgtttttatttaggaagcagctgcttctggagtgaaatttctttgcttccctgag

SEQ ID NO: 8730 - DNA, 489 bp, Zea mays
  Intron number 1 from transcript GRMZM2G085189_T01 (locus G RMZM2G085189) derived from phytozome v7.0 (chr-ID 1; pos 2 81163165 to 281163653)
agaggattgttttagtgaggtacgtgtgggtgttcggccttgatggtttttctttcccaacagtgtttctggactcgttagttaccgagttttttttcccctggatatataggggggtgatttatgttttgtgatggcatagcaacctgctataaggtcatggctgatttggtgtggttgttcgtgtttgatttgaggaaaggtctagttcagaatttgcctagtatttgtctgctacttgcaaaattcttcatgcaaaagatgactctgaactctgaagttctactcaaatcgggaaaccatatggttacctgggaattacgaacaccgtattctaggggtcgcgctcagtcagtgctcagagtcataagataatttagcgttcttattttcttagttgattttgtgagctatacgtcctcatgattgctaatggcaactccagttcataaatttaactctcttgcattgcatcaactgctcaggtct

SEQ ID NO: 8731 - DNA, 959 bp, Zea mays
  Intron number 1 from transcript GRMZM2G118610_T01 (locus G RMZM2G118610) derived from phytozome v7.0 (chr-ID 10; pos 64483365 to 64484323 reverse strand)
tccggccacctcgcgccgctcaccatcacccgcaggtgcgtgccccgccttgtttgttcggcatctgtggcatatttatatatatagggaacgtccatcgtacgcgcgatgatgcccttctagaacgttctagatcccatgcatgcatgcgccgtgccggtcgagaggcatccgaaatgtccagcgcgcggacgccccggcctgggtctcgccagtcgccaccgtcctcgccgatcgacctgccgaccggactgcgagccgctcggcttgatctgattggcgcaggccaacgtatacggcatgcatgcctctcccggccggcatgcccttaccgccggggacaaagccagaattttttttaagaagagctgaactaaacaactgtaatataaaagtcatttctatattatatatgtacgctaaaaattttaaaagaggctctagtgcggctgactcagcagcgttaggaggggttggaggcccgctcgccccaccgctgacttcgtcccttcttaccttgccttctgaatcatacaatactcactccctactttttttattggttatattttagtttaaaaataaactattgaactatatgtattcgaaaacagatgtgttttcatgcgccaactgttacaaggggccgccgttggatgaaattgatctcatgtttggaagtccacccgcttgttacttactcccttcgttctaaattaaaattcgttttatccttttactaaatttatataatatttaatgtatggtggctttccggtgcctacagtcttttcagaataatttagttttttctagttaattcatcggccgataacatgacaattgacaagatgatgtagatcgtcttttgtttgaattgaatatagaccattccgtgactatatattatgagcatgtgtcacttctgtcacacacatgcaggagcaccggggacgacg

SEQ ID NO: 8732 - DNA, 741 bp, Zea mays
  Intron number 2 from transcript GRMZM2G075044_T01 (locus G RMZM2G075044) derived from phytozome v7.0 (chr-ID 4; pos 1 79600139 to 179600879 reverse strand)
caagcggttgttgagaagctttctgagaatgtgagtgtctttttacgtctcgttattttttacctagaagctttctgagaatgtgagtgtctttttatgtctcgttatttttactgatctctgcttgttacaatttcttgtgaatctctgatatctccctgaaactaggcacaaacttactttgtcataaaacctagtcacttaatttccatacgtagctttacttgaaaatgaaaaacgaattttgtttaatgagttttctttatccatgcagcaagttctggcatagatctgtttgcatgagcctaggatttagtttctaatgtaaatttatcattatgggtacttctcttgtactgagaatggtgtcctacttctaccaaattaaatttctatgtatatgctacaagctccattgcctgggaggtatcagtatgaaaccagaattatgaatgctttcatgttcatttgatactggtaagattataacaactaagatcatttgaggttctatgtaggggtgatttcatctattatcattttgtagagattcaggttttatcgtaccaagtcctaattccacactctaattccacattgaactttctgttgcacccttagctatttggccactgatctattaatgaatagaatcggagaggccttattggcactttacagagataagtacaattgttgcgaagaacaattttcttaccaaagttttttatgcagacccgt

SEQ ID NO: 8733 - DNA, 578 bp, Zea mays
  Intron number 7 from transcript GRMZM2G135133_T01 (locus G RMZM2G135133) derived from phytozome v7.0 (chr-ID 4; pos 1 61941526 to 161942103 reverse strand)
ccagcaggtttggtttcttacctgctaagttgtatgtgggtctgttagtcgaactgtgatatacacacattagctaatagatcaactttgtattctcttagcttctatggcctatgggttaacacatgtactttatttgtgtgttctcagatttccacgtgtaatttgtttttgtttattaagtagttccgttcttagataaataggcgtatatttcatctgcttagtatttgattattctttgcaaaatggttatcatctcactgagtgtattgtttagctgacaaagcattgtggccaccgcagcctgttccaggcagctcactcaaatgttcgattctagacacctggtgctggatctgctgcctggccggcatagcatgacctaggttctgatccaatcacaaccttggtaacaagtgtccattataaacaatcaactatactacatatgcatgatgagaggcttcgtagatgaaaaacaaaaccctcctctctatgcctcaacctaccatgcagatgaatatttagatcctattgcagttgtttgggcaaaggcaaagcgcaaggcaaataaa

SEQ ID NO: 8734 - DNA, 492 bp, Zea mays
  Intron number 4 from transcript GRMZM2G135133_T01 (locus G RMZM2G135133) derived from phytozome v7.0 (chr-ID 4; pos 1 61942949 to 161943440 reverse strand)
cgaggtggtcgtcttggtcatccagatattcataggttagcgattgcatgatgttaaaatgagttgtttctagatcagaaaattgtttcctcaatgcttttgttagtacttatggattagctactccttccggtcacagaaacatgttgcttaggataagatttggtcaaaccctaaaaactacagacagtaatatcttttaaattgtttactttgaaaacatgttgtatgtgtagagttgcatcgaaaaatacttgcagattttcataaatttaaagaatatactctagaaaaaatagcggcgaaagaaatacaccaaatatttgaagctgttcaaaatcaaatgtaatgactactaatgaaaactaaattggcttaattgtaagccaaagtagttgagcgtgtaaaattttcttcatcgttgagtaagtttatgaaacctatcattctgttacagtggacagacaactgctgtgattacccctcacctgg

SEQ ID NO: 8735 - DNA, 644 bp, Zea mays
  Intron number 3 from transcript GRMZM5G811273_T02 (locus G RMZM5G811273) derived from phytozome v7.0 (chr-ID 1; pos 6 3368 to 64011)
ttactaaaatcctcaagaaagttgacttcaacacggtgagttacaacttttaatgtagcgtacagaaaatggtatcactaacaatgaagtaactcaaggaaactatagaccaaaaaggggacctcaacctagttcagttggttgagggtgtgaatatacccaaaccacccaagttcaagtcctcatcgtctcagattactgttgcactttgcaagtctgaaaaaacagtatcacacgtctcagattacggtttgattgtgctgcaatacgagcagcaaatacagctggaagatgcaggttttctttcttcctaatgaattatagaacttggacaatctgggaaatgttagtgcctttgacagctggtcggctgcctcagcttcttcagccaccaaacaagcatatctaaggagaacagagttcagttgccggcggaaatgttagtgaacaaaataaggttcaggcatttgactgatcctaacatgtggatttaacaaagtctgcaggccaacacatgtcaattgcagttttagcagaagggtcatgagacaacgtaataacttgctagtaactcacatgcttctgttctagagccaggggttatttcaattctgcaggctttaaattaccgtctttggcaggca

SEQ ID NO: 8736 - DNA, 864 bp, Zea mays
  Intron number 1 from transcript GRMZM2G085885_T06 (locus G RMZM2G085885) derived from phytozome v7.0 (chr-ID 1; pos 2 747292 to 2748155)
accttgccaggaacccaggaggaggagggatacaggtatgtttgctgtctctgtcaccgcactcctcctgctgttcgatctggacgcacggcggttttcttggatttggaacaagtgctcgattttgctctcacgaatcctaactagaggcttccgaaccatggcaaagcggacaatttggagaaccaaggtctgtttagttttgcaatatgagcacccccaccccattccctactctactcactcgcattgcgcagcatgcagtttggcttggcgagccacgtatctgaatcttagagattctttgtttttggctctctatttaactctctatttatttcttcgtagggattacattttatatgtagcatttcacttctagtttggctagttaggtggctagccaagtttggctattgagtaagccaatttgaagagtcaggtttggctattgagtaagccaatttgaagagtcagatagtttagcgagtcagataggtagtctgttggagagttattttgttgatgattagtcaaaatttagcttaataagtcatttagctagtcttttagatatgctcttatgttgtccaagcttttagggtccatctctgtctcgattgccaaaagtgactttacaacaaacaataattgacgtaagatgcttttgccccatttctgtgctgtgcatagagtgtattgttagaacaaaattcattattttttatatgtatataatagaaacaaaatttaggtaagcacaaactttgtcatagtggccttcatacatgggaactttcatggcaaactttgggatgataaatgatgcttcaatttcagcctgaataacctaggtgcaaaggc

SEQ ID NO: 8737 - DNA, 537 bp, Zea mays
  Intron number 2 from transcript GRMZM2G112793_T01 (locus G RMZM2G112793) derived from phytozome v7.0 (chr-ID 1; pos 1 4407572 to 14408108 reverse strand)
gaggaaagcaacgttcaggtaagctgtgctggcagtttacctctcactgatggctgggtatttttcacagtttcactctaggtgtaggaggtacctatattgattgttccaaatgctgttgaactagtagtataatgtttgccattgcatcgaatgaagaacattgtttaatgtttattgtgatgctccattttggttggcccttattgtcgtactatgtatcaatgatgttatgattaaggagttgaactttgaatctttcagtcttgtcgctttcattttgatcgatagattcagtgctttcattttaatctggttccttgtagaatgtaacactaacaataggaatataggataaataatgtaatttaaggctttcctcccgtttcaatccatttcatcctgctcaaccattggcttataaactgagtgcatgcatataatggcatgatgttcacgtagttgtggtagcaatttaggtatttcttctaagcttctgtaactttgcttgcagcctgtcaagagtccagttacaat

SEQ ID NO: 8738 - DNA, 599 bp, Zea mays
  Intron number 1 from transcript AC177897.2_FGT002 (locus A C177897.2_FG002) derived from phytozome v7.0 (chr-ID 1; po s 260136403 to 260137001)
cacatgtatgcccatattccaccatcgcagaccaagctcctccatcttgatgcgtgtgttttgtgtttatgatatggaagcaaaataatgtgttgtcaccatagttaaaaatcattctgtttgcattttgacgtttggtttgttactttgaaccacatgtgattatcttattacaatttgcaactcatgaacttttgaggaaatagttatatttttatgataagaaatggactaatttggcatcaacttgatgacacaagatttaaaaaccaaaaaaaataatattacaactgtcattattatcttccacgaaagaatagcagtgatttcattttgtacaattgggccccttgctttaaaaatattattagtttcagatgggtgagtattcatgtctgtttgacctaactatggactaatcctggtcccaccatataaattcatagctggaaatctagaactagatagcctagctagaattgtttacttaagatcatgaacttaacattttgctactccttttttcatcttgttatgcttgtcttacaatctatactgctgtgattttaacttttagtatctttcttgttcagtgtgtg

SEQ ID NO: 8739 - DNA, 641 bp, Zea mays
  Intron number 1 from transcript GRMZM2G177077_T01 (locus G RMZM2G177077) derived from phytozome v7.0 (chr-ID 10; pos 99365131 to 99365771)
ccgttgcctcacagggaggtgggtctcctcttagttcgttctgcccctctaattttgttgtgtcaggaatggatgttatagctcaggccacataagttatgtacgaactgcttgcatgaacgagtaaccaggtgatgaagccaatcgacacggatgatatgccaatcttctgttttcgtgtgtggaacttgtctgcattttgtgtattcaaatttcatattcgcaagtgattaatacggtaatgtccttttatgactgaattggggctaattccttttgaatctatgcacagtcgagctccactgcatcactctgatagcatgcatcatttctcttgttacagttggcacaacccagagtaggaatttagtttattttaacagcagcgaccaggccttatttgggttaggctacatatcaaacccgacaagagccacaaacaaagacaatcaaaatgtatcaaggttataataataatgaaaaagtacgctatttcatggttctaactttggttgctaaaggcatatatgtttttaaactgcctaaaatgttcagtgcatagtgaatgtttcatatcatcatggattatgatacaacttttttcatctgactcttatctttaatcattagtgaaagctccc

SEQ ID NO: 8740 - DNA, 894 bp, Zea mays
  Intron number 2 from transcript GRMZM2G022308_T02 (locus G RMZM2G022308) derived from phytozome v7.0 (chr-ID 10; pos 107292125 to 107293018 reverse strand)
ccgacgccgctggtattcggcccatcgtctggaaggtccgaggatcaccccatgatcttctcaattcactgcgtaactgcatttataccctgaccgagtgcttctctatcactccctagctagagaaatggcattgcctatgttgatgacccctgtactagtttcaaccattcatgaagttataggtataactgtataagtggtctatgttgacgaagtaaggtttttgcatgctttcaatcagtagtctatgttgactcacagtcacagtgtcctcacatgtcattatgataggggtgtcaaatcttgaaaggcctgtgaattgggtcccaaatatcaaaatctctcaggtcaaatggatgagataaatcacacctcagtgtgcaagtttcttctgatttagaacactttgtgtttttcaaggtttattttgtgtgtgcttctgatgtttttattttcacataaattctatcctatttgctttttttcttgtttgcccgttgctgaagaactgctcagcacttggtttgatattattcaagcactctgttagctgggttgatcataattccatttgtttttagttcagtgtatattttaagcttaataataagaagagcagaggcataatggcagtactacatcatgatattgaggtctactgattctgcagaaactgcagccacatattttagcacctcagcgattatgagaattttgttttctgtgcttggacttttgtcagtttgtcatgtcttttttattacttgtgttgaatcgtatttcattgcatgacttcttttggaactgtgatgtaatgactttgatttttgatggataacttctgtttgtgattcagtaaaacaaaatctcagaacaaactgctagtgttta

SEQ ID NO: 8741 - DNA, 914 bp, Zea mays
  Intron number 1 from transcript GRMZM2G038967_T01 (locus G RMZM2G038967) derived from phytozome v7.0 (chr-ID 10; pos 65619376 to 65620289 reverse strand)
gcggggagaagacactttctgctagctttcgaagggtaagatatgattgatgagcatcctttatttattttttattttctgtaagatgtttaggcttgtaaatttctttcttagaacatgggtaagaacgaaccttgttagaaacttccataagtaaaagaagatggtgcaattattgtggcatctgaatatctgatgacaaatgaagcatttcagcaagagatccctactttgatgggaatccttggcacatgtgatatatttttctatagtattggatagtttcgttagagtggacgcactaaccagttcaacccaaaaacttaagctgatgggagaagacagccaatccacttatatacttcaacaccgcagagaaaggctcaaacgcaggcagagaaaaaggcacaaacgtggaaataaatgggtgtatgtagtgatgtacaaataaagcctctgccaggattcaaactcgagacctttggctttgatatcatgttagagtggacgtactaaccagttcaacccaaaagcttaagctgatgggacaaggtagccaatccacttatgcacttcaacaagtttaacacattgtcaacttgcagtgttttcatgaattctagaacgaattcaatgaagaattttacatatataagaaaaatatctctattattgccatgaaagatgaaatatgtcttaacaatacttggtacatggatattgagatatttgttgtaatagaagatgctcggtatgcatctatcatgactacaatgttttcttggctgctaaaagaatatagtgccacattgtaattggtattgtgctttttttcgacctgaatccttattgtatttgttctcgcttttgctgtgccagttcagctgaaggattgtacatagtaattcggccag

SEQ ID NO: 8742 - DNA, 702 bp, Zea mays
  Intron number 1 from transcript GRMZM2G056462_T01 (locus G RMZM2G056462) derived from phytozome v7.0 (chr-ID 1; pos 5 5442884 to 55443585)
acgaacaggcggagaagaaggaggaggtccccgaggtgacgtgctctcgtctcttcttacagcgcatccagttaggtccggttcggtttggttctggcggcgataagttcatcggctgtcgtgcttgtgtccgcgtgagtaggccgggctttgaactaaaacctcacctccctgtctcctccagcgctcccccaaaagaacgctaagatgtggaatctgcatgaacggattaagttagcgtgacaaggtatatgatcgatttgaatttgggtgagtagctaggggttagacctttagatgtaatggactacactgctaggattgaaaagttcttgctgggtgtcttagaactgttgcgtttttgctctatgggtaatagagctgcgctgcatcaataaaagcatttttagttggacctggagtatagttcacttggatagaatcatagaatctgcacttctccttgcatatgtatcaatgattgttatttccccccttaaaagatgggtactatttattatagcacgatgccgaatttaatagtttagcgcatgatgtatgttaaactatttgtgatactcccatagtagcgttttgtatgtctgactggccaggtttctttcttttccttgtgtttatgctgatagtgtctataattattttgcagcttgctccttttgacccaaccaagaaaaagaagaa

SEQ ID NO: 8743 - DNA, 843 bp, Zea mays
  Intron number 2 from transcript GRMZM2G135337_T01 (locus G RMZM2G135337) derived from phytozome v7.0 (chr-ID 1; pos 4 5783453 to 45784295 reverse strand)
catctccggccttaacgggctaggggccgagatcggtgtgtgcctcactttttttttaaaattttgtaacacgtttaatgttttcatgtgtatccttatggttcggcgaaacaatatccaatatacagtagtatttatacaggttgaatgctggattgcaaaatacagctgggactgttgcatttcatggacatatgggcagaaactgggcacgcaaaagggttcacagccttagacatttatgcttcaatgtttattttgttatgaggtgtttgatttgaggaataagctaatctatcatcttctcactcctcacttttttttatttagtttgtggaatgaattgagttgattcatcaccacctcattcctcatagttagttagtactaacatgagtaatgaggccatcccactaaatttgagaaataagttcatgatgcactatctcatcttggatggagtgattcatcaaaccaaacaccccttaaagtttctggtgaattagaaatgcaaatggtgcggccatcttttcgatttttatatacatattttgtttaatattctgttgaatggctgtcctcattataagacatatggtggagtagtgtaactgtgcaagtcactgcctctcacttgtttacctgtatagttattacaattcggatcaatactcataatgtttttcctttactattggtccagccagtaattaattgttttgttagataactaccattgtatttaccatgaatgtattataagcattatcttggtgagaccttttgaactaatatttcctttcaacagcaaagaatcttgctctagctggtgttaaatctgtt

SEQ ID NO: 8744 - DNA, 840 bp, Zea mays
  Intron number 1 from transcript GRMZM2G703856_T01 (locus G RMZM2G703856) derived from phytozome v7.0 (chr-ID 1; pos 1 92286485 to 192287324 reverse strand)
cgaagggcattttaaaccggctttgttatagacaagtatgaatagagagttattcatcaagcacatctgccaacgtagagttgtagttgcggacgactggaggaacacttatggtaacattgagttactcaactatgatcttcatgacaacaaaggatttgttcgaggcgagtgcgacgctttgtttgatgagcagatgcaagctgttagactcaataagaagggtatagtgaagctagcatgtatcatttggaaagataagcaaatgatcagtgtatgagatatacgaagatgtgccttgtaatgataaccagatcgctgaagttctatctatgttaactcttttaatgaggtgtgaggatgaaaacttttctttcgtaaaggtgtggaatgacagctttagagcctgtggtgttttaattgattcacaaaccatcaagatggctgattcatatcatggtgtttgctttcttctgagatcaatgaatacaaagtttactaagttcgtgacagttcagagaccaagagaattgatgtttttgtcagatcattttcttaaaatggcatacagcgactcacccgcttcaatcaaaatggtcaatcaaagatggtcatctaatctgaaaggatgcacaatgttcaaaataaccaataacaaaagaactttaaatattatcaatacttttggtacgtactgttttcgtcgaccctcttcctgactcttcatttccctcttttcttgtgcctttaaactcacatgtctttttgtttccctctctctttccttctggtgttttttgaactcattatgtgcttatttttcagcgaaaaagggcatac

SEQ ID NO: 8745 - DNA, 335 bp, Zea mays
  Intron number 1 from transcript GRMZM2G360495_T01 (locus G RMZM2G360495) derived from phytozome v7.0 (chr-ID 1; pos 2 0725615 to 20725949 reverse strand)
cgcggcccacctgtaagtgcaatcaactccaagtgatggtttttgtgatttaatgacaaaacaaataagggtactaacagtttttgttcccaatgtatgattagaaagaaacaggaacttaaggaagcaccaaggacttcatgcaacggacgtataaaattttatgcaaaatcttgagttgcatgatgtaattcttcctaattcttttccgcacaggtaaaggtgtttgctatagctcaagtccccaaattcaaaagctatttttgaaaaccaaaaatcactttaacattctttggttgaccgtggttaggtttgagaaacctagagtgttcttg

SEQ ID NO: 8746 - DNA, 976 bp, Zea mays
  Intron number 3 from transcript GRMZM2G436266_T01 (locus G RMZM2G436266) derived from phytozome v7.0 (chr-ID 1; pos 2 943200 to 2944175)
gccgctactaacggtatgcagaatttagaacactcacggtaaatatgaggtactttcggtgtcaatttctgggcggcaatccttctactttggaaacctcgaatccccttcaggattggagaagattaagatgaaaataaactaatttcttttttaatcctcttcaatttcaaaggtaatttgagttttcaagcccatcctactcaagtcagaacctctcttggagccgcggttggttactcgatttattgactcatgcggtcatgcagttgacgacttcaggctgttcagggagagcatggagtacaatgatgtaaaagaactctactctactctactcacatggatttcatatttttgagtttcctgcatgccacatttcactaaaccaagtaaattgaaactagtagggaaaaatacaagacagtagagatttacatacagaatgaagggttggattccagctctgaactgaagcaggatagcaaaagtacagggcatttgcctgaatctacgctccacaagtatataactcgtatgtttgggctgtgagttgcagatgtggtcatccaagttccacccgatcgtggagagatccctccgcctgcacttcaccgttgaccccgatcaatgactaccattctgctctgagtttgctactttgctacgtggtcggtgttcttggagccgctgcagcctgcaagcctccatggaatctccaagctggacaagaaacaaacaaaaaaataacataccaatgccgataatcttgctgggagttgtgtttcagattactttgttgccccacatcgactaactgtgcctgttgacagagaactgagaatggatggatgaatgaatgaatctttgcaggccaagtgcttgactgagattgggagatgctcctgatgatccgagtttaacagatgtcaacaggcatgtgatcaggaatctcaactgcatctcttgttaacag

SEQ ID NO: 8747 - DNA, 630 bp, Zea mays
  Intron number 1 from transcript GRMZM2G414206_T01 (locus G RMZM2G414206) derived from phytozome v7.0 (chr-ID 1; pos 2 47741373 to 247742002 reverse strand)
agcgcatcctcgacgtctgcttcggtcatcaggtgccaatcccatacccgtccatgcgcgcatctcctgttcctgcatactcgttgttcggttcagttgcggttggttctcttgttttgccttgagaaaaatcatcaactgaatcttgttgttgatatcatgtagatccatagccttttgggaataatttggatttggatatcatgacattggtttattgcctatatttatttatttatctgaacacagaagaaaagttattgttaaggtaaaattatgcatttaactttatttccttttttgtttattatgttcttttcgatctatatattttaatttgcttttggtttcattggttcatacatgctgcttcatattttgagatctatcagttgagtttcaggtatatattaatttacccgcgaggatgtggtgtctgcaatcacctctctctctttctttgtgctgaccataataagctactcctaagtagatgcataatttgatgcattgtatttgactcacttcagtttgtgactcctcacatatcttcaatatgattttcttttgttcaggatggagtcactttgcgcaatttacaatagctctaattaataaagaccctaagaa

SEQ ID NO: 8748 - DNA, 477 bp, Zea mays
  Intron number 1 from transcript GRMZM2G031788_T01 (locus G RMZM2G031788) derived from phytozome v7.0 (chr-ID 1; pos 2 49378141 to 249378617 reverse strand)
ggaactcggcgaggacccgctcatcggcggccacggtgcgcacgccgcgcgccgtgcagatcagcgtcggcgccggctgcgggggcggatgtggggatggtcctggaatggcaggcgtggcgtgagggggtggaagcatggtgaagcctggtgtggacacccacgttaccttcttatagagtagtagagattagaaaaggagagtgtaaattaataaggaatccacctttagtttgtttggaaaagaaatcaaatgtagactatatatatagaggtcgtgtaacgagataaaggccaacaagaactaagaagcaagccattttcttctggctgggacatgggcaaggctctcagcacgacactagccaccgtcataacaatatttttgtcaatcatttttcatacttcgatatcgtaatcatatatcaaaccacattctcagcatcagtcacagagggtcataggaatcaggggcgt

SEQ ID NO: 8749 - DNA, 785 bp, Zea mays
  Intron number 3 from transcript GRMZM2G171022_T02 (locus G RMZM2G171022) derived from phytozome v7.0 (chr-ID 1; pos 7 4046986 to 74047770 reverse strand)
aaaggaccggtcccctttttgtttaatttccaaaggtaccatgattactaaataatgatttattagaaattaatgactgatggggtcaagatgtgtgaaactgttaagagcttgagatctgctgattgaccacacccaaaagggaaaatgaaggtggtcttttgaagatttgatttactttgtaaaagggcataattttgtgataactgggaatcattcctcaacaatactgataaaacttcaagtttttccttgatgttgaactgctacctccatgcctccattgtgccacagtggatatccatttggtgctctgtccctatcatctagttgtggtgatggggttcaggcattccctagtcgaaccccctcgctcacccacccaccctggttggaagactccgttgtgattatccataacttttggttgaccttacatctctaattatcgtatttcatggaatgtgtatgctattcgtactgggacatatatataaagcagtgagccagtgaccactgttccatgctctactgaagtgcccttctatgttttcccatgtttatcatttttctgcaatcaattagtgtattacagtgaaagtgaagtactaaaattaggagtattggtaccacttctttctgtgctcatgaattagtttattttggcaatttaatgaggcttgtctcatgtctgattacttcttctgtttctttccctggaatcttgcctcttccaggtgtagaggacattcagttttctccagttctccagttcctggatagca

SEQ ID NO: 8750 - DNA, 955 bp, Zea mays
  Intron number 1 from transcript GRMZM2G166484_T01 (locus G RMZM2G166484) derived from phytozome v7.0 (chr-ID 10; pos 118763015 to 118763969 reverse strand)
ggcgcccacctcgccgccgcctgccaacaaggtacatcatgttcgtctctctttatctctctctgtgtgtgagagagagtgtgtgtgtggcctgtgcgcgtgagtgcgcaagtgtgtgtacgctcggatccagtggtggtttggctagtgtactgtactactgtgtctgtggctatgtgccttcagatttggttcttagctttttgcgttcgtctttgcttgatggtgtttcgttgcgagtttccgtacgtattccgctgtggcgacgaactcgtacgtcttgatcaaagtttgttcgatttttttgctacattattcgtctctttcgggtcgcaagagcggtactactagtgggcatgtttcgggtgagattgcccgagcgaccgagtctccgtacgcgcgcgactgctgtggtttttgaggtcttcctctttgtctgtggttccccttccccgcaccccaccccatgaatcaggtatgatttaacccgtttctgatgttttttttgcccttaagcagagctccgaacgcaggaacgctgtttttttttttttgccctttagggtttcctggcctgaactctcaacagagagagggagagcaactgccctctgccctttgcagcagcaggctggccagctgcacaacctgcactcctgcaggcagcagcgcttgcagcctctcagaggattccggcaaagacccaccccgtttctcttgctccatttgttttcttggcccgcacgaaatggcgccgcgggcgcatgctgctgtatacgacactgcccttgcactagttatcttttgtgttttgtgtacaggaaacgtttctgctgttctccttttgagcccgaaaactattgcatgtctggagagtggagactaacgccgttaaactctcgttctttctttgcccccagctccgtcacctcccgccaccgtcctcgtgctcgcc

SEQ ID NO: 8751 - DNA, 397 bp, Zea mays
  Intron number 1 from transcript GRMZM2G016004_T02 (locus G RMZM2G016004) derived from phytozome v7.0 (chr-ID 1; pos 2 53570306 to 253570702 reverse strand)
tacaccacctcggcacaagcaggtaaggtcgtgtttggaagtgtagttacagttttgaaacaatattatggtatttagtgatactatagtattgtaactcaaaagatgtttgttttgtacaggtaaaacatagttttaaatactatggtttacctaaaaccattatatttttggaattttcgaaactccactcatcattttaatgttcttttcttctctttacaaatactttgtttttctaatagaaccaaacagatctcggttttgagtaatactgtagttttatatatgcatgcgtgtttcatacgtacgtggtagctacagtttacgtctaattacccaatcgtctttaccttcttcaccacaggaaggagtggctacaactcgtacgaacctg

SEQ ID NO: 8752 - DNA, 199 bp, Zea mays
  Intron number 4 from transcript GRMZM2G477161_T01 (locus G RMZM2G477161) derived from phytozome v7.0 (chr-ID 4; pos 2 7094269 to 27094467)
cgtggtaagtagtaacaaaagaagatgcattttttttcatttgcggaaccaaccacagtttaaattaaccatttgtctctttttaataattaattgtaacagatatatagaccaataaactgatttgaatcttgtaggcatttatgcatactataaattatgtatatggctgtggccgtagaggaacactacagaaata

SEQ ID NO: 8753 - DNA, 894 bp, Zea mays
  Intron number 2 from transcript GRMZM2G028883_T01 (locus G RMZM2G028883) derived from phytozome v7.0 (chr-ID 10; pos 130341659 to 130342552)
tcgtcgtcatcgtcgacgtcgtcgaccagaacagggtgagtcaaaatgtcagatcacttctctcttgtggtctcctttggttcgctttagctgaggtgttgataccggcctggtgttggctgcgtattcataaaccttttttcctagtgcgcgcgttaggttgctgatgactctgtcccagtgattttgcgtagttgctacattagagaggtagcatcaattgaatcgatgcacttgatgttctgtcgactgtttgatctgtatagaagtccagtttgatctgtacagtagaagtccagtacagtaaactctggtaataatagtgtcttgtaaaaatggttgttgtaccttgtaccacttatttctgaatgtttagacagcgtatttcttgtgaaatgtatttgcttcaaatatgaaacaccttcatagcccatttcaatcgttttactgaaattaatttgaatattctgtgtaactatgtatatgtaccctttatagttaagttggcaatacgtttcttgttacaaaaaacatggattaggacaatatttgggcatacattaacaaaatggcaaacataaaaaaccattacattgtttagtttgaagatatgtaaattatatatgcatatttgtatttataatatttgtaaaatctcttaaatttgaagacacattgaagaccgtgcaaagccatgtgtctgtattttttatcagatgaagcatattactgagtacttactactagccaatcagccattgatttacttggccaatcagccctctacatgtgaatctgaaattacttctagctattttgagataatcgtcgttgatttgctttctgatgttgattgaaattttgtattttctgtctggtattaggctcttgttg

SEQ ID NO: 8754 - DNA, 656 bp, Zea mays
  Intron number 1 from transcript AC216045.2_FGT005 (locus A C216045.2_FG005) derived from phytozome v7.0 (chr-ID 4; po s 191626832 to 191627487 reverse strand)
tggatcctaagcaggaaaataacaagttagtaaaagtatggcagtagtatataatacccttttctcagttattttgtaattgccacgtcgtcacatatattcaaattttgaatgccaattgccaacgtattgaaggattttgtcacttcggttcgatatttcaatttataagaaagttgaggatcgagttactcatcgtgtagttttagcactgccagtttaaccggtacacactattttttaccgtttgatttatttctgtaatctccatgtatctatatagggtcacaactcactatatgcgaaagaattcagccagcaacagtcacagattcatgattatgcaattcaatttcttgaatataacaatagaacagttgattctcttgtgtttcctgaagctccaccaactccggataggctgaatgactttagagtcttgaaagttcttatcacctctcagaagtaaaattttgaaacattttgtgtttcatgattgatttccttaactttcatgatttaccccaacgagcactcatggaaacagtttatctggtttgccagacagggacttgcgcaaatagctatgcaattgtattatgatattttcttaatttttaggaaagtatattctatactgtagaaacacttggtgt

SEQ ID NO: 8755 - DNA, 908 bp, Zea mays
  Intron number 2 from transcript GRMZM2G068328_T07 (locus G RMZM2G068328) derived from phytozome v7.0 (chr-ID 1; pos 2 40024473 to 240025380 reverse strand)
tgtgaaaattcaagttcaaattcaaagagtagtaggtatgcttgaagaataaaattttcctacaatgtgattgccagtagaactgtgggaagctcaccaagtagttggcacttttactggataggataactaacactattgagttgctgcttcaacagcagatgccacttggttattaggaagatgtgttgtaatttttgtacaaatcacaagtcccacatgatgatcatcataaaccagttattaatatcatgatggcagcttcatggattggtggttatgagccatcagccaagttagtggtgtagctaagcaggggctgaattccctaattatccttggagcctggactctatggaagcactaaaataactgtatttttgataggcaggctccaaacctgaatgtgactcaaaaaagctaatcaagagaaggatgtttgggggctagtaggggctatggagctatccttcgaactacccctattctcggtctttagttgagtttagatggttgatctgttttttatctagattcatggatccttttgtgtattggtgtttttggccaccagaaggtggctgtgttagttagtaatctttggtttgtctagcttagactcttccttttctcttaatataatgatgtatagttctcctacgtgttcgagaaaaaatagcttgtctagcttacttgttagcttaagctttcatagcaagtaacactctcaagggcttcatcttgtgaaccatcatagctgtcttccgcttgttttagaaaaattgaggcacttcgaggttgagattattagttatcaccttgcttgtcttgtatccagctttaagtgcctcagaacatgaagcttacccaaaggtcttcataatgattaggaagtcagtcaaggctgg

SEQ ID NO: 8756 - DNA, 915 bp, Zea mays
  Intron number 1 from transcript GRMZM2G113373_T02 (locus G RMZM2G113373) derived from phytozome v7.0 (chr-ID 4; pos 9 850523 to 9851437)
ctcttgttcttgctcccgcgtcccctgcatttcaggtcagaagcgcaaaatttcttgctgcatttgaattatgaacttcgtttctcccctgcgctattttggttccacatgactgtgtgccttctctgctctgtactacggtgtgattctgtttgcagacactctttttttttctttctaatttcccttctttttccgccttgtttttaagttcatatgctctgagagtcttctcgctgcaaatctgagttgcttccgttttcgggcactcatagtttcctatatctccaaaggtgctttaaatcagtgtcctaaataggacgcaattcataaaaaacagctctaatagtaccttattttacaaaattttataaaaaataatacggtataccatgaaataactcaaatatattacacctagattagtgtcatatccatgttttctaggtcattctcaaacttttctttctaataatgtaatttatttcctaaactctattttttccccgtttagctgcatttctttcgttttgaagcctgctgcgtttcatggcaggtttcactgcaatccttgcttgcaagctcagatttgtttttatttgttgccaatttcttttgccaagtccctcgcatgggtttttgcaaaccacaggtttcaaacttgaaatttgcagtacaatctgccctgccacacctgctgtttccttgtttcatcctacgttcgatctgaagcactggttctgccgtccagcatccaatgtgttttttttctaataataagacaaggacacgagtcagttcactgacatattttattgtacttctattgttattatacgttttgctacatccaaattgggctgaaaattgtaatctttagcaggaaactgatatcggggagcaagcaaggcaagg

SEQ ID NO: 8757 - DNA, 597 bp, Zea mays
  Intron number 1 from transcript GRMZM2G336886_T01 (locus G RMZM2G336886) derived from phytozome v7.0 (chr-ID 4; pos 2 32310140 to 232310736 reverse strand)
gtgctcctgctttctagcgatctgtgtccttacctgtgagtacctcatgttaaattattttaccatttgtcttaaatgattgctattgtacttaaagttctactgataagtcgtacgctctgtacttgaatgagatcttttggttgcgatcattatgtatgttcaaagtaatagatggactccatcttggttattttagtgttcgctagcagccttaatacctaatcaaatcaggttcatattcgctttccagtttatcatgctcatacaaaattagcaaccaccttttggaatgcaataatactttgaactaattgaaagacatcctggttttgttgtgttgaccgagtgttttctggctaaagctgaacacaaactcaccatataagcatttctttctttattgattatcttcaaaaaaacagagctcagttccaattgtttaaagttgcacatgacctgacatccgctgtccaaatgtaattagttgtttgttcttactttggctatattggtaagcttgcatgtgaattgacagcttgctccaatactgtaattggtaatgaagaaatgtttaacatttcaggtgataaatac

SEQ ID NO: 8758 - DNA, 971 bp, Zea mays
  Intron number 1 from transcript GRMZM2G112242_T01 (locus G RMZM2G112242) derived from phytozome v7.0 (chr-ID 1; pos 2 21942203 to 221943173 reverse strand)
cacaaggtaatggttctgatcatgcaactttgtgttgtcactgttataattgctaaacgcagtcatttagaattggaaagtgctgtgttcttttacccaatgaatggacatcttttgcatactggtctctatgtatggcactttgatcatgttattggcagaacaagcttgcatggatgtcactgtaattagagtcggaattgtaaccaagtcccccataggctctacagtctacacttgattcataactagaaagcttctctggtatagtggtgcttcactaaccggggcgccgaaataccgaaataggaattatgcttgctattattagaaatgtccaaaaaattatcatatccgtgaagcagaaagccagaaacataaatgtactcacattaatggggaatagatggaactgaattagttaattcatgttgacattgtcaatttatcgagaactctcttttcctcggtgaaacaagaatctattttgctcaaagcaaaggcaaggaacacttactttagccgttgtttcttttgtgatatgtcttccttaaggaacaagcttccatgggaaatcagtattacttgtccaatctcatactgataaactttaatattgttaaagcaaaagaatgaacttttcattataggcttactatttttctcaggaatttatagcctgtatatttctttgaacattcatgtgcaaccatgattgattgattgccactatcacatatctgaaattaggcaagacataagtgcataaacaagatccacatgcatgtaagacattacagtttggcaattattctgattcctagttttacaagagaaatttacatgatctataaatctcaaattgctttctatgtttctgggtaatgcttctgttttgcttttttccactacttattgcgtattctggtaacctaggtgattggccgacttgacaacagtgctatatctgc

SEQ ID NO: 8759 - DNA, 681 bp, Zea mays
  Intron number 1 from transcript GRMZM2G007347_T01 (locus G RMZM2G007347) derived from phytozome v7.0 (chr-ID 1; pos 2 2747635 to 22748315 reverse strand)
tctctcgccaagatctcgacaaggactagcccgtgagctgcgccgattttaatatctgctagcttctgaaattgttctattgttgtattctacagctagctggtagcaggtttgttttagtttagattagctttcatttgtcctcttcgcttctctggatcaacctgccatggtgagcatcgctttctctccatcttctccttttcgcctcttcatttttcttttcctgataagtttgtgtgtggttcctgctgaattatctggtctccgtacgaatctatgcctgagcatgatgagctgtgttactggattgttgatacagttctccattttggttgcttcattttttgcggcggccagggagcgggtagtccggtagtaggccatgattaatagctgttaaggttgcctgcctctttcctttagtagttccctgacttgagtgtagaacacgaatctgggtttgttgagtgttggtaacaaactcatttcttttccggagaatttccaaactccgcttcattctgctccaatttcacccttcttgatttggcacgcgaattatcctctttgcataaattccaactgatgtttctttccagcctaattttgtgcagtttttgagctcaactcctccacttttgctgcagcgcgtgtcaactggagtagttaagcggcgcc

SEQ ID NO: 8760 - DNA, 599 bp, Zea mays
  Intron number 1 from transcript GRMZM2G088427_T01 (locus G RMZM2G088427) derived from phytozome v7.0 (chr-ID 1; pos 2 54427828 to 254428426)
tcaagattttgattggtgatttccataaaagattggtgagcaattttcttgcttgttcaatactggaatgtggttattaccttctcagaagtgaagtaacttttgtgactaattcaaactatggactgtggtagtgttcccaatctatattagcatgatgttcctaagactactgagcaaagatctattttggtagccatgaatggaataacatcacttgcaagttacaattacaacataaataatggtagtgcaattttatggcaatccttctagtcttctacaccaggggacagagacaaattatttactgattttgcaagatattggcttcaagaaatgaaattgaattaatcaaactgtagcaactcttttcattctttagtttctagctgatttgcacctggaatcaatttagtgtttcattatatgatggtgcgcatcacttgttttaagataattagctgtgattacatcaaccaaacttgcaatacatcgatgcagattttatacagcttccttacctcatctgaactttgctctgcgtcaatcttgttaccgcaggtcataccggttaaatttgctaaaaaattcagagg

SEQ ID NO: 8761 - DNA, 803 bp, Zea mays
  Intron number 3 from transcript GRMZM2G396483_T05 (locus G RMZM2G396483) derived from phytozome v7.0 (chr-ID 1; pos 8 4064015 to 84064817)
tagcacggtgcggtgctgcagtcgtgcgtgagtaggttcttattattgttttctatcctgctggatatgtagtcatgacagttaaattatgtacaactatgattacaaacgggaatacaagctaggagttgagaccacaatccttatgaaaagttacactgtaagtatgtcgtcctgcttgcatttcttccatgttccttttctcactgtaagcttagtttttgtgatcagcttccagatagaagagttattaaagtagacactaaacgattccaacctcctgaatctctttttactcctgtaacacttccatttatatttatacataatggtattgtcaacagtacacatagtttccatcagtttgttaatagtgcacctttagattgaatgagcttcttgcagagcaccaaggattaggcattgaaatgtgtggataaaaatattagaggaccacacatcattattatgcaacattgtctatgcacatgaacataattgtatcggtagtaagccgccagcatgtttgaaagttaaaaatgtgaattaagaacgaattatcgtatcctgctatacttatgcaacctaccaagaattagggcattgtagaaaccatataaagtattgagatcaatttgaatttgtctgcctcatgattttttgatacctgacctttatgaaggtagaggacaacattaaggatgatcatagactaccaacattcttcttcagattaaatgttaaattcagtaatttaatttgtttcaggtgagccttcttcacatattgagcaacaataatca

SEQ ID NO: 8762 - DNA, 927 bp, Zea mays
  Intron number 1 from transcript AC233878.1_FGT001 (locus A C233878.1_FG001) derived from phytozome v7.0 (chr-ID 1; po s 272718564 to 272719490 reverse strand)
gactatctccagtgcttcctcaagaagaaagtaagctaatagcacccgcttttgttttgtatgtcttgcagttgcagtacaatacataatactattttggacccacctgacagttttactctcaatcagtattctcatatttttgttaccaatggaatatgatgttaatgagcttctctaccaagaatccagacatgcaggggcgaagctatgttgtgcactctggatgcatatgcaccccccaaaaatccaaaaaacagtgataacagtcaaatttccaccatatatgcatcacccaaattttgttcctatgcacccacaagagacgtgcacccccttatattttgctctagcttcgccactgcagacatgtaccatttcctatcatctttgaaaaactgaagttaactctaattaattgctctgcgttgtgtgccctttgtaggaagatacatcatagatctacaacatcacttaatcaagtttgttcatgttatttgtttgggttgcttactgttgggatacagcaacaaaaatagagttttgttgctgtttttatattcctagtgcaaatgtcactgaacaattacatatgaaacttattcagataatgtggtgctattaccattttatttgcattctattcacaaatacacctttcattacacgttagccgcatgcctgcatgctacttacaagtataattaccttcctgcttttttatattttatcatttgataataacatgctattgtgtatgcggcacacctgttatttctgggacatgcgtcttcttataacttcatttaattaagacaaactttagtttggacttttgaggtcatccttattttgctacaccctacatattttattctttttcttttttctgattgtgttttgaaccagcaatttccaatttcatat

SEQ ID NO: 8763 - DNA, 641 bp, Zea mays
  Intron number 2 from transcript GRMZM2G105800_T01 (locus G RMZM2G105800) derived from phytozome v7.0 (chr-ID 4; pos 1 6345388 to 16346028)
aggggaatagaccattgcacgttgcaactcggaaggtaagcaccattataagtgatattatctcagaatgttctgatttctactactgatttgagtcttcctattttacattttgacaataagatgttttgttgtatctatggttgaagctatgttgctcaggagaattactagaacagagttaccacattcgtgagatatcgcataagtctccaatgttttataaaacaattctaagaagattttgcaccttttctggatcaaacaaaattttagttcaggttgtactaaaaaagaaatactttcttccttaaaaagcaaggaatttatgagatgtttggtttgataaataagctagtccatcatcttctcactcctcacttttttgtttggttttttaaatggaatgagttaatccatcatcatctcatttttcattgttagttagtactaacattaagaatatgatcattccaccaaatttgaagaataaactcatgatgtaccacctcatcttggatggagtgactcctgaaaccaaacaccccttggttttggattgagtattgctcaatcttaagaatgcttttagcttttcaaagaagtcaaaaacggattttttgttttatatgaagttacag

SEQ ID NO: 8764 - DNA, 702 bp, Zea mays
  Intron number 2 from transcript GRMZM2G353147_T01 (locus G RMZM2G353147) derived from phytozome v7.0 (chr-ID 1; pos 5 6946064 to 56946765)
ctgattctttcatctctccagagactttgtgggaggtgtgtcattgaatcacttatgtaatttgcacttttgcacatatctgaagagctacattttctagcttcgatcaaatccctcgatttggtttgcagccttatgaccattcaaagttcttttggggcagcaaaaaacacaacagtgtaggggttttcccttttattaaatatatgatatatatagtgctttccaccttgtctctaacatttgcacaaatattctagaatatgtaaggaatagggatcgttctattcctggtaatggaacaccacaattatttcctgctccatggtgccaacacatgttttaactagaagaaattagataggagtcaagctcattggtgcttttgaaatgtagttctggccagagtaaaatacattcatttcaacagccacatggccacactagttttaccaaatggtacccgtttgttgttagttgttacttggtagtatgttttgctcctttgagttcgaaacaacatttttttatgttcaagtttacctacaaacctcgggtgctactaagtccttaggtgaggcaaggctcgactttaatgctagattttcttatgcgaatcaagaatcacttcaatcatagtgaattgtaacttttttctgcataacaggatctcaaaccagctgtttcatatcttcaacctga

SEQ ID NO: 8765 - DNA, 856 bp, Zea mays
  Intron number 1 from transcript GRMZM2G050961_T03 (locus G RMZM2G050961) derived from phytozome v7.0 (chr-ID 1; pos 9 6114707 to 96115562)
accctgccaaggtgggtgggttcgctgctgtgtgaatccatgcgctctggtttcgagtcttcaaggtttgctgggtggaatttatgatctaagtctaacggtgtggttcttggtttttttttggggggggcaggtggcgccgcagaacgaccgggttctcgtccgtcttgagcagatccctgaggtctctccgctatcaatcgtgtctccactccaatacgcatggattgagacggatacgagtgtagccgtataaagcctaagtgctgtagttactctgactttgagagcaactacgaccacttgggttttgaaatgtcttatggaatctgagtttatttatatagcagtataattgattcactcaagctaacactcccccaactataattacagtattctgtttactgcaccgattagagatattgcagtactatcaataagtgtggttagtttgacatgttagcagggctctgtaattttaaaattttagaatcaactgttgcacccgtccttttctatacctgaattactgtacaatcctgtttcctgtgaaactgtattacaggaatgcacatgtgtctgctgaagtttttagaagttgatagtttgatataattgattgttctgagttctgagtttctgacaaaactgttttattcatgcagaaatctgctggcggtgtattgctaccaaaatctgctgttaagtttgagagatatctgatgggtgaggtgagatcttgaaggcactactatctgtttctgtgattgttaattttagtaggatatagtctgaccacattgtattgttcatgctagattctatcgatcggtgctgaagtcagtgaagttga

SEQ ID NO: 8766 - DNA, 381 bp, Zea mays
  Intron number 1 from transcript GRMZM2G116873_T01 (locus G RMZM2G116873) derived from phytozome v7.0 (chr-ID 1; pos 2 91561994 to 291562374 reverse strand)
ttgaacggcttctgtaccactagtttatactttctgcatcttaaaatagtactccctctattcttttttatttatcgtgttgtagttcaaaaataagctagcgaacgacagatgagtagtcattttacctcttgattttttatgtatatattcaaatggatgaagataaaactagacacatatataaaacacatacatcaaatattgtataaacatattagttaactaaaacgaatttcaattttggacagggatagttttttttttgtggttcgctagaactcagtggtgcactgcaaaccattcccccctccctccaaaagaaactttgccaagttcatatgtatgtcgacttaaaatattacataacgttctggatgc

SEQ ID NO: 8767 - DNA, 633 bp, Zea mays
  Intron number 6 from transcript GRMZM2G355358_T01 (locus G RMZM2G355358) derived from phytozome v7.0 (chr-ID 1; pos 2 2621745 to 22622377 reverse strand)
cttagcttttacgcaccaggtgtgttctctttaggatttgaaattgtcttgtgatttcttttcaatgaacagaattttgatttttcagacttcttttctggatgctaagttgtatatagagtagtttttagtgctcgcatgtgtggttaatcatacaacataggttcttcaagctcatattctggatgcatgctattgttactttgttagcgtgttcatagattttgtgttcagttgtgcaaataaccacctcatagccttatgccatgccacacctgttttagagaacatgaagatagcttgcctcacttcacagacttgtagatgttcataagcgtaatgttttacccctaagtcgttgtttctctaaactattgcttagatgttttatgcatgtctattggatatctcagcttttatgactgggataatggaatcacaatcatgtgtgctcgctagaaacattctgcagctgtttaactagatgctggtttcttgcaaaagttgtggtctgtgtacatataaaagtcactgatgtttcctatttttcagggtcaatgttatatatttattattaagaattgctcgatgtttacaatcttcctgtttttttactgtcaagcgcgtgacgcc

SEQ ID NO: 8768 - DNA, 756 bp, Zea mays
  Intron number 5 from transcript GRMZM2G355358_T01 (locus G RMZM2G355358) derived from phytozome v7.0 (chr-ID 1; pos 2 2622392 to 22623147 reverse strand)
ccaaccttagggagacttgccaaccttgtcatcgcgtaagtttctgtctctgcatggaaatcaacatgtgcctgatgaacaatctattagtttctaaagatttcttgatgctttggtatttttagaaatgaacatttcttataaaacaaactctggattcctctttgactgaatctactaaggcattttagctggataactattttaatttatttgattttttccaagtgttctcactcatttgacccgagtcaacacaaattctctttatcttggtgcagccatcggtctcttgagccagaaaaataaattataacatgatttctactttcttctatttcataacgccgagataaactgttgttaatatgtagatcctcattctccatgctgaaccatttgtcctgtttacttatgctgattacaccatagcatttcttctatcatgagtgtgctggatgtataattactttggtcacccaacactgcttctattgtcttgaaatgtaatgctatagatatatgtccttgatgacaagggactgttaaagaatgaattaacacagaacacaatcatttacacttgacactacttgtgctaagcattaacattggcttctctctttatatacaagaagtgttttacttctattaaggatgtggctgatgcttatctcccaaattctcaattaatagtcaagaatgtaccatgctcaaggatactcatattgattgcaccttgatcatgcaggtacc

SEQ ID NO: 8769 - DNA, 861 bp, Zea mays
  Intron number 1 from transcript GRMZM5G828630_T02 (locus G RMZM5G828630) derived from phytozome v7.0 (chr-ID 1; pos 1 41736689 to 141737549)
ttccgtcgctgcgaagctgatccctcgtgttcgccatggcccccagcgtcgccgtggaaaacctcaaccccaaggtgacagcaccgcccgttttcctcgccctgtctacctgtctgtccattgaaggttccgttttgatggattcttcggtgggaagtttgggctttgacgagacagaaagaagcactgtggatgtgctgcgttctgcatatccctgattcatctgagccgcggctttgattctcgtttgcttgagaaatttggggtgaaaagattatccttgattcgctgcagtggtacatgcgtgcttagttcttgttctgatgatccggttttgattcatactttgaaatcaaatgagatttttttaggatatttgtaaaataactgcaccggcgcaaagttccaacagtaagatgttgggaacaagtgtagttccttttaccgggatcactagttgctatcgctctctctcaacccagagttagatctcagtgcgactcgagctgctggagtgccttttctttttgttttgttttgttgtgatcgaatagtttaatgtcatctatgtcagtatcctttttctcccctttgacttcaaaaggggatacggcggtttgtttgaactgctgccccattctggtgcaaaatgatgataggttgatgctgtactatttatgcgagatctgaggtactacaacgttggcaagctgtactttgttactaaacctattgaatgtcgtgtgatcttgatctccacctgtttcatagacaatagctttcgtgctttgcttgtctaggtaaggcgagtgtggcttctcatgcctagctaatacactgacaactattacaggtcttgaa

SEQ ID NO: 8770 - DNA, 884 bp, Zea mays
  Intron number 2 from transcript GRMZM2G702494_T01 (locus G RMZM2G702494) derived from phytozome v7.0 (chr-ID 4; pos 7 9588292 to 79589175 reverse strand)
cacaggtataatttcttaactattattttgggtgaaatctataaatgaactcaagttttgtgccaattctttgtgatttttggctaaaaatggttagccattttatatgtgcacatagttagtttatggtgattgctgacgtgaattatttattgtgcactaaagttatgaaccatatggttcaatatatgagatatgaacctctgagttgctcaatttagtcactgaagtgcatttctaataaccacaggccccacctgctgacaaggacgacgatgatgatgttaactcagcctatcatagtgataaaaaaacaatgtgttcaactgaaaagttaccagtgctaatcaactggaaccaacatcatcgatgtcagcatctgtggctgatttgtgtcattgctccagtggatggcgcggcttcttgctgttcttttggacaaacatctaccttttggaactgttaatggtgatgctctttctaattatgttcagttcacctggtgatcggatgatgcagaactctcgccccgtttaaaagtttgagtttctatgggaagcgtggttagctgtaacccgctagggtgtgtttttcccccatgtaataggttctgacttagctagcattggtcatggttggttgggcatattttccttttcaggatggttttctgattaggagtagtttcgccggccttcttcgattgacagtcttctaagtcgtagttctcgtgttggtaatatatgaaactcgttgcctatttcttaatgaaatgggaggaaaccctttctgttaaaaaaaatgaacctctgagttgctcagtttagtcactgaagtgcatttctaataaccgcaggccccacctgctgacaaggacgacaacg

SEQ ID NO: 8771 - DNA, 742 bp, Zea mays
  Intron number 2 from transcript GRMZM2G178919_T01 (locus G RMZM2G178919) derived from phytozome v7.0 (chr-ID 4; pos 1 73317356 to 173318097 reverse strand)
agagtttgcaggattggagtactatttccatacaggtgtgtgtgtgtgtgtgtgtgtgtgaaatcaataccattttgcttatttcttctttcctcagtttgcattagtagacacaagttaagctttcatgttggcaaaagaatcacgtgagccatagtaaactggtttcataaccaagctgagaaaactcacttgtctagaaaatactttcttagtaggaataaataatagttcattgcactgccaatggcatattatttttgtggaaggatgaaaaaggtaccatgctatggcaaggtgaaataaggggttttgtagctgatatttcaggagcacaaataatgtattctagatatcttttggaccaaaaatagcaagttactttgtccccttattcaagagcttgggaagtgaaatatgattagacaagaagcaaacatgttttttttcattgtctcagttcttttaaaacctgcttatgtcttgagcttatttttttgttggtgttttaataaatgctataaaggctcgtcaggttgcaaacctgctatgatctcttctgtatattttagctacttttagggttagttgctatactcaaatagtttgtgactattccttgactgcgatagttagtatttgagttcttccatgtgtaatgtgttgtcttttgcacttgtaacgttttgtgcttatacatgtggcagttggagcttgcactgaaaagagagtttggtgaaac

SEQ ID NO: 8772 - DNA, 1029 bp, Zea mays
  Intron number 3 from transcript GRMZM2G103740_T01 (locus G RMZM2G103740) derived from phytozome v7.0 (chr-ID 10; pos 10603829 to 10604857)
accaccgcactagccatcgcctaccagctctacgggtattcccttgtgctgggccctttcttttagtgtatgctttcttagggcctgttcgcttcttcagggcttgttcgtttgtgtcggattggtgggtcgaaacgatttctagccggattgcttctctaatttatataaactttgattagctggaacaattccgggcgcaatccgacgtaaacgaacaaggcctcaggaatgaacccggatttattccagctcatcaaaatttatataaattataagtgcagcttatagttgatccttcgatattactgacgattatatacccttcagcgccaaacaaaatacccttttttcttttaatatggtgaaaagaacagcaatggttgcggagatccctaatttacttgcattttcagcccattctaaggtccaatacgcatttttagcttgaaagctcaaatttgttggaggtcctgttagaggctctacatgtgtgtggaaatttgtttttttggaaggttgattatttccatcaaggatggaccatcaaaatattcgaaatttagattttttgggggtgaagattggcatgtctgtctgtacaacctctaacccatgtatatgttggtgcttatcaccgagtcgaatgatacattgtcaagttgcttttctgatgcaacagaacaacatcaaaattaaactatatgtgtttaaaatagccatttaaaaggaactctgactaatacaaaagtagcagagtatgtttttttttctaactctcaatttttcaacttgttgagaataactttcagacaatcagcatcacctctctcatctgtcttatgcatgtggatgtggtggtttatttctcagctttattcatgctagtaattaaggaaatggcattagaaactgtatcgttttgaaaaaaaacacaatgctactctcagatggtttgaggactcagttttcttgtcctctttggacaatgcagtccagagctgtataagtcaagggttttggagctca

SEQ ID NO: 8773 - DNA, 903 bp, Zea mays
  Intron number 2 from transcript GRMZM2G093344_T01 (locus G RMZM2G093344) derived from phytozome v7.0 (chr-ID 1; pos 1 09901 to 110803 reverse strand)
catcccctgtccgcgagtctcggcaaccaaatctggtatgaagcagaaaccgtgcaaaagatgtttctgtttttttaatcttcttgattcatgggtggtaaatcccatagttattgggctacatttcctatatgcctaattagggtttcagatttggttgctgatatcatttgttagcagtagaacttgactgatttgattaatgatactgttgtagaagtctgtgatcataatccttagtattaatcagtaattgttttaactcagttgtattctgtaggaaaacaagtatgttgaggttttcccctttttacaggccagaaatggttctaggctggtatcactcacatcctggcttcaattgctggatatctgacgttgatatcaatactcaacaagtctttacaaatccgcttgtgttctgaaagggatgttttgattcagtctatcaaaataggatagctgttgttgttgcactgtattatatgtcatgtcgttataaatactgatgtgtttttcttaataaaacatggatatgatattatgctacactataattgatcaactggaagcgctaggcagctccccctcccctcccccgtattgcctatgttttcaatttcactaccttcattgtgtaggctccatgtcttccctgaaaattattggtgaacttatcttgttggcagttcagttaacctgcatgttttatttatataaaagaaaaatgggagacatttgctaattattgatcccaactcactggagttcttcttgtgactacattttgtacttctgttctgtatcttatataagttccaagcactgcactcataggtctaaatctgttcaatatataattatgcagagttttgaagctttgaaccccagggcggttactgt

SEQ ID NO: 8774 - DNA, 1031 bp, Zea mays
  Intron number 1 from transcript GRMZM2G108032_T02 (locus G RMZM2G108032) derived from phytozome v7.0 (chr-ID 1; pos 3 3121976 to 33123006)
ttgcggaagcgagctcgccgcggcggtgcctccaggtcagtggctcgcacagtcgcactccccctttctacctctctctcgtacttcgttttttttcctgcgagttatcatatccatcgtttgagcttcctggtgacatgcagatggctggtacgattactccgcctacaccgacgtaagtctccatgcaccgaatgaagcattcttttttcttccagaatcgccaagcttttatctgcacacgtcatgcatgagtaacacccagcagcaaatgcaagttcgtttcgttcattattaaccgttcaaactatatgcgtgtatctctgatggttcttgcatctttatcaaacacaccatttcacccgggtgaccactaaataaccaatgcggtcggcagcagagagagccggggaagatggcgaagctcaaagccgccattgttgggaccacaaaacaaatgcttcctcttccccacaaggccacaaatccacaatgcacatgatcctccctcactctctccggtccgtccggccggccactccagttttgttcccatgcgtgcgctgggacacctcagcgcccccaccagtacagtacctaccacactaccagagatgctagcagccaatagacattatcacacggagcgagcaagtgacaagtactatactactacacttctcgtcttctcgatagtattctaagctccatctggaatggttgcaagcatcgtgatcatcatgtccctctttaatttatcaagccctgcacgcgcgcggctaacatgcggttctgggccgaccaagtgaccaactaacgcagcgcaagcaacagtgagccttcgcgtcgcgcgcgtgtcatctgtcgctgtcacgtccacacctatcatacgcttgagctttgatagaataaaataaactatgcgcggcgcagaacatgaacaacagagtagagcgcggcgtgcgctaactccaggtttatttgcgtggcgtccagtgcaggggccagccggagccggcgctgtacaacgg

SEQ ID NO: 8775 - DNA, 781 bp, Zea mays
  Intron number 2 from transcript GRMZM5G817939_T01 (locus G RMZM5G817939) derived from phytozome v7.0 (chr-ID 1; pos 2 82972647 to 282973427 reverse strand)
agaaagatctccaacgcctggatcaactttctgtaagtatttcttgaactacagtgaatggtctgctgtttgtggccttgtacttaaaatgctcaacacatatcatacatacatgataggtagagtcaaacttctctgaactcttaagctctccattcatgcaagtagcaaagtatccatgtgactactccctggaaagcaaatggatcttttgtatgcttcagtgcagactacattattttgtgtgttttcccagtaactacacatttttgttatggcaataatatatacttatgttgtaccagtgcaagaagacagtctttaacgcaacttcgatcactgatatgaattctgatgtttttgcaaaacctgtaatttaactctatgaaattgctctattaaaacaaatctatgcttactgtgttgttatatgttcgatccaatattcacatgtataagatatcaatagccaaagttcaaacagtttgactgcatgtatctgaacatctcctcttttatgactgctgagagtagtaaccatcagcatttggtttgctccacccatcatgaaacataattaaaaaaaagcctgtatgtctttggactctgaggatctttgttcgatggcagtagaacagattatgtttgtcccttcaggagttagaatcatgatgtacgttctggcataatcatattgttctaacagattgatgttgatgcaatattttcaaatttctatgttgcagctgagtaatttccgaccagagttcagatcgggtct

SEQ ID NO: 8776 - DNA, 746 bp, Zea mays
  Intron number 1 from transcript GRMZM2G087409_T01 (locus G RMZM2G087409) derived from phytozome v7.0 (chr-ID 1; pos 2 6087357 to 26088102 reverse strand)
gctatcaggcacgtatgttcacccctcacatttacattgaattgaacaaggtcttatgtttttcttagggttctacctatgtgatagggccatcacatactgatagttttctttcaagaaagagtttctactatttttgtctgaaaaaagagagttggtttcacctgtatgcatgaaagattacaacaactgtcatgtttttgtatgaaagtaattttatagccgcaaatttaaaatactccctccctccttttgtatttgatgttggttagatgggggagggagtagtaaacttgaatattttaaataatcaggtactccctctgtcccattatatagttcgttttgccttattttttttgtccatattcaaatggataacaatgaatctggagttctagatacatatataatacacatacattaaagattaaatattgtatgaatccattaacactctaaaatgaatactatttttgggacggggggagtatgttttagaagaacctagagtcacacctagttttttttttgggagaacacaaacaggtgaatttgacctcttggatcttcagttggcagcattctctcttgttattttaattttcgtaagttggtgctcctttttggtgggttacttgtgattttatcattttataagtagcatagattttcgttctgagaagaaactaaatgacttctttatcataggacattcgacaaaatttgggtggcattcgtggtac

SEQ ID NO: 8777 - DNA, 405 bp, Zea mays
  Intron number 4 from transcript GRMZM2G169462_T01 (locus G RMZM2G169462) derived from phytozome v7.0 (chr-ID 4; pos 2 41074463 to 241074867)
caaggaaggtaatattttcagtttagtacaattcataataatcaacctgtatggtaaactgatcgttccttagtcctggcctttatgcgactctaaatacaagattacatttttataaacaatgtctccacattgtcctaaagaaggtgcattgtttgtatggtcccaataatagcctactccaaaatgctttttttttttgtaaaaaactatagttcatggtaagtacctgacacactatttgctatttgggcaacagcttatgtcttcacattgatttcatattatacactttcttcaaaaagaaaaaaatgtttgctttctgatgatttgtttatgttatttattcatctattattttacaagcaaccctaattcttaactgttgccaggttaatccttcgg

SEQ ID NO: 8778 - DNA, 654 bp, Zea mays
  Intron number 3 from transcript GRMZM2G050825_T01 (locus G RMZM2G050825) derived from phytozome v7.0 (chr-ID 1; pos 3 5659889 to 35660542 reverse strand)
gctgattcttcaatttgtgagtatttgctacccatgtctatgacaagagaatcttacataattagtttatatacttgagatagtgtggcactttttttcatattgaattccaataaacctgaggtatggttttttaaggaacatcaaagtaatgacttgttttccagaataattgatcttacataaacattgaaggatgccaagtgcaccacatttgacattcgtgtatgtagggaatgagtaatttcggtaatcagtatcacctgtttctgtcccaaccttgttttactaatcggttgctcgtgtgttactacggtttttatattcgaaatatttgcaatatctattctttgttgaacacaaatggttgtgagctccaatggttagaacctgagtgtgggagcggggagagtgatggttcgaacccagcactgcgctcattttttggacttttatttcgttcgatgctcgttgcgcttgctgacgacgcacgaagggagaaactcccacttaaatatagtagagaagagatagactacatgtacctgcgcttgcccttttggtcttgttgtttctaacagttcttctgtataacaatgtttctgcattctttttgactgcttgattttatttcagttacctttcccagaatcc

SEQ ID NO: 8779 - DNA, 825 bp, Zea mays
  Intron number 1 from transcript GRMZM2G050825_T01 (locus G RMZM2G050825) derived from phytozome v7.0 (chr-ID 1; pos 3 5660886 to 35661710 reverse strand)
acccgtctgcactcataggctggttttgttcggtggtatggaaccttaatttttcctcgtttgatttttctcagaattccgttttctcccgcgacattattcgctcctgcgagcaattaattccaaacgtttgtttctctctatcggttccccgggtctgtttgttgcttggtggagtactgatctggcactcaatccatccgcgattgtgttgggctcgattaacctcctgagaacacgctaggtccatctcagttggtgccgtagggctttgtgtgctgatgcggtttaatttccagataagaaaaaatgggggttcaaatccgtagggctttctttgtagcattgattgaaatggtacggtagtagctgtacattcgggacaaccatgtggactagtggcagtgtgaaggttttgctgctagtaatggtttcttcttcctgcttgtaactgtgttcgcataagtctcttatcaatggtcctgtaagcatgtgcctcatagcccgtgttgtattccattttggaactctacccttgttaaatacaaagctgcttattctcgaaaaaatatctgtggtcacggatgttaagtcttcaatctcctgagaatcaaagacaatggaggtgcattcgtttaatggaggatctctaagatgtgagcattgaccacagagaaataaaccatagatatgcattttttaattgctgacaattattttgatgttgaccaatgatcattctcttttcttatttacctgttattgatatagtgttgttttgctttcgtagggagggcaacttgagtctaagatattcaggtattg

SEQ ID NO: 8780 - DNA, 249 bp, Zea mays
  Intron number 2 from transcript AC212343.3_FGT002 (locus A C212343.3_FG002) derived from phytozome v7.0 (chr-ID 4; po s 210048829 to 210049077 reverse strand)
ccagtgtcgtaaggatcctcgttttcatcgacgttgtaagccttccctatacttttgttcttccgaattcgtacgtcatcgagatatatataattcttctgcaaatagtagaattaattcatcattaccattttttgaattccttgaaaaatggagttgccctttactgtttctacgtagtacctgatatatagatgaatgtgtcgttgttcaggtactttgcgcgctactaacctcgggaggtgccgc

SEQ ID NO: 8781 - DNA, 659 bp, Zea mays
  Intron number 1 from transcript GRMZM2G156283_T01 (locus G RMZM2G156283) derived from phytozome v7.0 (chr-ID 4; pos 2 19723077 to 219723735)
ggatcttcaccatcgttctctgaactgctgcacaggtacaactatgagattagattatttctctgaactgttgcatagttctctgaattgctgccagattatttcgttgagatcatttactagttctgatgactgaagtggttagcaaaaactgattggtagattattttaaaaattacagttctaatggttttatgtgatacatggtggaagagcaaccacaaaactgctcagagaatgaacacctaggagcaacatcacatgttattcagattgatgataaacctgatgaaattaggaaggagacaagactaatatggaaatcagatgaagatgttagagtggtaattatttttccaatgcactttcagtttttattttctcacatggaagggtacttatttgcttgtgtgtctttttcttgtgtagatgagtgcttggctgaaacattcattgattcattgagtggaaacaataaaaaaggagataagtattgggaggatgtggtgaacgagtacaatcttactactgagaaaatcaaatggaggactaaaactcaggtaaaggagaggtggcacaagttaaatagatggataaacctattcaatgattgttggttgaaagctatgaatatatacactagcgggtattcggaccaa

SEQ ID NO: 8782 - DNA, 920 bp, Zea mays
  Intron number 2 from transcript GRMZM2G401075_T01 (locus G RMZM2G401075) derived from phytozome v7.0 (chr-ID 1; pos 1 48833854 to 148834773 reverse strand)
attgaagctgcaaaattaacttcgacagcaacaaggtgagtgaacgcttcatgtttatttttttaattgatgtgatttttttcttcggattacacaataaacaactgaaatcagattttatgcaccactgaatatcaattgccatgcttttctgcccataatagaggatgagaactgctgttacccgtcatgtaaaagagcaagtatcctcgacagacataagcgaacagcagttctcatccttcttccgattttttattgcttgaaggtgatctgttttttgccaatacataattaaactgaaatctgatttcagttgaacaactgcattttcctgttaaagaaatacaatgttcttatgtatgtcgaggcagttaacagttgttttttgtgttaagtaatacattgttaagtttatgtgtattggggttttttgtgttgggggtataaagtttatatgcattcttccggtatatatcggttgatgctaattcgtagaaaaaatgatagtggggaggcttggatggtactatactttgaattcggtgcacttgcatccgttcacagttctctttgtgatctgcttctcttcatgttcttttgcgaatataccattcaacacaaaggcaaacacccttaagtgcttctcttaatgtgcttttccaattacatcagttgctctgtgagacaaccactcactttgaatttctcaacaaacatgaaacaagttattcttacccattgatgaacacatatatataacaacctagggagactgaaatgcataagctcgcttgacgacatgatgactgattagattaaaatggctttataaagtaaacgaaatgataaatgatcaagttgcatatgccaacatcacattttttaatttaaattttgttaaaggctagaaggttttg

SEQ ID NO: 8783 - DNA, 621 bp, Zea mays
  Intron number 1 from transcript GRMZM2G401075_T01 (locus G RMZM2G401075) derived from phytozome v7.0 (chr-ID 1; pos 1 48834732 to 148835352 reverse strand)
gaacttggaggtgttgcggctctgcacaccccttggttagccttactcaacctctgcatcccctcttgcttgcttattccagcttattcacgaatttaaatttagtaactcaaatttattttgcttattcttcatatgctcattagtacttatttattttgcttgatttgttaatgaaataaaaccaaaatttgcttgatttcttcatatgctcagtttggttacaaacttgatgcaatatgtacagaaaatgaggtagttagaatatggttaggcactgatatggttaggcactgaaatctgttttttgccaaaactcaatgacaactgaaatctgatttgagttgaacaactgcattttcctgttaaagaaatacaatgttcttatgtatgtcgaggatagattcttatgtcttgttcttatgttttccctaatatgtataacttttatatgacatatgttaatctatgaagaatatctaatctggaattttatgtgagggcctgaggtgaagtctcctatgtaggtaattatattttcttcactatttcagttcttctagcagttgaactttgctaattgaagctgcaaaattaacttcgacagcaacaaggtgagtg

SEQ ID NO: 8784 - DNA, 344 bp, Zea mays
  Intron number 7 from transcript GRMZM2G096107_T01 (locus G RMZM2G096107) derived from phytozome v7.0 (chr-ID 10; pos 143080608 to 143080951 reverse strand)
tgcaggtttgtgtagttcttttatcagtttttagctcttcttttgctcatctagtttctttttgattcactgatatccctttgtttgtcatttgtcttgttaatgcattgctatatctaataatgcttactttgtactatacatataatgaaacaccactaactcccttggaacataatgcttctggatggctatcacattcatgcaatgcttttgtagttttgtatctctcgtttttacactgtgtgttgtatctaaaatcagcacttaatatgtattgattattcccaaactgtcttgtttctacagggccatcctgaaatagttagccagcttgttgatct

SEQ ID NO: 8785 - DNA, 747 bp, Zea mays
  Intron number 1 from transcript GRMZM2G073581_T01 (locus G RMZM2G073581) derived from phytozome v7.0 (chr-ID 10; pos 141685225 to 141685971 reverse strand)
aggtacgctgttgtgtgatcatgtaagtatctggtgaagtaacgtctggacatcaacacgaagggtgaacagtggggatgagtgacattgtactctctatacgataacatattgcagcaattctataatgaaacagaaacattggagtggggaattctgcttttgattttgcaattttttctgttgtaaaagagagcaattcataggggtgggggtgaagggtggtggtggtggggacataatctgaagagtttcatttatatacttcgagtgcagaattgtacgttttgtcaatttgtagtggtcaacgcagggaacaaatatctgagctgtgcactcttctttcatccagcagtgcatggtgttcttcttccatttgtggtagttcaattcgctggccaataagcacttctaggtttccagatttgtggtgcatgttagctcagttcatattagacagttttctgattgtctatgcacttagtgcacatttttgttgttgtaggttgaaggctttgtataatgttgtaaatttgcacaatatgtttcttggtttatgcgtagcattctccattgttaaagtatgataattgcatgcgaaattccatgaggttttatcataaacattcagcttgttttttatgttttattgtactagtgtcttaggtcccaatgattgcttcataattatatcaagaaggttgcaatctttgacttactgggactttgtcaagcaggttgccattg

SEQ ID NO: 8786 - DNA, 713 bp, Zea mays
  Intron number 1 from transcript GRMZM2G181348_T02 (locus G RMZM2G181348) derived from phytozome v7.0 (chr-ID 4; pos 1 75727069 to 175727781 reverse strand)
gaaggacgtggagggtcgctcttagtcatcaagaggtccgtctctttctgacgtgtttgcatacaaacagaaaatcttatagtttgccaatgtcgtttgttctagcaattttctatctactaaatcataaacatattagttgtttggcatagtagatcaaatgcataatctaattactggactagaaaaaatatgatccgttgtgctttgaatggtttctctctgtttcctagatgcagagcatggctcttattctttgcatgtttaaatcgattgtagtgatttgtttagttctgctctgcaaccctttgagagatacatacctgggtttgtatatttgtccatttcagaggtcaatgtattaccttgtcaggcagcttcaagatttctaaaattgacaaaaatggttggaagatcaaacatcgagaattcactttctacaagtggaacaattgcatatgagggcattgatctattgacatgtgcccatatttctatttatttgtcttcaagttctagatatctctcttattctgatttctagatatctctctaaaatttatggttgtgttagatatctctcttattctgatttctagatatccctcttattctgatttctagatgtgcttggtacaggtcagttttacctgatattctgtttttgttccttgtttgtttgaactgaggttgatttaggttgtgaacttgtg

SEQ ID NO: 8787 - DNA, 861 bp, Zea mays
  Intron number 1 from transcript GRMZM2G097381_T01 (locus G RMZM2G097381) derived from phytozome v7.0 (chr-ID 4; pos 6 2392988 to 62393848 reverse strand)
aaagcttcaaggttcattttcttttcttgactccatcttgtgtcatgtagtctttttatgttatgcataatttcaactgtgtactggttgactggtaaataaaccatgttgtcggctcatcaagcactgtggagtcgtcgtccgtaggaacttgaaaggcaaattgggcaatcacaatatggtgttgttcattctttctttaactcgtctgatgctggtgttgttagatccttacgagttcacgaatcacgacataagtgagcatctgttcttatctgaaagaaatcaaaccttcagcttcccctagctttcttggaggatacaagagagtttgggggcgttgatttgttcttttttactagaagaaatatgatccccacctcaagcatttcagtagaagggccatcaccttggcttatgttctctgttgttggctttcgaattctgtactgattcatgtcattaaaaaaggcaaagtttgagtaggaaggttgtgcacggcgtcctgttcatgtcatcctagccacttgttctttcttctgtgattccctttccctcctatgaaactcatctgaataaaggttatgccaccttaatttttaaaaatggaatgtctatcttaccaactgagaactcaagacaaatgacacaatttgtattagaggttaaagaggttgtaagacaaatttgtattagaggctaaagaggttgtaaggttttattgatattcacacgcgcaccatgattgcacaccacagaagtcagtagtgggcaactgctgatagtagttcgtctattgtttcaagtgtatttttcttatttgtatatattatgtttgattgtatcttgcatgttcgaggg

SEQ ID NO: 8788 - DNA, 762 bp, Zea mays
  Intron number 1 from transcript GRMZM2G357751_T01 (locus G RMZM2G357751) derived from phytozome v7.0 (chr-ID 1; pos 6 2352786 to 62353547)
gcacctacgttggtgtgagttgtgccgcctcatcgcgaccgtcatcgattgggccttcgaggtataggttactctgttgttgcttggtgaatgcttatatgcttatatatgtttttattcgtctgtgctggtgaggttattttaatgagccgttgacaaagacaatgatgtgtcccaggaataacataaaaccagtgcttattttctattcgtgcatgtgcaagtgttgtactgtttcttagaattttccagcaacttcgatgggaggaattttgtttgaacttgtgggcccaattcatatcagtcgcgaccctgggactatcccacggcctgcggcgagcttgcagcgctgctgcgcctcggattagcggacaagtcactacttgggactatttacactcctaaaagggaaacacacaagtacttgatatcctctccttatccactagaccacaaattgtttttgttgtttaccatcaaaatcaaggggttgtctatttcttacaatcagttgaagtttcatatgggaataaactggtagtacacacgggattagaaaatttacacaattaaatgcatacaagaaataagcatctggaatttttaccaaaaacagcgtgttggacatatatgcaacaatttttttgctaaacatctacactagattccatatggaagagaaatgtgataaccactattggctatttacgacacgtttcatgcaaatatgttagcatatctaatttgtgtcttattttgtag

SEQ ID NO: 8789 - DNA, 803 bp, Zea mays
  Intron number 4 from transcript GRMZM2G301961_T01 (locus G RMZM2G301961) derived from phytozome v7.0 (chr-ID 4; pos 2 41391459 to 241392261)
attgcattatcccaggtgcttttgaaagtttttacattttcttcaatatgaatagtctgaacgtgtggtgtggcctgtctgatctatctagcaggttttatttttttgttttcttaatatccctgtgcttttcatgcattgaccaataacttagcgtttggaataggtttctcctttttgtatcattatgtacttatgtgtacttccagggaataccatatttttcatatactgtactaaattgtttggactaataataaaaaccccgaaaagatttctcatggctttccgcaattgcagttaactgcaaaaggtcagatctttatgcctttcacacactgaaactgctcagatatggttttaaaatggatgttgtactgcacagtgtaatgaatatgccaaaagggaaatatgataatatggctggtaccttggtacagtcaccaagcgggttcatgataatacgtgtgatgtgtcttgtctaattgaccggtttagatcctataaggatttgccactttgtgatgtaagcttaagatgaatgcgagtttaggtcattacaattcaacatttccaaagccccatttgtaatctcactctgttagaaataagacagttctttttttttggaaaaaaacattttttgccccatatgcatgtgcctttgatttaatatgtgaactgagtacccagagctggcacatgcttctataaactggtcagtggtaaccaaatctaaattgggccatgtaatgtgacatactgagaacaggtatcctttgctgcaggtttgaacttagaag

SEQ ID NO: 8790 - DNA, 960 bp, Zea mays
  Intron number 1 from transcript GRMZM2G171420_T01 (locus G RMZM2G171420) derived from phytozome v7.0 (chr-ID 4; pos 2 0736310 to 20737269)
cagcgtttggatactacacctgctggcagctacaggttcttttctgatttttacagcttatgtagctctgaaattggaagtgagttagtgaattcgtgtatagtcaggaggcgatgtcgctacctatggacatggacttgggaacgcggcttttatttttgttgtgtgtgtagcgttattggtgggtttggtaacggttcttggggttcttgagcctgtaaagtttttcaaggtagggtttaatctaaccaagcaggagaaggattacctgaatagtcttttcatctatagagttcatcttgcaaattgcaatttgtcaacttcattttgggaaggcaattggttggtagagttgacggtttacatgggatcgatatcatgttcgaattaaaattcagcagtagagaaatttagtcaacattcttgtttttcatttgatcctagtactacctcatcaaccttttcgcaaatataagtcaatactctggtattttcttgtattttttcgctaaaccaagccatttaaaacagagtacaaactttttgcctgatttatggaacaaaagacacatttgctgtgcaatttcccaactaggcaactacagtataataatgactgatctacttgttctagctgtgtgattcatatgaatcagaagtcggaagtctatcttgtttcaagactgatctttaaagttagtataccttccttttccaaaaacaaaaaacaagttgttctaacttctaagtaactagcataagctgcataactttagtccaaatataagtttcagaaattttaattccaaaaacattccattgtttagctgataattattttgagtcactcttataaatctgcaactttgatgtttaatctgcttacattattatgaaatagttccttgtcaacatcaaaacgcagggaaatattttgaattggagatctatatccgcaac

SEQ ID NO: 8791 - DNA, 943 bp, Zea mays
  Intron number 1 from transcript GRMZM2G002492_T03 (locus G RMZM2G002492) derived from phytozome v7.0 (chr-ID 1; pos 2 3937442 to 23938384)
gcgtggcaccactcgtcgcttgcctgcacctgcaggttcaactcgcttgtgcgttcctccctcccgtttcctctccgtaaaaagttgcttttaccagcaggcttggcccgtgcccgtggtttctgcgtgaacgcgggtcgcatgccaagtattcggggaaatgtgcgtgtgtcatttgaattccctctgcctagtgtttgtgcatctggcatttgattttcctctcggccctctctcatgctaccacgcgtttggtgtcgtttcacctgctgcagccacgtcattgcgaccctcaaatagctaaaccgttttagaaagaataatagtagtagtacgtaagtggagaacctttatatagaaaacgaaaagggaaggtgaattatttatcaattatgtgaagcctctctctgaaaacaaacaagggatgtcaaaactcaacaggacaaccgggtcacgtcgatgtgatatgactatatgaggcaccagcttatggatctttctgtgcctactaccgtttttgcctagtccagcagtccagccctggccacaattaaggtttctctaatttgactgccacaggcacctggttttcttgctgcttccgctgtttcttcctcaacctctccagctcagctgccgcaggctgcgactgccatggattccaaatccatgttagtgttcttgcccgtctccctttccgtttcgtttctctttgcagtttgctggcctcccttgtttgtttgtgttaatgttgattcgatctctggttgagaaaataagtagacaggtggaaggaaaagttcagtacaatttgcaatagtttggacattcatatatttgggtattgatgtgccctacctccattgcccccttttcttcagaataattctctcatggttcttgttcagggaagcatttgtggcaagtgaggcctccgtcttca

SEQ ID NO: 8792 - DNA, 1032 bp, Zea mays
  Intron number 2 from transcript GRMZM2G000737_T01 (locus G RMZM2G000737) derived from phytozome v7.0 (chr-ID 1; pos 1 2090395 to 12091426)
gctggccagtccgccaagccaaggtccgagccgttcgaggagaaggacggccgccgcggacgtatcaaaaaagcttcctcctcccggcgtcgcctccacgcgtggaggtgacgatccattccgccccccgtaggattttgctcctcccgatccagacgtcagatctcgcgtggcggcatgcggatctggtggtttctctagaggcggcggcggcggccggaacaggggcagatggcgctctcggggatgcgggggctctctgtcttcatcagcgaccctcctccgacgctcctccgacgctcgccccgctgtgggacctccgctggcgagcccctcactgccgagggacgtccgctggcgagcagaccaggtccatcgttccctatgctcttctccttcaccatgggttaggcaagtttcctacctcctggtatacgttatgtatgcgcgccgccagcccctgccgattggagaccccgctgattggagccgccgccgccgatccgtggccgccgacgccgatctgtggtcgtcaactcgtccatcgccacgaggtcggtggtcgtgttctgttgtcactcgtcagcccgtccaccattgcgaggtttgtggccgtgatctgccgtctgccctgccccttctttcttctcaaagactcaaactcctcccgttcttctctgttcttctcagatctcatggcccgcggcaagttctgtacttctgtggccgcctgactctgactgctaattgttctgttctctgttcttattaaatctatagtaaccaccttatttttcttcttgtttatttcttttcagggaaaccattaaaggggtttaactttcaatttggtagtatataaatattaatgggttgtcggtatgattttgttatccctttttacctccagcttggggcattaagctatatagaagaaattaccttttgctttctacttacatgacatatattaaatataaaaatttgtacaacaatttcatgctaggacaagcgcagctcctccaaacttgg

SEQ ID NO: 8793 - DNA, 839 bp, Zea mays
  Intron number 1 from transcript GRMZM2G113260_T01 (locus G RMZM2G113260) derived from phytozome v7.0 (chr-ID 1; pos 2 52353482 to 252354320)
gaactagaaagaaagcaacaagaggtatgccactgccacaaatacttggctgtgcaaataattttgttttgaagttgtcaagttgaaaagaaaccaaaaggtaacttctgcttgatccttttctctgtaagcattcccagagatgccaaatgctagtgtgcctgcacttttgcatttgatgccaaagcttgatttcttctagaaaaaacttgtttaatttaaattctttcgtcaataccttgtattgctggatcgttcataagtttgattttattgaagagaacaggtaaccaattcaatttccgagattttattgaagagattttatttaaattctttagaaataggctatttcagtaatgaactaatttccacgtttaattgtcatgcactgattaatttcagttacaaaaaggtactagtaaactttgggacagacatgctattttactagtcatgtacagtgttaatttacagttatttttcattgaaattacagaaactggtcatgggaagaactttacatctggactggtatcagctgcctgttttccacgaaaatttgtaaagatcagtggttgccagttaaggtttttgaaaaaaaaaatgtagaaaacgaagcccatatctgttcaaccattaaatctcaatgtcgttagcatgtgtttgccatcaccaagtctggatacagatatctcgggatcgctgacatatgcctagtttttatacacctcatacatacgaggatttctgagaatcttttaaatccttttctaggctgcacgtttgcttataatatgctcgaattttctgattcaaattgttttaaaacgtttagg

SEQ ID NO: 8794 - DNA, 674 bp, Zea mays
  Intron number 1 from transcript GRMZM2G181456_T01 (locus G RMZM2G181456) derived from phytozome v7.0 (chr-ID 4; pos 2 3789676 to 23790349)
gtttgtgaggccgaggtgataaatacttcctaacgactgatttggtaaacagaaaaatagcctttagaaatagtttggaaactatattttctaaatatcaatctaaatagttttaaaaatattttgaataaaataataaacaaaatgatttatctaaatattttatgaaataataaacaaaataatttatctaaatattttctaaaggtttacaactattgctccaagattttttagagcacctagtgacccgctcggctaaatccactaaattttttagagctgaaactatcccaaacataatcttaattctcattatatatagcaagagattttgagagtgtttaaattcactaaagctaatagttagttgcctaaaaatttgctggtagctaatttgctaaaagtacctaatctattaactagagtatttgatgtcttcagctaattttaacagctaactattagctctaatacatttaaagatagccttcctcttcatggatcttctttaatttcttggtcattagatcagccctcggtgtacgggaagtcgggaaccaaacaacaatttagcaaaaccgggcaaccaatcacgtcctatcctaaccaaacatttaaattaattattacttgtaggagtacttctcaaagtggggtgagagcggcacggt

SEQ ID NO: 8795 - DNA, 954 bp, Zea mays
  Intron number 1 from transcript GRMZM2G119886_T01 (locus G RMZM2G119886) derived from phytozome v7.0 (chr-ID 1; pos 4 1760622 to 41761575 reverse strand)
caggttgtctctcaggtaaaaaagatcatctttgtgctattgctacttataatggacaaatccacttgacacgctattcatcatagatgaagagtatattatattttccattgattggataacaatacgtcatcaatttgtggaattaaaattactatggagtaggggtatatgtttgcctacaatggtagggctctgatctgaattttattccttgctactcttcggcagtaaaaatggaggattttacaatttgtaactgttgttacattgacatacataaaccaatcgctctatctggggttcctgaccataaggaatttgttagtactgtggtcttatcaagttttagaagcctatgtcatcaattcgtggaattaaaattactatggagtaggagtatatgtttgcctacaatggtagggctctgaattttattccttgctactcttcggcagtaaaaatggaggattttacaatttgtagctgttgttacattgacatacataaaccaatcgctctatctggggttcctgaccgtaatgaaaatttgttagtactgtggtcttatcaagttttagaagcctagtgaacagctcaacatagtgatgatgctttattcatctcgtttactgggtagtacaggaacatactgagctccctgtaacatatttacagaagaccagcaccacttgttcgaaatgattaagcaaaacaggtttcgatatacatgttggcatgtgtttgagctcagccagtagcccagtacgttgtagtttaatagcaattgatgcattattgccctcagcttactttggtcatgtgaatatttagttaggtgtggtgactccagcattataccttgttttgcaattgtatattggtttgatatagttgcttaccataaaacctttttcagggatttggacgcctttcattagttgcagcatctgc

SEQ ID NO: 8796 - DNA, 529 bp, Zea mays
  Intron number 1 from transcript GRMZM2G003379_T01 (locus G RMZM2G003379) derived from phytozome v7.0 (chr-ID 1; pos 5 4189097 to 54189625 reverse strand)
gccagagatgtgagtagtaactctgtttcttctgtggttttgccattgcgtgggcggagtgttggaaagattgtttttttaatgtgtctgtgatggcgatgcgttagaacttagaaatactgaggccgtctcagctgattcgagaaacttacgtgccaaagattgatttctaagacaattttctttaatagaataggaaatatcagttcagttttctgtgctgtttcttctggtttgtggacagcgaagtatcaacattttttgaattcatcatttttctagtgaagtgatttggaacgccagttcaaaagacggtatttagggcgcttttttaggggaaaaggctataggaaacctgcagcgcgattttattgaaacttatttaaggcgctcttagctgaaaatccaagttagatggttaagctgcattttgaacaagtgatttccgaataaaaaagttacatttcgttgatatcttccttgttcaatttgctgcagccgggaagcttccgaagcacaacaatatacc

SEQ ID NO: 8797 - DNA, 950 bp, Zea mays
  Intron number 3 from transcript GRMZM5G863645_T01 (locus G RMZM5G863645) derived from phytozome v7.0 (chr-ID 1; pos 2 69286124 to 269287073 reverse strand)
gactggactggtgagcatcttttcccctccttttttggttgttatattatcacgaactacttatgcatttactgtttgatttgattttcgtccatgttgatgactgtgtggttgtgaacttaattaactagtaccacaaattattcaccagccatggcaagggaaatgaacgaagatgccaatttctcactaggacgaaatgtacacttaatttttctggtcttaaatcctgaaagtgaaacgcaggactgtctattttttacacttgactttggtggccctgacctttagtagttgagatgaataatgttatctggttcgtagctgggagcttagctgtgattcttcttcgcttactttgtggttaccttgtatcgtgtattatctgaatgtgatctgggagcttaggtgcacaccagttcaattgcttcccattccatattggtgattatccacaagttgttggcttggacatttaattctgaggggtacagattgttgggtacacatcatttataacaaagattgacgtatgaactaatattttccttgtggcccgtttggttcctaggaaccgttccctgaaatgatttatacccggattgtttgcctaatttatataagctttgggtggattcctggacaaacgaacaatgccttattcagtttagcttctccttgttgaattagtaaaactacatgctagcttgaagttgcttatagtttatttactacatataaccataaaaatattaactgctccaaacgttaagctgtaagagcatagaatgagattctatactatagtaaggaaccaaatggtaataatgcagcgaacaatttagctaattaatatttggattttgtcagaactgcaggcaccactgagaatcactgataaatttatcagtctgatgttaacctgtagattgtgctgtgtaatataggtc

SEQ ID NO: 8798 - DNA, 797 bp, Zea mays
  Intron number 1 from transcript GRMZM2G180982_T01 (locus G RMZM2G180982) derived from phytozome v7.0 (chr-ID 1; pos 2 63744000 to 263744796 reverse strand)
acgagtgggcggccgctgccgccggcttacggaaggtgtgatctccatcttcgggacgttcgccaccggagcacccactccttttcttccgttcacgctgtgcgaaacggatcatccaaaaaccagctatttgtatctggatctgatccaatttcaatttgtggtatacatgtattgtgtctacaaactatttttcgtttgtttttttgcaaaaatatttttcgtttgtctacaaacaatttcaattgtagtacacccatgtcctttacccgtgcacacccttgcgctgcctgctgcggttatcccatatttgttgtggagcgtgtgccgggggaatttggtttggatgtggttgggatcgaggtatactctagattagggttcgaagttctcatatgacctgtgtgatgtggtagattcgatgttagagtgtcgatgaaagttgtctctgagtttagttttgcacatgagtattgaatatttgcaggtgtttctctgagtttacttctacacatgtcaattattgagtattggtaggtatgattgtctatctcttgctaaggaaattgtttaggtgttctatgatagtgtttgactttagattgcctattttgaagggacactttcagcgacagtatttaatttggtgtgttgccagaagacctggctctgaattatctttctatttctttgattatcacagggaactctactaatagtatgctggattagcacgattaaactgaagtatgacaaatttgcatatcatccttgcaggttatttctttggcgcactc

SEQ ID NO: 8799 - DNA, 592 bp, Zea mays
  Intron number 1 from transcript GRMZM2G114570_T01 (locus G RMZM2G114570) derived from phytozome v7.0 (chr-ID 1; pos 2 24378881 to 224379472 reverse strand)
agcaaaaaccttttggagatttatcacgatctgaggttcttatcgtccatcttttttttctctgcctgcttcttcgaacttgtttttatgggttaggtaggtaatttggtgcctctttaatttttttgggcaaacataaattcaggtgttattcagaaatcaaaccaagcaaatctactgccagtgaatttcgttttaagttataaagtcagtagctaaccacagaaatttactgccggtgttcagactagttagttctgatctcaccaaacggtacattaattgtgctaaaaaaacctcgctgaaacagagactccgctgaaacatgacgatttactaagtttcaatttttgatattttcttagattcctttcactgctcacagtaaaattagttcatctgtcagtgcaaaccatgtgccttcatcttcagtgttcagttcaattgctcaaataaaaaatgcgtagcctaaatttgtcagtttaacccatctaccctgaactctgagatgttcctgagttggctgcctttctccattagatcaaattaaattctgttggcaccttactatgttcttggaactgcaggatcc

SEQ ID NO: 8800 - DNA, 481 bp, Zea mays
  Intron number 1 from transcript GRMZM2G076423_T01 (locus G RMZM2G076423) derived from phytozome v7.0 (chr-ID 1; pos 1 2186227 to 12186707)
caaccaaagcaggtacgactatttattactttggtttgatctctgtgatgatgtaactgcaactgtagtatgcagaagtttcatatatttgtttgatgccctcaatttagacattaacgaaactgctgctatgtgtgtgttctctcgtcttgatagaatcagggaccatgtccctgctcttgtttagtccaattacggctatttcagtactgaatattttcttcacaaaaaatcagtcctaatgttcaatcttatccaacccaatgattcttttttccctaaccttgacagttgattttatgattattccatgtaatgatcagatacttttgttctgccgtatgaaattcttgttcatcttttggtaacttatttacaaagtttctgaataatctgcaccctgtatttcagtccccgtacttgacttgtctatttgttttctgcagaatctcccaaaattcagagcccctcggagagaact

SEQ ID NO: 8801 - DNA, 483 bp, Zea mays
  Intron number 1 from transcript GRMZM2G034830_T01 (locus G RMZM2G034830) derived from phytozome v7.0 (chr-ID 4; pos 1 98851041 to 198851523 reverse strand)
gcgcctttggcaagaacaccggtaagtcatcgtcatctcttctatttatgcgtcatagcgcaacaactgttcgacgaaatgatcctctcacctctcatgtaatcaaacaattttctagattttttgtccgatcgagactccagaagtagctgcacttactttctcatcaaaggtatcactatcttaagaaaaaaatcgaagatataactaaggaaatttgactgctcatttgctgatgagccaaaccgatcacaatcatttcaatgaatttactggaaattacacttgcatttcaaacccgcattatctgtttgtctgaaataatggctttcattgtacattgggttggaattattttcacttataaaccttattggccagctgaatcatatatcaagcaccaatgatcaacaactattcattttgtcaaatgtctagcctccaaccacttatttgaattatttcatatatggcttgcagcca

SEQ ID NO: 8802 - DNA, 644 bp, Zea mays
  Intron number 2 from transcript GRMZM2G092947_T01 (locus G RMZM2G092947) derived from phytozome v7.0 (chr-ID 1; pos 1 71062277 to 171062920 reverse strand)
gctccaggagaatctcaccggtaaactttcttggttcactatggtgatttcactcagtctagaaactggagtgattctagccactgccagaaattagtaagatgtacatgccactatgtacttaagtgtcaactttatgtttctattaatagtttattcagagtcatcatgccgcagatttggatataagaactctgccttacctattgtagcctcaactgttcgtgagattatcttagcaccgccttgtgatttttaagggtttaactgcaataacttaagtgtttaataaacacagttctagttggacgctcttgactctgatttattgtcgaattaaacttcttgtggaaaagacagcagatttgtagggcacaagttcataaatagcttgtggcataaacctgtaccgctcatgggttgcagctattttatgatgattggaccactaactctgttgaaacaaattcaaatcttggatgctgtgagagctaagcttactacacaaagagaaacaattagatttggtgtctgtccagtgctggcggtgttcttgcacacttgtctggtggtttatttcttcttttgctgcatttacttaaaacctgtactgaatcagtgtttaataatgtggtcacacagat

SEQ ID NO: 8803 - DNA, 991 bp, Zea mays; identical to SEQ ID NO: 7227
  Intron number 2 from transcript GRMZM2G079908_T03 (locus G RMZM2G079908) derived from phytozome v7.0 (chr-ID 10; pos 76403378 to 76404368)

SEQ ID NO: 8804 - DNA, 616 bp, Zea mays
  Intron number 1 from transcript GRMZM2G402881_T01 (locus G RMZM2G402881) derived from phytozome v7.0 (chr-ID 10; pos 60743084 to 60743699 reverse strand)
cttggtaagtgccttgcactaatgttctcttcacaattttgactatgttctctgtctaaatctgatatgtgccttgcactgatgtttcttggcttactacttgatcacttggtttcgatatggaattttggaaagtgatgtcaaaactcattcagttcttttgccattcttgatattagtatttgatttgattttcgtctaaatatgaacatcaagattattaatgaagcaatagtaattgaagctaccctctcactatatcaaatattcgagcttcacaatataacttgcaagaattgtttgattactcacctgtttaattgtagctcaacgacttcatcatttttttctttcagcactgtacaactgctattttgttagatgcttattgcacttacgaaggttgcagatgctttgtgttgcacaaaacaattgctgcgtgtggtttatgtgccaaaaatgaaatgcttcatggccagtgatagctcatttgtgcaaataaagttcatggtctaagtgtgtgcaacactgctattaatgttctgccagggtgttttttcagtcctcaaattgtgatatttgactgttactctgtctttgcttgcttgtaggggta

SEQ ID NO: 8805 - DNA, 810 bp, Zea mays
  Intron number 3 from transcript GRMZM2G062724_T03 (locus G RMZM2G062724) derived from phytozome v7.0 (chr-ID 1; pos 1 0033966 to 10034775)
cccccggccgcggtcgtgaagctgacgcagaggaggtaaaggtgaagctaaggtctggccggcctctgcctttgggaagagaacagggccggtcgtgatatttcgggggtcctaagcgaaaatttacatgaaggccctatacaaagtttgagtctgatattttttcaacttttaaataatatctaaaaaataaaagaagttgatgatttacacaattttattcaaaatgatatgactgaagacactgttacattagtttatgagtcgtaaaattatacaaattatgtaatataactctgcatttgttttgacttttaagagagtatttttacttttaatttgtcaaactagcctaaaccttaaaatgcatagtaaaccaaatctaaatacattagagcaaaatttcttaaaacaaagtttagcatactaatctaggattaagcaatgtaggttattagggtcggccctctgataggctagaattaagaattaagcaacatgacaggtacatgtgtacaacaccttctgtccttcccacgtcaattttagtatttgtcatcaagcagactgttgcgcgacctcgaaaatgattgccagaaaatcaaaaagacgcaacaaaagaatgagaatggagatttatatgtaacgtatatgtatttggatataagatggataaacgagggccctacggactttgggggccctgagcggtcgcacaccctcagggccgggccggccctggaagagaagcaggcgggctctgaaaattctctttgacgaattcctttttgcctttgttcgtccaggtgc

SEQ ID NO: 8806 - DNA, 927 bp, Zea mays; identical to SEQ ID NO: 6057
  Intron number 1 from transcript GRMZM2G071652_T01 (locus G RMZM2G071652) derived from phytozome v7.0 (chr-ID 1; pos 2 6751680 to 26752606 reverse strand)

SEQ ID NO: 8807 - DNA, 1034 bp, Zea mays
  Intron number 1 from transcript GRMZM2G088140_T03 (locus G RMZM2G088140) derived from phytozome v7.0 (chr-ID 10; pos 37944904 to 37945937 reverse strand)
cggccgatccggcgctggctcgcggcccccgacaggcaccctacccaccgaccggatctagccgccgcgtggtttttgaattgagctcccctcgcgtcgcatggcgctggcgcgggccgcgcgggttcctctctgggctgctgccggatcgacggcgatgctagggtttaggtgtggttcgtgtctagttagctgagtggcgcgtacgcgtttcgttttgtcttggggagccaagcgtggcccgaaatttatctggagcaggtgcagcagccttttggagtgacgggctttgagatttccagtttagggttcgttttgggttggtgggagctcgggtgtgttatggccattctgtgcgttataactgacatgcttataatttcaaaagtgtttagtttggttaactgcagctcatgggagctggagggacctcattcagatgatccgacatttactgcagtttctatattcatagcaagtattcgtgccgtgagatcatttgtatgtggtttaggtcaaagctgtttgtttttaaaactaaaaagctttaggtacaaattccatggcagtcttgtcttgtgcatgtgtaaggttttgggtgactatacagtatacacgtttagaaaaaaatgttttctgggactaccatatagtttttatgctgtatggcggaagtgccgagtgttatagttggtgtgataaaatactctgcaaaaattgatgaaattgagcattaatgaagttgtctgttttgatgtagcatagaaagtaattgacaggattgcatatgatccacgctagtttattctgcgctttaagtgaatagggatcaaggatatcgtacacaacagttaagtaggatcacttgtatctgtcctttaatcttttaattctaaacatgataagggtttatgatattgttttctgaaagtatagtatattttgtcttgaacaattaaattgggttttcttgcaaaggatgctacattttagcttacatttgctcttctttttgccaattcaggttttgcttt

SEQ ID NO: 8808 - DNA, 777 bp, Zea mays
  Intron number 2 from transcript GRMZM2G088448_T01 (locus G RMZM2G088448) derived from phytozome v7.0 (chr-ID 1; pos 1 4497415 to 14498191)
tccatctcccaccacttcattgtcatacagaggtgaatggcctaataccatggttaaggaggtatttggtttctaggactaaattttagttcctccattttattatattttagttactaaattatcaaatatggaaactaaaaattattaatccaacactttagggactaaaatgaaataaaatggagggactaaaaattagtcactagaaaccaaacaccccataagtatcactgccatctttgtcatgcttcagaatgtgttgtaatgaatgtttgggttctatcattattaatccaacatttttgtagaatttacttttcattgtgatttacatttttgtctctccctgaatggacaatgattattttgtgaatgctgtgtcaaggagcaaagaatagtgttgttgtaatggtacccggccaatcagactgctggatgaactggccagtagcacataatgccaaaataaagaggcgacatgattttctcaaactttagatcatttatcctctatttggaattgcattacctgatagattgaattggactgcattattctagtaggatagcctttattggcacatttctgttttcgtgattcaattatctccaactccaagcattgaagttaacatttttttccctatttttaaaggtaatataagggcataggatcgtgtatataacaattagttcattagcgataaggaaattaccttattgggatcttttgctgcagctcgggcgatctgccagccagttgaagcaaccttt

SEQ ID NO: 8809 - DNA, 683 bp, Zea mays
  Intron number 2 from transcript GRMZM2G063375_T01 (locus G RMZM2G063375) derived from phytozome v7.0 (chr-ID 10; pos 96617537 to 96618219 reverse strand)
gccataaatctactcttaataaacaccgtatggccatggctctaaacggaactgaatgcttactgtggtggggagaagcaaatcagtgaagtcgcattagctttatcgtcttctagtttatttttatagaaaagtgggaactgcacaatatgtttgattgagccaccctctttttatcaaattgttaatcatgaatattttctcttggattagagtccaagcgaagagcttggatcctttccaaatcaagtttgtgcagagggaatggttcaaaagatccaacaagttgaatatgatataacaactttacgcggaatttcccattcggagtcctctatttctagctatttgtgcatatcttgtaaccaaattcaaaataggtttatgcttcaaatctgatttttcaagattgggctctcccaaatagactctatattccgcacacaggccgaggatagccgacctctgccacttcacacaacgaattcacccattctgatccaaatatcttcaagtttgttatatcgtcctgtgcttgatcatttcatgaggcccacctctagctgctatgttacctccttcattctctgcccccaactgaatcttaccagctatcaggcttcacctcagtgaacaactgcacgtgctgattttgaaaataaagtgataaaaaaacaaaaaaa

SEQ ID NO: 8810 - DNA, 896 bp, Zea mays
  Intron number 3 from transcript GRMZM2G034804_T03 (locus G RMZM2G034804) derived from phytozome v7.0 (chr-ID 4; pos 1 36969702 to 136970597 reverse strand)
ggcgacggcgcttgcctctgctgtatgctgcatttcatcatagtgtatatgtatttatctcttatcttgccgcccacccctaaacaattatcttcaactgctcctatggtcactgttgatttttgcactctagtgagggtgtggtatagtttgtcaattttgatgagagttgaaatttagtaacatataatgttccaaactggtgatttcagtggccatttgggaatttttatatgtaaaagcttgtaccacagctgttttctgtgcttggttctgagcccttcaccagaagcctaggatgtgagttcatgggcactgatatttaggtatgcacattttattatagtctgagtgtaaattttccttaggagttattgggttgttgcaattatgattgattccttatttatagagtgagagatcaagggttacaatgagaatatgatgttatttatgcttaagttttgctaaaccgataacaactatgcagttagtctgcttttttctctgcttgcaaggtttctatgtttttgtttccatgtttagtttgatgtggttcatgtgtttcattctatattcataagatgagaatcatcgtttttttaatttgtaaccagagcatagcttattgaatttagagatgcaaaatgttttgttgggtgcagtgtgtcagtctgtcttgttctggacaaactcgctattctgttaggttcataggagctacacattcatcagctgtcaattttgaaaaaaggaattctgctgtgcacgcatgtatctgtgcattgcaagaatactgcattagtctggtttgactgttagtatctgttgctttaatggccatacttacgcctatgcaatttgattctctctttccaggtactactctagggagg

SEQ ID NO: 8811 - DNA, 939 bp, Zea mays
  Intron number 1 from transcript GRMZM2G356676_T01 (locus G RMZM2G356676) derived from phytozome v7.0 (chr-ID 10; pos 130417305 to 130418243 reverse strand)
gacagaggtgaggtctgcaacccatccccactctcctcaaattcaccgattcatcaccctcatccatctttggatcttgttgtgtgctgtctagagattgtaattttgtgaaaaaaggtttgtaattttgtcttgtgctatacattatgaagttaaaaatatcgctgtaacactaatattatattgacgatataaatatgtaatattattataaatatactgattcaaatagagtaaactgatgtcgaacaaacattataatcaagaaaagcttattgatgtcgatcaaaatactgaaccaagttagctagcttagtctccagctaataggatatgttgccttgttgcaaatctgaattaataataaatcatacctcaccgtggtgagttaccagcaataattcaggacacccatctatatcacacgctcaagtactcccccaacaatcaccagtaaatcgtcagctaattaactactgaatgatccctagaacaatcaccaataaaacaaagttcaggatcatttccaataacatttgaaactgcatgggtcatccacatgtatctagaaacagggataggcttaaacaattaaactgcatgagttcatatctgtcataggccaagaaatactgacaattaaactgtataatcgtactgtcaagacaaagcaattaaacaaacattataattttgttgactattataaatactgatgcatcaaattgtaggtcacctatgtaatttagggctatttttctgtcatgccaattcatagcaagaaccatggccattcttggaaaaaacttgccttgcttgttgcttctaacaggaagcatgggtaatgaaggcaatcgcctcccttggagcacaactttgcagattacttaaacaaggaaaaataaaacgatcagcagccgcacgacgcggtactcgaac

SEQ ID NO: 8812 - DNA, 994 bp, Zea mays
  Intron number 1 from transcript GRMZM2G174202_T02 (locus G RMZM2G174202) derived from phytozome v7.0 (chr-ID 4; pos 4 1662044 to 41663037)
cgcgccgatctgcttgtgagcgtgggagattgttttctttgctttgagcatttttcctaggctgcctcgctggttcactgtacatttttttttggtggcgggctagcagcagcacaagttgcagcttgatagattggatttcttctagctcattctttttggtggaattggagaaagcgctgttgctgcacaagtttgtctgctctattgtttgtgttacgtttctggtcgcgtacaagatgcttgtgctagtggctctatcgttgttgcgacttggaacaaagtttgttaataaaggaagacgtttggatgtgattgctcggaggacagttactactaatgagccaaaatggatagaaaggattaggttctcactcccttcatgcttttagctaaagataaaatattttttcttttgttctccctttcttgtctttgcttgcaccgtaccaccatggtctacatcctgttccccatatgtcatttgtatcggctgtggattgggtggtaacacacactgatgatctgatctggtcgtatctagaatgttgtgtgcattgagttcgagcattctgcttaggttgccccgcaaaccattgtttggggtgtggttttagtgcatttattggtatttttattttacaggaataatgagttgctgctttttagtctctatatagcctgtactatttataactccagctttatgaagtgtgttaattggattatattatttttgatagttagttgtacactgacctttgttccttaagctaaggaacgaaaacaaatggcattgctgcttatgcaaatcacattgtgccagtggggagagatgtttggtagtaattgtatgcaatcacagattctatgtcgaatgggatacaatatggctagaggaactgggtttatactccctttacacaaattatactttattttgatttgcttgtcattagcttgttttgcagtaagtaaattgttttttattttc

SEQ ID NO: 8813 - DNA, 1014 bp, Zea mays
  Intron number 1 from transcript AC186317.3_FGT002 (locus A C186317.3_FG002) derived from phytozome v7.0 (chr-ID 4; po s 168106014 to 168107027 reverse strand)
ttcgacagcttgctggatttccaacaacaatacaggtacaaggatttaggctaaatttttttctccagtttttattgttattggtatgtaaaagaatttgttttctatgtccgaagtggtgtgtgccgagagatgcatacggttgtacttgacgaagtgacttactgaagcatattctcatttatgtacaacggagctcgttcttcagtttagaatcgagtttgaagaacttggatgttcaaaaactgaacaaagatgaagtgcacaaaaatgccatgggaaatattggagtctaaaatagggaattgaattcatttcatgtgaattgatgtaagtaatttaccttagaaatatgttgctatggtataaaaccgctttggtgacatttggctcctcttaagacaggttattcaagaaggaaataggttgatgattaagcaatttcttccagaacttcacacaacatgtgttaatagcttgaccctttatcatacttaagactctaataggttgaatgaaactccatagactgtccaacagaagtttcggcctactattgtcgagtcatattttttgtaaccatcttactgttttgaggtctcagaggcaagcagagcctctatagatgttttgccatgagaagaccaaatgccaggtccaaccaactgagagccctcactgttttgtaggtgatgtcggccattgatgagggggcatgttgaagcagcagaatgtccgtgctaataggtaatcagataaatagatggtattcccctgatcctttgtttgtagaacatgaatgaacgtggggacagacataaatctgggtattttattctatctaaaactggtttcagatactatgggcctctttgttttttctccaaaaatcaatctttctttgatgtgtgtagaacacttgctgctagaatcagtcttttgtcgatgtgtgtagaaaacttgcaggcacaatatactgacacattatttggttcttttgcatgtctatacaga

SEQ ID NO: 8814 - DNA, 741 bp, Zea mays
  Intron number 1 from transcript GRMZM2G168940_T01 (locus G RMZM2G168940) derived from phytozome v7.0 (chr-ID 10; pos 132534540 to 132535280 reverse strand)
gcaaggtgccctgcaaaaaacaattaacaagataaggcagatctacatttgagagtaattttgcaaaggaaaaattcagacacgcaaactagaactagatcgatcgaaaacttcatatccatgagatgaacaacatgacacaagctaaagggggtgatgattctcttgagctgttcatcaacacctttgaacttgtgattggttactaaagtttattggtagaagggaaacggtgcgtgttcatttactaagtgatactgtgtattcataaaattcaacagaataccgaagaacctaaagtcaaaaaatagctaactccctaaggtctagagtttatttggtcaatttagtacttgtttccaccaatgattcataatcgcgttccttcactgaaagcagaaaacgcgaaagcatgagccactatctacatgcttgctacggtcatctatcggacagcatccatattaagtcgcaacctagtcgcgtacttgctccactttctgagttctgagttccgacataaaacgaaacgcgtagagcttccatttctagaatctagatcgagaggaatgagactaggttcatataaaagagagcataagcccaaatccagggatccaggcgcttcgaactagctcaaatccaaagtcatatatgccccggaggggaagcggctaagagaatccagccagcggattcgtggaaaaggggctcgggacgagaggagttaccacgcggacc

SEQ ID NO: 8815 - DNA, 760 bp, Zea mays
  Intron number 1 from transcript GRMZM2G180452_T03 (locus G RMZM2G180452) derived from phytozome v7.0 (chr-ID 1; pos 2 9259570 to 29260329)
ctttgggaataggtctgtattcgggacaagtacaggtgcgtcgtaccttatttcatctttttttcctttctttatttgctactggcgctgcagtatgatgttctctttgaagatagcaaattgcgttcatctcttcatgagtactctgtctctttgaacagcccaatcatttgtctctgccccacccattcattttcaggaattatgctaactcattaagcgatattggccttgtaccaaatgatttatgcactgcatcggagtgttttttttttgcttctccatatcctgcttagtctttgcttcagagaaaagggacaagcaccagcatcgcttgagcctttcttggccgaaatttgcttctccgggatcctggtgattcttacatcgtcatgctatagaacaggatatgaagtagtgagttatgacgataatatttgccaatccatcacttgtggttccccaggatcaaatttcgatggtttggggtggggacagtacgctctgttaagttttgagcaatcccctatcctggaggcttggccccaggaaaaggaatacaaccagctagccttttggttttcggatggctggatcttagtccctaagctgcttcggttattcccctggtgatttgaatgccacactttcttagctgttgtcctctttcttgttctgtggatctgattctacggtctctgaattctcacattttcgttttgtaggggtgtgtgtgcaagtcagcaattacctaactttg

SEQ ID NO: 8816 - DNA, 929 bp, Zea mays
  Intron number 1 from transcript GRMZM2G354560_T01 (locus G RMZM2G354560) derived from phytozome v7.0 (chr-ID 1; pos 1 85340328 to 185341256 reverse strand)
agcaggctgccgcgccgtggagccaggaagaagaggtgcttcgaggagggagaagaggtgctttggggagggagacgagatgcggcccggcggcgcgtgctggccgactcgggagcaagaagctgctgtttgattcagaatgggaacaattggatctataccattaaaagatccaaactttagatatataccatggaccccacatgtcattgactcatgtggacccacatgtaagtgagatagtaatggtatggatccaaagtggtgatcttttaatggtatggatccaaatttcccttcagaatgagattgggtaaagttttaggtgggccccactgtcaagcacaataaagtggacagaaaatagatgtaaacggcgtagaagtgccctctgaggtcagttagctcgtggagggggaaaactgagcacaaagtaaaattaggggtagcaatgaggaggcagtccaaagtaagggcaccaatataaaaatccctatttcccccgaaaagacggcaagaggattaccgaatatacttaaagaaagagaatcagtacaacttaaccaaaaacagggactcctgccaacaatgccccaactacaaccatttaaaagagagagagaaagaaaaaaacctaaaaaaccaccgctagagaactctctgatcaaaaaatatagaaagccgcactatattataagatatccttcttgattagatggacgacgacaagttgatcattcccataattctgaaaaattcttctatttttttctttctatatattccaaaaaatagatcactagcttataaaaaaccttcttcttggtttatcaattctgagtcaataccttgtttaacatgtatgtatctgaccaacagctgcttaaaagcccacatggtttgatgatcagaaatcacaatacgtgaac

SEQ ID NO: 8817 - DNA, 562 bp, Zea mays
  Intron number 1 from transcript GRMZM5G881798_T01 (locus G RMZM5G881798) derived from phytozome v7.0 (chr-ID 1; pos 1 44236384 to 144236945 reverse strand)
cattgaaaatcgagattgggtgtggtgctctttatgtaagaaaaggatatctggtgggattaagagatacaaggaacatcttgcaggatgatacagtgatgtggtaaagtgtaacagaactactgagctatcatgaagaagatggatgctgctttgaagaaaaataagaggggccagcccattccggtagatgagcatgaagctacaaatgatgtgagatggagggggatcagaggagcaagagcaagcctgtggcaagttcagggacagcagctaaaataaggcaaagtgctttgtctttcaaggttacagatcatagatcaattagtaccaagatgcggatgacaccacatgaggttgtagagcaaagacactcaaatggaccttctcaaacaagcatccaatcttatatgagaaagaaaaaacaaagagttgttaatcttgagatagtcaggttgttttatgagtgtggaattcccttcaatgttgcaaactcatgacaattggagagctgtggaagcaattgcacaatatggttcagggttcaagcctcctagttatc

SEQ ID NO: 8818 - DNA, 1006 bp, Zea mays
  Intron number 2 from transcript GRMZM2G455476_T01 (locus G RMZM2G455476) derived from phytozome v7.0 (chr-ID 10; pos 100027096 to 100028101 reverse strand)
cagcttcgtggatcgctgccttaccgagacccaaggtacagagtaaactgaaaagggcctccgtccttcattctgccccgtcgtcttcgtccccggccccttcctgcttgctgtttgacccattacaggacttgagcttcctgtgcttgatttcctctcttctcctttctttactgcgtagcgtagagtacgtttcgcgttgatttaatagtttgtttgttttctttcaagtgtttgtttgcaatgcatgctttcatgtgatttgaatccgagaatcttgtcggtaaagattattgggcagagcgaacaaaactttactattaagtatgaatttagctggggataggtgcctgcctaggttttattaacttctgaacgtggacaaggtcgtccaaacgctccacttctcatgagtacaaaaacccaagactttacacaagactttgcatgagtacaaaaacccaagactttctctttcgcgccatgttgtgctgttcttgtagtccctggattttctgctgtccaattgtgcatgttttaacttcaaagaaatcatctttatatctgccagccaagtggataatgcaattaaatggattggttgcagcatatcagcgacactattgtttctgtgacatgtgagacccctacgtaccctataacaaccgtttatttctgatttgcaactgcacaaataaattgtgtacagtacagtggctgaatacgactacttcgacacagttgggtttgacaagctctactaaccgtatgatgatctcaccttgtaacgtttgtaatgttttgaagataggcatttttttacacattcttgtatcacctgcctttatcaatttttttattttactcatcacattaatcgaattagatgctgatatatattcaattctagtgtataagtattttttttggaaaacaaatatattgcatctaacgaatatattggttcaaaattcaggcgacctgcctcagcgtctctgcggccccg

SEQ ID NO: 8819 - DNA, 619 bp, Zea mays
  Intron number 3 from transcript GRMZM2G073860_T01 (locus G RMZM2G073860) derived from phytozome v7.0 (chr-ID 10; pos 27460663 to 27461281)
tgcccttcaagttcggcctcatcggtacgcggccgatcattgtttccaacgtcttactgtttcttcgccataaaaatctcatctattgtttccaacgtcttactgtttcttcgccataaaaatctcatctactcgtaaaggtaaatattttctaaaaggatgacaatgggatttttttttgaaccgaagtatagtgtactagtagaaaattacagctcaagtcgacaaaaaaaaaaccgaggttgttcttgttccaatagtctaatctggaatcgacgagctgattgcggtcgacgcatccaatggtcaatgtcccataaataaatactagtactagtttatttaccaatgcagattatatatactaatgtctcaatcctatccatgatttttatctgaaagaaaaggggatcttgctaccactggactaataatagtgtcatggccgcctgttgccatctggacgtcaaccgcaacgtgcaattaatcaaagcttgagaacgccgtgtagaccagggattcatggacgcctagctgccgaggactctgatgactgactgactgactgatgctgaataatgcaggcgaccttgggcagacgttcgactccaacatcacg

SEQ ID NO: 8820 - DNA, 662 bp, Zea mays
  Intron number 3 from transcript GRMZM2G177686_T01 (locus G RMZM2G177686) derived from phytozome v7.0 (chr-ID 4; pos 1 99040468 to 199041129 reverse strand)
tggtctaccccaaagcacaaggtatataattactagttgcaatttgtgtttctactattgccaacatgaaattagacataaactatcttatgctttgagctatttccacttgtggtttgtacttaaatcaaaagattttgattttgattataatacccactttagaggataaattgttggatactattgttttctcaaaaaacaatactggctttctcaagcatgtaggagtgttatgtgtctttaagttaaaaagagaaaactgttctgaaacacacacacaaaataaataatataaacgctttttagttgttgtttgaacacaagggtgtatcctttacaactgtttgggtcattttcatgactcacttcttagcttaacctccatatgcaaagctgaaaagaaagcaagtttggactgctctagtgtagacataaaattctagggcatatgaggttagaaacgtgtgtggtgccattgtttcttgagctacattttttgttgaaatgaatatgcaggaacataccttgttgtgttgttcaaaggaacacgcagtaacatacctagtattccaagaaaacataccttcttcaaaggaacaagctagaacataatttaatctatgtttctagttttacaatataatggttttataggacaa

SEQ ID NO: 8821 - DNA, 734 bp, Zea mays
  Intron number 1 from transcript GRMZM2G177686_T01 (locus G RMZM2G177686) derived from phytozome v7.0 (chr-ID 4; pos 1 99041818 to 199042551 reverse strand)
aaccttatcatagtgaggacaatgatcatcatgtggttgatcaggtacttagggggtgtttggtttaaggaatcactacatccaaattgaggtggtgcatcatgtgttcattcctcaaatttggtgggatgaccacattcctcatattagtactaattaactaactataaggaatgaggtggtgatggatcaactcattccattccacaaaccaaacaaaaatagtgagaagatgatggactagctcattcctcaaaccaaacaccttattagatttcttattgtacccctttggtgttattactgatttgtgctcaatgtgcaataagataaatttgggtttaattcttttattatgcctacgaggccatgcaagatgaacatttctacattgaaagaacgaacaccaacatgtctactggttttggaggaacaaaaggatccaaagagtggtagcacctagtgtagaagaccaagttggtagagtaactaggcagaagacaaaggaactatccatagttgagaaagatatacatggttcgactgcaaatacagatgagcacacattgatttctgccaattttcctgcacaccatgatgacgagattcagatgtgtgatgaaggcaagaaaaagtgatccattctaaaacaaatatgttctacaaatttgcattaaactaattataatctacattaattttgtgaaaatgttcattattttcaggtcaaatag

SEQ ID NO: 8822 - DNA, 678 bp, Zea mays
  Intron number 1 from transcript GRMZM2G700143_T01 (locus G RMZM2G700143) derived from phytozome v7.0 (chr-ID 10; pos 28895473 to 28896150)
gctccgtcttgaggcaccgacacgcggtccctcaggtcagtggccgagcgcctacagtgaggtaatcccgagccggtcaggagaggtgggccgcagttggttgggttagtgggccgaatgccagatcttcggcacaatttagatagttttcctctttttctttttcatttcttttctaattccaattttaaagattcaaactgaatttttaatttcttgttttaaatttctgaatttcaaatattgattaacattcaattgtgattatattatccactatttataatatttttatttattatcatccttgtcatctatttataggagaaatatagagcttcataaacattttctttctcaatttctaacttcccctttcaattcaagtataaagttgacagtccaaattctaagtcacaagtaaagtactgacctgataggattatatttatttatctatatttttttctttctttcccattcaaggtgttctttaatcctcaaatgagttcatttgtattaatatgaatattgttattattaaatgcccatacaattcaattctacataatgcaatagatatatgtttattttaattattttatttatttggtgattgcttgaagtatgaaacatactcatactgttttctcactttttagaaaaatagtattttga

SEQ ID NO: 8823 - DNA, 555 bp, Zea mays
  Intron number 1 from transcript GRMZM2G124638_T06 (locus G RMZM2G124638) derived from phytozome v7.0 (chr-ID 1; pos 1 89359550 to 189360104 reverse strand)
agttctaggttagctgaaatctcccttattgtaatctgttcatctcctggcgtgagtctgtggcgctagtgtgatgccttctcctagctcatggcttccggtctggaattttgcttaccctcttcgacttattgttcttttctctttattccgcaactgttgggtccgaaattatggtgatctgttcggtatccccccctgcgaaatccggacaaaagtggggatctgcagcttctgtgctttattggctttaaacctaccttttcttggaccttttaccatttctttggcccatttcttttatctcccatttccgccagtaatttgcttttcttttcgtttctacttatttccaccttccatttcttcgagaaattttcatgtaccgtaaaactgtgtgcttgtcgcgtgaaagatctcgtacttagcggtttatgggtttttcgcaggttcgcaatccctaatcctgatctcacttaagcgctcgtgagctctctccagtggctaaagattgcagatttgagttatagtccaagaaacgggtggtggtccgcc

SEQ ID NO: 8824 - DNA, 628 bp, Zea mays
  Intron number 1 from transcript AC188128.3_FGT004 (locus A C188128.3_FG004) derived from phytozome v7.0 (chr-ID 10; p os 144219994 to 144220621)
gcgaatctccagagaggagaggaacccaaggtacggttcgtgttttctgttgttattcgatgattctattttcacttggcttatatgcattggccctcactgcccacaggccacaacccacatggccttgttaacacgtattccagtatattacgttttcactcgcgatatcgtacttttggttcgtcgtgtactcgtgtggaaggcggctgcctgctcccgcgacccgcggtctcttccgtctcggaggtgggagcgagcgatcagcggcgtcgccgggtggatccaaagcgcgcgagaaaatgcagggcggatccagccagtggcggatctagaattgatccaagagggggctactatatatggtctcttttgttctacacggctcttattcgccctaattgttttagaattagaagcatctttcttctggatcttgatgagaatttatccattttattcctataaacatgggattgctaccaaataaataatcaaatcaaaacttaatcaaactcaaagcaaataatagcacatgttttaccttcactgcttgcctacttcacaaatcacagcttcaccttcgttgtttctgcttctcaatttgcacagagcgtcctattcctac

SEQ ID NO: 8825 - DNA, 822 bp, Zea mays
  Intron number 1 from transcript GRMZM2G110306_T01 (locus G RMZM2G110306) derived from phytozome v7.0 (chr-ID 1; pos 2 09522607 to 209523428)
cggatcgtggcctcgtgcagcggcatccgcagcaggtatcatccgtctcaccctaaaccaaaacaaaatccttccattttcattttcttcgtcgcatccccgattccaaaaggtaattaatccgcgcccttgtttttgtatccctcctcacacctcaggaataatgaatcgtcatgatctacgttgccgagcccgcagacaggaacgggggtgtaagccgatccgcgagaaaaatccaacctacaagacctacaaggccaagcgacatcccaatccgagcgtttcatcttgccctctgctctgtcccctcacaccttctcgccaggttcgtcttcctttggacccctagctgctcggtcttaaacccctgcgagatgcaagcatcgaatcgggaaactgggaggagttggtgccgttttgttgatttttatattttttcgacaaccggtgtaatgttatatatttgactgcattggattggaacgggaggcgcgtgctcgattcacagatcgccattgcacttgccttctattctggtggggaatcgtgttattgttgtcgcggctagattagggttctgtcatcctccctctttgctcttcctactccccctaaatccaacctacctgcttccagtcgcgccgtcgccggcgtccttgcaccgccttaggcttcgatttgctcatctggtgtgtggattgattcgttttggtggtgggttttccatttgattttgcggtgtttgtttatccgttttccatttttcctgttgcaggctcagtggtgacatcagctgaggtccggtagtttgcctctgcagcc

SEQ ID NO: 8826 - DNA, 793 bp, Zea mays
  Intron number 1 from transcript GRMZM2G171803_T01 (locus G RMZM2G171803) derived from phytozome v7.0 (chr-ID 10; pos 33616276 to 33617068 reverse strand)
cttgggaacttccttgttgaaattctcatcaaactgtacacagcccaatgtttagttatcgggaagctttatcaccttcaagacttccaaggatgaagagtcatgaactattcaggtgttgtttggttcacatatttgtaatgtaatgagtaaatgataatgttaaatcatgcctgtttaagtccaaccgtaatcagattccacactagaaatcgataccggcctattcaggtgttgtttggttcacatatttataatgtaatgagtaaatgataatgttaaatcatgtttgttcaagtccaaccataatcagattccacactactaatcgataccggcctattcaaacgtacatgattccaaatataggttgtttcagaattgtatctggtcaaacattttcatctttgctttatcaatatatgaaaagtcacaacacatggttgatctaccaacagcatcattgaaaatacttccttaaaaataattcactattcagaatggtatattttaacaaatgttaaaagtcctttgtcatatagaaggccatgttactgtcctaaatgacctacatttgaaatcagatggtatctaacacgagtataaatgcactcgtattctatgtaggggtggtaatggatcgtcacccaaatggttcttcacaaaatgtcaaggcactaaataaattataggtcctttttgctctagtctattttttgggtttagaaaaagaaggcccacaacagtatcttaccaagtgttccggcagtacatctaacagttgagaggattg

SEQ ID NO: 8827 - DNA, 427 bp, Zea mays
  Intron number 1 from transcript GRMZM2G038846_T02 (locus G RMZM2G038846) derived from phytozome v7.0 (chr-ID 10; pos 91360102 to 91360528 reverse strand)
cattctttcgattcttcagcttattcacctcgcaggtgcggtgcggtgggattctttttcattcccatatgttgttgctctttgtttgtgtgtcattttttttgtttggtgctatttttttatttaattattttgattcagcattgccgcggagaaaaacctgatttcatcattggttctggacttctggtctgtgcgtgaaattggattcacatcaagtttttgtttcctataatctgcacttctgatcaactcattttcttttctttgtttagctcgtttaattgtattctttcatgatttttattcttttccttctatagaaagttagaaacaacccttccatgatttctctgttctctctgcgttcatttttgaatatgtagcgctaggcgtggacggagcggcgtcgttcaggttcaccaac

SEQ ID NO: 8828 - DNA, 892 bp, Zea mays
  Intron number 1 from transcript GRMZM2G442742_T01 (locus G RMZM2G442742) derived from phytozome v7.0 (chr-ID 4; pos 2 16655448 to 216656339 reverse strand)
gtatgttgattgcctgatggcgaggacctagacagtacaaaatctattacatgttttggtgatcaaaggacgtcggctacccaagtaactaaacaacacattttgcggcttgaaagtctaacaagcagatgatcctaccagtgggctaagcaaccaccgcacgtgggaactgcagtcatatatttacaagcagagatcaacctgtgttggctagcacgagaagggaggaaggtccacagtcatggtcagaagcggaggaccaggtgctcgctaccacctcatagaattggagcaccatgatccaacggtgacctgtaaagatagattatgagactgtcaaaacatgtagtgagcaaaaggtttcttaaacatcgctgaaaacatgaagctgagaactggactggacttataaagaaggaattcaaatgttgaaggtacattgaaggtacagacttgcagttgttcaacgcactgtaaggtcctacctaataaaactttaaaacatgttaacataaatctcaatcctaaccattttgctcaaaggctactataactcgtgtcgacacaaatctgatcacatcaaaggttttttagattattctattattaagagtatcgaccacatcttgtttagaaaatttcaattggttaagacacccaccatgaagctctcaagaaaacaaattaactaatgaaataaaagacaacttgattacctgcagtgctctagcaaaagaagctatagtaggaagacgtgcaacattgcccgttgtgtatgtcaacaataaacttcctccaataattgggtcctgaaacaagaagcttgaagtcatgatgacatgattgactttttttgcaatttgtttttttcctgagtcagcctggtcgtaat

SEQ ID NO: 8829 - DNA, 964 bp, Zea mays
  Intron number 1 from transcript GRMZM2G119852_T01 (locus G RMZM2G119852) derived from phytozome v7.0 (chr-ID 1; pos 1 5776979 to 15777942 reverse strand)
tcgccccccgcttcgacatagtcgcgcgttgccaggtgagggggacgcgtttcggtcttgattgtgctataatccatgccttgaggagttgagttgttcggtggcgttgccgtgcttttgccatggttaaagtttggtcgttcacggagcaaatcgttggaatttcgtgctattttgtggattagggttgatgatgattgataaacgatcgatctgtgtttagaattcaccttagggataaccatgatttacgtgacatttgctaatgagggtaaaactccaaccttataatcgttttgaatatgataattttttataccttcttgatgttggctgcacctttggtctcttacaggagtattaggatgtttgatcttgaccgttaaacacttagtatatgactaaaagatatgcacctgtcataatttcctttttactatgctaaaatgtgcatacatagtgtagatgaatcatagatttgtggttcaaattgatagattatccatgtgatggttgattcaagcaagaaaattttcctttttatttggtcacataagaatttgtcctgtgtggttggctatattatggagagacttataaaatgcgaagcttctatgttatgttaagccctggtactgcaagttgctctgtgctcttaaagaaaatacttgtgacttactaaactagttcaagcttgagatttcaccatgttttgcatcctagagcaatatatacacatctagtttttcattaacatatactattacttctgctccttgtggtcataacgtgccccttactaatttgctttttgcttgatttatgttgtgaatgtttctagtctcttcgaacacggcaagtcagtcagtgtcagttagctactacttagtttagtagccttatctgagttctaaccacattttcatcaggggggagcgaacgctggacataccatctacaactc

SEQ ID NO: 8830 - DNA, 904 bp, Zea mays
  Intron number 3 from transcript GRMZM2G011240_T01 (locus G RMZM2G011240) derived from phytozome v7.0 (chr-ID 1; pos 5 6762869 to 56763772 reverse strand)
tacctccgcttcaaggaggagcttgtcgacggccagtacgtgctgctttactccgcgcccccgttctctgctttgattttgcgtgcgtccctgttctcttaggccccgtttgtttcgttgcaattgaattccattttaataattataatttagacaaaactaattaatttcatatatttatatatgtaatatatttgtatattattctaaatcatatgagaaagataattatatactacatttatgttatagcaaagcaaatagaatagtgtgctttaagttgtacatcggaaacatagcatgtaaagttatagaatcaatttccatctctcatcccatgaatttgagataaacctatatgataactttggaaagtggtggaatgtcatattctaaaaaattagcctattccattagtaagattccaattcctcaaaatgaaaggaaacaaacgggaccttagtaaacttgctctcaggcaactcagcagccgcgcttgctggggtccagtcaggttgacactccaattgagtaaacatggcacttttgcacacctttctttgaagagaaacttttgtacaccttccttttaatgtcaatacatgtttttggaggacaaacaaacgtaagctccctatcgttaataactttccgaccatattgtttcctagatttgatgtatgcaataagttagttgaagtaccttccaggattgcccggagctttgcttcgacacgttcctcgtacattttaagcaaacaaaactttttttttctcagactgttctcatgtttatccatacttttctttcgtcacttcgttataaagaacgtatttaaggccatgtttaagagtatatatcgcccaaaaaaaaagttaaactgtatccaaaatggcaggcaca

SEQ ID NO: 8831 - DNA, 491 bp, Zea mays
  Intron number 4 from transcript GRMZM2G351519_T01 (locus G RMZM2G351519) derived from phytozome v7.0 (chr-ID 1; pos 6 3601503 to 63601993)
cccaaggtaactgaccttatttcactttcaaatggtagcaatggttactccacattcttctgctgtgtaatgtttgtcattgatcaatagttttgctggcttcgggagttttgcagttcttggcacacataccattttgattagtgatggttttgccccttgtgttacatgtatctgtttattgtgctaaatagcaaaagaatctataactagtggcctagtgctacttggaatagacaacagaaacacagattagatgtttttcccttttcccttactttaatgtttctttttcgttggaagcatttcatagcctggtgcactgaactatactttttttaggaaacatctgcatttacacctaatgtttatactttgtattttccctttctgttttgcttcttctatagttttagctattgattttttcccttctgacgactgattcaattgtactgcaggattggactggcttaactttcgaagaaatc

SEQ ID NO: 8832 - DNA, 1041 bp, Zea mays
  Intron number 1 from transcript AC185218.4_FGT004 (locus A C185218.4_FG004) derived from phytozome v7.0 (chr-ID 4; po s 223456684 to 223457724 reverse strand)
ctgcgaaggaagcactagtggctctttcccgtgatgtgagatgtgcatatattcttcgttggtaaaattactttggcatttcaaactgtcgaagcaggaaatttatgttcgtgatttttttgctgttttcaaatcaatgctgattgaagacaccataatttttttcacagattgcagtttgatttaaatgtcagaaggtgcagtgtgatgaggagacctttcggaatcaaccacgcccacccactaaatggatcacaccatttgaatcaagtcgtatcaactaatgttgttttagagtttagtgtctttaatgggaagtgtatgaattgtaacagtccttcgtgacatgtgttcttcagtttagtctgttgttgtttgtaatatgtgctatcgaatagcctttattttatgaactggccaatggcctttgtggttcaattattatgcttcctgtgttcttcagtttgccaatggccaatggtgaatgatggtctagactgcattgtagtttctttaccattaaggtcctgtttgggaacaaagtttttgaaaaccacagtttttgaaatactacaatatactttagtcatgacaataccgcagtttacaataccgcagttttgaaaactgaggtccagagctaagtttagaatgccttaaaacagcattagtatttgcaatacttcagttttgaaaacagagattttagccagcttgccaaacaccattttgtatataatactgcagtatttgagaatactgcagtattcttccaaaactgtgaaaaaacttcactcccaaacaccccctaaaactgtgaaaaaagcaggcaaatgctgtcttcgaatacaagaatgtggtatcaatttttcttctagtgtcgacaacagcatagtcaaactgaaactgtttcagcagcacaacaacatagccaaactgaactagtttttcttcttgtgtagacaagagcattgcttgtttcagcagcacattgacagtgtcttccataatttcagaagcacattggcagttgttgccaag

SEQ ID NO: 8833 - DNA, 518 bp, Zea mays
  Intron number 2 from transcript GRMZM2G439284_T01 (locus G RMZM2G439284) derived from phytozome v7.0 (chr-ID 4; pos 1 38574560 to 138575077)
gcatagttgatcggacaactgatgtgagaattaattctagatatactttgcaccctcatttttttcattattttagctgaagtatagatacagttacaaaattatttgttttttggtcactaagcaagaactgacttctgccatgtaggcatgtcccttccggtatccttttgagcaatgtgtgctgcttcaaagtatttgttcttttctacaatttttttttcatttctcattatttctcggttttgctcaataactattctgtttgttctgatttctgaatgttttctctatgcatattgttttgtttgaactaattgcagctctttataaatggttaacaatttctttcagatcttatctagtaattttatatccttttacttttcttattgtctattaacggtttgtttgtaatttcataaaaaatgttttggcaaccaacattgcggagagtagtatcactatagatgatgttgtctatgtgattgattgtggtaaggccaaggagacaagct

SEQ ID NO: 8834 - DNA, 519 bp, Zea mays
  Intron number 3 from transcript GRMZM2G016774_T01 (locus G RMZM2G016774) derived from phytozome v7.0 (chr-ID 1; pos 2 97794210 to 297794728 reverse strand)
tcgttggctagttgcagatcaaggtaacttactcctctcctctgtttgagatgacaccatgcattatgattccttagttagtctctagtggtgtgtgtgttgtattggggttctctcccccctttcttttcttctattaatacaaagatgcgcagctctcctgcgtattccagaaaaaacaccatgcattatgattcctaatgttgacattcccctttcttattacttcactggagataattctgcggttccttatcctttctggattttgctgctggagcactggaatgttagcatttgactgttgcagataatagacaacaaatatcagcttggccttgttttttcagtaatatatagtgatatgttctaaagccatatagtacaatgctacatatacatgttttatgaatttatatgcataattctttgtttatcgttttcatggatactgtccagagtcttcctctgtcactgatggtttcagtatttcacacaaataaatgacatacaggaatc

SEQ ID NO: 8835 - DNA, 665 bp, Zea mays
  Intron number 1 from transcript GRMZM2G155317_T01 (locus G RMZM2G155317) derived from phytozome v7.0 (chr-ID 1; pos 2 93055261 to 293055925 reverse strand)
gctccgcggggtacccaaggtaacggcctgcccttccgcggaatgaatgtccgcggtttttttcgcctgtgtctgtgactcgtttcaaatggctcaggaatcgcgcgcgattttcggtttgatttcactcgctgggctgcttacttctttgcttcccttccgcctccctcgcagcagtggtgtggtgggctggtggcgtgtccattgagcggaagcgagaaggctgcctaatttgcttgcaccgttgggttacacgtttgtctattagccttgagaaaacgttaattggggaacatcatgctagagttagtgcaacgaagcttcttgctatatattttccatgttttaatggctgtccaatgaataatagcgcaaaacagccccgaaaaataaaatcatataacgcaatttgactgaatatttgcctagttggtcgtatcatgtgattcatctatttcctttacggacaagaactgcaacgttgttgttgcgtttttttttgggtggtggggtggggtggggccgtggggggtcgattttaatttttagggcggcaaccgctgtatcatgtctgaatggtagtcatgcaattgaaggtaaaagtcttaatgatttctagttgacctgttcttgttctatttctgactcgtacacagggtttgctc

SEQ ID NO: 8836 - DNA, 717 bp, Zea mays
  Intron number 1 from transcript GRMZM2G134104_T02 (locus G RMZM2G134104) derived from phytozome v7.0 (chr-ID 4; pos 1 81183764 to 181184480)
gcgacctcggaaaggcgggggcgtctcgtcgcgaggttcgcactccaaagtccaaaccctgcttcccctccctaccgtcccgcaccgcaccgcctcactcgcgctttcctttctggctgccgagtccgcagtccacgcgcgtgaggagcgaggatcctgctaggtttcccttgttttggcacgcttggaaggctataacgtttgatttgtccccgatagccgccggatttgtcggtgctcgcgcccccctcccttcccctggttagattgtagtcgcggcgtctctgcgcaagagttatggatccgtgtcttctcccgctctaaattttagcctttaggcataagggtactcatttcgttacggtgctatgaccttgatttaacaacatggacttcgcattttgatctgtgagcgagattgggagaattacgtcatatagaaccttggattttctatttgttcgtttgtggcatgcattgtctgcttcaaaagggcttggatttgccccaaaatttcaattagcacgctgcgcatgtacttgtttccctcctgtattggacggatccagctgtttttctatgggcaaaacctagctatttgtttagcctacagccctatactatccatcttggaatttcacttctgccgttacttcaactgctctcattgttagcttattaggtcttgtctgtggattgaccaggcatttgaggcca

SEQ ID NO: 8837 - DNA, 611 bp, Zea mays
  Intron number 1 from transcript GRMZM2G169848_T01 (locus G RMZM2G169848) derived from phytozome v7.0 (chr-ID 4; pos 8 0632215 to 80632825 reverse strand)
cccgggagtggtgaactggtgataggctattcttgtcagtgcatatgtattatttgcaacccatggattatgcaactatttctctattatatttgcaacccatggattatgcaactatttctctattatttgatactcttgtcaatgccttcatgtctgagaaaatccattgatagtagatgatttgtttttgctgtcacttttcagagtcaagtttagtcatctacctctgctaaatttctggatttcacgatatcagtccatgttgtggaaaagaaagcacacttttgtgttcttataattcactaggtgcattttagtaccttaacacaatcagggagacttttggggctacaaaaacaccacccatgctgctcatcggcattgggagttctcctatgttttgttgtctatgttcttcaccttgagaaccatttctttacaatctagctatttattgtataaggacttgacggtcatctgttaaagatttggaagttgtcctttgtttgttccttcgacttgtatgttgttatatctacatttgattaattgcataattgtttgtgcttttaggctctcccattcttggatccacttaagcatttaga

SEQ ID NO: 8838 - DNA, 397 bp, Zea mays
  Intron number 1 from transcript AC195595.3_FGT003 (locus A C195595.3_FG003) derived from phytozome v7.0 (chr-ID 4; po s 87289162 to 87289558)
gagggaccttttgaccaagatctgggtggtcgaaggtatcgagtccaccaagctgtagggaagatgatgggcgcgaagcaactggcctaggctatcggcttcgctgaacaacttgggtaccctttggggtttaccatcttttggggtgggccagatgattatttatactacttctccgataatatggaaatagaggaatgccgctatatggcggacaatgttgttttcccgaaactagaggccatgctttcgactatgtcttctgaatacttttttgattgtctagcttatactcatcttaaggtattttctatcggtttttgttttttagcttcgggttgctttgctggattggcttatttttctctttttgtatctttgtaggatctattcctaa

SEQ ID NO: 8839 - DNA, 865 bp, Zea mays
  Intron number 1 from transcript GRMZM2G000622_T01 (locus G RMZM2G000622) derived from phytozome v7.0 (chr-ID 1; pos 2 68563448 to 268564312 reverse strand)
ctcgactgacgcgttgattcctgcttctttcgttggtaaggaaccctatctccatatattttgtgggtcgactatttgtgagggtatattttctgtctatagcagtcgaatctaaatcccatacgtccttctccgatccttccagttcgtttcattgtttctgaatttttggtgcaacttggtgaatactgaatatctactagcttactagtactatcttctttgaggttcggatactgatcaaagcaaagcagattagagtaataatagtatcgaggacaggtcagtgttcactggttccgagttctgacggcctgacagttgacgccgagatattttgaaccatgtgtcgctgtcgtgactcgtgagacaacactaggtcactactgtatgctatgctactaataatataggataccaataatatatgcagtatatctgggaacaaatatgtttgacagcctgcatgtgtatagggtgtacgtgctttgatgttaataccttcaggttaagagtgtcctagtctttgaagtttgaacttcgagcatgcagaattttttttttatcatgtctctacatttttcacttgaggaaccgttttacattagtttattagtagcactaccttcttgacatttgaagtaatggcaccgtaatctttggggtcacaaataggctgaggaacttgtttgaaagaaatgatctcctttcgtgattgtttatcttctttgctttggcatgctcaatttatctgtacacttatatctttgcatcacttctataatttcatgcttgattcaaaataaccctgatttccaattgatgtgcaggtctcccattctttttttacaagaactaaaaaaat

SEQ ID NO: 8840 - DNA, 1065 bp, Zea mays
  Intron number 2 from transcript GRMZM2G561386_T01 (locus G RMZM2G561386) derived from phytozome v7.0 (chr-ID 4; pos 2 039760 to 2040824)
ttggttggaacttgaggaggtgcgcagaggtggtggtgagttcgctattcatttttctgtagtaggtcaaagggccgctgtggctggatttcgaagtcgcatcactgaactactaggtgcacaagggcatttcctaaaatccgcgagatcaggttttcttccctctcctgtattgagtgcttgcccattcggtcagattggaagaatctgttgtttgatgcttgatgcttgatgcttggaagaatctgttgtttggtttatctattttatacattcatgtgttattctgttagatgcttggaagaagccatctatggaattgtttgaaatgatttgagcatttaatcacttatctttgaatagatgacataattggagactctgtccatatatctatgcgatgttctgtatttactacaagcaccattataggataatagtgttcttccatagtcccttgcatcggttgggctttaatttgaatagtcttgcttcggttggtatttaatagtcttgcatcggttgggctttttctgaatcgctaatagtgttcttccatagtcccttgtctttatgtcctttgtggaaggtcaaggatattttaggttcaaaccatgtataatttcatttctgctccaattaggtggctacaacttacctgcatagacaaaatataagtatgtgcaataatctagctagcagaatcaatctttttgttactgaaaataatcatgtgtggctttaatgaaaaaatgaacctttttcagtctgtacaacccatctgctttagaaaatcagcccctaattagtgaaataagatcatgcaatacattaagcatccaagttgtattatcttggctgtttctcctgcaaattctgatttagccaactctgatgcgctccaactagcaagacttgcttatcctgatgattcttaatcaacttacataatgcatttaattaccactttctttgtagtagactactagctaagtgtcaaccttttaactgcttgttgttttactggcagggtctcgtactgaccgtgttatcagcaaggtattt

SEQ ID NO: 8841 - DNA, 371 bp, Zea mays
  Intron number 1 from transcript GRMZM2G493946_T01 (locus G RMZM2G493946) derived from phytozome v7.0 (chr-ID 1; pos 2 01967804 to 201968174)
gaagaaggggccgcgagtcccacgacatcacgcaggtaagttcttaaaccctagtctgattttgatagagctagttgaggatcacaggtgtagttgtgccccttgaagaaacaaaatcatttattacctgcatacaataatatcagtccagtttgttccttcctatgcatctgtaacatttttcttttatcatttatttttagaagatacagaacctactcctacagactatgagaaatagagggcaattacaatcatgaagaataatcaaatgatgcaacggttagggattcatcaattacagtcaatgatggctagtattccaagtggaaggatgaacgataatgctccttaggaatctggatcgttgt

SEQ ID NO: 8842 - DNA, 592 bp, Zea mays
  Intron number 2 from transcript GRMZM2G176521_T01 (locus G RMZM2G176521) derived from phytozome v7.0 (chr-ID 1; pos 5 455542 to 5456133 reverse strand)
tccccaaaacaaccgtttggaccaactcgtactgggtacgcacacttgacactaaaccgacacctacaaattttaagacggcagacttggacaaccattcactaatataacacgggaagaactagcacaaaatctgagtggcggcctgttactgatgaacctctatagctacgtgaaagaatatatattttctttagagccccagaatttgagtgggggcacgtgcgcccgctccttgtgtactcggtccgcccttgtaattttatacattactcaccaaactttccgaggcccttataggaaacagtagtttgatacttgttaatgtgtttatctttagccgttcggcattgagcacttgatcagagtaataataatatgttgattctcctgttttgtagtgtcatcaatcatatataaactaagacttgtgaggattttcttggttcatgtaaaaactagtgaggggtttctcagtgaacaaactatatgtttcattgactctttggcttgcagtccttttcttttcttggaaccgttgttgaacgctgatgcttaattataacctgctcttgcctttgcttaacgcagg

SEQ ID NO: 8843 - DNA, 724 bp, Zea mays
  Intron number 2 from transcript GRMZM2G022962_T01 (locus G RMZM2G022962) derived from phytozome v7.0 (chr-ID 1; pos 1 83897908 to 183898631 reverse strand)
caatatcacgggtgcaagcagccaaagatctgcaagtaagtacttggttcatacttcaaatgtggcatcatggaatcctttgattggatatttctttgttttgagctattgtcttttcggtctttaagacaccctttctgtggcttgtgcctaaatttactcactgttgctcagtttcttcttcagtagttcaattattcctctttcagttactgtgtcataatattattcttttcgtgcagcgctgcttgttttgcttcccctgtatagttcaggcggtgtatctcattagaaaatagaaatgtaaaaatctggcttacaaaaatggtgcccctctttaacccaaaatgatcaccctgttctgtatgcgtgttgaatttagaatgctatgttataattatcccgggccatattgcatcaagtataatatgtgctaacaggagaactgtatctggtttctaaaagagagtatgcacaacctgcaagaacgataatggtgccacagaccattattattttgttgatcatagccaaccaaagtccattggatagtgtattgccaaaaccgctccacttagtttcgaggttcagggtgcagcctataaatagcacaggcatattttttgggtctgtacattgttactgccagctcatctttcctcattttctcaattcgtatggtgtttcaggagttggagaaacagagagaagaacttgaggcatt

SEQ ID NO: 8844 - DNA, 583 bp, Zea mays
  Intron number 3 from transcript GRMZM2G104983_T01 (locus G RMZM2G104983) derived from phytozome v7.0 (chr-ID 1; pos 7 3640381 to 73640963 reverse strand)
tgctggtattacttctgttcctttttataaatatgcatcagtcaaaattcatttttgaaatctcttttctagttgctcacttactctagttcattttagggctcagggtgtgttggtagaataagtataccagtttcttggttcctttctttagagtaaggatgtatatatctgatcatactattgtcatgaagcatgattgtaatggattttctatgtttggtagtaaatatgtaagtatattaggcatattcaacctcaagtaagatatagaaagtggtttgtatgtaccccaaactgaaggctcgacaactcgatgttgacataagaatcattcacaaaaaaacataaaatactataggctgaataaaacagaagattttgagccaaattaactatttcgcccatttttatcaaaggttgggtcaatctaacaaactgcagaagttttagtctgggaatgttctactgatttaccataatctctacattttctaatcaaaattaattccctcacatacctttttactatgcatgacacatggcaggaggaagtgaaggaggaactttcagctgaggaatt

SEQ ID NO: 8845 - DNA, 674 bp, Zea mays
  Intron number 1 from transcript GRMZM2G115978_T01 (locus G RMZM2G115978) derived from phytozome v7.0 (chr-ID 10; pos 72675529 to 72676202 reverse strand)
cacagggccccctttttttggggcctccatttcacgtacatgtattgtatactagcatcccagtcagcccatatcccattcgattctaactggtctggcctctctcggttggtggcttccataggaaggcaaagaaacacgcggccgcgtacctacccctttggcttccatcgtaaaatatccctgccgccctgccatcagcagcggcagcgccggcgctgccgttgaagagaatcaccagcagcaacgtgtacaggctacaacatcagcaccctgtctcccgcgtgaagccaagtcctagttgctttgctctgaattaactagcaagcacgccaggcaagttctttcaactttttttaatcagctctatgctctcagtctcacccaccccatgtgcaagtaggcaactagatgcaagttccgtttatttaatctgcaaagtgcatagtgcggctcttttgtttttttaatcttgcccaaaccctaattaattcatttatcaaacaagactccaaatcattttgattatcatgtattctaggaatagaaaatatgattctggttttcaaaagcgaaagaagaatcaaagattagaagcagcagctcaatcttaaaagggtgctattgataatgtaaaaggctacactctcaaatcattgtcatctactcggcgg

SEQ ID NO: 8846 - DNA, 849 bp, Zea mays
  Intron number 2 from transcript GRMZM2G122045_T01 (locus G RMZM2G122045) derived from phytozome v7.0 (chr-ID 1; pos 2 95070368 to 295071216 reverse strand)
gacaacgcgatatattttaattctattcgagagatgtaagttctacttgtaagctgacctctcttgtcaattcatatgaactttttacttcaatgtggcattatggcttctacttttgcccactgttgaaatgtgtaatgttctattccatgattctgtctaattgtataaacagcaaaacaagaagtaagaactggcagaaactttccataatccaattcacacgcagtttcaacatatcagtagtatgtatgaaatgctcatggttttatatactataaatacgtcaacaactgtggtggtaatctttgatgatctctaataaatggagtatccagtattctttgtcaactagtgcacatgtgtccagttttatgaatattggtctgatcccatggacatttcatcaattcataaacaatggagagtgctttatgcattatagagcttccgtgctttgattaatgttttcctatcctatggtaaattggagacaaggtggagaaaatttaacagatggccacctatgtaaaattgcaaaaaggatcttcacgggtcataatttggtagtatgctcacctattttttctaatctaatatttgatgctaagtctgtcttcacatgtcaataacgtggactagattcttattactccttttggtgcctgttaagctcttgaacatgtctaccaaaatagtatagtgcaaaccttaggcattatttgtctttatgtttgtgtgagtttacccatgtgcttttggcttttttggtgcaattgcagacattcttacaactagcaatttcaaaatcatcattttctgaaatgtcacatccatgttatttcagat

SEQ ID NO: 8847 - DNA, 676 bp, Zea mays
  Intron number 1 from transcript GRMZM2G122045_T01 (locus G RMZM2G122045) derived from phytozome v7.0 (chr-ID 1; pos 2 95071252 to 295071927 reverse strand)
gtcccggtaacgctctccgcccgccgctcacacccacaacaaaccctcgccgccaagggcgccctcgcgccagatctgtcgcccgccttcgcgggagcttttccgtatcgggtgagctcgaggggtagggcccggtctgggttagtttcctggagaggttcccgtgaatgttaggctgcgactgcgatggaattgaagtacaagtactcggtggaaagctttgctggtgcatatgattctgatcagaaggtgaatatagagccaccaccgtgcgctttgatgcgtgcaactgaattcactgatgttctgcctagagcgcatctgatcagtgtggatttccgcaacttgtagttttgtcccgagtgttatgtttgggtcataggatatgtattaacgtgtttacattcgctctatagttatgatccacaagtggatctatctgctgcagctgtaagatggcttgcagtttgggaaatgtaaaagcaagagtaatcatttggtacaatttctgcaacactaatgccaaacttccagcttggaaaatacgaacacttggtcaattattcatttgcactgtttgcccttgtgtctcttcgcttttgtctacaagccatttgtatgtctattgcatatttcattatgttgaccccaaatgcatgtgctattctgcaggtat

SEQ ID NO: 8848 - DNA, 957 bp, Zea mays
  Intron number 1 from transcript GRMZM2G010362_T01 (locus G RMZM2G010362) derived from phytozome v7.0 (chr-ID 1; pos 2 31512116 to 231513072 reverse strand)
ttcaggagttccagcacacgctcgacgcctggcaggtgtgcgcacgcttctctcgattcgctctcttcctgttcgtgtcctgagctgggtgagggttggtttctgagtttagggagtcggacgctgctaacttgggttggctcagaggggaattttcatgtagtcgtgtgaattcggcctgagctagtgtgaattgtattaccgttcggagtggttctgcaatctgtccgaagctagctccataggagaaggtggggatcgcgattagatttataggagtggcattttgttctgacccctgcagactgcacagtgtgtgtgctacagctgagggttttggtctcagttggtgtgcgttagtttggaaaactcaaagactggatattttaggtacagtttacttttcaatccagtcaattccttctagattagggttactactttgtagtgaatgctgatgacctaaatctacaagttgagcttcatccaagtgtcttttataggacttctatgcgagttcgatgcgatgccagtgtgccactgactggttcaacttagtccatctcctgtaattggaggttgggatgtgtaacgcgttgctttggctatccaggcctttgaacagactgctgttactctgttaggaagtgatgatttaagaagatgaatggaggatagagttgtgcattggcatttggcaatgtgcgcatttgcaagttgcgggaattcaccaaagatgacactctttcagtgttttctaatttcttgatctattatgggtatatatattgtgtttgtataaaatgtatagttttttgtcggcttggaatgtattctggattatgtcagatgaattttcttcgacatggtattatattgcagccattttattgccaagttgagcatatttgagtgtttttctaattcttcttatgcaggtagctgacagtttacttc

SEQ ID NO: 8849 - DNA, 794 bp, Zea mays
  Intron number 1 from transcript GRMZM2G122442_T01 (locus G RMZM2G122442) derived from phytozome v7.0 (chr-ID 4; pos 1 34215939 to 134216732 reverse strand)
accaccacctcttccccaaggccatctcccagctggtgcgtggatctctatgtggctgatttagggtttaagctccaactgtatactgctttaattcgccgttcatactggtacattagcctggactagcatgtaactagatagttgtgtttgtagatcaataacacgtttgatctgtctgtgggtactccactgggacaatgagacaagcaactgcactgttgcaaagattttatttttggcacatgtacataggtgtgttaagatgggagatctttgctttgcatttgtttcattttcccaccgaatgatgtctatcaagttgtctcaagtgctgatttgtttttacccaaagttgaatctaggtgctgtggaaccgctgtgaaatttaggttttgcaatctgaacaaaggctcaagcccattttaattagaaatggtcacagtggttgttgggtttgtaagacaacaagtcaatgaccctgagcattgggggttctctgaaatgggcacagtagtttgtgggtttgtgcctattaggcattaaccccaaatgttggtggctttgagaaatttactctgtattcttttgttgcctattaggtttacatataataaactgtcccttgtttatacctttaagtcacaacagcctgggcactgaagaaaggggccctccatttcttatatgctgccatattttatgaatgactgagaagtgagaacccctattaacattattctgctttgtcaatatcaggttaagaaatatcatattagcgagttggagctatc

SEQ ID NO: 8850 - DNA, 622 bp, Zea mays
  Intron number 1 from transcript AC217374.3_FGT006 (locus A C217374.3_FG006) derived from phytozome v7.0 (chr-ID 1; po s 297436252 to 297436873 reverse strand)
aaagggaaggtaatgcagttgtgtctctacgagaaagaaggcagcaagagcggcaatagaaccgatgagtaagctgcaagcacgctgattcgaaagtgtctacagactctgaaaacagaattacgtaccaatgtcttgtaatatgagttcctaggtattgcatgttagtcaatctgatccaccaaagattttggagtgtaggattcggtctatgggccatcatttgttcacgacaattggtgacccagttgagaaagccatatttgtaaagccacataagctaatttgtattctaatatgttggtcgagccatattttctaatttaatcttaggcatggcgatagcctagataactctgtttctccccaaaaaagtacagttccaagaaattgatgtgcgacataatgacaggtaaggaagcgccacagtaccacacccaatctgaaaagtctacttgaattatttgagtgtgtcatatcttatctctgtttttcttttcattcccttgttctttttccaagaataccatgaatgagataatatacatggaggtgtatcagaaacagaccctatttcttttgttaatgcaggtgtaaatcagggccctcacaggaaaggcac

SEQ ID NO: 8851 - DNA, 756 bp, Zea mays
  Intron number 3 from transcript GRMZM2G318578_T01 (locus G RMZM2G318578) derived from phytozome v7.0 (chr-ID 1; pos 2 22513342 to 222514097)
aatatagacaaggaagctgaaaataaagtggcgaggtaaagttaaatgtagccaatggaaagttttacttgaccaatgttttatactcagttaagaaattcttcaatatgacttatcgcttcaaaagtaaatgcgtgacttatcgcttcaaaagtaaacgtgtcatgcatgggttggggtgtaccttagaatatcaatgaataaagttttttcaaactggacaccagcagcttgaaatcaaagcaagagttattatttacaaatgatgaacagaacaagaaactgccaaaaaatgaaaacacatcaactcctcaataggaagtttagtgataatagtacatataagtacgattactaagtagaacttaatgttttttgttccattgattaaatagcactcctgataacatggaggagcaaattggcgaagcacacatcaagcagtcctccacaaatcagggaccaaacaaaaagctagaaagactggagtcaaaacaaccaagaaatgagaatgtaaaggaaacacccctttcttcagactttggtataaaacacggtttcgttaatcaatagggttagcggcaggagttgggtaggggagagggaatgccggtggggcagagaaaaaaggacggagggaaaaagtatttggagacttcatgcaaataaaatccaatttttctaatcttttgcctggtaccttgattatctattcttttagggaaccagagctgaggtctactgcaccagacttat

SEQ ID NO: 8852 - DNA, 841 bp, Zea mays
  Intron number 1 from transcript AC202091.4_FGT005 (locus A C202091.4_FG005) derived from phytozome v7.0 (chr-ID 10; p os 25777849 to 25778689 reverse strand)
aagagggtggctgctagaaaccttgatgtacacgcacgcaaggctaggatgaacagaccaaggggaagttcatgttctcccccaccagttctacaaaaaaaaaagttttgttttcaatagcgtgatgactcttaaaacgggctgttctccaactgtcataattgcaagagcaagttgtgtcgggcttgcaacttttgatgcaaatggctaagcttttcttcttctgggcacataggcggtgatctagtctatggattgaaggccattagaatggtgcttgagctctattattattgtcattgttattgttactatcactactactactattactattactattattattattattattttcttttttttggctatgtggtatgcgctttatgagcataggccggaagtctcctagccaaagctcaaagctttttatcatcttgatgtactgttaatggtttcaatatatcgcttccctttccgagaaaagagaaggggagatgtatttgtgcctttacgcgtgtcttagccagctgacatactattctgatttgccatttaagcaaaattgataagaaacaaacaagaatgcacgcttcgatggcaaatatgtaagtggcattttaataatgaattctgaaggctgtattgggaaaccggggagcaatttttggtttgaagtgacggtatactatcattctacaccatgacccctgcaaatttcgtttgaaagtgagaagcatcaatctgccccatgagcgtagtatgttcaccctactaccctagattgtttaccggtacctaagaactggagaacagctatagcaaccacgacgaggct

SEQ ID NO: 8853 - DNA, 827 bp, Zea mays
  Intron number 1 from transcript GRMZM2G369309_T01 (locus G RMZM2G369309) derived from phytozome v7.0 (chr-ID 1; pos 1 78411626 to 178412452)
agcacagaactgattcaagaagctattgacagttggtgaggatggggaaaaatgtttatctttttttcgttaatttaccaatgatcctagtatccctactgaaaatttggtataacgtgggccaaacaaacatttcttttggtttcaagtcatgtattttgactaccttttatgatgttctgataagctctcgtttttgtaatgcacagagtagagagagtaaatgtaagattatgttgactgtaagattattttgactaccatgttacattcttctttgatcatttttgtttgaatgtaggcaaaggtgaaatgcttgtctggtttgctgtccaccagaattgtgctgaaccttagttcataatgatagtgccatttgtattgcatatgctttcacacactttcacttcatagcaatgccatttaacacaactgatgtcgtatagctgagccatcctacaaatttatttatctttatgcacattgggtatgcttgcttcaacacagaagaatctgcctggcttaggcaagtgctccctgattttggatgcttgggaggttttaaagtcgagcgactagtaatgactagtcgagaagtagatgcagaggtgatagtcaatatgagcgacttgactttctctactagtcgctcgactcgtcgactagtcacaactagtcgtagcatttgagttaggcgactagtcacaacacagaagaatctctgcagtaatccaagtttatcttactattttaacttatttgcattgcatttcttcgggtctacacatacaggtatcagtcttgcttgcttggatcttttcaaactg

SEQ ID NO: 8854 - DNA, 647 bp, Zea mays
  Intron number 3 from transcript GRMZM2G369309_T01 (locus G RMZM2G369309) derived from phytozome v7.0 (chr-ID 1; pos 1 78412862 to 178413508)
atacttgtcaagaacagaaatcactgcaataagttgtgagtagtaaaaaaaagggacaatgcttaagttgcatgaaaactagatgagtataggtgaagcaatgcatgtgttagatgctactagttgctatgctaacctattgaaatagatttcaatggggtcacctttttgggagtttctttttctttgtttgcctaaatacctagtagatataattctttatggttgactgtagcctcattgtttttgactagtagattaagatgtatgatccagcatgtttctgcatctaaacatttgtatcatttcaagtgattgaacaatcgtagctttattgcttatttcagtatgtggtgcttctctgatgatagcatcgaaatattgatgaggcaatcgcttcctgaagttgatatgttatatcatcaacacttcttccaaagtcaaaccagccacggctttctaacctcttgtaatatgttttctgccttctcaggcaagttcacgctgggagaaaagacaagccaaagtcctggtacaattttctgcttgattggatatacaagaaagaacaacatggtctgattcaatagtagtttttttgatatatgaactgtctgcatttcttgcaggagaaggtaagaaggcgg

SEQ ID NO: 8855 - DNA, 660 bp, Zea mays
  Intron number 4 from transcript GRMZM2G455433_T01 (locus G RMZM2G455433) derived from phytozome v7.0 (chr-ID 1; pos 2 71320732 to 271321391 reverse strand)
caacaccacacctcggtacaatatcacacaaacaggttaggttaaaaaatttcaagcacttataatttggaagttggtgttgaattattttcttttgtaacctgcgtattgtggtatagttgtgatataatccatgttgaatttgtaggattttgtatagtattgttgatcatatttatacaggggagtgggtactaattataaactgagttctataaagaaggtaatcagttagatgcttcattttcctcaataaatttgttcctattggtgctacaacataaggtgtccttgttttcttttatttgactcacatgacatgattgttctggtgtactaaatgcatgtacttgtttcctcatatcaatactagtaccccgtgttacttcttcataaatgtcacgtatttacaatcccaaatgctatagttcaaccatggccttttatatcactgagctagtaaagataatggcgtttattctctgtgacttcagaaaaaaatctaagataacccgtatggtaacggatcaaagagtataagtttataatgctacaggtctcatggctgcatagccatgaagaatccacatatttgactgattcggtttctgttatgcactggcagataccacttcttcgtggttccaacaaattagaaaa

SEQ ID NO: 8856 - DNA, 248 bp, Zea mays
  Intron number 3 from transcript GRMZM2G455433_T01 (locus G RMZM2G455433) derived from phytozome v7.0 (chr-ID 1; pos 2 71321580 to 271321827 reverse strand)
gggagaagattggcagacgaggtaagtgccaatgaactaacattgaaagagtattatgttgagaagaatcaagaatgaacattttataatttacattaatggacattttctgccttttccttcattattaaaccctgcattggatatcagcagcagcactttttgctttttgcacatgtttctttgaattaactgttgcttttctgtatgaaggtggcttctattgttgacagtagaccggagctttg

SEQ ID NO: 8857 - DNA, 946 bp, Zea mays
  Intron number 1 from transcript GRMZM2G148188_T01 (locus G RMZM2G148188) derived from phytozome v7.0 (chr-ID 4; pos 1 6498914 to 16499859)
cttcgctttaaaaagattaggcaacaactattctagtaagtaaaacttttccatacacatcttttgtcaatatgttggtgtagttgttctggattcacttagattggtagaatttattgcataaaatctttgactatgatccatccaactcaccatacttgtctacaccaagattaacattatatataatcctagcaatcaatttggtagaggatccagattgtacatactatctagtagttatggcatatatggaaggaatcttataaaatctcaagtcaatttttttgtgatgtatgcaaaaccgtgagggggcaagaattaacattagtgtatcttgtaaaaaattgcggcttttaattagggccaagtactcagagaatctattatgtactcccttcgtggcataataatatttgttttagctcttgttttatatgtctatattaaataaatagtgatgaatctagacacatacaaaacacatatattaattattgtatgaatctattaaaaggctaaaacggattttaatttgggttggagggagtaatattttgctagttttctggaaaacaaatagtagacttccacaattgataattgtacatcaacactgaacgtagttcaaggtatgggtgtacagctccattacctaggtggaagccatctttggctctatttttggtaactttttttccttaatatagaattacagagatatataggtgcctcccactttctaattttacaagtaccttcatctatcaaaaatgttcttctatagagtaagtggtgttggattaatttccatttttcaagtaacacaattatatattacttacaaaatccttataaatttatttatgaacacaaaactaaaatattgtcaagtatgaatatgacaatactaatttatttgtttttttaattgcatagtgccatc

SEQ ID NO: 8858 - DNA, 748 bp, Zea mays
  Intron number 2 from transcript GRMZM2G172930_T03 (locus G RMZM2G172930) derived from phytozome v7.0 (chr-ID 10; pos 147705560 to 147706307 reverse strand)
cgttgacttctcctgctggagctcgctctcacaaggtaaccgttggttctggctgttaccctttgacgggataacaaatatttgaatctgttgttgggtgttgcatgctttgcaatatttccgtgtgattgtgcatcttctgtacgagaaaaagaagtccaagccccttcaagtcgctagtttaaccttaacgttttgccagcattctcgaatcaattgctcagagcaccaatcaattattgaactgagctcattacacagattgtttgttctacctttacccacataaaccaagatacagaaggagtcatgtgagtgagctggctactttagcaacgtgtgcattcctgccgtgctttgcacatatgaggtcaatccccagagctatgactgatgaatacatacgaatagtatcctgtcctgattaaactctttttacctttgtggtactgaaatacacgctgatgtttctttttctatttgtagtttagtagcaattagttcaattttgatcgattgttcttctgcagagctacctttacatctatgttcaattgcccggctgtattagcaatatgccattagatttctctttttttttatagtcatgatatttttagcttaaaattattgacctgttttgtttatttggacactgtgggtgggtatggttgtgaaatgagctgttttagctgacccaatgtcagagttgtcacgaactagttggctatttttacaggccaagttc

SEQ ID NO: 8859 - DNA, 576 bp, Zea mays
  Intron number 1 from transcript GRMZM2G022909_T02 (locus G RMZM2G022909) derived from phytozome v7.0 (chr-ID 1; pos 1 03563653 to 103564228)
ttgctaagctcagcggttctgcagccaagtactttcttccaccttcccctacactatgtttgcaagctactcgattgatttaacattctgctagaaaatttcattccattttgttggtagatctcgcgtctagaattgccgctagatgggggaggtgagcggctcctggtctcttcgatccaatgtaatggtcaggtttgttttgagttcgagattgttagctagttctcagatccatcatggggccctctatgttttccatttctggtgatgagcatgtggtttgttccgtttgggtttaatggggtttagacctgtaacttcgtccatttttagcttccacctacctggatcttagtaaattcgaggactcactgcacatgtccctatcatgctactcttgttgaattaaaaggaccttgtagtctagtggcagctctgatttcatttccatttactgtgttgtacctgcacaccaaaactctacatattactgcaagttcaatcttctaatccttatggaatttcaatcttgttctgaccctgcctatactgcagctaagaagctacaagtga

SEQ ID NO: 8860 - DNA, 954 bp, Zea mays
  Intron number 1 from transcript GRMZM5G853141_T01 (locus G RMZM5G853141) derived from phytozome v7.0 (chr-ID 1; pos 2 18692559 to 218693512)
tttggcagcttgctggatttccaacaacaatacaggtacaaggatttaggctatttttttcctgtttttattgttattggtatgtaaaagaacttgttttctgtgtccgaagtggtgtgtgccgagagatgcatacgattgtacttgacgaagtgacttactgaagcatattctcatttatgtacaacgaagctcgttcttcagtttagaatcaagtttgaagaacttggatgttcaaaaactaaacaaagatgaagtgcacaaaaatgccatgggaaatattggagtctaaaatagggaattgaattcatttcatgtgaattgatgtaagtaatttaccttagaaatatgttgtatggtataataccgctttggtgacatttggctcctcttgagacaggtcaaacttctttttgctggggagtggtagctttgcgaccaagtttttgaatgttgtcaatctggccgctctacttagtttcggagaggcaattggtatgagtaaacaacaatatgatcacttggcatgtagggaaaaataaatcaaacatgactgactctttggtgctctggcactatagctgatgttgatgtcaattattgcaatgactctgttcttccgtacgaagatgaagcatgacatgttgaatgccggggtccttatatgggcgcactcttctttggtgggcttatgatcatgttcaatggcttatctgagctgacgctaattgtcttcaagttgtctgtattcttcaagtagagggatctccttttctttccggcatggtcctacactatacccgcatggatcctcaaggtacccatactgttccaggccaatcaagaggttgaacagagctgtgcaggtgagcatgcattcattatattcccacagttgatattctttgcggtactacatctatggcagatttagtcgctgctgccatacaccag

SEQ ID NO: 8861 - DNA, 699 bp, Zea mays
  Intron number 1 from transcript GRMZM2G075336_T01 (locus G RMZM2G075336) derived from phytozome v7.0 (chr-ID 4; pos 1 72080585 to 172081283)
ctcccgctgcctcctcgtcggcgccaacggatcaggtaggcctggccctgatccccgtttccatccgcggttcatctgatgcatcacgatctgtagtctaggtatccagtgaaaagggaaataacaattctgtagggcgtaagcctaggggacgatgggcgatcctgtcggcgacttaggagttaggatgctctgttgtgattgtagtttccactcttcactgccccgattctttttgacaccacgcaacaaacaattagtgtgtgatttggttgttgcttttgatggggattgcctgcccagctcttcacacctaataatccatttattgactagaataccgttgtttctaatgcaataacgctatccatgaaattgtggaatcacacaatctggtaggggtagtgtaaccttgaaacaacgttatgcttgtgctacagaagctgaatgaagtgacaaatgcaattaagctactgaatgtagcaccaattattggtgttcttgtatattcttatacattttgtgctacttccacatttttccagcattgtgcgttgcatctagccattcacacgtactttctttctgccattgtttctcctcatggagactgaaaagtgtggtagaactttgattaatttggaatttccattaccactgctagaatttgtctacctccaaagttggtgtgtaacagga

SEQ ID NO: 8862 - DNA, 1058 bp, Zea mays
  Intron number 5 from transcript GRMZM2G069467_T01 (locus G RMZM2G069467) derived from phytozome v7.0 (chr-ID 1; pos 1 96421678 to 196422735)
ccaagattgtcacgtcaagcaaaactgctgctaaggtgagctcatctatattctcaggtgctatgtcccatttgtaggatcttcaaagtttaggaattcaaatatgagaagaacaacatgttattgtatgtacccacaaaaaacagagaatgagttgagctacatattttcttttgccacaagtatcactttcgtgtgcatactatttaatttagttttgttaatttgtgagtccaaggacctgtaccattgacccattgttatagtttctgaagtctctaatcattgctgtcgtaattgtctgcatgatttcaacatgacgctctgtctggtctggtttcatcagatcacacggatcgttatcttagtttgtaccactggtactattgatcctctggtaatttgtttgtttatttatggattccattctgtgactgcaagatactccttcggatcatctgatctatatggctctatgtgaggagaatattgtacctcaagggagtgctgccgtggtaccgcttcttctgtcatgagctatagcttggctaccaaaaagcgccttaatcaacatgcacacaggcccaaagaaataagtgcccccagggcctacagggatagacaatcaagggcctataatacagtcagatgagatgcagtgcactggccacagtttaatggaggacaactatgctctgaatttggttaaagaacaatggtaattagagcatatattttgcatttgaacatttcatatatgtgctctgaatttgcaatttgatgatctttgtaggagggtactgttcaacaatctgctgaaggtgaaggaatcaatgatatttttttgttatcatacatcatatgataacaataatcatgagtacactgtcttggcaagttgtaatagctaaaagataatgggatactatagccttcgttgctactaggacattagcatttccctttcgtttaccaaagtttggtcttttgttaagcttttaattggcaaacaaaaagttgatgcatgcagggtgatttcgagactataacaacgctag

SEQ ID NO: 8863 - DNA, 693 bp, Zea mays; identical to SEQ ID NO: 8608
  Intron number 1 from transcript GRMZM2G031139_T01 (locus G RMZM2G031139) derived from phytozome v7.0 (chr-ID 1; pos 7 4741528 to 74742220 reverse strand)

SEQ ID NO: 8864 - DNA, 764 bp, Zea mays
  Intron number 1 from transcript GRMZM2G147517_T01 (locus G RMZM2G147517) derived from phytozome v7.0 (chr-ID 1; pos 2 78634891 to 278635654 reverse strand)
aagcgcctcgcggccaagatatctcttaattgctcgtttgtgctccgaagcgcctttgtatgtctgagcttaggttgacggacgggctggactgtggcaggaaatgtcgaaggccagaagatgaagaggaggcagcattacagccttgagaaggtacttcagtgctgtttttccgcaccatatgttccagtttggggcttgcaccacctatgttcaggtcatattataaattaagattcttattgtaatacttttgatgacaagctgcatcctgatttgcactatgatggatcggtccgctgtggacagagtttatgttaaacacatcagcctgcatgtagttgaatgtccagagagtcagtttctgcaactagattttgcttgccctactttcttattgaacggttcttttgatgatgccattatgtgctctactatccaagcctgatttttgcctttttcgattttgaatttgggtgttgcctccactagatcatcaacaccaacaagttcttcaaccttgactgatgtttgtggtgacagtaaactcgtcagtttgctaaattcaatgcttgtttgctctgtttgaccctgaatactggcaagaactaacaaaattgtgggaaaggatgagatgtcacgatgtgagcaaagaggagaggtccaagtaagcaatagggtcacagtcttgtatctttatgtttgcattcatacattaacataattgtcaccattccaggacagtaagtcaggctatccataaa

SEQ ID NO: 8865 - DNA, 554 bp, Zea mays
  Intron number 2 from transcript GRMZM2G411746_T01 (locus G RMZM2G411746) derived from phytozome v7.0 (chr-ID 4; pos 1 73754635 to 173755188 reverse strand)
tgttattagagttcagttctggtacctggtatctggtactgcttcagttctgatggctggttttgttttagtttgtttatgtttagtgatgaatcatacaaatgttccaagggttgcatttgttatatttcacaaatggacaaggaatgcatttgtttatggatctatttgtttatggatggaatgaacaatctgataaattcacactgatatagctgaatatttgatttaatatgtaggcaatgtgatactgtccatactatagtaatgagttgtgttatgtaatgctaatacttaacataactaccttacatgtctgatctattaatatgtgcattgtatatgtttggtttttctttgctttgtccacattcagttttttaaaaaaatctcatgaaatgagacaattagtgtggacataggattgtattttgttggttcttgttctgatctccagacatattcttgaaccatcttttccccttgttaataatttctatttaaagtcattaatctgggacacctgtaacattatcaagttactcgttgtgctg

SEQ ID NO: 8866 - DNA, 981 bp, Zea mays
  Intron number 1 from transcript GRMZM2G098677_T01 (locus G RMZM2G098677) derived from phytozome v7.0 (chr-ID 10; pos 97316162 to 97317142)
tgaggtgcaggtacgtgctacaaaccatgcatcaactaaacaaaatatagtaataagtgtgtttagtctagtttagtttccttccgtatttagcaatttagaaactaaaattgaataaaatgtaaggcctacctagaaaccaaacactacataaactttttttaaaataaaataaaataaaacagaggcctccagctttatttcgtatagaaacaaaagtaacaaacatctgaattaactaaaattattatcttcgcacctcctgactggaacagaactacagccatccttgcggatgtcacagttgttcttcttgcagaaccatggtctccagtcgatttgcatgttccatgtacaataagattcttgcagtctatacacggacatcatgtgtgcttcatcttcactctgcaagcatgccacttcgtaacagcaataatatagacatgcatgcttcaaagaaaaacagctgctgattaattcaaatcagaaaatgacattaacatgtaggtatgactaaataattaattatttagattattaaaaatattctcccattaatcccaaaataacagtctatatgactagctagatatgacattcacaaaccacagttcctctaaatggtcgtttagcccgttacactacacatggtttaaacgctatacagtggtacaccgtttctgtttaatcggttgttttgaccgtttaaacggtttcgtcatctgtttaaacacccgttttgcccgaataatgagctaaatgataggtgaccaactgttaactatttagcatttcatattattgtaaaccatcagttcaatatgttcttttcttgatagctgcaatcaaaatttgcaatgtttctttatttttattttttttattattcttgatgttggcaaatttctaggtggagagagttttaaaaacttttgactactgcacatttatgcttttacaggtatctcattgttatcg

SEQ ID NO: 8867 - DNA, 134 bp, Zea mays
  Intron number 1 from transcript GRMZM2G137615_T01 (locus G RMZM2G137615) derived from phytozome v7.0 (chr-ID 1; pos 2 30172005 to 230172138 reverse strand)
ttactggtttgacacgggttagaagattccagcaggcaagtcttcttttctgtgagttgtttgtttttatgtccggttatatttaatgctaattttgttttctcctactttgatgttttattatgtctggcagg

SEQ ID NO: 8868 - DNA, 759 bp, Zea mays
  Intron number 2 from transcript GRMZM2G002472_T01 (locus G RMZM2G002472) derived from phytozome v7.0 (chr-ID 4; pos 2 7258500 to 27259258 reverse strand)
tggagatccctactaagaactacctcattgtaacagtaaatattgcataacccaacgaattattattagcggcaacaagctgttggtggctaaaatctctttctctaggtgtgcaagaaacatgggaatgcttgtttgggctcaacggatccaaagtcaatcaagagaagcaaccaaaatagtggcgtctctatacattagcaacaaaggcacaaattattgattcatagaggagatctaggaactcgactatgagttagtatatttaaaggttcatctgtttcattggcaatgggtgaaattggcaggtggaggcattatagtggaccctgaatacagtatgacaaattgacaaccaataaccatggacctcaaaaatattggatatagagacgaaccttttgtcctcacggtagcatgtgactcgggaattctacagacatataaattctaaacccaaaaagtgacaagaaacaagatgatgagccacattattttgcccaagaaaaaaatattatcagagttgaggatattaatgatgaataagattatgatcaatttgatgatgtaccctccttttaaagtggatgctgacacaagcatcctatttaataatgtagaaactccatatttgtggtaagaccattactaatgaagaaatataaataagaagttttttactgtattcttgcgatgaattattattagtggcaattagttttggtggctaaaatctctttatctgtttgtgccagaaac

SEQ ID NO: 8869 - DNA, 908 bp, Zea mays
  Intron number 2 from transcript GRMZM2G170088_T01 (locus G RMZM2G170088) derived from phytozome v7.0 (chr-ID 4; pos 2 27036678 to 227037585)
tctgcggtatctgctgctcatgctctaactaggacatcatactgcatatgtacattgtgcaaaatgcgctaccatgttgtcctaaaagattgttattacaccacattttatgctttggccatgttgtttggataattttcttggatggctaactgctgtgctatgaggttgagtgccaatgtcccattgattttaattcctggagcaacatggcttaagactattctacaattttatactcctacctgatggtaatgtagtaacaggcttgcatttcttgaaatgggcagtggtacttctagatgctcctgggatgggtgtattatacgagtcttgcaagaaactgctctggttccatacctaataattatctctgtaccaatgtattgggcacttctgtcttttggttgtatcattgcatcgcttgtctcgtcctcaatgtgaatgtggttatgctcttgttaactgggatttttaatctcattgctactgtagtacttagtgatttgattttgcctggttggctgattctgttgtatggaaatatgttcttagatgttttcggtagctcataaaaaatagaaatggtgttgattttgtttgcatttacatggcttggtcaattgcttttggtgttactatagttgggcaggtactccaactctgttgcattttgatcactagcttcagaagtacttgaggaatttggtcaatggtagtgaagaatatggtggtctattttgttcttagaagtattttgtcatttggttagttggctgttcaactaaccagatataaacatcagttgctttgtgcaacaccatattatttttctgagtcatttcctaataagattgttttcatctgttgtagtactacccaagcctcaaccgttcaaagtgttgctc

SEQ ID NO: 8870 - DNA, 617 bp, Zea mays
  Intron number 3 from transcript GRMZM2G309782_T01 (locus G RMZM2G309782) derived from phytozome v7.0 (chr-ID 1; pos 2 0653412 to 20654028 reverse strand)
atactttcatcttcaacacatttgtattttgccagtggagtatttgttcttcaataatttaagaatcataacagaacattagtggacgaatcttgcttcaccttttagacaaatacatactgacattggattgttcccaaaagaaaagaatcaatattaagttgactataaattgatagtagttttcccccaaaagggactaatgtgtaccctagcattgatactacatggatatttttcttcacgtaaggactcgttataagctattcattgctttacaatagtcgaatttcaggtatggcataagttatgtggaagctggttatatgcgcttcacttggtctgtttttggtcaattttcagtgactcactatttttctttgcattttggtttgttccaataatttaatgtggccagctttaacctcctagaatctaggcccttgactgaccatatattaacctgttgtcttgcttgtacgaagttgaaccataccagagtgaatttgctataaaaatatacattattttgatgatttatggctcgtgttaactccatgtagatctggaacgaaggtttgagttaacttgggtgtgttttttatgccagatcttca

SEQ ID NO: 8871 - DNA, 492 bp, Zea mays
  Intron number 3 from transcript GRMZM5G837018_T02 (locus G RMZM5G837018) derived from phytozome v7.0 (chr-ID 1; pos 2 82463549 to 282464040)
agcaggttcttttcagtctgtgctgtagctaacccgtgatgtagactttactattaggtatctacctaatgcagacgtcttcaaggaagtagttttgttgtacggttgaattttgaattattgattactatgacccttgaacttcaattcagatgttttgtctagtgaatgtatgccaggacttcaagcatgtgctaaactgacccaacaaatcagatgtttgaacttttgttaatcttctaggtttacaaattaatcatattgttttttatttgtgttaacagaatagtagtaggaatagaaataaattatttattgttatagcataaggtgtagactaatctactctgggtgattacacacttgtgcttgccagctaattactggtaagaagtcacatgttcttgtactttcgacaccatcacattttcattattgtgaccctattcatgttcaggacgtgtataagaatatatcctctacaattgctgg

SEQ ID NO: 8872 - DNA, 936 bp, Zea mays
  Intron number 1 from transcript GRMZM2G372398_T01 (locus G RMZM2G372398) derived from phytozome v7.0 (chr-ID 1; pos 3 6497861 to 36498796)
gccctcgcgtactcctacttccgccaggaggtgaggtggtcaataccgtttgcttttactcactcatacaatctgcatactctaattgggggttgaatgtttgaattcgttggcttacttgcaaattgaggaactttttgggtcagatattagcattttttgcttggggttgcgaagggttagttcctgggtgatcaggcattagaatagcaagttgtttcagttaatcaattggtagtcacatttgctgaaattgggtgtagactttgatcttatttgctggtagaaatcgtgaggccagtgtctttgccaatttgtagcgtggttcttatttttaccataacatttttagtttttgcacaaacattacaccttagagaatcaaattccctcttcatcattgtagggttatatttgatgttaggtctacaaattcttctctagaactaatgttttttcgtgacacagtcatcttacaagttggaggtaatttaagaagcaataatcgaattgaagaaatttatcagtactaactactaaccatgatgtttttttcacttgagtactagtgagcactgagcagcctgctttaaccacatttacttattttttatcttgcatccagattccagacattggatatctgatgcagcgttctcttgtaaattgccctgtttattttggtgaagcaaattagggatagtattttaccttaaaaataaagtttagcttcttgcactaacatttaattccttttggttacttgcatatattgcacaatctgtggttatcacaataagctttacttcatataaaaagtaggggttgcccaatctgattcaataattattatcatgtagcttgttctactccagtccactctgttggtgtttaaattgggctcaacctgtcaaatcccatcattttaattttcag

SEQ ID NO: 8873 - DNA, 975 bp, Zea mays
  Intron number 1 from transcript GRMZM2G466919_T01 (locus G RMZM2G466919) derived from phytozome v7.0 (chr-ID 10; pos 31618812 to 31619786 reverse strand)
cgccgcgcccccgtcgctcggtggctcaagcggtgcgttcttggcttccctccttcctgaaagaagagaatttccgcttcttctgactggaattaacctgagctaatccattgcttgcactgcattgattttgattacgcttgttccctaggatcccgcgggatctcgtgtcattcggcggcaaatgctcgctcttaaagtgggtcataggtactagctgcctgattcctactaaatctccctccccttttttctcccctcccttagttgaatcccaactctcattgtatgatatattattttattgcatctgtgacaagagtgtaagagtgtaagagtaatagtaggatcctcttcctctgcagctacgagaactgcggcaagacctttgttgatgtcaacgcactctgcaagcatgctcatgtgcataataagaagcagtatatctaacatcagtaccacatactttttgtttgttgttgcaataaaaatgcacttgggccttactgtacttgtctgttctaaaacacaaaacatcttgagatgttcttgtttaactgagtatgtttaccactccctgttccttatattgtctaccacttaggatgtacccgtccagtgtgtatatttagttcctgagcagtcctgctatttataattgtattgtttctctaagatttacttcttaattacattgaaacctatggcaaagtaaatcataactgaatttgacggtacatatcgtactacgaaaccataaatagaactatgcattcaacttttcagcccttcagcctttttcgttttccactgacatggtactcaagttcatagctttatacctttgagtagtttaaattcaagtattaatttaatgtctatcacttggagtataaactttccatggaatacttatatgattatatttattattcattaggttacagtttttttcagattctcctgcagccactg

SEQ ID NO: 8874 - DNA, 988 bp, Zea mays
  Intron number 1 from transcript GRMZM2G317770_T01 (locus G RMZM2G317770) derived from phytozome v7.0 (chr-ID 1; pos 1 95911094 to 195912081)
cgctacatccgggctcgttttcatccccgtcaaaggtgagcgctgctgctggcactcccaagtcccaaccagaaaccggttctatgcccattaattaaggtaccaactaatcaaaaagatgatatgacactttaagtaaataagagatacggagaaatgatttcttattaaaaaaatatgtctacacgaaccaatacattaagatgtgattggtagatgagcggaaagccggaaataatatatgtaattggaaaaaagattattttgtccatcgagaattcgggaacatagttcctctgtgtgggttctagcattgtgactgccctaacatcatttgtgtgatgtcagttgtggaggattcagttcaattttatcgtagtttagcactttagccataaatgtaggagttctcctggctattagtagttcacagaattgtgggtgttttgcgcccaactgaacagaatggtaacctaggctgctagctttgactggaggtgttttcttcatagcttgctgtcaggtggttgatagggtgcatggattgattcggccttgcttcatgaaggaagggggatttgcattagctaacattcctgtatactgtcgcattgactgcgtttgtctgtttgcaattagatgaagaacccactgaatctgttatgtcactgtagttgcattcctaaattgtttggtgtttcatgcatgctaccaattccacttgttggttcatggcatctcttcatgaatagttacatatcaagtaaaagattccaggtctcgatatacaaatccccttaaaatcctctatgcatctgcacatgtctcatagtatgcagttgcagggttggcttgattctgtgaactgcggctattttgttacattttaactttgaaaatgctgttaacaacttaacatcaatgtgaaccctgttggattgatctttttcttgataaaatggtttgctgtctttttctgcttctccag

SEQ ID NO: 8875 - DNA, 1051 bp, Zea mays
  Intron number 1 from transcript GRMZM2G140924_T01 (locus G RMZM2G140924) derived from phytozome v7.0 (chr-ID 10; pos 141076582 to 141077632)
atcgcccggtttgaaggaaaggcttggaaaggaaggtcggtcatggccgctctttctccttcttcttcctcgtgttatttatgttcttgtcatgctacccgtcgtttcttttacaaccttttcgggtctggtttggtgttctttggttgctcgtgccacagtatgaaactggcctacgagtttgcagttcacctttgaaattcagggtggttctttcgcgcctttctcgttcacttcttccgtagcgactgcctgtgcgagctgtaggcgctgcaagtttgggaatacatacctgttaccatcgtgatcgatcgcgcgataggttttattgggtctttgaagatttgatggtccacgaaagttctggtttttttttcttttgtctctgcaatccaattccctttcatttactatatcaaacttcctctgctttttttttcttatcgcaaaagaaagaacgaaaaacttgctctgttttcttccccggatacaggtcaaagtctatcctctgaaagacggaatcgttttctgctgcatgtttcggttgcttcgactgtctgaaaccagcaactttctttctcatgctttttttttctcacttacaagacaaagataatatttttcttatgcgataagacagttacgatcccatggaatccgtatgtgtcaaccgtcgggtgcctcctactccctctgtgaatgtcgttttaacttttttttattaaattttgactggctcggcttattaaaaaaaaaaactcatcattatcatttattttcattttgatttagtttatcatatagcttactttaactatgaattggatttttctatattttcacaaatattccgaaaaagacaaaccggtcaaagttgatgtcaaaaaaaaaatcaaacgacaaattaatagtctctaaaattcccgtaaagcaaaatcagtacacctttcggttttggtacattattgtgttgtgttgtgtcgtggtatgcaggcttgaccaaattgacctttcaggataggaataatttcagacaggaaggggaaaaggt

SEQ ID NO: 8876 - DNA, 982 bp, Zea mays
  Intron number 1 from transcript GRMZM2G012143_T01 (locus G RMZM2G012143) derived from phytozome v7.0 (chr-ID 4; pos 2 37035192 to 237036173 reverse strand)
ctgctggcaagatcggcaagaccctcattttcaaggtcatcgatcacctctaaccctaacataaacaggctgcaggcattacagttacttgtttttttagaaacgctcaattagacaccttatgccgacacacggcgtgagacatcagatcccagagacccagacgctttatcgctgctaagattccttcaccgttgtgtcggtggcggtgggatcggttcaaaattgcctccattatacgttcattatgattccaatagttttgtcgttatccagcaaacattttgtttctatttgtggctccctatcatggtctcttttttttgcatatgaaggtggtgtttgttttctagcgactaatttttagtctcttcattttattctattttagttactaaattgataaatacggaagctaaaactctattttagttttcatatttatcaatttagtgactaaaatagaataaaatagagggactaaaaattagtctctacaaaccaaacacctccgaaatcttattacttgtcgttttcagtcctggttaaatgcgctttatggttggataattttgtcaatatcgaaccgacatatttttctgtttatttatggttacctgccgtggtcctttttatatgcaaatgccattttgtgtgagttttttcgctgttgcaagaaaaacaaaaactaaaaagcacctgatcatttgtgtgtattattgattctctaacagtggcaattattaacaagctacatagctctgggtgatgtgtaagcccagctgtttatgacatggcatatttgaatgaaagccctattcatgtgccaagtagttactgaaaatgaaaaaaaaaacttagatcttgtcttcccagttatctgatttctgtgagtgttgtttgatccagcatcagcgtgtgtaggttgttaggcttgtcttttagactccttgttcttacacaaataccctgcaggttaagg

SEQ ID NO: 8877 - DNA, 699 bp, Zea mays
  Intron number 1 from transcript GRMZM2G311914_T02 (locus G RMZM2G311914) derived from phytozome v7.0 (chr-ID 4; pos 2 33087765 to 233088463)
gggcccgcccttcaccggcgacgtgcatccctccggtacgcccttccggtctcttccctccccgctctgtccgaaaccgagtaacccaaaccctaaaccttaatctccgtgtattgggatctgacgcagtcgtatacgtacgttttgtatacacgcagaaacttcgttttttttttgagaaaaaaactttatcggttgcacatatgtccacagatgtcctgtactggatcatcccgtgctcgtgaatagatgaccttgggcagtttcgctgtatttgttgctctcgctgcactgcatatcggtgtgctcccggtgcagattacagaaagtcagaaactgggaggttgggaaaaggatggggaaattttgatatgaaagagatacatttctggcgcaagttattaacttattatgctatttattggtttaaatgagataccttaaaaacttgtaaaatggcgactccgatccggaacgtcacctagcgctagcagtactggctttgtgacttatatgtagctgatccctttaaactaccatgcctatacatgcttatatatgcatgctacgagatgttcatggattcagggtgcaatctgatctggaagtttttcttcaaagtctcattttgtactgattcttgcttgttatggtgcaggagaagaatattgcgctcacataactgaataactgatatta

SEQ ID NO: 8878 - DNA, 994 bp, Zea mays
  Intron number 1 from transcript GRMZM2G110309_T01 (locus G RMZM2G110309) derived from phytozome v7.0 (chr-ID 1; pos 4 0352437 to 40353430)
gcgatcggaggcgggcgggcgtagacgccggcgaggtgagcacgccgtgctagttccgcggaattctggcgaattatgcggttctggggctgggtttcgtgtcttggtgccccgctgtgaggcgctgctgtgttggggttttgcttccgctctgttttcgtccatccttgtccgaattctgcttgctttgctccgatccgccgctctgtgctcggataaagaggtgaaattcgcgtctttccgagattccggcacatttcagagtcgcggtttggattcgtggggttttgcttaatttcgcgtcgaattgctgtggatcgggtgccgagatcggatctggcctcgctcgattcacgtttttctcgacgttcttgtgcgcctgtgaggtttccggtcgctcttcctttttttagtcgacgtgcccgctttccttttggcagttgcttgctcctcgcggattccgatgcacgaggttttttttttaaaaaaaaaagttttcttctcctctctctcactctcccttttgatcgcttggcgtgctggtttacctggcgaatttatttgcttgtgcattaaattcagtggcgaaaccatctcgcaagaaaaaacctgaggtcttaactcggatcacgggttgaagtatgaattctctctatttcttctgctgtttttgtgtttgagttttgattcgtttttggagcgcagcctgctgaaaattcttttcatttggctgtttcacgactagatctctcggttaatcggcttggggtattgggattataacttttggtaattaattacttcaaacgcagtagtactcctatgatcgttccctgtttaattaatggaatggagggtttaaagaagatttatcccaagtcactgcggagatcccaatgaattatttcctcttcttttttttcctacctactagtaccagctttcatttgctgattgctactgtgttcttgcagatttgtgttggtgacaagcc

SEQ ID NO: 8879 - DNA, 956 bp, Zea mays
  Intron number 1 from transcript GRMZM2G162931_T03 (locus G RMZM2G162931) derived from phytozome v7.0 (chr-ID 1; pos 2 50957776 to 250958731)
ctcctggccacgcgtgccttctgctgtggagctaggtaattttgtgactctaccaaatgatgggaacagcctagactcttaacagactgctgttagtgtgaacatactcgaacataaataatctgtaatatctagatgtagtcttattagtgaaatgttagtacctgaaatgcttttgtaaaacaaaattaagaagggagatttaggacttacacacacataattggtataacagccatgcttcgggagacttacccaataacccaacccatggtgggggtggactgttttttttagataggcccgtacagtctcacattgttgctgccaaatttgaatataacctctgttttgttggtttacctggagctgtttgtgcatggagagtatattagaccatgtccactgttaccttaaaggatgttagacttaaaaaccctctacttgataccactcatgtgggagggagccttcgacactggatctgccctctatgacatattgagccaaatgaaaagaaacattcatgatgacacgatgagggatacctacttctcttgtattctctaccgcttttttccatgaatcttcgtactgccaggtgcttgggcttgcgggaagcaacaacttgctgtcggttgtgcttgtgcctctcaagtgtggtgaggagggagcatgtgaagaaaaatgtttgtttttttaaaatttgctgactcaatttttcatctgagttggatacctaataggactctatctagctgaaaatttatagcataaagattgtttagggatgtatgaatgaaaaccagaaagctgtagttttgctgtttttttgtatgttaattttggcttaatggttaatatctattaaatttgttgagaaaattatttgacaattttatttatatatgtgcacataagtttgttacagaagaaaacaagcgttggtttggctg

SEQ ID NO: 8880 - DNA, 638 bp, Zea mays
  Intron number 1 from transcript GRMZM2G079889_T02 (locus G RMZM2G079889) derived from phytozome v7.0 (chr-ID 1; pos 3 1431151 to 31431788 reverse strand)
gggaccaagaagctctcctccttccacttccacaggtgaagtccccctaacaatctctgtagccggtctgtgagattcttagactagtttagaagctgtattcctattttaccaagagaaaatgaactaattttccttggaaaatagaaatcccatagaaaaatggggttcctaaactagtctttagtgttcctttccgggaaaattcttgcttgaggaattcatccctcgagtccaagtcaaaacttgtaaggcagttcagagttcttcagtttctgtgtatgaattgatgccatgttttctgctcaagaaaaattgtgataccatgttttgtatgttgttgttatttgatgctctcctaaattcggagttcagataagtggagtggaaaattggaatgcccagaataaacgcgaagatctatttccatagggatttgttgaacacctaccgttaattcttaacgcttttgtccatgttgggaagattgatgtgaagcacttaagtgcctttttttttcttcctcttacttttttggatgataaaaacagcagcactgctacagcgttatggaagatgagtatatgtaaaccatttaggtaatttaagcctaagtgctagtgttatcttttagcagg

SEQ ID NO: 8881 - DNA, 1004 bp, Zea mays
  Intron number 1 from transcript GRMZM2G417684_T01 (locus G RMZM2G417684) derived from phytozome v7.0 (chr-ID 4; pos 2 33510592 to 233511595)
gtacccatacttcaaggtactttccattccatttaggattgcgcattaaccatttaattgaaatatgttagtattgtctttgttttaatcattttaacttaaacatttaggattgcgttggtgccattgatggcacacatgtattggctagggttcctagttcaatgagagcagccttcatggatagaaagcacacaacgacacaaaatgttctagcagctgttgattttgatttgagatttatctatgttcttgctggctgggaaggttcagctcatgatgccttgattctatcggatgcattggaaagatctgatggcctcattgtgccaccaggtaattccataacatgtttgaatatgcttttaaattacttcataatcaaactaactagaatcttgaagaatagattcaagattctatacaacaagccttttcatccatatccgacacaagttaagcttgtgttagcatgcaccatccttcacaactggattcttagatatgggctggattcacattttccttcagaaaacacttgggctccaaacattgccaatgtggaaggtgccattgatgtagttcatgataaccaaacttggacccaacaaagagatgctatatcaactcaaatgtggcagcataggggtctagccgtgtgtaatttctttgtgattttcttctaagaaacattgtactctgcagtgatgttttttgttatcggccttacaatctgagaaacattgtactctgcagtgatgtttttttgtggaacttaattatttttatatgctgagagaaattgtgatctacagtgatgttttatgtttgttgtcttgaaactgtatcattttttatatgctgagagaaattgtgatctggagtgatgttttttgtacttcctgctttgaagcttaattatttttatatgctgagaaaactggtcctatgctatgatgccatttcattacctcttcttatgtcttatcaattgtatatagact

SEQ ID NO: 8882 - DNA, 1046 bp, Zea mays
  Intron number 3 from transcript GRMZM2G356897_T01 (locus G RMZM2G356897) derived from phytozome v7.0 (chr-ID 10; pos 64367222 to 64368267 reverse strand)
tgaacatcttgaaccttgatttggggtataactttattgagaggagttcatatttgaaggttgcacatatccctgtttgccaatgaatctatcatgaattatttttgactaacaatcaccttttcattttttttctcgaatacgcaggaagggtgtgtatcattatattaaaggataggggaaaaggcctaaggcctggaacaaacaggacacaacacacaccagactcatacaacaaaaacacaccaaacacacacacacatacacataccagccacacacaacacaccaccaccacaacatacaaagaggctaaaaaaccttccttcctctaaccaggataaaaaagagagctcatgttcttggatcctacaaaaaaccacatccgcatctcatctttgaaaccatcctctaaggtagaaaggcaaagctgagctccataaaaaattacacctatttatctgcttccaaaggcactaagccccaaggatgaccacactattaaagccctttcttttgcttttaggaatcctagctaaagccttcctccaccattcaacaaaataggaatatcttctctaaggagccacagtagagagaccggttggagttaatatattataccaaaactgacttgtgaaaatgcaatttgatagaatatgttgcacagtttcatcttcttgatcgcatagaacacaatttttaggataatcaagacccccttttttgagtctgtcagctgtccaacacaatttccagcggactgcacagattccatttagtctacattcagttaccaatagttcatgctaacacctagacactgcatacagttgatggacattatactaacaccctgacactgcatatagtttacaacacctaaacatgacattttctttattgttttggagtcattttccttgcacatggcttctccacgactggtggtgaatatagatggcttctccatgactggtggtgaagtagtggcatcttcaacatttgtagtcttgggctattatcaaaaccaaagcttgctgaca

SEQ ID NO: 8883 - DNA, 518 bp, Zea mays
  Intron number 1 from transcript GRMZM2G356897_T01 (locus G RMZM2G356897) derived from phytozome v7.0 (chr-ID 10; pos 64368550 to 64369067 reverse strand)
gaggcagtggcggtcgcatcaaaggaggaaaaagggtagcaagacgaggaccacaaggtgagagaatttcatttcctagatcgacttgcttctaccacaaggtgagataatgatctcctaatcaatgcgtcactcggacaccataaatttaaagtttctctgattttgttcttcacctacagttctacgattttgtgaaattgaagttaaaggatcgatattttggtggtgtttaacaatggaatgtattacttgtaatatgatgaaattgttgtcaaaatatcagaccaatgggacttgatttggttgatttgttggtaaagcttgtggagtttacaactgttttatgctgctgctgctatttttcaattcagagtagttatttttgacaaaagcattgtgacatgtatttcagtttagagaaaataaaaaacagcaatgtagatgtatatggacttgggggtttgattattcatggtgcagctgcaactttaggtcgacagtagcagcaacattgt

SEQ ID NO: 8884 - DNA, 908 bp, Zea mays
  Intron number 1 from transcript GRMZM2G003509_T03 (locus G RMZM2G003509) derived from phytozome v7.0 (chr-ID 1; pos 1 73231227 to 173232134 reverse strand)
ttgcgaggctcaacgtccagaggtacggtgtgcaggtgagcccaggtgatcgtgtttcttttgaatctttttttccaaccaattattgtagcctggttttgccaacgcatcgatcagattaagcgagtaactgggagtttatccagatactctaatttaatgttctcatgcttatcacttataatcatctcatcatcggtgaaagcaagtgtcctgagctatgtcaacatgtccagataatccggagtgctcagtgctggtttgctggttatggctcttaatgtggatagttagcataggtggacgttttgctggaaaatgtagaacgaactgattaaaaaaatttggattttgagctgtcacttgtcagtttagaataaaaattagggcaatttcaagctgggacagtgtagtatgatacaactattgtagcatcgttcggcttttggtgtgcctttcattgaagaaagcatgcccaaagatgttcctttagcctttaagttggctgctcaaagatgctcagctgatcaaatcgatgctgaaagcatgcccaaagatgctcacatccacctagaggtggacgtgagcattcagtgtgaattttctgatagtattgtgtgctcatttgttgtgttaaataggtatatagaatcaaaagtacacacttgcgtttcgccccttgctatatatctttcactttttgatagcttgtcttacatcaaccttaatagtttgggagatacacaccctagttagagtcaataatagtttatgaagtaaaaacttgagtaccaacgagtttggatttgtaatttttctgcacaggtcaatttattacgccgtgctggagtaagtcatgattaatacagtttttccatgttggaatcaggataaagttgaaataaggc

SEQ ID NO: 8885 - DNA, 470 bp, Zea mays
  Intron number 1 from transcript GRMZM2G335499_T01 (locus G RMZM2G335499) derived from phytozome v7.0 (chr-ID 10; pos 104022812 to 104023281)
tgggtccgcagcgagcgctagggtttaccattaaggtaatccaccatgattaaggttggaatcaacgggccttgaacttcaatagggagtgttggctaatgttgctcggtttcccgtaagatttctggtcccatgagcatattcagaatgccattggttcatttggcagagttattatgtgggattcaggtcgttcgaatatcgctaggttgatggtgagagcaagagttacctccatagaagaggtgtcacactttatagtcttttcagtggcagagggtttccagggagtttcttgactgttcagtctgaggtagtgcaacatgttatgatgggaggaaacccaaaaaatgaagaataagtacctccatatccaaacaatggtcaagagctcccgtttgatttctttggtctaggacagccagtcaacaatgttaatcttgacctgaacaatcctctaccacaggagg

SEQ ID NO: 8886 - DNA, 1010 bp, Zea mays
  Intron number 1 from transcript GRMZM2G404459_T01 (locus G RMZM2G404459) derived from phytozome v7.0 (chr-ID 4; pos 5 516559 to 5517568)
ctgtccggtgcgccatttttcagcacactcaagtccttttgctccaataaattgtgtccctaacttaatttctttcttggtttgtgttgaaccttatgcacctgtaatacatgaattcttgacaaactagttagtccatgtgtttgtgttgttcgtcaaccaccaaaattaattataggaaatggttaaccctatttccctttcacaactcaactgtcagatgagtactccattacagcacttacgtacacgagttctatgagagcagacctccaaaatgaatatctgctaagtgtttatctacttagatgaaggacgacaatcactttcttgggaaatattagcgacacaactccttacatcctccgcttcttcctagtgttttttgttgtgattgagtcgacacagcaacaacactgcactattacaaccagtacgactatatcaactagcaatgtcttccttatatgttactatttattttgctaatattcattatgtttaaatcacatgtgcacctttctattgacatcaaaaaattagtggggatcgagtgattctttaaaccgattattacacaagttaaccacactaaaattaacattggtgaatcgtgccatgatttttttctagtgcaaaatagccaaaccaagcaaaacatatgtggctatcgttacacatgtgtaaaggtattgcatcacaccattgtcacccatgtatttggacaataccgagaggaaaaaccacttatttattgtattttatcaagtttatcttgcttacgtataaattataacccaacaaagtaatcactaaatgtcaaaaccaactagataccatgtcatctctaccttatcttactaatattctttttgcaaaatcgaaaattaatcttgcacaagcacaaggactgagatgtgtataaatatctcttagattagtagataatatatcgcacatattattgagaccaactagcaacatagaaagcacaatattgtaccaataat

SEQ ID NO: 8887 - DNA, 558 bp, Zea mays
  Intron number 1 from transcript GRMZM2G068270_T01 (locus G RMZM2G068270) derived from phytozome v7.0 (chr-ID 1; pos 2 39998570 to 239999127 reverse strand)
accgtcggtttgggacgataagaaagaatggaaccatattttccacttttcagtggtagacatgtaatatttgtaaagttcttctatccaaaatccactaaaaacaggtatagatgtgctttcaaatttccacaacaagaaaaccggcttttgaaaaaaaaccgcttgctggattagaccatttggtttgccttttgatctttggggcaaaaccacatccaaaagccaaaccaaacccacgtccttatccaaggtgagaatactcctatctctaaataagtatataattatagcttttaaaaagttaaacaattttgatcaagtatagatgagagaatattagtatatttatagtatataattagtatcattatatgtattgttaagtctatttttataataaaattattttagaatacaaatattgttattttttatgtacggagggagtatatttgatgactggcactgactctgaaagaagatactgatggagctgtatctttctctttgctcattgtaggcaccttcagcagtgcttgcttcaaccctaccgtg

SEQ ID NO: 8888 - DNA, 484 bp, Zea mays
  Intron number 3 from transcript GRMZM5G866681_T01 (locus G RMZM5G866681) derived from phytozome v7.0 (chr-ID 1; pos 2 0642074 to 20642557 reverse strand)
ctgagataatgtttggttagctacttgccgatataaacattctcgtaacgttctttgtgcagctagctatctgtaaatgagctgatttcgatagcagcttgtaattataagctatttgtcaatctgcaattgtttgcccatggctttgatttggggcatattgtaatggtacatttatttttgttatatgatcagttacttccttgttcttctgtctctatcctgctagtggactatggttcctcttgttgcctacagtcaacttgaagtgtttatgcatctaatgctttaattttcccttctgtatcctttagtgtccttcactattttgtgtttctaataaagtatacttaatttgaatccgatctgattaccagtcataagaatcagaactcttgatacgatgataatatttatcctaaatgctaatgcatacttctgtatattcttgtccagaacaatattttgaagatacggaaagtgt

SEQ ID NO: 8889 - DNA, 1049 bp, Zea mays
  Intron number 4 from transcript GRMZM2G110143_T01 (locus G RMZM2G110143) derived from phytozome v7.0 (chr-ID 1; pos 1 82539698 to 182540746 reverse strand)
gtgcagtttgcaaagtacggccccaatgctgtgccaatgtgagtaggcacacctgtatgttgataacctgttacctgtgttgtttatgtagttatcatgacaataagaagcatgatatttatctcattttgttgtggaccactcttgatttgaggtgacaataattatatgctaacagcaaggaatatgattaggttgatgcgtcttggttttttatttgtctgagatcttgctgacggttgatgcctgattatctatctcttgttacccaaacatgttttggttaatcttctgagattagcataccaatgtactagttatgctttgttacccaaacatgaatgaaggacatacctggcacagtggtgagaagccttcccactgagccgaaggcccttggttcgacgcagcctctctgcaaaagaggcaggggtaaggcttgcctcagttattccttccccagaccccactcatgtgggccaacactgtgtctgtccttgataatgtgattgaacattttggagtttgtttgttcttagtttcttagttcaagactactaaaataagactcgaaacaaaatcagcaaaactcttgccgttctctgtatgttttcccttttttggttacagcacatgaaataggttgagagaattaattgtcaaataatttgtatgaacagtcgagcattgtctatctagctttaagatatatagcacgtttttcgtatggtaaaatcccagtaccagtacaatactcattatgtacatatagtatgccatatgcatttatggggtagcttgtgtaaaacagtctgtttagctaaacatatacaactcaaagacaacaattgcattcactcatgtactaggttctgttagtttttcttcttcttgaatttatttatctcctgaagctgtgtgcaagagagtgtatgcatccatttatcttatcctctacctatttcattcaggtcaccaaagtttgtccctgctttgttttttttgtgtctgtagccacaaaggaagggtcaaagagggggttgagaaat

SEQ ID NO: 8890 - DNA, 473 bp, Zea mays
  Intron number 1 from transcript GRMZM2G139512_T03 (locus G RMZM2G139512) derived from phytozome v7.0 (chr-ID 10; pos 106435620 to 106436092 reverse strand)
ttttttttttaatcttgcccagaagtggtcatcaggtcagacgaacgaaattaatctactggcactggggttgctcaattagctgaccgagtgctgaccggttctgaatttggaactttctaactgatgaatgcttttttacacacacaagcatgttcgattgggtttaatccgtaccgacttctacgttatttttgtctgattgtaattgcagtagtctaaatagactgctttgattcgaagagaacaggctcaggaaaactatctgattaggggaatctggtcctttgctctgccacttcattctgttgctagttgctaaatagtccgagtcagcaagattttagatttccattttgttttctggttgaaaatacactaggccgaaaaatactcgttatgttttgagaatcgttcctttgtcttcttgcaaagaaaccagtcgacggagtttcaaattcctctcatgcagc

SEQ ID NO: 8891 - DNA, 902 bp, Zea mays
  Intron number 2 from transcript GRMZM2G125838_T01 (locus G RMZM2G125838) derived from phytozome v7.0 (chr-ID 4; pos 1 73372667 to 173373568 reverse strand)
ccatccccgagttctccctcaacccgctctccaaggtgcctcccactacccgctccctctcgttcatgctaagtttcatgtggttttattttttcaggctgagctgattgttttttgtatgtcccattacctttccatttcattgtcaatttatgctggcagttatgtacagtacaactgttctgggattggtgctgttgctacagattattgtacttccctccttttcctttttgtttgcatatctggcctcggagagctgccaatttacaacattccctcggagagctactgaatataaaccattttgtcctcttgtgaatctgaaaccaaacgaaaaaaagggaaggtaaataaaacatctaatcaaacaagctgctcgccactttaattatagcttaaggccatggttaggggagctgtagcctttccataagcatcatctcctggagatgcatcatgggaaagctgctccgagtgagcttctatactttcagtatacagttgaggttttggtgcttttgtctgcttgaagaagcaatcctgtttggggaccttctgcattttgagctctcttgggaagcaaaagttgctagaaactctgccaaacatggcctcatccacatcagtcgcactatctgggtctgggcaaagcttggttgggtttcctctgtatctgctgccttgctgaagaacagcgtcagttgtgcttgccataacaacttgaccgataggatacacggctacaacactaggcatgctactgtctctagataccataagttacatgacaaagctctgccaggacaaacggtgtactgctccagttgattcaaccaacgtcttgctcatctcgagtgatggttttgagtatctttttttttcttcagaggttgctccgt

SEQ ID NO: 8892 - DNA, 1052 bp, Zea mays
  Intron number 1 from transcript GRMZM2G434191_T01 (locus G RMZM2G434191) derived from phytozome v7.0 (chr-ID 4; pos 2 36755735 to 236756786 reverse strand)
ttacttccttaaacgctaagaagactatcaataaggtacttcaaactcttcttgattagcatatacaagtcatttttcctagtgttttcatttctgttaaactttgcagttttttttctcgaacgcgcaagagacatgcgtatcatttcattaaaaagggaggaaaaaaggatccaaaatggatcagtacaagaagacccacattacggtggtcgaaaacaaagaaacaaaaatacatccataaataaaaagaaccagaaactactatgatctaaagacctgggattggggctgttaggagatctaagtttgtagtgcctcgtaacacccacaggtccctctcctcctcggtcctcttgatggctgtattaagacagggagaaagaccgtaaaaacacatgtgtttcgatggttccacaagatctagaggccgagactgataaacgagtttagatcgatttcatttgagcaattaaagattgtttaaacattagttttttgcccatataaaataaatcttagattaaaattcagaagcagtccttaaacttgtacgatggtgtcatttgggtcctaactcttgatttttaattgagtaaaatacattaccggtccctaaacttgtagcattgtatcacggtccttagactcccaaaatgcacatctaggtctttaaacttgtgaagtttatcatcccggtctctaaactctcaacatacacattctggtatctatacttttatggttgtgtcatctgggtctttaaatttatttttggtgtcatcaaatgttcaaatagtttttactctttttaatatttgattttttgcactcgtactatagttattaaggcgataaccacttttttaccttttaagcggaaagatataaggcgaggcgacaccttactcatatataaacacacacttatcatttatcaacatatttgtataagttgcatttcctttcactttttattatgatgctagtgctctacaatttcttttttttgttcagcagaaaaatacacggagtcggcgtcagaagaaact

SEQ ID NO: 8893 - DNA, 609 bp, Zea mays
  Intron number 2 from transcript GRMZM2G458782_T01 (locus G RMZM2G458782) derived from phytozome v7.0 (chr-ID 1; pos 2 15399119 to 215399727)
ccacgaggcagaggttcaagcagtagacctctaaggtaagggttccgtcaaagacttttttttttaatttgttctaatactagataaatgtggtcacttttatttgcttggcttagtccatctcatgccttattactagtagtctagtaatttactatgtcatcatattttcagtcagtgttagcaataacttgatgttttatttgttagctttagatatttggcacctgggcactcttttataaacaaacattctgtttgctggttgctagtcgctaattaaacagtgagcaatttcttgtttcttatgcaaagaaaacatgttttgtacggtacagatgtactggatgcacataagttttataacgttttccaaggtcaaaatttgcatattgagctgtggacttggacatgtgacaaaaaggagcgaggaaagaagagaagttgtttttatggctgaacatctctcttgagttgatgcacccgtaaacattgaaaaatatgttttctaaataggacattttttttgttttgatcttgtactgatccgtgaccttatatattgcctttccagcaacagatttaacaaccgtggttgtttgcaagctg

SEQ ID NO: 8894 - DNA, 1030 bp, Zea mays
  Intron number 1 from transcript GRMZM2G406043_T01 (locus G RMZM2G406043) derived from phytozome v7.0 (chr-ID 1; pos 2 31727748 to 231728777 reverse strand)
tgctcgccatcgagcaggcctgctccctcatccaggtcccattccgcagcccacacccttgttgacgagcttgaattccacgtgttccgtgcttttagcactttgctctcggtaccccggcgttagattcggagaacgcgcgtggacctgtgctcgctgatgtgcctgggttatgcagattttactgcactttgttatttgaaccatggtcgggggactgattgggcgttttctgtagctcagtgcttctctgtggatttggtgatgggatccagtttgatgcgtgtcagatgaggcttcgcaactgattgattgttttgttgggcatttgaacatttaaatggcttgcttaatttgtttattttgggcacgttaattgattgcttaggagtgagatgcaggtacttcaatgagttctgacacattttatgttagtgccttaataacttctaacacatttgaaagttggctatgaattctgtaaatgccggttagttaaaagttctttgtcttgacattgcgtttctcaagcatgtaatctctatgctacggggtagtactggttctatagtgttgctttgctgatattttgtgagttgtgacacatttattcattggataacctgaagctcctcatttcagactgggaatctgcgtgtagcaattgagctatctattaggactttagggggttctagtagaactgtgctttgcagagaaagacacagtcggaatagcatttgctgaccctgattaatctatccccgctctgttctcaacttttccacttgtttgattatattattttattgtaactctggatccttagtttattccctaacaataatcaagctgcccaaattatgtgaaattctataacaggagtgtcttcctggtatctgtgtttagcttaatatatggaactgtcatggtgctaatgaacactctagttttcttgtagaatgccatctattgcatagtgttgattcagcagctatgcttttgacaacgggtaattttgcagctgcac

SEQ ID NO: 8895 - DNA, 419 bp, Zea mays
  Intron number 1 from transcript GRMZM2G401975_T01 (locus G RMZM2G401975) derived from phytozome v7.0 (chr-ID 10; pos 139035408 to 139035826 reverse strand)
gtggtacgggagcccttacggcgccggcagcgacggtaggtttgtactcatccgcttaaaatataattcgttatatattcattaagtaacatttgaatatagtttgtatgtgaacagaaaaaagtagactaaaagaactatattggtggactgaggttatattggtcaacatcatgtgatgcagtgatgaagcgtagcagtagtggactagaagagatcatatattcatattcaagaagtccctttgtttttttatttgacgtttcctaatgtaaaaacttgcactatatatccaatgcaacgtcaaataaaaataaatggaggtagtatgatcctgcaactctaatgacgatgttgatggtcagctcgtttctgcatgcacaggcggtgcgtgcggctatcaaggtaccgtcagccag

SEQ ID NO: 8896 - DNA, 975 bp, Zea mays
  Intron number 1 from transcript GRMZM2G116314_T01 (locus G RMZM2G116314) derived from phytozome v7.0 (chr-ID 4; pos 2 27106606 to 227107580)
agtttttaaggtatcataactgttacatgcttgttttgctcctgttgctttttttgcttgcttgctagtgtttaacttaatgcaatagtaaaatggattctgtatgattcagaatcaactcttctagtaccaacgaaaacttccactacatattattggtgtgagatacaatgttgtcctagtgagcaatgttttcaagttgtctgattaatcactattagtcgtgattaatcgtccaagttggtttggaccaatcacgattaattgcccaagtcgtccaactaatcatgattaatcgccctagttggtcagccagaacgaccagcaagttgtccgacttgaaaacattgttgaataatcactttttatctttcaaaatattcaagaaaagcaatttttgtggagcaaaagtatctgcagcatctaaagttacgagtcatgtaaaagttgatgaaattacttgaccttcttgaaagaaatttatgtccaaacctgtcctctagctctattttaactaaacacatgtttttaagttctaatcagacataacttaccatatgcatatctgataaactaaaaaaatgaacacaactcactaggtaaattatcatggcatggtaatgtgttacataagatgtgtggcagctggtggtgatataacatcactaccttttgcactaatggaaatccatagctagcttgccttgtgagatacaatgttgtcctagtgagtaataattgattgatgtatcactatgcctgggctgatgtactgatatcctatgaacattcaaaatgattttattgaagtatttttttaggttcttgtattattgttagacattttagaagcccgtcaagaggtgaaaaatataataattgaatttaagtttttttaatgaagctattgtttcctcttgaacatacatgttcatttgttcactatgcaatttgaatacgaccaggcatcttgtg

SEQ ID NO: 8897 - DNA, 498 bp, Zea mays
  Intron number 2 from transcript GRMZM2G403667_T01 (locus G RMZM2G403667) derived from phytozome v7.0 (chr-ID 1; pos 1 88601257 to 188601754 reverse strand)
gaccttcagcgagagcgagaggtggccagaggtaggtcttcttcatcttgggtgtttcttctgggttccgttgttatttactagtcactaacgcgcgcctagcgcgcgatacgttgtataattttattaaaatgtgtatagcatgtattcgtaagagaaaaaagattaagtagttatcagaaaataagtaactatgttgcggttcataagaaaacaaaaaaggtatcttgtcataagaaaacaaacataaattagttacattgttggtgttgtccttaaggagcagaggtactactaagcatcattccgaaataaatctaaagcgaagaaatcaaaacacaaatttaatcgtttatgtactattaacatgctaaatctagaagacatgttcgcacggaagattcgacaatgcggagaaaatgattcttcctgtgcttatctttctttgttaatgaggtggttgtcaccttttttttgctactttgtttgcagaaccga

SEQ ID NO: 8898 - DNA, 901 bp, Zea mays
  Intron number 1 from transcript GRMZM2G165747_T01 (locus G RMZM2G165747) derived from phytozome v7.0 (chr-ID 1; pos 2 59217001 to 259217901 reverse strand)
ccccggagctactctcccgctccacgttccaaagggtaagcgcgccttccccccctccccccttgctgtatatgccccctcccactctcccgctcgcccattccctcgcttccgctatctccccgcgcctctcggatcgcctcggcgcgcggtgagtctggcatgctgctgcccccccgcctgcctgctcggtctgtctggattcgtagccattgtttccttccctgtaggggttgctttgctgcgctacgctgtgcggaattggtggttttggtggggctcgatattttttggtcgagtcgttgagatcgccgctgggttactgcgggattagagtcgattgccccccttttgtttttcgaggagatgtttcgagtcgtaattatatgaaatccatcattgtgatttgagttggctagcatctcaggcccccagatttttgttagcagcgtaacgcgctgttaatttttagatcgtttccgaagggcgggcgggctctgttagatctacgggaacatttaaaatttcttcatgtatgtatgatccggaagttagttggcagattcactgaatggacagtgatagttttatactgatcaatttgttttctgtggctgtagtttaatatatcattgcttcctgtagaactgtacaagtgcgcattttatttgcagctttgttgagacaaatattcagctagcttcttgttgatgtgaatcaagctgattttaacattttgctgttatatagaaagatggtgtcccatattgttgcatacgcttgtatgggcccctagagctagagagagctcttttagcttatttgcagtttttttttgggacaaatattcagctagcttctctgtcaacctgattttaacatttttctgttatatagaaag

SEQ ID NO: 8899 - DNA, 939 bp, Zea mays
  Intron number 1 from transcript GRMZM2G016447_T03 (locus G RMZM2G016447) derived from phytozome v7.0 (chr-ID 4; pos 2 05554157 to 205555095)
ggccacggctgacgggtgcacgcaccggtatgcatcccttgctgctctaattcccgacgctctagctcgtgtaccagatgtgcagactgtcgcctagccctgctccggcgtgaaggacttccgcttttgcccctgcgcatcccgcccttggtcgcgcacctcggcatgttcctcggcccgacggctactgtcttgaggcatacggtggccgcccacctcgtacccagtcaccagatctcaagttccacctcaaaatctagatcaagtgaatgccatgtttcatccttggttcaatcggttcttactggaatttgttggcagggcgacgagcacccaccaccggttatgtgcaccctctctccttcggtccttcctccctttcttccgtgctaagccaccgagcacccaagcggtttggcctgatgccacatctctggtagctacaaacctacaagctttgacaaaagatgttatgattaggctgatacaaagttgtttctgcttcattatctctgtatcatactagcacttattaggttgcaacttgattgtttaggtactagatttgatctgattgtgaattaccagatggttggtgcaggtaggagaggtggatttggtggacctagattcgatgtgcagagagcgacttggaggtggctgacatcttcaagcactgcatcatgcagttacaactactgttggccatacagggaaatgctgggcctattataccaattgttcaaagcatggaccttgtataattacatgtttttatcatagatagattaatttctgaaatgcccatagattggtatatttgtggaaatttatttgccaactgtaagcccgtcgtgatgcatagaacatttgtggtataagatttttctgttgatgtttgcaggttatttttccagcacttgacattcgagtgaaaaa

SEQ ID NO: 8900 - DNA, 502 bp, Zea mays
  Intron number 4 from transcript GRMZM2G016447_T03 (locus G RMZM2G016447) derived from phytozome v7.0 (chr-ID 4; pos 2 05555753 to 205556254)
gacaagtatcttcaccacaaccattcattttaccgtccacacctttcctgctgagggatgctttcaaggatttcattttaacatcgaaccaatatcaattaagcatggcattttatttggaaatagatgtttgtggtggtgccatggacctgtgcgtcccttgtgaaatgaattgattttctgtcattgaattttctaactgaagctttttcattcgtttgatttacttgagctcccttaagttgtattgtattatttaatcacaaatgtcatccttcctcttatagttatataatcaaatattagttttaatcctatctgcatggtttacaatgtattggtttgtgtcattgtgtgaagaatgtttggtggttagtctgaccacatgtgttagttgaatatgagtgccgagcagtagcatgcatataagttccactgcattcaatatttacattttttttcttatttccaggtaactcaagaggtccacttattgactctt

SEQ ID NO: 8901 - DNA, 926 bp, Zea mays
  Intron number 3 from transcript GRMZM2G052995_T01 (locus G RMZM2G052995) derived from phytozome v7.0 (chr-ID 4; pos 4 5669620 to 45670545)
agggctacgtccttaccataatccatatccgagaggtaaccttctgtgatgttataataaacacctccatattattctacatagcgagccacaacagaaatttttttgacaacattttttcacattctattcgatattaaattagtttatgaggtaaataattccaaattggtaaaagatgagttcaacattggcccattcttctcacagctgcaggcattagccaacagacctacatcttgcatatgtatttctcttgcatctacttacctctatggatctagcatatggctgcatatatgactgattatgacactgatatatatgtttcgatttccgatgaaatgttaccataacttttttgtcggtcatattcattgttgctagaattctagcagaacaagcatgacaataagcttcgctgctgactctgcagatatccacctgcaatatagtgataaataatagaacatttgtgagatgtcgtggtgccctatcatgctttctttgctttccttcaaattcttcctatgatatggctaacaaaatgaaatggtagattcaggtgacttcacaaccttttgatgtttaggttagaacagtgtgatggtcaagttgtaaaaatggttgcaaaaatgctgaatacatgttgaagaaatggttgcacatatgattgattctggaagaaatgaaatcactagagagaagaaaataggcgctggaatggtaataggaacttgaagtttgtccttttcagacttctacccagaaaatgattttgtttcgttttccttgcttaatattcctaaatttttgactgactaaattagtgctctattgaacactgaatgctgaatgactgacactggattattatttctcgtagcacagactctcgcgaagcgcgaacaatctactcgttcaaa

SEQ ID NO: 8902 - DNA, 837 bp, Zea mays
  Intron number 1 from transcript GRMZM2G378949_T01 (locus G RMZM2G378949) derived from phytozome v7.0 (chr-ID 4; pos 9 6426552 to 96427388)
ggaaatctctcgatagggagaagctgataagcgtccgggagaactgaaccgagaggaccgtgccatatctgcgtcctcttgttgtgttgcttattggtagcacaaggcagatccgactaggataggatgttgtcttacgctgggctgctctaatattttatttttcatcttttacacaggcacaaatgagggacatgtctggctttgttgagactaggcaacaacttttgtcgttaaagccaaatcaccgcatgaactagattggttttgcggttgctcatcatttgaattctgagtatgccactttctagtcgatgtcgataagaaccaatcatatatgatttagcataatatgtcttggaacactactaaatttttatatgctacatatgctatggtgaaagtacggtagcaaacttcatcccaaacattgttgagtgtgcactgtaagcaattgaagtagtacacggtataaagtgcgagctgaatacaatcttcttggatcatgggttcctttatcatgtcaattatttgattgctctttgtcatcattgcaaaacatactttgtataatatatggctttttcattttttggcatattggtgttcttttcttttaagtgtgtagatagcctaaaggtccattagtccagggtttgcacagatgtctctgactctctgcctcacttgtatatacctcatttcttataattgagttgtatagcctgaagatattttttctgtgatccaaacctgaccacttatatttttgtttgtattcttttatatcagatgtagaaacttgttcatttatttgtgatctatgtgctaaagatt

SEQ ID NO: 8903 - DNA, 907 bp, Zea mays
  Intron number 1 from transcript GRMZM2G116526_T01 (locus G RMZM2G116526) derived from phytozome v7.0 (chr-ID 1; pos 2 34816611 to 234817517 reverse strand)
tcctcgctggcaacgctgaaggcgccgtaagttgatcctcctctttatttcgtttccactggactaccgcacgcgtagggaagctcctgtgcggtgtttcattaaacactcgtatccatttcggattttcgggtgcctaactgcctgtgctaggtagaaaaatcgtcattgccgcattggtcagtgcctggggattgttggctggtgttattttactgaatatttctgtgacggcctggcattccagagttgcaatgttgctagccctgtcttctacagcctagagagctgtagaccgtgattgttgtacatcagagcagtaatttgttatttgatcctgggtctgatgtatcattaattatatgatgcagtatggtcatgtatatgcaagtatttgttatgttatgtagtctcatcttactagatataataaggctagttagtggcgatacaagccaagcttttagtctgaaatagtttgtagttacttgttagaggtattcatctgcctatcaagtggctgaacatgggtgatatatgggagatctagcagactagcactgcatttttcttttgtcattttttcttactgcatcctctgattcttgttcacttagtatttttttttctttagtttatctatggcggggcggctccatatttaaaagaaacaaatatacataagttgattccttagccctaagtttattttaagctggagctatacttccgtgctgtagttctgtagctggtatattggtatcgattatccacttaggcaggatctttcctgaacttctcttgcataattgatagttgtagttttaaaaagtaaatatggacatatttattgtaaaaatgaaactcaatgcattggtctaacaacaatttaaatttctgaatgcag

SEQ ID NO: 8904 - DNA, 623 bp, Zea mays
  Intron number 2 from transcript GRMZM2G060567_T01 (locus G RMZM2G060567) derived from phytozome v7.0 (chr-ID 4; pos 2 38326520 to 238327142 reverse strand)
ggaagaagaggaggaggaggaggtaaatgaaattatatgatttttttaattgatgcatcacatgaacccttttatttaactttggttctttcatgtatataggcagaagtaaatttgctcttctttatacgaaattctatctttatgtagttgtgactgttataagcatgaatgcctgcatgttgatagcactaatcgataattattatctgttcattgcttggctgttcaaaataatttgttggagatacttgatgcatatgcccttgcagtgtacgtgtgatttcttgttcacactaccattctaattgcatacctatcttttcaatcagctaatggttatgtagtaattaaatagctcaaacagctatcctcatgggcttgaattatgcaatgtaattttccagtagtatattgtttcttactaaaattcaattccaaagcaatttgattcagtgattgtaatcgcaatgattatttctggtgttgttatgcagagtatgatgccaaccacttatgttagttaatattgaattgtcactgattgaacactatcgtcttgttttactgcatgtctgcatcctgtagaaacctaagccagcgccagtggaaaaggtcgctgc

SEQ ID NO: 8905 - DNA, 867 bp, Zea mays
  Intron number 3 from transcript GRMZM2G145996_T01 (locus G RMZM2G145996) derived from phytozome v7.0 (chr-ID 4; pos 2 34467466 to 234468332)
tttagcgagctggctacatattagtaagtgtacccccttttttttgcaataaagtgtaaactcttagcaaataaggactactgtataatgaaagaatccgtttaatcaagtgatgttctcaatactctgcctgcagtggtagagttggtgaattagctcttttcagttcctggtacatgcaaaatgcaaccagtatacactacatgacttccgttgcattatacgttacatgtctacagggacttttattttgatttgtgaatttgcttgcagaagttctttcaatttgtatcttgatgttagccttcatcttctcatcctcgatgtgtgattctgttgtttgtgagggtaatgtttaaccagacatttgtatgcaaatactatgctgatatcatctggtatgtgcttttgtaatatgtttatttggtttggtgatgtctgggttaggtatcttcctgtgtgcttccatatgtccacaagggggtagtcctcttttttttgccccatcgtccatatgtcctgtatacttccatatgtcctgtttgaatacaaagctaatcactagccagctaattatatgtagcccatccaaacagggagctaataagtgggctaatttttatcccaatccccaaccagtcactggccaactagctgaggaaccccatctagtttgggctaaaagcgtgtaccaaccgctcaaacaccaaaaatcccctgattctataataatctcttctggtactcatccttgacaggttgtctgcctatcttctaaatgaggaactggtttcctgagttaaattactcatactctgctgattactttcaggttgggaatacaacagatatctgatcgatcagtat

SEQ ID NO: 8906 - DNA, 945 bp, Zea mays
  Intron number 2 from transcript GRMZM5G864065_T02 (locus G RMZM5G864065) derived from phytozome v7.0 (chr-ID 10; pos 96911075 to 96912019 reverse strand)
atttgttagattggtgtatgtatatgggaaattttgcctgcgcctatgataagttgtgcagtagtaggattcatttgggaagttatgtctgccatctcgtatctcttcatccccaactctattgtttcttaattcctaagttatagtatatacatgatagtaatagatagatctgtcctgtataatacttccatgttctatatacactgtatatgtactaataatctttgtcttttgtaaatcttcacaacatatgtactaatctttgtgttttgtaaatcttcccagaatttgttgccaatctatcaactcagctaatgtgttgggagcttcttcaacggtatgatttcacacgactggtttaatcagtggcagacgccacttctgtatttattcagtttgctttttaatgtgtattcttgggaaaattatcaccccagacatctgatgaggcaatcccagtcccagttgtctagatagatcaggactcagaccgtgatgcgactattgtgcagctaagttttggagatcattcggggatactacttgacacggtatatattttacatgcgccactgatgatgcctttacattgttgctgctcaaaattgtgatgtttaagtttttgtcatatctgccaattatttttcctgatattcactgttttcctggtatttctttatgcaaatacggacaacctattttttagttgatatagatggtgttgatttgttagttaaagctattgtctttgatggtcacacttttattggaaatctgcaattccttttatgttgtaacaaaatttaatatctaaaaatgttgttggtgtcttggtggtaccgtgtcagttgtcaacaatccaattccattctcatggctttgattctgacatatgattatgattattttaaatttgtgcagcttctttcaaggcaatcaacg

SEQ ID NO: 8907 - DNA, 774 bp, Zea mays
  Intron number 1 from transcript AC208439.3_FGT002 (locus A C208439.3_FG002) derived from phytozome v7.0 (chr-ID 4; po s 82220499 to 82221272)
atctggtttgtaaattgcttgatctggttggttaattatacgtgcagaccgataggggactagggcctccttgttaattaatccccccatcctaggttccttgtcttggtcactatacgtagtacttgtaccctactatttgtcattagcagttgcatgattattgatttgattaataaaatgggggtagattaggggggttgcatctgcgtcagcggtgagctatagggtggagtctacgaattgtttacttaatttgggtgcttgatgagccagctagcgttagctttatatgtacatgtactattattaattgctacttgagctcgacatgtcactatgtgaatttgatgctttagttactagcttttgctatgtagctagatatatgtcatgtccggaaacatatcaaaaactatatgtacctagaaaactgaaatgatatgattcggaacagagtacatgaaactatggaagaaaatagtctgccacacggttgctgaaaattttgttagtgcaaaatagaatagtaatatattcaatcttagttagatttttaaatcacaaatgtgttgtgtttttcttttttttaaaacaaacaacactacactcagcctactttgttcgaatgctgaaatcaccctagggattctcatgatcatttcacttttctcgtgtgtgcatttaccccatgaagaactagagtttgtaaaaggtttcttttgtatatgagcttacatcttatgctttgtccttttgctgatgcaggttgag

SEQ ID NO: 8908 - DNA, 1029 bp, Zea mays
  Intron number 2 from transcript GRMZM2G114459_T01 (locus G RMZM2G114459) derived from phytozome v7.0 (chr-ID 1; pos 2 102615 to 2103643 reverse strand)
tcctcctcctcctctggttaccccgtcagctccaggtgatactctatcctccaactcccttctttcactgtccaatgtgacgcacacacggttaggcgtttacaacaacaacaacaacaacggcggccgccgttgcaacttatttgattggttcagttgctgagttgtggcacaatgcagtaatgctttggattaggcagtaataatggcatcttgttttggcaactgtaatgtcgggtgttcttagtcgtgcacgctggctcccacgaccaaactgcatgcatacatgctgtactcggacatttccaaagctatattgtcaaacagtatctgtgtttaatccttataacaaaaagtcaaaaactgctaaccttcaccaccctagatgtagtctgtcacagacccttcttctgttctaacaacaactgccaccacaacatcaacatatatagcttgcaatgtgctttgttctctatttgttttgtcatttgattaattttcatgttgagcctttcctgttaccacccttatcatagtcacatgatgtgatgcggccacctgtatgaatgcattacctagagaatcatgctttgaaaagtctgaacggcatgttgctgtctaccaacttctcgcgagttatactggttagagcagtgtgcttgcggggtctccccttgtcagccccgtttgagtcctgccacagattcttattgcaatggctaggtggtggcttctcccttgcctttgagttttttttccaatatatttttgtaaacttcccattcctattgcatgttaataacctagaagttatgtatcactctatagttgtgccacattcaattgcttgtttggaatgaggtgctgtggtgcggtaggaagcagtgccgacctctctttcagttctctatttcttttttatattttgcctgtgcattttcccccatggtgatgattctgatacctttttctccctaatacccctgtatttcaggcggcagcagcagctaactccgtacaagctaaagt

SEQ ID NO: 8909 - DNA, 1060 bp, Zea mays
  Intron number 1 from transcript GRMZM2G043749_T01 (locus G RMZM2G043749) derived from phytozome v7.0 (chr-ID 10; pos 66014183 to 66015242)
ttggctcctccgccgtggccggaggcgaagcaagtgtaaaccagcccaccctcctccccgtctcctctccctccccatgcgctgttttgttctgtattgggttgtgcgcgggggacaggacgcctcctgcgccgaccgttccgttcgtgtttgtgcctgcctgtgccttcggttgttcctctgagcgacggcgagtcggcgaccgaggtggggttccgagcgccccagcccgtggtggaattcgtttggtctggttgttgcggtaacagccttccaccccccccccccccccccccccctccccccgacacttctgctttgagtgctgggctgcagcacctgatgcttaggatatccagggtgccgatccgaatcgcagcctcaacgtgggcaaagcactggacccgcagtatctaccgctgccgtttcttgcccgtagtttgtagtaaaaattacatgttgttgccccttgcccgcccggggagttctgctcgtactgcatcatcagaggtgacaggtactttgactctggcgctacggtaaacgggtaaagaacagtgacttgtagttactgtgtcatggaatggaaccgccgtacttggattgtttgcaggatcgaattgagcttggatggaatgaccaatctatttttcagtgtgttactctgttggcagtgcttgttcgcaacctattttcatacgaagtttctacttgcttcgttgaaaaagtaagcgatgtcaaaaggtgtaaaaacgttgaaatcgtgttggttcttgtcactgtagggatatgttctggatatgttctggatatttcgatattggagggtgccattaacaaattgatgagtttgacctccctactgttaccagtttgtatgactgcataactgttgtactgtcatgttctggatatgtttctctatgaccgccactaccattaatggtccttcagtgtcatctctacttttttgttgaatgatgaatgaatggctcacagacatcatttggttttattgcttgtagggggaccacagaagcattagctgggtgaactcttt

SEQ ID NO: 8910 - DNA, 779 bp, Zea mays
  Intron number 4 from transcript GRMZM2G029396_T01 (locus G RMZM2G029396) derived from phytozome v7.0 (chr-ID 1; pos 2 90004282 to 290005060)
ctcgtatccactgccttcctggagcttggtcaagggtaacttttatttcttctctgactttagttgccttcttcagacttcagctagtcattactgtccttactttgataatttgacaacttgaggtttcatatatagattgttttccaagtcttggctacacttcaattcttcagcgatcactttttacaagaaatatcttactttctaaatatcaagctttcactgggtagtatgataatatattgcctggttttgaaatcgttctatcattatcacgctgcatgatggaagcaaggagccaagttttgatagttacacatcggagacaatttgtatgaggacaatgtttgtttttatacttttactagcaaatgtgccgttccctaaattaaacccaatgcataatgatgtattgtccaatgctgatgctgtatctaaattatccatttcaggactagttttttaatgttgtcatagtaatattaatgcagaatatgtacttgaagttttatctccgtcctttgattttctttgcagatactactttagtaaatagtattgtggtaaataatgttctcatttggatacatggattttaagaatccggatttaaaaaatctcataatcctggaatcccttcgggacattctagattctagtagattttaccacacaagcacggaatccaataaaacacattagatcttttttatccagattcttaacttatttggttttcagctatcaaaaggcaatcgaagaaatcactaggcgaa

SEQ ID NO: 8911 - DNA, 614 bp, Zea mays
  Intron number 3 from transcript AC217264.3_FGT001 (locus A C217264.3_FG001) derived from phytozome v7.0 (chr-ID 1; po s 245950351 to 245950964)
tacaaggtaataagttcagttagatatacttagatgctagctaccattattgctaatgttatatatatgttgctggttgtactttattttttaggttctcatagtaactaacaattgcaatcaaacaagttatctcttgttgtaacgttcttctatttgtatttaagtttttacattcaaacaagaaactcactagatgcggagtttttcagttaataaacaaatgtgttgcacatatttgaattaaagaaggggattctgagtacgtaattgaacccagtgaggagcatagtatagtggaggcggtaaggaatatcagtatatgagatcatttgtagttaaattatttatattcttcaaattaactattgtttttatttaaggaattaataagctctcagttatttgtctgttatgttatatccagatttgatccaggaaatttactataaataaagctatatctacatacatatgttaacttcaagtcttataattagtaatgtatttaattttgaaatggagcatcaagttcaaacaattttgtgttactaatgattttatacacgttgacggctactattgatagttccttatggtttcattgtagtttt

SEQ ID NO: 8912 - DNA, 625 bp, Zea mays
  Intron number 1 from transcript GRMZM5G800514_T01 (locus G RMZM5G800514) derived from phytozome v7.0 (chr-ID 10; pos 80619611 to 80620235 reverse strand)
ccctcccaagagaagaacaggtctctcactgccttctgttataattttattcctatgtttgtcaacacataggtggtagtttttagtagttggttaatattggtaattattcttttgattactcttgatttttttatcaccatcatgtgccttacaatttgaattttttgttggcatttgttgtgggtgtcttgaattttaattcatcaccaccatatccgtacaatctggatattttctattattatttttttaaatcgttgttaacaccttgaattgtttggactagcatattcattcgcagtctctgctggttcagacccttctaggagcaatgaacatcatgattgttgcatgattgctagggtgggcttaattgatactctggatcttcaatgaaaccatctatttgcttgctcccaaatatggaagtagatgtgccatgcaaaaatgagtactatatgtgtccctacccttcttcatgctatgctttttctatacctgttttcacttttcttcttatgaccatgtatttgttctctgagaattttttccatatctgatgctacatatttttgtttatatcgcagtgcaatatatttgcatttctggtgtgttgatttta

SEQ ID NO: 8913 - DNA, 944 bp, Zea mays
  Intron number 1 from transcript GRMZM2G148913_T01 (locus G RMZM2G148913) derived from phytozome v7.0 (chr-ID 4; pos 2 17923427 to 217924370 reverse strand)
gtactcgccgagtgcgtctacaaggtccgtgcgttggcatctcctaaatttcgttgcccggctcgtcctgtaccttaccgatcacgattgacggatcgctagatagatctgtgcagccattttcggctggagatttgtccgaatggtgcatgcggtaaaagtaagcattagctgttatggttatgttgtacgaaagtttttttttggaaactagaatgtttattagttgctggacatagagtttcctgcctcttctggtgggggaagcataatgaaatctgcatgtttgtgtattttgtaatgatatgtagtgtgccatccaccaaatgtaggcacaccatcttgggacacttctgagcaaaaaccatcttggtatagttgcatgtctgatactattaatgtgacatttcatgcttttaccatgaagaaacatcaccttatcttctgatgtcctcgcttgatctaattgatctgggtctcagcttaatataacagtcacaaaccatatagattttccagatacgttgtttttatattttgtttcaagaatttctagtgtctattttccgactagcctacctgatcaatatcctaggactcactatgctgcccaactagttccttgcaaatggattgcatgaaatgcttgaatgcctatactgggcctagcttcccattgtactgacacattgcattatttcgctcattcgtcctcatttacaaatgtctgatcatcatctctcccatgatgcaatttcctgaatgttctgacatatatgatttggtacttataacttgccactgtatggttacaaagtgacatccgttgtcaatcagaagaaaaaaaatatttgctaggatagtgacaactaaagcctttcccaactggacaaggctttgtttttgttaatagttgtatgcttttgcagagacctgtttctgag

SEQ ID NO: 8914 - DNA, 596 bp, Zea mays
  Intron number 1 from transcript AC191366.2_FGT002 (locus A C191366.2_FG002) derived from phytozome v7.0 (chr-ID 10; p os 98821274 to 98821869 reverse strand)
gaagaaagttgtagcaaaggaaattagcttcgaaggtgaacaaaactagggcttcctctagcgaggagaaaacctttgacctgaggcacctgggcggtggcaaacttagtgctgaacaattgtctaaacttcgggagtttgccattgacgaaggttactagtctggtatcgttctttttggcggtgtagatgaagaagtgctagaatgtcttcctgaccaaactgaagctagagtggttaacactctaacacaatctatctgctttctaaagctaaaaatgaactgagcaattatagaaagcaacatattgctggtagtttagtctattcaaattttaaggtatgaagctacttatatgatgtgttttataagtttattagggttagattatgtggaatcttactatgctttgacattgttgtagaattttttaatgagcaaagccctaaaacttcagcaagaatcagaggatcacaaaaatgagtttattatctctgagttagaaaacaaagttggaaatttacaggggctgattacagaaaagatgcaacaattttgtcgcttaaaacaaatctagtcaaagctcaaaagtcaa

SEQ ID NO: 8915 - DNA, 853 bp, Zea mays
  Intron number 1 from transcript GRMZM2G114772_T01 (locus G RMZM2G114772) derived from phytozome v7.0 (chr-ID 1; pos 9 2239381 to 92240233)
tccgccgacgtgccgcgcgactgggtccgcgcaatgtgagtgccgccttcctcgtccgctccgacgcgtctccgtcgaccaatagcgaaaccagagttcgaagccattccttgcaaagactttccaaggttattttttgcggataattttattgcgcactgcaaacccgcgtcgcgtctcgttgcggtgcaaactacagtgtagaaactcaaggcgaagactaggggatgtgtgacgtgttttcgggtacctgggagaacgatgatttgctagttcgggaagtggaacagggcccacctgcagagaggaagcttctcctagtttttttttttcaaattcttgtggggggtatcttcggccactcacatcgagacatatgcactgcatcctgcaatgcttactttgttattaaagttgctcacagaatatgctgtcatggatgcacagctctgaagctttgactatttcctgtcgtgtactttttcaatcctctgctacccacttacactggtcaactttcctttttcttttatagtgattgcacagaggatcttcgtttgtacaaaaataaatgttttccgtagtttctctgaccaggttcatagccaacacttttgtgtcttttatcattggtggtatcaaagtcagtcccaaacgattaatagcgatcggtgaatgtcccccaagacatggcttcatcgtttcacaagggtcaacgggacattttttttcttacttgttttactttcgtacgaagacttgtttcaacgaactaggaattttgaatgcaaaatgcgaaatgaaacgagacacctattgacaatacaaggggacgtatgcaggacagaagagg

SEQ ID NO: 8916 - DNA, 745 bp, Zea mays
  Intron number 2 from transcript AC235534.1_FGT004 (locus A C235534.1_FG004) derived from phytozome v7.0 (chr-ID 10; p os 136835331 to 136836075)
ttcaataatttcaacttcgagttttcagcttcactgtaagtttcaacaaattgttgaggtgagttcgagaagtgtttggcttacgcatgaacaccagcttctataatacaattgatttgtgtgagtttacttattaattacccttgatgattagtggggtgtcacgagagaaccgagcgttatattgtgtaaccggtgatatagtgagttttttttgtgcaactttacgagtagacatgaaaacaatgtctgtgaagcaccaccagagaggcttcatgaatttcatgaggctcatccctagttttaattttttttccaaagctagagctcttagaattagacctgtttggatagaagaagctgtaacgaactcaatttttttttgaagtgaaaccctcccagacatgcccttgatccactgggtaactaccatatttttttgttgtatatattttttaaaaaaagaatatatggtttagtgaaagaaataaatgtattcgttatcatgatgaaatattgagcggattttattcaaaagctatagaagactataacaggatgtatataagccatctcatttaataattttaaagaaaatacgaagatgatcccacattatttatgcaagaaagcaaatagctaagaaaatttcacaaatacatgtactcatatacgtgtatataattctcaaggaaaacatgtcccaatatatgtcttgaccttcattaaactagtcaacatattc

SEQ ID NO: 8917 - DNA, 986 bp, Zea mays
  Intron number 3 from transcript GRMZM2G702426_T01 (locus G RMZM2G702426) derived from phytozome v7.0 (chr-ID 4; pos 4 4063007 to 44063992 reverse strand)
ggaagggacctgagggtccacttcaaggtgcgttgcgtttcttcatgctgatttgataggttcttcaacatgctggtttgaggtgcaaagtagtgtgtcaacataagtgtgatgtcatgcatggatggattagattgtcgaaacctaaagagtaaaaggttctgctatgttattcatatgagcagttcccgcgttactttagtgacataaacacattgttgattattacctatggaccattgtgttgttttccatgactaatggtttgtagacaatgtgacatctttagacatttattttttgtttctggagacgtgcctgaatgatgctggtgtttcattaaacttgtacatgctatgccttcaaatactttttgtgtgtgtgatgacttcaaatactgagttgacatgctagttacacctcaaacaaaatcgttgattcaaagtgaaattttgattccaaattaagtttcggggaacccaggattactgattttattgtgagctatctcatgagacataataagtctcatgtccatggggactgataaattgacagttttttttcttgttcttttaaaacattgccctgagtctctttaagttgattttaaagcattgctctgtcagtgtcctctacttgatcttgtaactttgttagtcacaagtcgcacaggtataccatgcagtggtcattagaaagtacagaatattctaggtgaattctctctaattatagttagaagctttggcacatagggctttcctatgaacctgcaactgggtttttgcgatctgtataagcttgaaatcctttttgtgctttcccacattcaacttaggcatactgtgatactcagttcagtgattagttgatatcagatttcagatggcgactctgagattgattatctttctgttatctcttattaaactcgtaaaattactgcagaacacaagggagacagcttttgcgcttcgcaagct

SEQ ID NO: 8918 - DNA, 753 bp, Zea mays
  Intron number 3 from transcript GRMZM2G107982_T01 (locus G RMZM2G107982) derived from phytozome v7.0 (chr-ID 10; pos 106985738 to 106986490 reverse strand)
ctgcagtggagaaaggagttcggtacagacacaaggtcattgttttgttaacattacttatcttgattcttgaaagagatacacacaataaaattaaagagaagagtattcactgctttcctttgcaatattatccctataaattcatttgcaagagtcttctttttaacatcgttattgtgcatgtcaggtgtatcttatagttcagatatggggttacaacattacttttgctatcaattttagttcgtacaagatagtttgccatgataaacaagcaaactttggttaaatttgcaattatcagaagtctctaaaatacagatactgtttaaaccatctcagtaatttgattgcttaggatgttttagtgtttgtggtaaaattgacccttggagagaaaaaggaccaactcttgttttccaatccctgtatcccacttcaactagatatctaaatcacacctactcttttagaaaagcctatgcagtggatttagttctggtattttatttactttccaaatgcttggatgtaaatccatcgatccaaaaaagaaccatctatggaattctggaggttaagatcatctaaactattgatgcaagcataattgcattttatctttgttgcttcatttgttttctgtaagcaagatgtagtttgaaaaaactcatatatctaacatgacattttccttttctgttctttgttatagggctggaaaaactttagcaagattgcaagggattt

SEQ ID NO: 8919 - DNA, 998 bp, Zea mays
  Intron number 1 from transcript GRMZM2G076114_T01 (locus G RMZM2G076114) derived from phytozome v7.0 (chr-ID 1; pos 2 92652331 to 292653328)
tcaggtgcgtctccctcccccgtccgcctctggctgcctgattgccgtgcgtatgtctacttattaagatttgttgcggattgcacggcggttgctccccctggcgtccggcggcgattggtagatctgtgtcgccccagggacgaattgcgatggtaatcttgcgggtctgtcgatcctagtatggagtaggcgtgactagcgtggtggcaatgctggagttggagcaatgccgcaggcctgattgaatgtctgtcgtcgtgctcggcttttactaggtgggaacagtggacgttccagtttctgctggattctgtatcctgttcttactggcagtattagaaacttcagtttctgctgattggctaaaattgcaggtggtctgaaattaatgcagctagtcccgtagtttcactttggcaatggtcttgatcagtcaattggaccgatcggtaccgcctacacggatatgatagctattttcttgctctataagcacagagtattagatttgtggttgactttgccatgtagcagcacctgtatcgatggatgggagtcatacgactctgttggagtgaacgactttgccatgtctgctgcttgctgcacaacataatcatagaccttcaggaaacagcagcggacaaggcacaatcaccgaggagcagcaacgggacggtagccggcaggaggtactccatgacgatgcgatgtgctaacgatcgggtattgagcgtgccaagcggcgatgcgcgtgtctagggctcacactcgttttcatgggttggtaaggtcgtctaattcaaaggtggtcgagggattggttggcgtcatcctggatttgagtcgcattttgccggaagctctatcctctctgtttctcttcctatctagtctatgattgattcgacctgttttttgggacaagttagagtagtcttcagtcgatggagttaatgcaaagctgagttgctgcacgttggctttcttcagag

SEQ ID NO: 8920 - DNA, 632 bp, Zea mays
  Intron number 2 from transcript GRMZM2G044898_T01 (locus G RMZM2G044898) derived from phytozome v7.0 (chr-ID 1; pos 2 68884016 to 268884647 reverse strand)
cctttgctttctggagtgcaagtaaagtgcaacgggttagcttagacaacgagtgttactatgaattaacagtagatcgatcccttttgtgcattttgagaatgcaagaaagctgtgctgcctgtcttagtaccatcatattcatatatgggatacacagtcaaaccaaagaacctcttgttggatatatacacaagccccttagctagtcgctggtcctaaaaggatctcaacaagcgtctgcacacttgttatacagcatgagctttaccttttgcagattgctgagttattattaggagagaatttaaaaaaagctaaaatatctttagtaaacctataagcaatcacttctaccttatttgattatttcagtcttccatagaacatgcagtccttataatgtgtgcttttgagtagatcgagatgaatgctttacttcaaagttaaaatagagcatcagattattaggttcacaggagatgcctgctgtatagttttgtcctatggcgttttttcctttgcaataaaattctgttgtaggggcttcccctacagtttcccggtcaaaaaaagaacttacgtttacagatagcagataatgtgtctttgttttttacagaataatctag

SEQ ID NO: 8921 - DNA, 403 bp, Zea mays
  Intron number 1 from transcript GRMZM2G044898_T01 (locus G RMZM2G044898) derived from phytozome v7.0 (chr-ID 1; pos 2 68884665 to 268885067 reverse strand)
agacacattgcaaggtactttcatgaatagcttcacagttaatttattgtgcgagaaacaacaatatgagatacattccgttttgcaaggtccaccctctttttgatactctacattctagtttttcttttcccagtaaagcaatcacttctaggataccctctgggccataaacctataaaccacaagatattttttaatgtgtgcttatttgattattttagctttttttaatgtggactctatgtgtgcttattggttcttgtatcgaagtctctttttttatcttagcaattgttttggtttgcatgctctatctccatgcagggcacagccccacccccacctggtggtcttcttttttgcagcagctgtgtggtctagcttggtgcagcaatagcaa

SEQ ID NO: 8922 - DNA, 478 bp, Zea mays; identical to SEQ ID NO: 7702
  Intron number 1 from transcript GRMZM2G155525_T01 (locus G RMZM2G155525) derived from phytozome v7.0 (chr-ID 1; pos 2 93034374 to 293034851 reverse strand)

SEQ ID NO: 8923 - DNA, 688 bp, Zea mays
  Intron number 1 from transcript GRMZM2G307928_T01 (locus G RMZM2G307928) derived from phytozome v7.0 (chr-ID 1; pos 2 46462413 to 246463100 reverse strand)
ggccgagtccgccaaagccgggtcgccctcgcccggtaagacggcgcccggcggcggcgaggaccccatgttggccctggatccctaccggttctgccgctctgtaactgaagtctctcttttggatcttaatataatccaggcacagaatctctcccctccgtatcttccccttcagaaaaaaaaactatgctaaactacaaaatcgatttctttgttaaaggtcattcattgaaaatagattggcatggcatctgcacccgtaatatttgaacactatcagtttaggatgaatttacaaaaagaatccagaaaaagttttttgtaatcgattacaccttcctagaaaaacttctgtttatttttgtaccattgcttgttcatttgattgcataaatcctctgatatgtcatactgactttgtttcccatttttatattgtaacaaaaattgtgaaggttcaaaaggttgactggtcgaagtgaagttgctatttgttcaagagattacaaattctattcaccctggcataagatcaggtgttccccacaggcagcatttgacatccctgatacaagtgtaagttgcctactgtcctactgagtttaatgcagtcaaaataggtaatatagttacttataatataatattaccaacccgctatgatttgtttaggctttgacagagg

SEQ ID NO: 8924 - DNA, 698 bp, Zea mays
  Intron number 1 from transcript GRMZM2G145909_T01 (locus G RMZM2G145909) derived from phytozome v7.0 (chr-ID 10; pos 50581875 to 50582572 reverse strand)
tcctcgctctagctctgcaatcttttgaacttgttgtgcgtcttttgataatttgatggtatgtgatctagtttaatgtatatgcgatgtgaagtaattatagatatattagtccttggatctcctatttgtttctttatattttgttgagcatcataatgtttaatattctgaattcagggtttttatcttgagttattattaatacatcgctagtaccgtactgctgtaccactcgttagtgattgaaatgtctcttcttttacacgagtgtgacgatgtatctgtggtacattccatatggcattatattactctcaagttttaggttacccttccacttccatgtcacacaccttattctttctgcaaattaaaaagtccatgacttgaatttccatttaaatgcacagtacgttgtttactgaaatatatagctaacttgcctccttttctagttcatgattgtgatctgcccaaaaggatcgatcttctttacttaataagcttacttttgcgacattaacagcacgacaatctatctaaaggtgcttctttttaaccttacttgggacactgaagaatatgaatgacttgctgtgacaaacaatttcccatatataccctccatcgctgtcagtaacgtttgcctggtgattgcagggacggagcagcaactgcgagactgcaggggccat

SEQ ID NO: 8925 - DNA, 561 bp, Zea mays
  Intron number 2 from transcript GRMZM2G404191_T01 (locus G RMZM2G404191) derived from phytozome v7.0 (chr-ID 1; pos 2 36409140 to 236409700)
ggcacggtaattcttatttatcctttttatgttgggttgtaggatatattaattgactttgtgatatattataggtgaagcagggcagaacaagaagaggcaggtttcaatctcgaagtggacagctcttcgctgtggcactttttgatttgtgatggtctcggatgaaaatctcgggctgagaagaatgaacgatatatgcaaaagctcacaaggagcaggctgagagagatgtaagtacatatgcttttcatatccatatcaacttgattatgcttgctttagtccatgtcaacactcaaaacagtctacactctggtgttcatttcagagatgaaatagaccaagtaacagctcacctttgattatagcatatctcaccaacatttgttattatctaaaattgttttcagctttcatatctcaccacattttcagtccgtgattacagcatgccttggtcctttaactacacttgcttggatgctaacaacccacttgtttgtttggacattgtgaattacagagaattggagacactttagactttgaaattaagag

SEQ ID NO: 8926 - DNA, 693 bp, Zea mays
  Intron number 1 from transcript GRMZM5G847923_T01 (locus G RMZM5G847923) derived from phytozome v7.0 (chr-ID 4; pos 1 39525738 to 139526430 reverse strand)
ctagagctgccaccgtcagctgcctaggcgactgacttcgtcgccgagttcgagcgtgagtgcgacgctgggcgcgtcccgaagaaatcaaatttgaattatgattttctttgctctgattgacaaacaaatagatcctaaagtacctacaccctcaaaactaaatgaccacttgattaaacacacaaaaaaccagtagcgatcatattccaaacatttagctaaacacatgcatatcacattcaaagctaataaaaagaggaacactgagcttaccctgggtgagagatcaaacctgatgacgtccgtcccgactcctaacaacagcatcaaagagtgattcctgacaagagcctgcacgcacgcaatgccaaatcaaaatcaagcacaattttcgttgtgatgaagaaacaaaacataagcttattgattgcagaacaaaatcaaaataccaaagtaaaatcaaattaatcgctttcactccacagagcattgccatgagctacaattacctgtgagcagcagcaggaatgaaccttcaggccatgcgaggaaagatactgttttggcaaccttttccaagcactccttactctgcatcatcaaccaacgaataatagccgttcatcttcaccgccaccgtgctggcgcgctccagcgccaccgcggccaagggccccaccgacgtgctcg

SEQ ID NO: 8927 - DNA, 667 bp, Zea mays
  Intron number 2 from transcript GRMZM2G172410_T01 (locus G RMZM2G172410) derived from phytozome v7.0 (chr-ID 1; pos 1 2977427 to 12978093)
cgcctagcacttcaacggcgacgcaggtgacttttcttcgctcctgttgtgagtcaactactacgtattgaaatagatgccacaggctggctgccatgtggtctgaaggaatcggatgtataaactgcaagtgcaaggcacatggccgcatgattcgagatgtatgcttgttttctatggcaacgtttgctcaacgagagatgtatgcttcatgtgcggcgaggataccctactccggactccggagctgcatagatgggaatatgaatcagtgcatcctaaattccgtggaacgttttctctaccaaactggtcaccaaataaaaatgcagtctgtctatgccttctgcagtaacggtttgattgtggtcacgtctacacttggacgtgtttccattggacacatatgatactatctacgttctcgaatatttatcgcccgctagttcatttttgaactaaaacgtgacaaataaaaaaagcagagggagtactatacttgagattagatgttatgctcttatgctttgcttagtgtatactgaaggatacactcacgcaaggccctctgtttattcagagcactctgcagtgaattctccatttaattcacattaagtttgctccatgtttttttttggttccatttccccagggaaacctcaac

SEQ ID NO: 8928 - DNA, 852 bp, Zea mays
  Intron number 2 from transcript GRMZM5G801409_T02 (locus G RMZM5G801409) derived from phytozome v7.0 (chr-ID 1; pos 4 0805826 to 40806677 reverse strand)
tcccaggaagcgctcctcccgtcaccgcggcaagggtacgcgcgcatctcttactccctcttgttcgcttgccttgttccgatacgtgtcatctgaaatgttctacccttcaacctttagaacttgaagtattatttatgttccttttatttaaacaacctgtactccgctagtggtgttgttaagtaataattttcatagggttgtcgtccgtcagtgaaggattgtctattgcatataagtgcaatccaacatcatgcataatctgaaaacgtgctgtacaattgaattatgttgctgtgaatattaacctgtttagtatggtatgcacattcatttggcaggtttacttaatgtccaaaatctgatagtaatttttctttttttgcagtgaagtcattccctagggatgacgccaagaagccttgccatctcactgccttccttggctacaaggctggcatgactcacattgtccgtgaggttgagaagccaggatccagtatgtccacccccttcttttttattaatcaattaagctgaggacatagtccagtttgtttatatctgaaaaatgaattgtaacataagaacgatttgatttctgaccagcagctttagttttttttataaatttgagggcacttaactttagatgataagccacacaactatctcttcacaggcccatagacttactcaaaacaatagatttttctgtttgaatatccacaactgcttgcacccatgaatctcaagtatatggataccatttcactccattatcgtaactgctctgcctacttgatttctacagaactccataagaaggaaacttgtgaggctgttacc

SEQ ID NO: 8929 - DNA, 872 bp, Zea mays
  Intron number 3 from transcript GRMZM2G340739_T01 (locus G RMZM2G340739) derived from phytozome v7.0 (chr-ID 1; pos 2 44284122 to 244284993 reverse strand)
atccgtataacctgtacagtttaccaaagaatcatgtatgtggtataatttactctgctaattgttcagttttagtccagttatacgaccatgaggtcatcattttggtctaacaatgtgcttcttcattgatctatatatgtgttcataagctttacactttctattgatcattcctatcaaatcccagtcacttagttgtgtaaagcaaatgcagttttttttgttaggagtacggaattgctacatgtttgatattttttcctatcagtttctcaactgcttgataattgatcgtgttatcactttgatcattgtgggtttttttccaatctctactaatgatacaatgaagaaccatacaacaatgactcaggttcatcagacagtcagttcattatataatatctctaagcctaatataagtaacccaaacaaactgtgatgacctactaaaattcctgaaggtaatatatttgagtaggaattcatcttattgcattttgaatcgctattaagattgcttgagccgctgaaccatacatgggtttgggttaagttttttttagataatggaacaaggttcgagctgggtttgggttatgtattaccataactaaaatcagtttaataaaggcctacactagagtatagagggtgggtaccatatgatttacacaaccttttcttgtggccaattcaaacttatattgttaatgatctcagttcccatctcagttcccatctcagtctcctagacatgggcgcaataagaaattcctttagcacccccatggataatagtacggccgtagtagtgtgcttttgttccaagtgagaatgtgaagaaaattgatgctaactgcagttgc

SEQ ID NO: 8930 - DNA, 489 bp, Zea mays
  Intron number 2 from transcript GRMZM2G340739_T01 (locus G RMZM2G340739) derived from phytozome v7.0 (chr-ID 1; pos 2 44284982 to 244285470 reverse strand)
aagagtaagtcatgtcaaatagtcagtatccatacttcttattgaaatgttgatgtccacccattcatgttagtagttgctccatttgaatataatcctcccgttgttagtggactaccatgttcaatgccactttgatttaaaatggacgtgttctccaacagtgtggaaacacgtaaaattttaggtgtgcagtgattaatatggtttatgatagtaattctgtttttttcttttcaatgtttaatactgaaaagtacttcacaagcagcttacacatttgcaagtaacaacagctaactcattctacacttatggattcaataagtccactgcttttcagtctgttcatagtcgacactagcagctaacaatgtccacaattgtgctgccatttcgattcagtgtcagccatcaattttgtttttattaaaagtacacctactatatgcaggagtgatatatctcagatatagtatccgtataacc

SEQ ID NO: 8931 - DNA, 473 bp, Zea mays
  Intron number 1 from transcript GRMZM2G049674_T01 (locus G RMZM2G049674) derived from phytozome v7.0 (chr-ID 1; pos 6 0063274 to 60063746)
tccattaagagaattgtctagcaacacccttgaaggtatatctactaataaaatgcaatatttgatctctcaccaaggttttaaaaaggaaaataacgatgttcatattttgtagatgaatgtccagaggtacctgtcagcgacggaagcataattgatttaactaaatcgtgtgataacactcaaggtgaatatgtttgtttaccatgtattgacaatggagattattgatgggtaatatatgatggttcaggaggtcgaactgatgcgagacaatgtaagagagaaagagaaagagcacgatatgcggcgatgagtgttgaaaaaaaaacgaattgaagaaccgtcgtcagtcacgcaaaaaagagaacgttgttcaccatgagtattcaaaaggtaaattaaggctgcttgtgcgtcacgcatctttaaaataatgcttttcttatgtgttatcgggttactttgtgtag

SEQ ID NO: 8932 - DNA, 1032 bp, Zea mays
  Intron number 1 from transcript GRMZM2G065629_T01 (locus G RMZM2G065629) derived from phytozome v7.0 (chr-ID 4; pos 1 47844053 to 147845084)
ccaccgccttccccgctggtaatgtgctaccccatagcttcgcctcgtcttactctgcgcgtagcacgggttggtataggatttagggcctggtggtcgtcggacggggtgcacggcgtagggcgccgccgtgaatggggcgccgccggtcggggatgggggagaaaatgggcactccacgatggccgttggattctgggcgtgcgatccagattaaatctcttcataccgctttgctctaggaaaccttggccgtcggatcggccgcgggcggccgagattaggtatttccttacccgttcgcgcgatcaacaggaaccgtagatctgccatcccaaggctcagactagatctagcttcattaaatcatggccgtggatctcggatcccacggctaacagcgcttaccgtttcgtttgagttatatctaatctgcgccacacgttgttgatcggacggaccagattagaacttaccccttcgctgagcggattttgtaaaagagaccccgactttctaagaaaacaacccaccgtccatgcggctgtagctttgagtctcgggaattttagtagattagcccctgttgtctctaggatttgaggacctgtccagacagtgataaaaacatataaaatcatttagaaaatgaatttctatatgaaaataattgatagaatttgtttaattcatgtaaaattcatatggagtctaaattggtccattccaattcctataaatctataatattactgtttatcacatagtacatctggtttgacatgaaaatcatattaaaacttatttcctaattaatcctataccaaacacatgaaaccttaggaaaatcataactccttcgttttaactccgatttgactcgttccagttgcgttagtctcatagcaacgcgtagatcgatattatgcagttgttcttatgtttggtgtgatgttaattttgtctatatcatgtttgcttgggttgcaacgactagcgcgaggactcgtgtcatctgaaaagcaagttggt

SEQ ID NO: 8933 - DNA, 724 bp, Zea mays
  Intron number 1 from transcript GRMZM2G703491_T01 (locus G RMZM2G703491) derived from phytozome v7.0 (chr-ID 1; pos 1 1400727 to 11401450)
gcttcacaccaatagacttgaaaagctgggggtgacgcaggggaagttcaaccagttctctgatttgggccatctgctttctaactccaccaacatcatcatagccaacttcatcgagtctttcctcatcctccctcttaataggctcaccctcacagaatatttctgtatctggtgcaacaatacaatactctgcaggatcagtctctatgactttgaattctacacttctcatgccacccctgactaggaaaaggtctcctttcctcaaaggacgataggcttcaagaaagtatgctgaaaagttgaagataaagtatttagactggcaatttaagcacaaagtgtaggatgctgagtagtctatcatttcatatggtcagatgtctatcaaggcccatattccatttagcaacaatgcaataatatagcctagtaacacaataaatgatgatagttcagagatgcaaccaaattatggaaactaacacctggacaatgcagaactgagcttgttcagtaccacagatacgatctttcagcacacataaagctacaaataaataattatacaatagatgcactactaaagtaaattttgtttgtcaaaagatgatctacaatgccaaaatacagttatctgtcacaaaaaaactgtttaaaagaacaaggacgtgatagagaaatctcacgtttcagaaaggcatcaaataagttgccagtg

SEQ ID NO: 8934 - DNA, 710 bp, Zea mays
  Intron number 3 from transcript GRMZM2G181348_T01 (locus G RMZM2G181348) derived from phytozome v7.0 (chr-ID 4; pos 1 75724459 to 175725168 reverse strand)
gggcaccactgctgttgggtaagttttataatcgcactaaccttggacagtaatattttctgaaagaattatcttcccacaaaataatcaccaagttgaatagggtctgctagcttggccccctaatctctatatagcgctacgctaactatttgagtaattcgtcgtgcagggtctacaataatcgagcattacttacgatcgcaactacaacgtttcagacttcctgccgtgtgatatccaagttcctttgaatattgtgtcaactactagggcatgttagaattgcttgcgtgtgtgcttttccattgttcaggtagcataaagtttgagaccatttgtttattctatgctgatgagttcgactgctaattagcaggaccttccagtcaaaagcagcatgtgtattgtataactgtaaatattgccttgatttgaacaaatttgttttttgtgctagaactttatttcacgaacttcatatgatagaccctactttagagtatttctttctcttctcatttcacattattgttatcacttctctttcaatgagaattttctttcttattttattttattttattttatgtagaagtgtagaaccatatagtctctttggctaatttaatatggttttgttatctggaaatcttgactaatatatttatcacatctttaaaagtggtattttgaattattagatcgac

SEQ ID NO: 8935 - DNA, 726 bp, Zea mays
  Intron number 1 from transcript GRMZM2G340958_T01 (locus G RMZM2G340958) derived from phytozome v7.0 (chr-ID 1; pos 2 67531367 to 267532092)
gagcttgggaccagtagggaagagcgctgtaaaaggtaacaattatgtatgctgttttttcttttccaagctagtttagtttagctatcaagtatgggcctggaagctggctattgattttgtcaaagctaggagttaattttttgctgttttgagcttgggaagggatgggggaaaacatgtgagcaaacaatagttgttagttactccctcaaatgcttactaagatgctatgagttgagattgcacaattcgtcttactccgctgtagccgtttacacttgaaacacgtgcaaacgaagcaagtttctagctgtttaaagcgaaatcagcaagctaggagggttatagtttataagtcgagttagcaagtgcttgctctttttgttgcttgaacgcaaggcatttctaatgagcaggctcataaacattgtttctatatatgcatcttattgtatatatgcttcattaagggtacgtttgatttctaaaaatattagtcaaatgctacttctgcagcagagatattgtttgtgtatgcgcatagtaatttctccaattccccttctttttgtctgttatgaaaattatttttgacaactaattggtgggctctccttttggagctttgttctatttttctctctccacaaccttttgtgatacatgggctaatccatctcattcacagctaaacctagtgcacagcggaaccattctggagat

SEQ ID NO: 8936 - DNA, 827 bp, Zea mays
  Intron number 1 from transcript GRMZM2G004641_T02 (locus G RMZM2G004641) derived from phytozome v7.0 (chr-ID 1; pos 1 3644228 to 13645054 reverse strand)
tcttgctgagtctgggacttcagttcctcgcagaggtatagtataagccttgttgtctttgtcaagcaatagcttaaactatcctttgcgtcttaatctgaacaacatatgccggagatgggatggattcttggtttctacgtactccctccctgcttgttgagctttcggtttctagttagctccgtgtgtttggtggtgggtgcaccagcagctgaaataggttgcttctcgttttgccttagtcaaggctctttgaaatccgaccgaattttctcgggagctagttcttcctggctgggatttctggccgggtgccgaattttaggattcgtttcctttcacagcccaccaatttggacttctggttttgctccagttaggtgatgccttcacccaaaacaacttgaaggcttgctatgtcccaggtagctatatatctcaaaagttttggtggcagtcttcgaggaagtggagtcatctcaagtttttatcgatcgtcccaggtagagataccttaaatttttattggatccactctttggggggttctttttttgtgctgattttcttcaggtttcgctcgcccagtatcagacatattcttcacctcttttgcagtctcttgtctgaatttgctgttattatttgcatgggaggttttgcttctgattcaattgccaatgtttcaagcaactattcttttgtttttcttctctctccaattacacgcagcacagccgaattcctaatactttggaatctctgcaattttttcatcttcttttgcagccaggctttacatatcttgggtgccgcacacagta

SEQ ID NO: 8937 - DNA, 996 bp, Zea mays
  Intron number 4 from transcript GRMZM2G155144_T01 (locus G RMZM2G155144) derived from phytozome v7.0 (chr-ID 1; pos 2 0541507 to 20542502 reverse strand)
gtcttagatcttgttccgttgcgtctggatcaaaggtgattgattttaggattaattgtatatatgtcactcagtttcagctctgaagtaagacaatggacctttatatgtaaataacttcttcagtactaaaaaactctaaccaattattattcttgaagagtccatgcagttatctcatgcaactattcttgaagagtccatgcgggctattcttgaagagtccatgcgggcacgtgatttactaatggagcagaatgttgccctggatttagctcgaagagaggctgagatggctatccgtgctcgcaatgatttcctagctgttatgaatcatgaaatgagaacacccatgaatgcaataatagccctttcctccttgcttttggaaactgagcttactcctgagcagcgtctaatggtggaaacagtactgaaaagcagcaatttgttagcaacactcatcaatgaccatgaatgcaataatagccctttcctccttgcttttggaaactgagcttactcctgagcagcgtctaatggtggaaacagtactgaaaagcagcaatttgttagcaacactcatcaatgatgttctggatctttccaaactcgaggatggaagccttgaactggagattaaagcatttaatcttcatactgttttcaaagaagtatgcaccacagctaatactctttctgctccagattataggtcactttagctttgctccaagtcaaactctaactttgaccatgttttttttaaaaaaatgttaacttacacaaaatcaaataaatgcacaaacaagacatttcatggaggattaatggaactgattgacgttattgttagtgtatatttctataagtttgtccaaagttagagaagttggacttaggtaaaggaagtgacctataattggtaatagagggagtatcaaacatctagatacatgatgcaatagctctaattcttatttggtattacaggtg

SEQ ID NO: 8938 - DNA, 653 bp, Zea mays
  Intron number 4 from transcript GRMZM2G039797_T01 (locus G RMZM2G039797) derived from phytozome v7.0 (chr-ID 10; pos 148571068 to 148571720 reverse strand)
agttccggaatcgtcatctgtcagagcttacagaggtgtgtaattacgtcatcattcagtgatctgctaaacttactcatgatatttacaacagaaagcttctggcaaacaaaaggatatgcagcgaaacatggcaaaccagatttcttaatggtagtaattcaaagatagctggtgtagaatctgtaagtgtgttgaattaagcttgtgatggcagtcatgtgttagtaactagttacatgattgaacactagccatttgctaactggaacggtgatggtatacaatataatgatcccttttagctcattgaagctaaagcccaaaaatcaaattagtatgtagacttatcgtaatacaaaaggaacaaatgggtgcagttcgtttctaataaacatgtagtgtaataggcatccattttttttaaaaaaaatgtagtaggtcttagattatttcttttcatggtcttgagttttgtggctttctgaagtccatgtagtgtcacaccatgcggggcggtaaaattatttttctttcaggttcatacaatctgtatataatattgagcaataccatcagatttttgtaactatccaacggccttttgttattccctttacagttgtgtgctacgtcaggaagttctcttggct

SEQ ID NO: 8939 - DNA, 482 bp, Zea mays
  Intron number 1 from transcript AC194099.3_FGT003 (locus A C194099.3_FG003) derived from phytozome v7.0 (chr-ID 4; po s 48968842 to 48969323)
aagtaatagtgctgttgcgtcgtcaactttgcaaggtaatgtctctactgttttgttcagtttgcttcgattacttagattctaagcgtcaactttgtaaggcagtgtttattcttgttttttatttatcagatgtctctgtatgcttgattatgcaagtagattattcagacagtcgaacataaagattcttgccatcccagtcgtcgatcggaagaaaacgtcgaggaagagtgtaagaaagaacaccacagtagactgtgggacatataccaagaacatcgtctacaaggaggtcctaacaaactagacccacggtaagtctatcaaaactcaattgtttgtttcaaaaaaaaggcaccgacacaagactaacactcaaatgtaatccgaaaaagttacaggacgaggagatattaaggagctttataaaataatattgatctatttgtaattgttctatttgataggttgggttattc

SEQ ID NO: 8940 - DNA, 762 bp, Zea mays
  Intron number 1 from transcript GRMZM2G341058_T01 (locus G RMZM2G341058) derived from phytozome v7.0 (chr-ID 4; pos 7 1211605 to 71212366)
aggcaatcgatctggtacgagcaacacacatgcttcttcaagctctctaatttgcagtattattgccatgtcttcttctcgtcccaacctccactctactacctctgcctcaaagctagctaagatatatactttgtccgtttactctgttaattttacaaaatctacgtgctctttccgtggataattagatgacgagcattgttaataaccaaaaaccgcttttctttttttctcggaaagaataaaattctacgaacaagtacgtctcacttatgatcccttgctaatgatctgtatttgtgtgtgtgtgtgtgtgttttttttgcttcgttttttggaggggaaagaacatatacctggcctccagtcttcacccagctcagcgccgctgatacgagtgtaaaccgttgattagtgatcatctttcactcatgtgataaagttgcctcagacgctgctttgttttgtgtaccgttgcttgattcacgggttacaagcttgcggtttgcgtatttttttttctctcgcttttttgcctctccctgtgatctccaaccaccgcactttttggggctggtcgcattaatcactgctgatgctgctccgatccgctgctaatccgtaataataatttttctagacagacgtcgctgttccagggacttggatatatttttttagtttttcatgctgtctcgtactctgtgtttgctacgcatggcaggagaacatccccgtggaggaggtcttccagagtct

SEQ ID NO: 8941 - DNA, 656 bp, Zea mays
  Intron number 2 from transcript GRMZM2G444379_T01 (locus G RMZM2G444379) derived from phytozome v7.0 (chr-ID 4; pos 1 98479850 to 198480505)
atctaaggtttgttttcaataacctatattaaattataacccatggaatagttctaacatgtttaccgctctttataaattagatacttcaacgtgattggatcgaacccagacatatgactgtttctatattctacatatcaataatcaccgctactgatttttacactaatgttggatttgtatacttcccttgtggtagaagatagaaacaacagttaaccagttacagcgtgcatgccaggcttcggaggaaataagattttatctacaccacgaactgttattgttgtttgaggtatatgaaagtatgaaaccaatcccccttttctcatgtctcataattcctgatgtttgcgatatgtatgctactcgtgctatggatttggaaaataggtttggtaattagtatggctacctactaagtcaatgatatattcggtgataaaaaattgcatgcatttgatttttgtctaaggcattaatgcttgttcctaattttcctatgctactatctgagaaatactccattgtgttacatatttttttctatttaaatcagtggcggtgccttggtaccttaaacaggtcgctacacccatgttggtagaagtacagtgatatgatcatccttttttgtctgttgctaaggtctg

SEQ ID NO: 8942 - DNA, 710 bp, Zea mays
  Intron number 2 from transcript GRMZM2G396430_T01 (locus G RMZM2G396430) derived from phytozome v7.0 (chr-ID 1; pos 2 74519596 to 274520305)
tacaagttgctcctattgccatccctgctgaggttcaagacattccagtccaacacacttaggaccatgaagttgttcctaagacacgcaaaaaattatagaaagtgtgacaatcaaacataccatgaatcactgaaacttctgatttctataaccaatttcttccttttgtcccatgttggcctaaacatctgtgtacacaacgtctgctcccttaactgcttccttgggatatagatttgacaggtgagagaacaatagtttcaacaaattgacaaggtaatgaaaggagccaaagcgcccttagaatacccaaatgcagaataataccaattagcacatcagaagtctgactggtaaattgaattgacacgccatcttatctacgtcaatactttataacagtgacaaaaaaactgtctgcaactctagcattgcaaccctgaaggattgacgtagagaactgcaagttttcacccgtcccataaatttaatgtggcacataatgtgtaacattatagtagaccccaaacaacctacgatctggggagcagtggaaagaagcagaaatcagtcacataagcagaaaagaggaggcacccccccccccccggtttcttgaactccctgtccaggcatctcttctgcttacagtttcttcaaatccctgtccaggcacggcagctccaagttagtgtgtctactactct

SEQ ID NO: 8943 - DNA, 798 bp, Zea mays
  Intron number 4 from transcript GRMZM2G469697_T01 (locus G RMZM2G469697) derived from phytozome v7.0 (chr-ID 10; pos 55446975 to 55447772)
agatcagcctgaaatttatatcaataggtgagcaggtaattaaactttctgatgcagttatatatcacatgtgaaagtgctatgctatatactacctccatttcttttataaggcgcacacgcatatcaaggttcagactccaagatctttgaccaataatttgactaacaattttaattattataacacaaacttgatataattagatttttaattaaatctactatctaattatcataggtttataagtataaaaaatatagaataaaataaatagatagtcatagtgtaatttaggagatcttctcatgttaagtggtgccttataaaagagaatgtagggagtataagcttatcagtcaattgtgtgttaccataattcataaattgctatagttctgtgagatcttctgttgatttagttcagtttatgtattctttgtcatggcacataagattttatgttgctatttccaaggttaataatcggaactacaataacaccaaggtcatatattttacttacagaaaactttgatgatttgacacacttctgcttaaactgtgagatcatatcatttcattaaacatgcaggagagctgcatatcatttcattaagtaagaaaatatagtacatagagtacaaggggagaagagtcccaaaacaaaatacacactaacacacaaagaaacatacatccactggggacctggactaagccaccccaaatccatgacctgatgtcaacatctttggatttatgtctgaaactgttggtcatgtctactttgcagg

SEQ ID NO: 8944 - DNA, 443 bp, Zea mays
  Intron number 2 from transcript GRMZM2G409485_T01 (locus G RMZM2G409485) derived from phytozome v7.0 (chr-ID 10; pos 85458820 to 85459262)
catatctaggtgacgaggtaatccatgcttagttttaaatttagcgaccttgttatgtataagtttttttactcaccctggtatttttaatcacaatttacacacttgcaggttatagactgttacataaatttaataaaagctcaaaagcatctaaagtgccgatctggaggtcgtgtccacatagaaaatgctttccagttcaatttcctgaagcgagatggtgatgttgaaattaaaataaaggagctatatccaattaaagacatggcacaaatatgtagcgctgaacgaagagttttactttacctagatcatgacatgttacatttgagtttgcaatctaaacaaaacagttagtgtttacatgtattttattgttatgtagtatttataattgttttgtaggtgtttattccgataaacatccaagagacgcactg

SEQ ID NO: 8945 - DNA, 368 bp, Zea mays
  Intron number 2 from transcript GRMZM2G049716_T01 (locus G RMZM2G049716) derived from phytozome v7.0 (chr-ID 4; pos 2 18776278 to 218776645)
gagcagcttcagctggtgttagaagaacaaagcaggtatatgtgcttctgggtttgagtacttctatgatccatgaccttttgttaaggctggaagtatggagaataacatttgcatttcattctttatcataagtgtcagtgtgggttttgtcctccaatgcctgaatctttttttttttcatgtctaggttcctcatattatttttttcttgaaaggttcctcatattattcaagactatttttctcacatatgatgttttcgtgctaacgtttcctattgtatgattcaatccattgccattatgtgtttgttttggctctcacagtttgttcttttcctagatttggacttgatattgatctgg

SEQ ID NO: 8946 - DNA, 920 bp, Zea mays
  Intron number 1 from transcript GRMZM2G162749_T01 (locus G RMZM2G162749) derived from phytozome v7.0 (chr-ID 1; pos 1 4851288 to 14852207)
tgccggagacggccgccgtcggcgaggctgccaaggttcgtctcgtttctcttctccctccgcctaacatctctctttcccaagcccaagccacgtttgaattggagcgaacggtagggtgagtgcttgcttggacatagccagtgatcagggcaaccagaatttttttttcgcacctactaggtttaggttccatcgtacgtggcagctggtttttctgttgcccagttgctccctcaggatttatgtaaacataggatggtgattttctgttcttcctgttttaaattttttgtatgtagaagctatgtgatatggtgtcatgtttgacacttttgccttccattagcatgcgaattttaccgggttttttttgggtacccctcctctctctctctctctctctctctctctctctctctctctctctctctctctctctctaacagcagtgttcttgctgtttgcggccaaacctatggctatggttttattatgtcagccgaaaagaaacattatttagcagtttattcagaggtggtgcaggattcagctgtacccttccgattgttccctttgcccttgctttcaaggatttcgccaccaaatataggcagaagctgctgtatcaaccactacagcatgcgccgtgtggtacgggatcagttacatcaccatgttttgattagtgttaaagtcacacgatcaacagctgctttattagcgatcaagagtgaaaaaaaagaaaataaatagcattagagttcataggtccaaccggaaaaaattattcatgtatgaccttttggctgtgaactagtattttttttctacaacaaacaaagctgaaacctgaaaactcttgcgagagctttgagtaggtcaagaactcagcgagcttgtatgcatgattgcaggac

SEQ ID NO: 8947 - DNA, 657 bp, Zea mays
  Intron number 2 from transcript GRMZM2G149170_T01 (locus G RMZM2G149170) derived from phytozome v7.0 (chr-ID 4; pos 2 9189071 to 29189727)
caggtaccatgccaacataatgcttagcttttatgcaccaggtgtgttctctttaggatttgaaactgtcttgtgatttcttttcaatgaacagaattttgattttttcagacttcttttctggatgctaagttgtacatagagtagtttttagtgctcgcatgtgtggtaatcatacaacataggttcttcaagctcatatattatggatgcatgctattgttactttgttagtgtgttcacagattttgtgttcagttgtgcaaataaccacctcatagccttatgccatgccacacctgttttagagaacctgaagatagcttgcctcacttcacagacttgtagatgttcataagcgtaatgttttacccctaagtcgttgtttgtctaaactattgcttatatgttttatgcatgtctattggatatctcagcttttatgactgggataatggaatcacaatcatgtgtgctcgctagaaacattctgcagctgtttaactagatgttggtttcttgtaaaagttgtggtctgtgtacatatagaagtcactgatgtttcctatttttcagggtcaatgttatatatttattattaagaattgtttgatgtttataatcttcctgtttttttactgtcaagagcgtgacgcc

SEQ ID NO: 8948 - DNA, 831 bp, Zea mays
  Intron number 1 from transcript GRMZM2G152549_T01 (locus G RMZM2G152549) derived from phytozome v7.0 (chr-ID 1; pos 3 2082422 to 32083252)
cgccgccactgcggcgactggatccgagaaaggttagacgagatcttttcgtgtgatgcactgcttttattttttttctttttgtgatagtgtgctctaattttatttgtttggcattagtataatgtctgtttcgttgccacacggagttctgatgggtcaaaaacggtacgatccatcaaatgcattttcactgtgcatttgattttcttgtttactgatcggtcttcaaggtattgaaccaacgatgcattgttgccaaaatgctgatatctctacgtgttaatgtggtagcctaaagctgatcaagcgttgctgcttttggcttctgtatgtgttaataaatgtcgatgtcttaaaggtcaagcttttaacgtgctgaattgtgtgattctgcaccaattgccaactggagaggccctaaagatactgataaggccttccctgtgttaatttatgtatatagataggcacgtgcaaaactattcagagcttctccatgtggatagtgttcattctgagcatttcataggtcttcttggtccacaatgaagtgagttaaatatttattctgctgtcttagttgtgatttatgtaaggatgatatatttgaatcttgcactcaagcatctgcatgggagattaaagttgagttatccatgctagtgcagttacgatttcattttaactcatttaatgcagtatgttagctgtttgcatgttaccttgacaaaggtggcaaattcatgagtaattaatttaaaataatctctcatgtgctcttgatttcccttaggacgtgaagttcataataacaaggaagggaggggg

SEQ ID NO: 8949 - DNA, 944 bp, Zea mays
  Intron number 1 from transcript GRMZM2G143190_T01 (locus G RMZM2G143190) derived from phytozome v7.0 (chr-ID 1; pos 9 0903213 to 90904156)
gaccaagttagatctaaaaaatttgtgtcggtacgtgtgtttcttaataacatttaaagataaaacctggttttaatagcttatgtcgtctccacaaatgctggttctagcttgtgactgtttaacgaagctgccattgtcttttgggtttctatgtttgatagtgtgtgtgttgtgcattttactatggccatttctgttaaaatttttataagtgctctcatattatgcctattatttttgttatgagtaatttcatcagcacacatgaaaatagtgatgaagtggccaaaaatttgatgaacaaggcaaaggctagccttcctaaacgagtagcccgcaaacagagaatctctattcttgtagaaaaattgacatgaattttaactaaaaaggttgtctactataggtctcttgttagtagatcttcactgggcaatagcaaaaaaacatagtacagagaacacttgctttcagtgattatgtctgcactctgtagctcatattcacatgcaaccatttatttggttgttgaacgcctaaatggaggttgtctacatgttattcatctgtctgaaaaatactccattcagagtataacttatgctcacatatgtgaagtatacaaatcccctttcctcatggcacaggcatctctcagatgcacatgagctggtgtcacaattatataacacgaaaggtattatgccaatctgtttttgcttttccctttcatgctttgatattctacaccaaaattttatgtgcctcacttgttaagtaacacttatgcttgctaaattaagttgaggccataagcacatttctggggggaacaaatatatttgtgtgatatatagaaattgtagcagcacacgtgcacctaactataactatttgattgtctgtgtcttccatgtgcaggcattcctatacatcatctc

SEQ ID NO: 8950 - DNA, 854 bp, Zea mays
  Intron number 4 from transcript GRMZM2G129954_T01 (locus G RMZM2G129954) derived from phytozome v7.0 (chr-ID 10; pos 1723347 to 1724200 reverse strand)
tcctctgagaacattccttcaaggatcaataggtgagcagtcagctagcactctactatttgtcttgtggatctaaacaacagtttttaagggaaacaaatcttaagttaaaaattggggaaaaattacactagtgaggtgaggacttgagtagagttcaggcaagaaaacaactttatcatttataaggatttttttagcagccggcctgttcttgctcagaaaatcacatcatgttcacaaaaccattagacagccactataaagttccttttttctctctctcttccatgcatgcggacataaataaatgaataagttttgtaccaaaagattggatatggaaatctctccgaatccttaatgatctgctgtcacatgtgttgtataatagtagatgacagcaacccttgtattatatctcggcctggtcggtgtaaaataaatcaaaaacaaataaaagaagatatgaaatgatacgcagttcgatcttgcggatcttttcatatcgccgtacgtatccatggaacaggtctgttgatgcagacaggtcactagcaccactgacaaattgttgcgttgcgcgatacaccagtggcagggcgctaaagtcaaagaaagaatcaaacgatattattgctgttctttcgaacaaaaaaaaaagaaggaatcataagatatgacatatccaaaaataaaaatatataaaaaaacacaagttgcaagacttgtcttttaacagcatatatatgatgctctatatatgatcaacgggagagagagaaaactaacaatcctggttttgaaattctgaaccaggtgcctggaggaaggagctgacgagttcttcctaa

SEQ ID NO: 8951 - DNA, 938 bp, Zea mays
  Intron number 1 from transcript GRMZM2G069772_T01 (locus G RMZM2G069772) derived from phytozome v7.0 (chr-ID 1; pos 2 84060688 to 284061625 reverse strand)
ccacccaagaggtttgtgctgttggaagaggacaggtaaatgctcaaatcctcatgaactcttgttttttctgtattctaatgcatcgccatcagcttacttcatttagcacacacgctcttttttgttgctctctgagctgtcttatgatctgaagttatattagatggccacgaccaaggtggaaacaaattttgtctgtccttggctccttactaaacatcctgaaatcattgctatcagtgcatgcatccaattctgatttgatgacatcagagcatctattgtctttgcctttctcagctaggtagggcatatgtagttctgtcctcgtttcatctgcttggaagacactgatgtgtacttggtctaattttgagctttaacttacctttgaactttatatgaagtaattaggacattgaaagttgttgggaatttttattaggtgctgtcaccttccattcatattcttgctgcttgctggttgagtaccgtgtttatacaggataccgtggtcatagatttgtctagacctggtacagtgcttcccccttgaagtacagtctgacatatatggaaattttgttctgtatttcctcagggcctgttcgtttgtgccggaattcatcctagaatcgttccagctaatcaaaccttatataaattagacaagcaatctggctaaaaataattccgggtggccaatccccaagaacgcccttatagattcttggtagtccaatttagagaggagcttttaattttttttggctatcttgtggttgatagtggatacaaatgatttccaggttttttttggcctatggtatattgtagtgacaaaataatttcaatattgatgcttgtgtttgatctttgatgttctttttgtgtcggtgtggaccaggcaacagcagtatataaggtttcatctt

SEQ ID NO: 8952 - DNA, 986 bp, Zea mays
  Intron number 2 from transcript GRMZM2G450920_T01 (locus G RMZM2G450920) derived from phytozome v7.0 (chr-ID 1; pos 2 92341303 to 292342288)
atttttgtcggtcacggctcgcctagcagcttatcataagttcataacacgagtgacgaggctagactttggagtgcacatttctatttcgctgtgctagtcaaacctgttacattaggtatatatatgatatatcaactgacttgcgcacatgggttgagtggaaagactacgcagaatgtgaagtatttgaccttgcttggtcacagttttctatctctgcagctaataatcagggcttcatcatagtatttgacccttgtcgggtatgttgaaggagaatttgcatacctaagggcattgcattgtgaatctcatggctgcaaagaagtacttcttgatccgatgagagtgctcgcaatatatgtggaaggaattcattgtcattagagctcttggtctgcagttctgcacattaaaaaatggggtcatttgatgaccattagaagaaatttgcactacatttgctgttttcccgaccttttgtttttgtttggtttcaaccaaactttactgcttactccgtgtgtgtgtttttatttgaaagggactataatggtggcctggcactttcctttttttaattaactagatatgtcaatatgtcatgtcattcaaactattggcatgatgtaattttactgatgaatattactagttttttgtctgtcagatatctttgcatcactactgttcccatctgctcaactagtcaagttgatgttgttacaaaatcacagtattttttaacataattttgtatgttatcatgtttttagttagtactagtgtgcatgaaagtcgaactattctcgttagataagttttcatcttcagagaagtacatgataaagtttcaagccaagtagtcaaacttgtttaaaatataggagtttagttgttaatctctggtactttctcacccatgtctcataatagtgcacatgcagttttacagttggcttctcattcatactgaattgtac

SEQ ID NO: 8953 - DNA, 717 bp, Zea mays
  Intron number 2 from transcript GRMZM2G157879_T01 (locus G RMZM2G157879) derived from phytozome v7.0 (chr-ID 10; pos 96126542 to 96127258)
gctcctcgtcgctgcttggagtccaccttatcaaggtttgtatcagatcaatagggagttcatgccctggatcaatttatatttacccattaatataaggtacatagtttctgctgcatatataacacagaagagacccaaaagatggtcagctttaccttccataactgcattacgtacttcgtcagctgaaacactcagtgccttcagtgatatcgctaagttctgtgcctttttagcatcgagtatcctaacaaattgaggggtatcctttgctgctaaatcctttttgccgtcagcatttttcttgtcagtagcatgacaaccaaaaaggctctcgatcatctcctcattaaacctatcaatcaattagtaaccagaagagttagcatcactggttcacctgacgttaccaatctttggttggtagcaagcaaccagtaaagagatgtgcacagtacaaatacgacaacaataatcatgcaatagctagctacgttcagggagattggcaagcttgttactggaaggataaaactactatttccaaaaaaaaaacaagaaaaagaaacttactggaaggatcctgctttaatttgatcccacaccattgcttgatccggatttgcagtaactttatcccagaagaatggcttcagctttgttttattgtctgccacaggaggacctgcaacattccctgctttcttcaacggt

SEQ ID NO: 8954 - DNA, 920 bp, Zea mays
  Intron number 1 from transcript GRMZM5G852329_T02 (locus G RMZM5G852329) derived from phytozome v7.0 (chr-ID 4; pos 2 6376335 to 26377254 reverse strand)
cggcggcggcgggttcccagccagctttcgaaagggtcagtgctactgctctccctccgcacggggtttgaaccgctcttccttcctcctgggggtccaccacggccgagcgctgcggcttggcgacaccgatttggtgccacccgtcctctgcaccgcaggactgtgtgtgtgtgggtggtggtggtggtgggggggggggttcgctttgattcgggctctcgttcatgctaccttggggtggtcggtttcaggttcctgtctggtggttcgacgcatgttcggtgccaaaattgccattttaggggtaatttgttacggattagggattacctctttcggccgccgtcgaatttttttccactcctggggagtcccacgttggcggctgtggggattctagctcttgcaggctgcagctacggaaagatacatcatcatttctaccattgtacttacagattctaggacatatactgctgttaagagagaacacataagacgcatgtgccctcactttgttcctaatcagaggctaccaacaacatgattaatagcgattggttgataaatggaaagtatttgatgcaaaactggtttgtgccccacctagaatccattatctgagtacaactttgcaatgcttgtatgggctgtattacttacaggatggagggagtagtatatatgcttttctagtcattggtggtgggttgggttagttccttaagtagcaattcttggatggatgattttacttacggttctatatcttgatggcagtgcaaacctttgtgtattgtagaaatgggatctttgatcctctctctttgttctacctgtatctggtagagaactaacttgccccttgtttttttatctcagttttattccgtgattgcaggcaatcaatcgtcagg

SEQ ID NO: 8955 - DNA, 868 bp, Zea mays
  Intron number 3 from transcript GRMZM2G066538_T01 (locus G RMZM2G066538) derived from phytozome v7.0 (chr-ID 10; pos 68967334 to 68968201 reverse strand)
aaggatttctactgcaacgattgcaacacacacacgtaagagacgttctatgctcatctcctctctacttcctgttgcttcaggttttgcccagatggatgcatattctgtatttgaattagatcaggagcgattcaaattttaagtattattagtaagtctctaatattgtacgcttatgggctcttcttttgggcaacaaagcaaagaacagtggagcaaggtccttaatttttgttgcacgttggagatggattcaattgagcgacaaatcttaacccaagtcagaaggcaatgaccaccattaatatcttttcttctcctaacaaaagaatcttctacgaatcttaccaatttctataatgacccatggagggagatcaactgccataacaagatagaccatcatagagctgagaacaaaatgcactatagctttttgaccaacccgattcattaactcagacttccaactttgaaggtgatcggcaatcttgttctctgcataaaaacatgattacattgattcaactctgatctggtgtttggcatttgttttccctctacattagtttctcattattatatttgtatagattcatattcttaagactaacctaatcagcattctttacataataatattataaggaggattaattttatatacaatactatatataatgagatgaatcatttggccttacgatatgtgtaagaaataatgctttgatatttggcagcctatcaagaatttcataagtgtagaacattttttcggctgttaacatagtgtataacatttgatgtcgtaatttgttttggaagaaaatttaatctcaacttataattttttaccgacaggttt

SEQ ID NO: 8956 - DNA, 968 bp, Zea mays
  Intron number 2 from transcript GRMZM2G041123_T06 (locus G RMZM2G041123) derived from phytozome v7.0 (chr-ID 10; pos 122524824 to 122525791)
aggagcagagccatcacagaaattcttgtctccaggtatgttgaagtttcaacaacttggtttataaattaacatgattttaaaaaatcacagtgactcctcttgcagattttgtaaaatgtttttttctctactgcactgcctatcatttgctgcaatttgaggattataacattctagacacactaaaatctatcatctatcataaacagtagctatttccccctctgttctttgtgtctctgattgtgtggtaccagctactttggcatacatttgttttttgctttaatcttctgttcagcttctaattcagaaatctttacttcagataaccagaatacttcagcttccatagttccacttacacagttgtaacaatctagcctgtaatggcttgtaacagtacagtgagttgggagttgggacacctctgatgtttagagctccaatggtcctgtgggagggatatatttttgttttcatattgtttagccatggggtgccagggtctacgttctaccttggtttggttctctccttttctcctatctgtcaacacatagtcgtctattacttataaaaaaccacattttcccattttgatccctttatgaacaatgctggaaatcaaattctattcattttggaaaataattacatatttattcgtcgtagctatattccattgttttattaggtgctcaaaaattgtgttgaccggacacatgctattttggcctatgtgctatccattgctatgttttatcggtagggttttccatgcttagataacttcctaatttctcattttttgtaaataaataaatacttggagattcttggtcaaaggaatgttggacacctgctagccaatgtgcaggtaacaggaacctgaacaaaatggccttgcagtcttttttttttgactgtgtatatctttttcatgtggagtccattaaaaatcc

SEQ ID NO: 8957 - DNA, 513 bp, Zea mays
  Intron number 1 from transcript AC196215.3_FGT007 (locus A C196215.3_FG007) derived from phytozome v7.0 (chr-ID 1; po s 15692315 to 15692827 reverse strand)
gccgtcgctggcttctctgttcgggagcaggccatgtacgtgagtttgaggaagaagatgatccatgtgtctatggcaggtgggcccaggtcagatgcatgtgtctagagttgcagattttgtgttgtttttccaaaaatcatatctcaagttttagagctccaaaaatcacgaaatttgttttgttggcttccttatgaaattctctaactattggatctataggttggcatgttttagtggaaaagtttttctgtagaaattcgtaattaaaaactggtttagagaataaacaaacttgcttctctccataagtttaattataaaaatccaaaaatgatgaaacctattttgttagttagatgttatcatactccatctaggaaaaatataaaacttacatgttgttcactgttttcttggtgtgttaattaaaacatgttaaataggaaaaagatgattgttttgatttttatttttggatctgtagctctggtgctccaaataggttga

SEQ ID NO: 8958 - DNA, 898 bp, Zea mays
  Intron number 2 from transcript GRMZM2G127386_T01 (locus G RMZM2G127386) derived from phytozome v7.0 (chr-ID 10; pos 17677876 to 17678773)
gatctgaaggccagaactgtggaaatttccttacggtcagtatccaatgacacctgtgaacattttgattatgctattttggagcaccagttgagtgctgtgcaggtggagcaagaaaaagtttatacttgctctcattcatagtttgttcttagcctatgatctagaagtacttgtttaggttttgctgcaagaagcacccttcataatatgattacggtgctgtgttctgtatttacattaatatgacatggaacatggttatgatgacaagttctctctactgatctcaccttgttgtacttctatggtttgcccttcttctctgtggtagatgaagtcatactaaatcatttgcagttataagagcctggtatttgacattatgacaataaatacttgtagcattttatcggaatcatggttgttaatcctatagtatgtcattagtgccagccagaataatctctgttgtctgttggtatgtgttgagctttggtaatttaacaagagttctacttgtgggtttacaatttacttgtgctttacagtaatccaaacttccaaacttgtgcttcacatgctgatgcaatttgcgttaaatatacctgcttgcttgtctgtccttagaatattctgatggatagtcccttcgattgtttcaattctttgcttttgcacttctactcatagtgaatagtttgccaaataccttttacatgacaacggaatctttgtggccatttatccaaacagcctgtttgttaatgttcttagattgcggctgaaaatgcacaaaggcaaaatctctaccttgaaatatttgtacatttgcggatattagctgttgtgggatgctgcaggaccgtccgtcgaccaaggtgcaagcagctccagg

SEQ ID NO: 8959 - DNA, 810 bp, Zea mays
  Intron number 1 from transcript GRMZM2G068506_T02 (locus G RMZM2G068506) derived from phytozome v7.0 (chr-ID 4; pos 5 8958948 to 58959757 reverse strand)
gctcccagacctgcctggaccccgacgccagcacggtatgccccgccgcccgccgcctgcacggggaatgcggagggttctcttggagcgcctggccgtctctcgcctggccttgcctctggtccgtcgggtcgcgcctccgaggcgcatttgccgttctccgtgggaaattgggacgcgcgcggaaaagattgtttttttttgtaaaaaaaaactttatatgaataacgcgttgctcatcttgatgcgtaaattggcggctgggtttgtcgcctttccatgcgcacgtttcgtagttgctgcttagacagtattttctttttgtatgtactaggtaccgatgaatgtggcaattttatgatgccacttgttgtgaggctcatgttgttaaatatgattccttgtagtaggctagtagccaataagaatttgatgaagatggtgtcagtgttgtagttgtgggtattggatcattatttatggtttaatcgtctattcttcccatacaaatataatacttattagtttttggatctgatgcagaaactataatggccatttgctattatccttgactcgagtggcctgcgttgtttgaacttgccccgtcttttgaattttgtattttgaatttgtcataatgcagagattatgttattggtttccgtggagctaataatttttcagtttcagagctgtccttgtccttctgtggtgcccattagtttactcactcttggctgtatacaataacacacatttgttgttggttcagagtgttcttggaatcattctgggaggtggtgctgg

SEQ ID NO: 8960 - DNA, 689 bp, Zea mays
  Intron number 1 from transcript AC213890.4_FGT004 (locus A C213890.4_FG004) derived from phytozome v7.0 (chr-ID 1; po s 250596461 to 250597149 reverse strand)
ctacaggctactgggctgtgttgttccgttgttgggtttgggagttgggactgcctaatttcgggtagaatgggtacttcgggtaccgcggatgaatacccgattaggcccaaacttacttcgggtattcagttttgttacccgttggagctgttcgggtaacgggtcttgagctaaacgggtacgggttcgggtaatttgggtaacgggcttcagactcgggttttatgcccagtcctagttaaagtgattccatcttctttttttcctcgttgtttctgccatgcttagcatattgatgcctaaattagtatagatgcaatgtttaatgcatgtctcatgatatagaacttgattcctagattaggatagacataacttctaatgcttcctttgcgcattttcatcattgcttcttgcactattcgtgaatgcattcaacaacatgcaaatttcatattattgtttgccacaatgtggagctctgaataaacgagatggccatcaatcgccacgcatgtttttcataatctaaagaccacaaatacatgcatgcagatccagtgcacataatgttctgccagataactttcgtcgcgcaaaatatgtagtgtcacatagttttgatgtttgtgattctttctgtttttctaggttttacgccatagaagtgctccttgcgctggagt

SEQ ID NO: 8961 - DNA, 1018 bp, Zea mays; identical to SEQ ID NO: 7002
  Intron number 3 from transcript GRMZM2G169516_T05 (locus G RMZM2G169516) derived from phytozome v7.0 (chr-ID 10; pos 124062191 to 124063208 reverse strand)

SEQ ID NO: 8962 - DNA, 167 bp, Zea mays
  Intron number 1 from transcript GRMZM2G495613_T05 (locus G RMZM2G495613) derived from phytozome v7.0 (chr-ID 5; pos 1 80005051 to 180005217)
tgagcagtatacgacagatacgtccagtacccccagtaagtatatgatcttttgttttttgatccactgcccaaatatccagaagacaattagattttgatgtctgcatattaaaattgccgatatcaaataaatcgtccattaaatcagttttctatgttttcagg

SEQ ID NO: 8963 - DNA, 637 bp, Zea mays; identical to SEQ ID NO: 7225
  Intron number 1 from transcript GRMZM2G156621_T01 (locus G RMZM2G156621) derived from phytozome v7.0 (chr-ID 5; pos 1 31189945 to 131190581 reverse strand)

SEQ ID NO: 8964 - DNA, 995 bp, Zea mays
  Intron number 1 from transcript GRMZM5G801076_T04 (locus G RMZM5G801076) derived from phytozome v7.0 (chr-ID 5; pos 2 08741144 to 208742138)
ggaattcggtccttcgtccccaaaccaccaatccggtaaatatatatgcgctccctcactccctccccccagagtttcttgcgccgttctctctcgcgcaaattattatgccgggaaagattatattcttcccctttagctttgagcccgaaaggccgaagctttcgcgttcttccccacagatatctggagccgtagcttctgtttggtatggccgtgggttgaaataaatagtagtgtgcgggacgcccaccaattggcacgctgcgctttccatccctgcagctgcaagatgccttctttttagatctgtgctgccgtgccttcctcttcatggtaccctgtggttggagtcggtattagcgtttaatgaagctactttttcctcccttgccttttggatgatgcttagtactactacgtcttatcagctatcaatcctcctctcgcgtgcttcttggataggttgcattctttgggtttgctcacagcgcacacaaagccattttactgctgggaatggtggctggcactattagcgtctccggctcttgagtgatctccaaggtaagcagcccgccactcccttggaagaatgggaaatagataggaatgttttgttttctcggttggaggagcaaggaattaaccactccacatccctccgtgatttctgaagtttatggctagaaaatttatgaggttgctcggtatgaagaaaatagtctttccttctatctgatcattcaaattgttcgcttcgcttcgcttctctctggttttgcttgcctcagtctagttgcaagatctgtattcggtttgacttgggttcttctcagtttgtttgatgtgagtagattggcgcacgaaatgaagtattaacctgactgaactgcggcagtttgttcatgttggtagttgaagcattcattcttgagtagtcagtcgtcgtaatggattatcagtcctttggaatgctacagggaagtgaagtg

SEQ ID NO: 8965 - DNA, 445 bp, Zea mays
  Intron number 1 from transcript GRMZM5G829516_T01 (locus G RMZM5G829516) derived from phytozome v7.0 (chr-ID 5; pos 3 4164697 to 34165141)
tcgaattggcagcgccgaggcgtttgctggccccggtgaggccgtcaccacggatgaacaaggattgtccctcgccgctcctcgatgggctaagctatgcccctggaatagagttccagcattatgtttgaaatagatggaatctccgcatgcatgaccaatcgggtaattcctcgatcttccttctgtttgtttcctttggtcgttgcaaatggcgcctctcctccgaatcagtgggttttttctgcaaactgttattggtggatttgctgcctcttcgatgtggtgcaacttttggatcgtgtctttcgattcttggtttgttccaaaaaagtggggcttattatttataatttgagatcgtttaaatgtgatgaattcaaattattcttccatctctggaatttcagtggccctaattgggctaaggaatatcgggattact

SEQ ID NO: 8966 - DNA, 688 bp, Zea mays
  Intron number 2 from transcript GRMZM5G829516_T01 (locus G RMZM5G829516) derived from phytozome v7.0 (chr-ID 5; pos 3 4165152 to 34165839)
agaacaatcttcgtgggctgaggttgttagaagtaaagttcatcgtacttatgatcaagctgtcaaatcgaatgttctatcaggggctaatcgcatcccgcttggcaagaggacttatcataattatgtttaccatagctcgatccgtgttcatcagaggagatcggtttttcacaggattgtttttttctcgctcaaagtctcttgcgaatttcttgcagtccaagcaccattttccttattttctggattctccttcgtggaaattcaatggtaatcattatggcagattattgactaaaaattcaaatttggtgggttgttatgtttctcttggcccttttgaatctttaaagcgccctatgttttggggtcgacaaaagagacgtgtctggaggcccaagttgtcccctcttggtaacattcacggattcatacctaaaggtttatcatcttccggtaatgcgatcagtagacatgattttggcatccccttaagaagacttcgttaatgtctactcagcgagatttgtgtgcaggcttcctttctaaaaatattacagctgatccctttacaaagaacatttttttaatgtcggatgtctctcaccattccttgtggttccatcaactgtctgtatgcatgactggtgggcccaaggtgtttacttcatttgcggagttttcc

SEQ ID NO: 8967 - DNA, 1038 bp, Zea mays
  Intron number 3 from transcript GRMZM2G132121_T02 (locus G RMZM2G132121) derived from phytozome v7.0 (chr-ID 5; pos 7 522013 to 7523050 reverse strand)
tcaagtgccagggctgtttcagcatgtaagggttcttggctcttgctgttgttttagtatttggttacttcaattgcaattgatatcgacgctgtgtcatttgatttttacattgaatgtttagcatgcccagtttagtagtaggtactagctagttgatatgttaaaattacttaagaaacctgtacaattgcattctttttggggtgggggtaatagttggtaacaagggtgaagcaacacttttggattataatcagtctgggatggtagcaggctagactgaaagcaacctgcaaaactaagtctaaactaagcctggatgttggtttgtgggctagtctgctctcatcacagtatgcatgtgaagaaaataatgttgattggtactgattctgatcttggtgcaaattgcatattttagttagtttctagttttgctgatataagtatgtaggtcactcatttgaatttggtacaataattgcaattgatagtgatggctagcttatttgatttgcttgctctttggaatgatgtagaaactgtatcttggtcaaagttgtttcactcagctgttgtttcaaggaggttgagagatgacacaccttgccccacttgcatccctaatcacagcattcatgtgcagaaaaaaatttaattgatactgaaactgatcttggtgcaatttatttgcaattgatagtgatatcagttgatttgttcatgagtaggtcttccgtgtgttgtgatggctagcttgtttgatctttgtagtgggtgtgcaaacagtattttggtcaaattcagctgatgttccaaagaggttgagtgatcacgcacctagcaaatgtttggactgctaagctttcttgcaattatctgtgatatttaaacattatcctttgttgaaggtgattacagttgtatggttctttgggatatcagcatgctgaacaaatcaaatgcttgctgtatcttactcgtttttttgtgattgcagaaccactgtgttcagccactcccagactgtggttg

SEQ ID NO: 8968 - DNA, 415 bp, Zea mays
  Intron number 2 from transcript GRMZM2G132121_T02 (locus G RMZM2G132121) derived from phytozome v7.0 (chr-ID 5; pos 7 523054 to 7523468 reverse strand)
agcggctagtccagtcccccaactccttcttcgtattcctcttcatgcccttttctaattctgcgtggcgaggtgttgcaaatcgtgccgaaaagagacccaacgaatgtaccatttgaatttagtttttttgaaaaatgttgatttggtttggaagagagtattagaaactggattcagtatcaaaaactacataaaaaatagttgcaacaaagcacgttgagctagattctgcagggtatgtataattcatcaaccaagttgtgttcaagtagagctaaaatctgaaaacataaatgaattttgatattgtgtttattaacttgtattaatattaatatctgctcttatgcctgtttggagactgactctaatcatctacttttttcgtttttcttctccctttgtgtccagg

SEQ ID NO: 8969 - DNA, 817 bp, Zea mays
  Intron number 1 from transcript GRMZM2G094655_T03 (locus G RMZM2G094655) derived from phytozome v7.0 (chr-ID 5; pos 1 91114613 to 191115429)
tgcccaaggttttctgcgcgggcgctgatctcaaggtaccagctgcattagctctattctggaagtttgattttgctcattagtcattacgattccagttcgtgaattgtcctgacacagggtatctttcagtggcaacgattgcttattggcagttagttgctataggtctataacacatatgccttcttgttttctttagacatagtattgcaatttggatatctataacacatatgccgacactgatgtttttgcgagactcatgagctgcttgattgcattaatccccacacttccaagtcgttgctaatattatgtgtggggacaattgattatttcgggaagacaaattgcaaaatgtatgataatttcatttcaaagaaagaagtaaatgatcgtagacgaaaaactttagtttgttaagtttgtatagcacatagagaacatggtatttaaacaaatatcagaaaaaataatgatatcgggaacatttttgcatattttattgacaaagagaaaaaacagtcaccagctactggaacgtcagacttatgttctataagtaggatgattggtgacaaactccaaagtttgcataaatgtactacattatgactttatgagtaactcaagtgactatgactttgcgtactgtttacagtattgctttgtgaagaaatttgtttgattttctaaacaagtgctagtcatttgtttaatatttgacctttgtatatcctatatatcagtataagactaaaccatgtatccgttttgtactgcatgtcttttatgttgacaggaaaggaggttg

SEQ ID NO: 8970 - DNA, 960 bp, Zea mays
  Intron number 2 from transcript GRMZM2G368358_T01 (locus G RMZM2G368358) derived from phytozome v7.0 (chr-ID 5; pos 1 54411192 to 154412151 reverse strand)
gtcagaccatccgcctctctccttccagcatcaaggtaacctctccttatttagtacgtttgtatcaagaaaacagtgttccatgttccatcacaaatgcaaagagggttctcacggaaacaggatgcctcacaccgatggagttggctctttgctacatattaagcaaatagtgtatttgtgttgttactgcttggacttttaaacatttgctctctataatatactgatttagtcatatcttttatttgtagtaggttgcttttatggcatcttgatccatcaattattaggcttgatctctcagtgatgctcaaggaggtaattagaaggctcttgctttgcctgagaaagaaattaaataataggatggaatgacgtaccttaaacactcatatggaataccctatgcttttgcttgcactgagttttgatgtgtcctgaatcctaattttggtcaatgggcttctacacatacttttaatcttgcaaatagaactacaccaaacagaagggtatcctatgggagcaacaagatgtttctagatcttacatataagcagacgcatcccttgtaatctatgttgttactggttttgtaggaacttagaagagtttgcaatcattaaatccttagcatgacaagaagtcatctgtatatgctatagcatttgtgtcatctgagtttgtgtcgcgtcctcttcgaccgtctcggggaagaggttctgtgcgagcttgttggggtcgacggtggggtagaggagttgcccgtggcggcgccggtggaggtggtgggtgcggagaagaaaggggtgttgagatcagggtgggactggtccacatccgagtagaggctctgcttggcattcgaggaagcgaaagccatggttgcgtagctggtcggttgctatttaattttgcattcggttcttactatgcttcagggattaagtggttgta

SEQ ID NO: 8971 - DNA, 721 bp, Zea mays
  Intron number 1 from transcript AC196084.3_FGT001 (locus A C196084.3_FG001) derived from phytozome v7.0 (chr-ID 5; po s 206607127 to 206607847 reverse strand)
tccagagctacctctgcctcgatctggttaagcaggtaaaatcgttaaaggcacttggcatcttgcctaacttttttacatatgaatgtgcggtgagattgttacaatattttccattgccaggtctcgctgtttcatggcatggacgacctgatcctggacaacattcattatagttctgaatgagatatggattgttctgtttaggttatgatcctgctatgggactgcttcagttatgacccaaattctaagttgtgactatcattgtgtgcatttgttttcttttactttagaaaagtagctcatgttctatgtcagcttctctcaaaatccgaaacacgtttttgaggttggcgtagttgtagtttggcgttctgatgtttatcaattttgttttatatttttgcatccaaaattcacttgtctttcttcatagtctgtttcaaagatgccatgaatgttttagacaattggtttacagttgacagacttcttcacttagcttgtgatctacaactgatgtacaagctgacatatgtagttcatttgagtggaactgcagccgcatcaagatttctttcattacttctacaacccattctaaagagatttttgttatataggattcgaccgaggataagcattggtcatatccatgattttgaccactaatattgttgcttatagttgacagaagctctcacttcttcacttctag

SEQ ID NO: 8972 - DNA, 272 bp, Zea mays
  Intron number 4 from transcript GRMZM5G829738_T01 (locus G RMZM5G829738) derived from phytozome v7.0 (chr-ID 5; pos 1 61000494 to 161000765 reverse strand)
taccggcaagggagcttgtacaagtttttgccaaggtttctttctccattccttttcttcttgtctatggtttgcaaattttcatttattattccttccctaattattattttgtttgatttctgtggggtacttctgatgtgtttatggattgaattgacaaggtgtcatgaattattatcccatttctatgtcattaagttaattatgtagtgactatccaatatggattgtcaggacatagaacttggcggcgagctgccaaaagttcc

SEQ ID NO: 8973 - DNA, 323 bp, Zea mays
  Intron number 2 from transcript GRMZM2G172239_T03 (locus G RMZM2G172239) derived from phytozome v7.0 (chr-ID 5; pos 1 88388300 to 188388622)
ttgttgcgaaaaccccgaaagagttagggtcttgattgtataacaatgttgaataagcactgtcctatgtttcgaaataagtctgtcgtagcagccatgacactgattgccaaaacaatgtcaccggcatgctcttcttattaagatctggtactcttcttattaagatctggtattcggattagattggagtgaagaatttatttcagctattttttgatttgacaagtaatgaccatgctaatcatgtcagatgcaaggcttattgttttttttttctttgtgatggttcaggctgcggagccagtttacctgcatttgct

SEQ ID NO: 8974 - DNA, 979 bp, Zea mays
  Intron number 2 from transcript AC191577.3_FGT004 (locus A C191577.3_FG004) derived from phytozome v7.0 (chr-ID 5; po s 137123079 to 137124057 reverse strand)
tcagcaccaagacaatcgtccaggtttcttagtttcatgacaatatcataattggtgttgataatgaagtatccagatagctctgttgattatattgtcaccctatctgtgtgaggactgatgagaaaatgcaattggaacagtcaaactaatatctaattatctatcaattatcctatttgcataggagcacaacttttgtatcacttttgtaggaaaaaaacaatctgtgactggcttgaattggaacctgtcccttctaaattgacatttttggtatttactgggctaaaaaactggggctctagtatttcttctgtcatgtgttgcttaccggtgagattgtgttgttcaggaaacaaacttaatcatcattttcctgattacaattactgatatttgttttccttttggatggtagtggaagacaatccttcccacgtgcagggttaatatgttggcaagcgtggtaatgaaatttgcttgcaaccgtatgtggagcatctgattgatacatcatatctacatatacatgggtctgtattgtgcttgctttagtgtgactattcaatggatggcaaaacttgttccggttttgtaatataagttaattcaattgcaggttggaaaaaatgagctgaaggcaaggggctgttagtacattgtttctctttttaagggcacgatggagagcctcttgctatctccaatgtaggatcccaaacataatcagcgatgcactctcaaggaaccagtaccactagcagctttactagacctttcacagcaactggattagggtctatttgtgcaccagacaccaatccttctaaatcaaacgtgcatacaactaaaccagtgactacgccttttgctgccaaatcctccaatgagactcaggtgcatcaccttccttgatatccataaatgcatactatgtgcaattttcatgacatattattatgtttttttgtgcagg

SEQ ID NO: 8975 - DNA, 958 bp, Zea mays
  Intron number 2 from transcript GRMZM2G432480_T01 (locus G RMZM2G432480) derived from phytozome v7.0 (chr-ID 5; pos 5 3614670 to 53615627 reverse strand)
ttcgacggtacgtaccgtacctacgtccgatccaattgattatccattaatcgatggaactaagaacagagaaggttcggtaattcattgacaatttggcatttgctaatcacatggaagctggcagcgattagacaattcattagtggccaactgtgataagctatagctatcccgctgacctttcgaccaatgcagcacgctggtcgccggtgataagttctctatgagcacaccatggttttggtttccttttcacatatactactatatatactactataataacgcaataatgcttggcctctacatcctgagactgatgagatgcataaataatagccatagccatccctgatgacagaggatgcgtgatgacgaggacgaaccttgctaaccttttaaagaaagctcgaacagttgacaaatataagcgggatggtggcatttattttttttttaactttgatagtactggcacacgaaatatttaggatttctgaacatctggtccaacataaacccctccaacttgaataaactattttttcgagccgtaagtcattctttttttttgagcttaatcgaatttatagaaaagaacataaaaattcatgacaccaaatcaatatcattagatacgccatggaatatattttcataatttattaaattatttgatgtcataagtaccgttatatttttttacataaatttagtcaaattcgaaaagtttaacttagaaacaacttcgggagttagatttatttaggaaggagggaatatttcctggatgtaggagcatctgcaatagttctctaaacaggttcctaaacttgaaaatttgttaggtacaatactagttggatctgcggcctccgtgctgattttccaccacttcctttcctgcgtgcttttgacaggaaccgtggctgacaacgtacgatacgggccgcag

SEQ ID NO: 8976 - DNA, 1036 bp, Zea mays
  Intron number 3 from transcript AC191254.3_FGT003 (locus A C191254.3_FG003) derived from phytozome v7.0 (chr-ID 5; po s 176230514 to 176231549)
tgcgataaagagcctaaaagtatctgacttccaaggtacgtcatctaatctctgaatgtgaaatgaaatacaacagttactcacctgtctttcgcaggaacgatagctctctgcccagccaccagttttgagttgtattgagagcaaaaattcacatgctttccgaatgcaaatattgttctcataatttctcccagcagcaactaagccgtttatcgcatggagggtcccatagataaaacatattccccaagtgccataccttgcaggtaatttctgatttagttacaattagacagagggaaaaaaccgataacctgtacaaattagaagatgttttcatacaaaccaggatccatccttgttttgattactctcaatgatatacattctttatattgatgttttatctttgtacgatatgcaggtacacagtcagggataagctcctagattgttttagagcttctttctgaaacaatgttgctggcaatgctaactttttatattttcctaatattttccaattatggtgtattaacatataccttttaatatttgcttacgcttctcttttatgtgtctctaggttctttttctggttgttaatggttcagaggaaattgaagccatcaatttgatagatgtgttgttgtgaagagggtcgggctcgctgctgcgcaagttcctgcacatccatgaccattgctcactctccaactgcgatgacgacctgatcgatgctatcaggtgatccatggccatcaccgtgtccaacaactacttcacccaccacaataaggtactatatcctgctagatcatgtgtgtttgtttgtcctcgccctgtaatgatcaagtgcccatgtgtgatggtccatttattttatttaccaaacacatataaaacttggaggattctacatagtttggcgcatatatgcctaagaattcgtctgttttctgcctataccaaggcaggagctcatatcatagttgcacatatgggtctgacaactgcagggtctatcggggca

SEQ ID NO: 8977 - DNA, 1030 bp, Zea mays
  Intron number 4 from transcript GRMZM2G459755_T01 (locus G RMZM2G459755) derived from phytozome v7.0 (chr-ID 5; pos 1 34485756 to 134486785)
ggctttcccaaatacaggtaagaattgcttgaatttttaactgtatttatatgtttatatagttacctctgtacaaaaaatattttttactttcttccattgaacctgcagttttcatctctggcacattcatttttgctcatgtttgccaaatgaatttacaatttgaatccatggatcccaaatctcactaaaaccacaggttgatgatactcatggaggaacacttaaatagatcatattagacaaaacacaatgggtgagataagtggcatgtcttaaaccttagcacctgcgaaagggcctctagccgagttagataggtggtctaagtagcaatcctcaggttctgggttcgactccccgtgggagcgaatttcaggctgtggttaaaaaaatcacctcgtctgtcccacgccaaagcacaggtctaaggcccggtccccgttgcggtcgcggtcgtttctcacatgggctatgtatgggtgaggcaggggttcaggggttttctcgacctgcgtttgaaggtcttcttcttaatataatgaccgggtgctgtcttacctcccgcgggttgagtttttttttaaaaaaaattagcaccttgctaatgcactgatacaacaataattacgtgggctaaactaccatcctatgattgtgtggcatatggtatctaacatgtgtatagtttatctagttattgatctggttcctcattgtttgaaatgtctgagactcctgtatatacttgacttttatgtagttctttagagagttcttttaatatcaaaccaaattctatctttacatcatgcaagcgtccacatcactcagtgtcaatacaatatcgacctcttttaatgcaatgattattgtcctcaatttaccatttatgcatttcctgatttccacactgtattgtttatggatttaaggtggtatggtatggtgcttattatgagtatttagtttgaatttacttttttttccaggggtggtcttgtcttctgggctgacactgttggag

SEQ ID NO: 8978 - DNA, 791 bp, Zea mays
  Intron number 1 from transcript GRMZM2G075039_T01 (locus G RMZM2G075039) derived from phytozome v7.0 (chr-ID 5; pos 3 3990880 to 33991670 reverse strand)
cctccccagtccccaccggacccctccctgcggaggtaagggtagcctctcctctactacctgtcctgtctcccatgcgcgtcccggggatcacgtcttctggttggctgggcggcggcgaggactccagcgggttcggagagcgagcgagagcggtcggcagataggagcggtacctccgtttctagggttggggggaaaggtgacggggttgggttgatggagcacacaaagtagacctgagcgtttggggtagaaaaccgcgtcaacttgatcagcgagctagtggctggagtttttcttcctttttgttcttatctgatgcttgcttagttttgggtttatgcatgcggatttctcctcatatgatactcgcgttgggcgcccttttgccactctaaaactgtgattaactgattacggtctggatggtgaatgctgttgcttgagagcatcatcatccgttgctgccttatggacctgccatttgagtgtgaattccacttgtattgtatttgtgagacagtgtgtagtgtaccacttgttccgggcctataggttattttctggtgtgtggttctattgtttatatgtggaaatgccctgattgttcaacattagtacattacccatccttattgctttccttcactctgacaacacatatatgtcactggtatttaattgcaacattctaccatcttgtacccatttaggatgcacctattgctattgttgggcgttgtttcacctgtgttgtctttctgtttgatgcttcagtactagtgacc

SEQ ID NO: 8979 - DNA, 726 bp, Zea mays
  Intron number 2 from transcript GRMZM5G801436_T02 (locus G RMZM5G801436) derived from phytozome v7.0 (chr-ID 5; pos 2 11976313 to 211977038)
ctccagcagttgtggctgaagaggtactttgcattactcatttatttggagttcctggtcccctatgtatccaataattggctctgctgcaaagcactaggttcattgagaatgttcagcatcttaccttttcattaacaaaatataattaatattgatgtaccctttagtttaatggttagtcctttcgaagtttctaaaaactctgcccaggagggaaagaccacactcccggtattatattaagaagagaccgaaacatggtcccgaacgagaaaatccttgaaccctggtccaccatcactagcgggccgtcaccgtccactctacaacggcccaacgagaggattttttaaccaagccagaaattcgcccccgaggggggatcgaacctaggacctagaggtgctactcggaagccttaaccccattaagctagaggctctttcgtctttctaagtttctaaatttatattacatcaatagttagtgccgttgaaccttgcatttttgtagctaaatttcagttggtttggttagcatgtatgcgttgccttattttcctgtctggttcatgcttcttgaaatcaaatagttctccatgtccttaaggaaactgtgctccctgcatgtttttattaaagatatgtcctcatcatcaacttgtgctattcataaactatggttcatcttagaaatgtgttctatgtgcaggtcactgagaac

SEQ ID NO: 8980 - DNA, 761 bp, Zea mays
  Intron number 1 from transcript AC191775.4_FGT004 (locus A C191775.4_FG004) derived from phytozome v7.0 (chr-ID 5; po s 25351680 to 25352440)
tctttgttgctttagtggataaggttagtatctataatttgtctttgatttgtttttagtcgttacttgtttgtttatatagaatactttgcctatgtgggggttgtgaaggtcaattgaatctagtctttgagacctcattctatatgaaaagaaaataggcttctacttgctattctaatggggtattgacatgaatctaagatttttgaggggacttgctcggatttgaccaaaattgaaatgcactaataagtaggggtgggtcctgcccaaaacatgtctatatagggttggggcctgagcccaaaagatataattcattttagactaaatatatattcattaattaatctatgaatatagtttatatgtatatctacatttatctttattattataaagcatcagtttccatagttcaacggttccacgaccgtcattttttctggagaagacaatgaaaaaagcaacaaaaatgggaaatatagaagaagttggtgacataaacattgccaaagaacagcaaagaaagtcactgacctaatgaaaaagcaaaagttacagcaaggaagatagtaaagaatcaagataatttcaggccatagggtcatgatgctcatgcaaaagtctgaattctacgttcgatatttcactttgtgttgtttgctacccaacacctatttcgacttatggtatttcctattatcctttgttgcgctataggttggtagtcatttgattgagctctttattgaaac

SEQ ID NO: 8981 - DNA, 587 bp, Zea mays
  Intron number 1 from transcript GRMZM2G076951_T01 (locus G RMZM2G076951) derived from phytozome v7.0 (chr-ID 5; pos 2 09411819 to 209412405)
gaagggaaggtaatgcaattgtgtctctatgagaaagaaggcagcaagagcggcaatagaaccgatgagtatgttgcaagcacactgattctgaagtgtctacagactctaagaacagaagtacgtaccaatgtcttgtaatatgagttcctaggtattacatgttagtcaatctgatccaccaaagattttggagtgtaggattcggtctatggtccatcatttgttcaggacaatgggtgacccagttgagaaaaccatatttgtaaagccacataagctaatttgtattctaatatgttggtcgagccatattttctaacttaatcttaggcctggcggtagcctagataactcggtctctccccaaaaaagtacagttccaagaaattgatgtgcgacataatgatagctaaggaagcgccacacgaccacacctaatctaaaaagtctacttgaattatttgagtgtgtcatatcttatctatgtttttcttttcattcccttgttctttttccaagaataccatgaatgagataatatacatgcaggtgtatcagaaacagaccctatttcttttgttaat

SEQ ID NO: 8982 - DNA, 842 bp, Zea mays
  Intron number 1 from transcript GRMZM2G153635_T01 (locus G RMZM2G153635) derived from phytozome v7.0 (chr-ID 5; pos 1 21521243 to 121522084)
gttactcgatccggagtagtggcggcggttcccaggtcggtggcgacgactccccgatccagagggcgagcgacagtggggcccttgtgcgggcaagcagcggcgtccccgaagccccgaggaggcggcacttccaaggccgacgagcaagcgacgcccgtcgacgtgcgagtagcgacagtgacgcatgaggcgcgatgttcgagcgagcgacgtcacggaaggcgcgagatgcgcgcagcgatgatcgcgtgtgacatcctccgatccggcgcagttttcttttcggttattgtgttttatgcctaccacatgtattatttacgctaaaaactgtacgattttatgcttgaacacggagttcgtatatcagtttactgcatgcacattggaaaggcaattctttgatttatgttgttcgtaatttgcgcgcatgcaatggaaactctcacgattttgccataatttttggatctgtataataatagaaaccgcatgcatgcggctgccatgtttttcggatctgtcataaaaataggatcgtaataacaacctactaaagctatcaacctctcattgactcggtatttacacttataattgagggattttatgctcaaaacttaaggtttttacgctccacccggagatgcgtccaccagtgaacaacatgccatattttttacgcaatgtaacgaattacataaatacctacatcgtgtagtataatttatatcagtatatatcataaactagttctaatgcgtttagttgcatggctgttgaagggatcctatatttatgaaggaaatctctactccttattaaggctctaagggtag

SEQ ID NO: 8983 - DNA, 1006 bp, Zea mays
  Intron number 1 from transcript GRMZM2G501450_T01 (locus G RMZM2G501450) derived from phytozome v7.0 (chr-ID 5; pos 2 06024482 to 206025487)
aagaacaaggtcctggagatgtgagtactcagctgccacgtgcttcatccctcccgtcttcggctcttcgccgttcataatctttcttctgtcggatcttgttgtgtgcgcctgggtggtgtatccaaccgacgttgtctagagatgttgtaaacacgaagcctagctcttctaatttgacgagttctgaactgaagttgtaaaacgaatccttacaatgctaatcttttttatttgttgggtcaaatgccaacatttcgagctcacttgtctctggcctaggattggaccattggagtgatacagatacacctcgcaagtcgcaacaaaatttccatgccaacgtggttggcaaaatctgatagcactttgagcttagcttctagtaccactgttatttgacgttcttttgttctttcttggatggttagcttcttatgaactgagttgactttaaagctcttccatatttatgttattaaagatgaatagactgtagaggttggtaaaattgacatcttcagttttatgcttccagggcagagcactgttgcatagcctctcaggaaatctatcttcatggatcatcgatgctatttacagtgatatgtgataggctggcatatttagtgttgtcaatcaagattcaagggttcagcataacctagccacattaaagctgctaacttttgtattgttgccgctctcaagattcagtgctgtaagcaataacccacaagggcgtgtgacagggtgcccatgcgttacgacccattctctttgtttcaaattataaatcatttcggcttttctagttacatagcttttgcgatgtatacgtacactctatctagatgcataacttccgctttgtatctagaaaagccgaaacgacttaaatttgaaacggatggagtatctaggaagcctaggctcttataggtcttagcttcactgcgtttttttttttggtattgatatacttccattcctttcaggttttacc

SEQ ID NO: 8984 - DNA, 1039 bp, Zea mays
  Intron number 1 from transcript AC233959.1_FGT005 (locus A C233959.1_FG005) derived from phytozome v7.0 (chr-ID 5; po s 80489949 to 80490987)
ttcgtgggtacgattgatcggggtctgcttacaacgtaagctagtttgaattatgacgtcacaatgtatcatgaaatgtttgacgacacacaattctgacgttttgtatgccattaataattaaattttaactaaattgttttgttagtacgttgggcataaattgtaaacaaataaaaaacattaaaaaaataattacgacataaatacaagtcggacgagtgaaaataaaaaaagaaaatagaaaatgaagttagttatgtggaaatgtatatttaatgtgtagagggatacataggggaatttatagggaggacggttgtgggatgagtgaatatagggcagagaatcttgctgacgtggctgcatagtaacatttaggggggaatttaggggacaccgctgcggacagccttacacatatatagactgcaaacccctacacagacacccgttccaagagaaagggggagggagccattgaccgcaaacagtggtctgaccatgtcggtgaagtgtttttttcttataaaaggaagaactttgctaatccataaatgttgtatcgagctgatacaataatcacaaatctgttttactatataaagcaccacttcaaaactttacagcatccaaacaaacaaatgctcctataaccatcccacctttgaaaccaaggaacgagatcaatctaaatctcttatttctcttacctgctcaaatctaacgatctagcttatttggatcatccctccctcatcaatcatgttttcacaggcgatctcctcatagggtcgagtgtgtcgagcccggccgtagctggcggcgtcgtacgagttggaagtagcgcagtcgacgcgcgaaggcgtcgacaatcgagtagagcgcgacgaagtgcagcgtggtgggctcgaggcttgtccccatgaggcgcatgttgttgcctatggtccctgtcgacgatggtgacccatggtatgacatttgagatggtgtcactgtaggggccggaggaacatacaacaaagacgttgtggat

SEQ ID NO: 8985 - DNA, 607 bp, Zea mays
  Intron number 3 from transcript GRMZM2G380889_T01 (locus G RMZM2G380889) derived from phytozome v7.0 (chr-ID 5; pos 6 108044 to 6108650 reverse strand)
ttcccccctgtaggaatcacgggactgaaagaaaggttagatttctgtttgcctttctgggcatctcagtccgaacacgataaagattctgagagcactgtaacaattattattaaacgatttctctgtctcttgctctgaacaggaattcctatcatcgttgcagatcaaatacgatgaacatagaattggagaaaggtggaatctttgtgcgtgaaaactgcaatcagttgcagcagcaggttgattctcaacctgcctgaaaaagggatcggcttttacgaaagaattagactggactcaagaacacctctgaactgaacctgaacacagccggaatgcttggtagagacttctgtttctgaatttatgaaaaattttgttggatacctatatttatccttggtcattttcttaaatgatatcttcttgttcaagtagttttttgtgctttaaaatttcaaggtgtgtaagagtgtatgtaatatatttacatggccaaattttatgtgatatttctgcttttctacaatatctactttgtgtcgtgtacttgtgtgcctgatatgttgctccatgttatatttcttgaaggacaaaggttctg

SEQ ID NO: 8986 - DNA, 568 bp, Zea mays
  Intron number 3 from transcript GRMZM2G122274_T01 (locus G RMZM2G122274) derived from phytozome v7.0 (chr-ID 5; pos 1 3312919 to 13313486 reverse strand)
tacccacgacacacgggaacaaagtggtatgtgggtttaaattctcacagagtatgagttcttcaggaacataacttgtttctaattgtgcagagttagtagtacttcctttgccaaactctaatatgtctgacgatttgtcggttgtccatttaaggctacacagcaaacgtaacctttttgtctgcctagtgaaattgaatagtgacagcaatttgtggttattctgtgatccgtcgtagcagtagcactgatgttcatgtgttcacggttcacaccattcacgttatgattgaatttttggctaattgcaaaagcaccactgagttattttttttgttcttttttcctttgcatcaacggaaggttcacagcagttagtttcagcctgccctcaagtgagctatgaactgaaaacaactgatttagcttagctagtactctgcactatatcttctgtctccatctttgatcattgcgtcccatttttttatatttaacaaaactgatgcaactatgttgcatatgtacagctttagctggcaacagtggcgctcctagtcatata

SEQ ID NO: 8987 - DNA, 830 bp, Zea mays
  Intron number 1 from transcript GRMZM2G334142_T02 (locus G RMZM2G334142) derived from phytozome v7.0 (chr-ID 5; pos 2 06309335 to 206310164 reverse strand)
cggctcctccacctacgccttcttcggcttcaacggtaaaaactctctcttcagatgccttctcttgtgggggcggccggggggctagctgtgccctttctcttctccatgcatgcctctgtccctcggccttttccttttttttttctgccacgtgtttcagtccctcatactctgtttcctagtctttctataaagataaacgaaaaaaaagggggtcacgtgccacatctcaaagccgtatgaaatttgtgtaaaaataagttgaagagatttagagatgatgaagggaccctgaacgacgagtgacagtaacgacagctcagctcaataataaaagtcgttattcttagggcctgtttagttcatatgtagattcctgaaaatctgatttcagctgtgaactatgagaaggttgttgtgagctgaccattataaatactgaaatttgcttggttgaaacaactctcaactgtagattttataagagcatgacagcttctaatatggatgacaggaatctagaaaatctggcgtagaagatgattctaaattgaactagagaaatatatagattttcagaaatctattctgctgaagtatccattttggttggaatttcagatttttggtatcgaatctggttaagaaagctgaatcaaacaaaccattaagctgtctctcaaacagtttttctatcccacgcactctctatttcaaactcaactacgtaaatagcacagcacagtctacagtttcgcacggcctttaccattcgacatatcttttcgataggaaccgctggcgtgtggcgcatatccgctttgaac

SEQ ID NO: 8988 - DNA, 923 bp, Zea mays
  Intron number 2 from transcript GRMZM2G162241_T01 (locus G RMZM2G162241) derived from phytozome v7.0 (chr-ID 5; pos 5 5212604 to 55213526 reverse strand)
gtgctgcccactccattttattttcttctccacaggtactgcatgaatttgttgttgcaatttatattagatgcagtaaccgaatctctggatgtcattagctgattgacattaatcttgtgtcgtgccattagaataaatggtatttagataaacatgctacaactttgttacagggattataattcattcacacaatagttgttgcagggcagatttcaggcatagtcccttaatgggaagaacataagttccttatctgtagataggatcagaggaggaagggcaagacaaagagaaattttgatagagctatcattctattccttttaattaatgattcgaaattatatataggatatttgatggcactatcatccctaatcatctaaagttttgatagaacatattttttcatgtagcgattagaatgattcaacatgtattcatgccaagaacacatgtaaaactaacacatagtttgcatgtgttttattccctaatattcctgaagcctacttggatcgctggtaagtaatttctgtccctggcatgctgctctacactgcccattgtgaagtgcatgttcgtaaggggatgttgctctacttggatatctttaaagtttgtaactatgtactacctaaaaacatttttttgagagtacaaacagttgaacacatatttgagctcatcaaagatatctcgtacacgacacacaactcaaaattctggacccacattgtcttaagttggacatgttgtacttgatatttttcatatgtttcaatatcatattctttcaaaaactgaagtatgataggatactcacctcttaccttagttaaattcagtaacgatcttgatgctgccactacctgaattttgtgcaggtgcgacgtttacagctttggtgtcatatt

SEQ ID NO: 8989 - DNA, 943 bp, Zea mays
  Intron number 1 from transcript GRMZM2G329532_T03 (locus G RMZM2G329532) derived from phytozome v7.0 (chr-ID 5; pos 1 92432034 to 192432976)
cgacgacttttcgacgtcgtttctccttcttgaaggtgcggcccagaagacctgcagtttgtgtgttcgttcgtgttgtggaggctcttcgtcgctccgcttggctcaatggtgtccgtgttgtggaggctcttcgtcactccgcttggctcgatggtgtccgggcctttgtcgctttaggcgtctgctcgctcccggagttcgacgttgtggatctttgctcgtggtgaagaatcggagctgcctcgtgtgggtgtgttgaggcttggcaacgatggcgcgccgcggtcttattccttgcgtcggtgtctgaatgtaagcgtcgtcgagttgctttggcagtgtgcggctcgtcttgggaagtcggagctgctcgtctcttgtgtttgagtttggcaacgatgactctagatgtgtttgtgtgtggggactgtcattgtctaagttgtttgttaggtcgttcgccggtttttctactgtgcgttctgtgtaggttttaggcccgattttccaaaaaactgggtcaattccattcttcttaattgagaggcagagctcctaccatcacgttaaaaaaaatcgcggtagttctttcttcttttttgatgctattgattacactgaatagtttagttttcatgaaattttatcataatacctgcacccctcctcgctcaaccagaaaacacacacaaaaaagaggacagaaaaaacctatcattagaagaaacatgctcctggataactgtaatgtgaacacctttctctttacaagttattgtatcagaatgacatttgacaattgacagatttgattccttacattatttctaccatgattgtcggcaccattagcctaagacgttagaatttcaaatatttgtctatgtctgccctgaatgttatccttgacatgccactgattgttttgtgactcttcagg

SEQ ID NO: 8990 - DNA, 1019 bp, Zea mays
  Intron number 1 from transcript GRMZM2G568240_T01 (locus G RMZM2G568240) derived from phytozome v7.0 (chr-ID 5; pos 1 62143513 to 162144531 reverse strand)
gcgccgtaattcgcgcgtccgtcgccccaactccggtaagaaaccaagcacctttgtccgccttcatttctctttgcgtagcactgatcgggggtcgaattagacagtatagcgagggttggagctactccgacgtgcctccgctgggcccgtgggcggcgacgccgtcctgctcggcacgaagaaggaagacaaccgggggccatcgatttccaaagtagggccaggattagatcttggggaattgattgtcggctgtggattggtggatgaacggtttagatttaatcgagcataccgcttcggtggagcgcgcctgggccgttcgatcaggatcgaggggcctttgttggacccgcagtaattaaattcgggctgttggatctcgatccagaggcctgtgggacgtaccggttcactaggttacagatctaatctagtgcgtagaaattagatcggacggcatacaatagaacataccccttcgccatggtatattttcttaagagcccccgagaaacatgcaaatcaacccgacatccacacttagtataaagtaatcacagttgtgtcctggtttcttataaaacaaaccctggtctttccgtttttgtgcgcgcagcccaaataaattgtaggtttaataaaatcaaccagaaaatgtttttagtgtaaaaataattccagaaacacatttaattcataactaattcattttaacttctttttgatccattccagttgcattaatgtcgtttaatattgtttatcacctagtaactctgttttttcatgaaacatagactaaaattatgcacttaatctattctatatcaaccacttaaaactttgaaaaattgtaactctctaatcgtaactccgaatttagtggttttcgaaccaacgatctcgttacgatacgtagaattttattatgcaatatgttctcatgtttagtgtgatgttaatttgtcctgtacaatgtttgtttgtattgttgcgagtagacgggcaggcaa

SEQ ID NO: 8991 - DNA, 694 bp, Zea mays
  Intron number 2 from transcript GRMZM2G478664_T01 (locus G RMZM2G478664) derived from phytozome v7.0 (chr-ID 5; pos 2 11898857 to 211899550)
caatcagacgagtaacttgggttccttctcaggtatttaagttgtgttctctctgtttttttaagttagcagttcatgtttgatgccagatcatgtaattatttttcttatttacgcttcatcagtaatttctcaatttgtactcatgtgcttgaagagacaatgcttagtaggatactacttgtcagaagtgttttcattttcatttttgtgcatatttcttgcctttactttggaagaagacggttagtgtaatctaaactaaactagtctggtcttgaattatgccttctgagttctgagcgtaagtgattgcttgatcccattttctgtgaccaagtaaatgcatttctgtcactatgtagtactccctccgttccgtaatatagttcgttttagaccaaacacacattcattaatcaatctatgaatgtagtccatatgtatgtttgcattcattgtcattcattcaaatatggatggaaaaaaagaggactagaaagaactatattttgggatggagtatgtaatatttttgagttatatatttcctttttaaaccctctgccaatcagcaatgatgaaatgctactgcttgttacttctattgttgctatcttgtgttgtttgataagaagaccatgttttatggcttttgttttgacgttcccaggcacaaaacaggattgttgcc

SEQ ID NO: 8992 - DNA, 585 bp, Zea mays
  Intron number 2 from transcript GRMZM2G165270_T01 (locus G RMZM2G165270) derived from phytozome v7.0 (chr-ID 5; pos 2 783259 to 2783843 reverse strand)
atcaggtatgtgtatgttgacacatgttatttctgtaatacagggtcaatcatttaggcattatttgagcgtaaacttcttctcttttaaatctagcccttgatcttttttaaatatagccgaatcaaattagtgatttatccaaggaaatagtaacggttgtgtgcaatagaaagagtatgaaatgttattgtccatgtgttttttttctttcgaaaatttgcgagctcatttctttgtagttatgtcttctatgtcttatcagcatagtttgttgcaactttcataattctcagatttcatatttgcaatgaataggcgtggtctgttgatttgatagccatgatattcttaagcacatcaactaatgcacatttactgctgaaagaagatacctgacgcttttattgctcatcaagttaaaattgtcaaatttgttggcaacttgatgttggttctggggggttctgttgatttgattaccatgatgttaagcatgtcaactaatgcacacttactgctcatacctgacacttctgtctcatatcaggttaaaattgtcaaactttgttcgcaacttggtgt

SEQ ID NO: 8993 - DNA, 916 bp, Zea mays
  Intron number 2 from transcript GRMZM5G838754_T02 (locus G RMZM5G838754) derived from phytozome v7.0 (chr-ID 10; pos 129011606 to 129012521 reverse strand)
atgtgagatggaaactaatgaactgttatttacagcttttatctaatcacacattcatgttccctaagcttatttcattgcaatgtttcttcatgatgcttttattgggctaatcccatcagcattagttttacccatgcctatagctgaaatttactcttgtgttgctttgtttaccatagacatgttcccatcgtatctaaattaatcgttttttttatttttggtttcactgcttgtggttgagatattatcctgggacatatagatataggtatggttagttgtagatggtggacggaaccattgaaatgtatgcacactggtaatagtgtagtgttgcttctgtgttaggtttgaaggaaacatatgtttgactgtatctagtttagtgtcgcacgttatcccaatgaaatgatgcaaacaaaaaattcatgatgcatacatcagcgccattgctgctttctgctgttagtcttggataacgatgtgctagttgtttgcttagcagaggtggttgttatactgataatgaaggatatcgttacaaataaactagaatgcatgtatttgaggttgtctatacatttgaatatttgatgcgttgcattatataccaatttaatttcagtgtagcaagttaaatcgttaccacatggtctcaatgatgaatattactgtttctggagctgaatgagcactgggggcagcgagaacatcattcatttctgatatttctttttttttttgagatgctaaatttgttgctgttgtatgttataatgctaagcttcttgtaaggtgtttatcctttagttagttgcttattggttcacgatgttgctgaggattaccggtggcaatactttataatgaatctgggacttttctgtgtctcgaattattgcaggattcc

SEQ ID NO: 8994 - DNA, 879 bp, Zea mays
  Intron number 1 from transcript GRMZM2G090197_T01 (locus G RMZM2G090197) derived from phytozome v7.0 (chr-ID 5; pos 1 96902398 to 196903276)
gtcggaggtggttgctccagttccccgtcgtgcaggtgagtagattgggtacaattgtggtttctcgtagatagaacagttttgagtgttctgaaattcaagatgagctgtaaatttcgacacaagactactgcagtaatagaggttggaatttcatgcttaggcatcgcatcgttgtgctttcggagtactcacttaggttggtactagtgacttctgttgttgaatgaacacatgcattggctgtttttcttttgctcttgtgtgcttcccagttgctgttgtgctcggcagcttcccctacaatttatttttgattcatgtgtgaactgggaactgataaaacgagggtattaactgaaaacggatcagatgggtgtgggcgtgactaccctgtcttatagttctggtgaagatgccgtcggacgggagataaacagtgtgcttataagattagaaattttgagccaggatttattaaactcgttcagccagcctagcataggcttgcacttattccatgagttgctatgatcaaatttgcacccatacagttggtattccttctctttatgttgcctgggtgtgtctccccacttagatctgctcaaatgcagtgaattgataactgatacatgatggctattcatggcatgacgaacttacaaaattagtgattctttgataaggctgtttggtaattttaagccaaaagtgtcatctacttggaaaataagagatgactttcttaatcatcatttatttgtatttgcttgagtgagtagtaacttttaatgttagcttttcctctccaatcatttaagtagttgttcagttgtcttaattttcacttcctttgtgtgcagcgacctctattct

SEQ ID NO: 8995 - DNA, 877 bp, Zea mays
  Intron number 2 from transcript GRMZM2G330684_T01 (locus G RMZM2G330684) derived from phytozome v7.0 (chr-ID 5; pos 3 0837495 to 30838371)
ctttcttggtcatcgatcgaactgatattgaatttgtatgtatattgttcatgtttgatttccagttttcttttatctatgaatgtttctatgcattctacttcattacacaatagttctgtgtcattctatttgtagctaggatgcagctgtgatttgaaaaaagaaaaagaaaaatcgtctcctagtttagcaatttaccgagtactgatcactcattttttttgcgtgtcttacgaagcatacttttatcatttccaagccatgtttatctttgaactgtttgggtggtggtgttgccatgtacatgtactcgtatagataaggctcaaatgacttgctgtgataaacaacattcagttgcaataatattttccgttgacagcatgctccttgaaaacttagagggacagtgactaatatcttctgaaacatgcatggttacgacttgctagggatggccgcgctgatagatagctctgggctctggctgatgtgtgtctgcacctgtcctgatttttttttatggatgcatctaatttggatctgtgttgcctttggacaatgccagggaacctatgttgaagcattttttgtttatttttgatgtatagaaataaaacagaagaaactagatgcttttataagttgacttcattgattgcatggcctacttccagagctctatgagtttgttttgagttcttacctggtaaattgtatgtgatacatgctaatatgaagatggtaagtattacgtgtgctgcgcattgatgtttcttccgccggtcactactagacttcatttgtgtgcttaatttgttgctgattctgagcatttctaataagttggcctcttctcttgatttctgaagac

SEQ ID NO: 8996 - DNA, 822 bp, Zea mays
  Intron number 1 from transcript GRMZM2G415491_T02 (locus G RMZM2G415491) derived from phytozome v7.0 (chr-ID 5; pos 1 941808 to 1942629)
cccggctgagcggatttggaagtcttgggctccgggtaaatgcaaattttttctgtggctcgtggaacataatagatgctggacagctgacaggttggctttgagggggctggaccaccccatctgctgtccgctctgtgaccaggccgatgagacaattaatcatttgctggttgagtgcagttttgcaaagcagttttggtttcttctccttcggtcgggggacttccaggtgctctgtccttctacaggggatagctgttttgattcttggtgggagaagagtgctgagatggtgggcaagcctttgtcgaagggtttcaactcgctggtcattttgggtgcgtggtccatttggaagcatagaaataggtgtgtgtttgatggctgtagcccgagtgttgtgatcgccctctcggctgcaagggaagagatgttgtgctggcgtttggctggcgctaaagctctctcttctttccatctagaggagttggtttaagagtggtgtatttggtggtgtgtgtctgtaagtctgctgttcgtgtttttggggtttcaccccttttctcttcttaatacaaaaatacgcagatctcctgcgtattcaagaaaaaaaatgatggagcctgtctcttggaatctgaaattttataagatcatgaatgtcatagttgatactgttatgtcggtgtataattttaccttgttctgattgagaacacaattttattcatgtatcactttcacatatctatcacatgagataaggtttttttgatcaatcaatgtcaatgctaatccatatattttattgtcaggttt

SEQ ID NO: 8997 - DNA, 879 bp, Zea mays
  Intron number 1 from transcript GRMZM2G089357_T01 (locus G RMZM2G089357) derived from phytozome v7.0 (chr-ID 5; pos 2 04897187 to 204898065)
cgcagcggtggcccacgctgccacgcaccaacgaggtacccctatgcctatcccccacgtacattgcattattgtttgttcccatgagacgtgaacacagtaagatttgcacgctgcaacgtagaaacgtgatttgggatctcggttcgatctcttcttattgccccttattaaaattacgatctaaatcgtagaatgcctatttgttttaagatcgcctagctcattgattactcgccttttaaaaagatcgcactggttattctaatctagtgtgaacgcgcgccctagcacggacgaggttacatggcaattttagatgcagtttccttgccgttgcagagatcactaataagctagcttgcgtagtgaaactgctgttctccgctcataacggggaacaacgaacatacaagtgcgctggatgcaggaacatgatagacttttcgagtggcatctggagatgtttttttgacaaaaaggaggatacaatcagtgttattctaagcgttaaacgtacccacagataggcaaaaatggctgttttaaaggggctactaaacggccgtttgaatggaaacaatgtaccactgtagcgtttaaacgttctgtaaacaagttaaatgactgtttaggtgaacggtattatgcaattgaaagaaaaaaaacgaaaacgaagttgctttgccatgtttgtgccacaatagctgaatatcctgagcttggagtaatctaaatgaagttgatggttgttacgcctgcctgttaatggtactgcctcttgcatatagttgactattttccccccctcattgctaatttaggtttcattttgatgttccagaaaaaggcacggttcgtagagttgccggacgagct

SEQ ID NO: 8998 - DNA, 945 bp, Zea mays
  Intron number 1 from transcript GRMZM2G046288_T01 (locus G RMZM2G046288) derived from phytozome v7.0 (chr-ID 5; pos 2 10888753 to 210889697)
gcccaggctcagcagtggagcagagaagaagccaagtaggaaggaggtccttctcttttctctcctgcgtcgacttccttgtcttcctttacccccattgataatgcatacttgcgccattggttaatgcatatttgcgcttgctattgtgtatggccacaaaaaatctactagtagtgcttatgggcagaacagaaaagctctcgtaggtttctaatactcatttgttccgttatactgagaggcctctgcaggattttatctggggtactacactcattcagtgttcgacaatgggccgagaagtgagatagctggaaatcgctgcaagttcttgaggtccccaggctggataaattttctgcatacgatcaaatagttcattggatgaaatgtaggctgtagggataactttaacacacccattgacgcatcaaccaggtttacatgttgtcctgctgaacttgtgtcaatcatcttttggtgttgttctctgcttggtgtttgaatctgtttttaaacaaaactaatagaggtgcataggtatattgggggctcacacagataattctattctcgtgtgtagattttggaaaggaagaaggccacatatgagcttataagaaaagctgtagctgtgaaggaccatctagctcaattatctgatttccataaatatcagagaaatggtaacctacattgtcacattatcacccaaaacatctaacgttttccatgattgaaacaaaatttatctttagaagtcatggaagcaaattcgattgcaaaaccagtcatttgcagttgcaattcagcacagtacttgttgcttttcagtctagtgtgtgttctgttgttctggatgctgagtgattcacatcaatcttttttttcctgactggtctttcagtgtacctagagtctggaagtggtcatcaactgaga

SEQ ID NO: 8999 - DNA, 781 bp, Zea mays
  Intron number 2 from transcript GRMZM5G833140_T02 (locus G RMZM5G833140) derived from phytozome v7.0 (chr-ID 5; pos 1 0278375 to 10279155 reverse strand)
gccaaggaggaggatcgtgttgctgccaccgcagggtgaggtttatccccgttttccaatgaacttcagtttgagcctcttctttgtagaacccactacctgtgactattcagatgctgcaacatttacatgacttgaaaagaaagtgagaatcccaccaaccttggttttagcacttctcctatatgtcaggtgccagagtttttaatgatttcaggcaacactcttgtagtaactaattagtgtaagtaaattgttgttaataaatcatttttttgtctttgtctgctatagaaataattgttaattcccaacatggataagattttcttggatctataaattctaatgtgtttttttgttcccgaaactgaaaattgcaaaacgaactgaatctgcaattttagtataaaatatatgcaataactgtcgcccgaaaaaaaattcaggcacttgaattttagcaaaacccttgttttagtggtgaaagtgtatggcgctcatgccgaagcagatgattgtgactctagaatcgaaagtaaaaaactaaaattcaggcacttggaaattttagcaaatttgactacaggaatgatcttaagtgtcattttggtcaaaaccaccatagttttacttatgtcagaaaataaaaagatttaaatgctgtccacagttggtatctgaagttcataatagacaaatttgaattatttttaattgtttattatattttgagaataatttcgctgcttattcaacagataccttgggggagcatttg

SEQ ID NO: 9000 - DNA, 653 bp, Zea mays
  Intron number 3 from transcript GRMZM2G159586_T01 (locus G RMZM2G159586) derived from phytozome v7.0 (chr-ID 5; pos 1 87884103 to 187884755 reverse strand)
cctggccttggctcccttgtcagtgaacttcacaggtcaatttactatcaattcttcctctcatggcagaattttcttgtttcctttacttcggatgagttttttattttctggtaatctctttagaccataacaggtctgctcactatgatgaatgtcaagatattttaaagaaacaattgtggattttttatggtgatacatttgtaaatgagagacttgctgaatattttagttctccctagagcttataagaaaatatgtgatgaatacctatactgagtcagacttcatgattaacagaactattgtgtttacgtaaacattacctatatttgagttccagagtccagactttggtttttcggaagcttcagcttatccttacagccatgaaccatgagtttttttcatattagagtttcagggtctctaactgtaacatgtaatggtgtggcattttagaaatactcagatgtgatgattaatgagttcatgttgcttgtcccatgattgcggaaacaaaattagttagggacgaattcataatttactattttgtagtactagtcggatttccttgttttggtattatgtatgtttaaattgatatgtaatattactttggtactgcaggacattactcaaccagt

SEQ ID NO: 9001 - DNA, 988 bp, Zea mays
  Intron number 1 from transcript GRMZM2G133407_T04 (locus G RMZM2G133407) derived from phytozome v7.0 (chr-ID 5; pos 1 819187 to 1820174 reverse strand)
tcgccctgctcgacgcgctcggcatccacaacaaggtccttccttttccgtatcaacgttgacttcttcaattcctctcgtgtgtactactgctataagcctataacacacttcgtactcatccatcctctgtgaagtgtgtgaacatatatacaaacgcctctacttctataattttttttaattttgaaaactaactaaaacaataattctaaaactgataaaaatcatctactcatcttaaaactaataataagccaataatatggaattcttcgcatccgtgtttcttcgaaattaaatttgatttttttattaattacgatctcccgtacgtacgtattgtttgctatccagccttttgttccgaggttaaagtaacaagctaattaagttaaagttaaactaagttcattttactgtaatctggtgagtctaatcagtacaccaagctagttaataggctgtttggtttgagaaatgagttagttcattatcttctcactcctcactttcctcactttttttgtttggtttgtggaatggaatgagttgatccatcatcacctcattcctcatagttagttagttagtagtaatataaggaatgaggtcatcccaccaaatttaaggaatggacccatgatgcaccactatattttggatgtagtgattcctcaaaccaaacacccctaagtttctttctttctatccctaagtggtgcagcgtatggccaggcatccgagaatatccaagaatatgtgtataaaacgcacatgttacatgtacgatagaataaagcggtggttgtagcatcagcatcatcaatttagcgtgtgcacatatgtaatcaaactagctagcatgcatgcttatcaaataattgcctgatctctcatcggtgacacaatggagcaataatcaatgtttgtgcctgatctcatcatcggtgtttgatttgatttcgcttcttcacggatcggatag

SEQ ID NO: 9002 - DNA, 509 bp, Zea mays
  Intron number 11 from transcript GRMZM2G069198_T03 (locus GRMZM2G069198) derived from phytozome v7.0 (chr-ID 5; pos 43151029 to 43151537)
caggtttttggaacttataccttatttcagttctagttcgcaagttgaatggcaggttgttttatgatgcatattactcgaggcatttgatgttgatcagaagtaatcaagcatttgcttgcttgcaacattagtttgtttagctgttagatatgaaaagtacagaaaataaattagtacataactcttagatttgcaatgaacaagcttgggcttatgagtttcagtgccaacctccaaggttctcttggtcagctagattgcagagaaaaaggacagatacggggtaagcttaggtcaccaccattattaatgtctcccattatttaatacagtacgctgctaattgtcttcccttgtctcaaataacgcgttgaatcattttaattatttttattgttttgcctaaaggaaaactaagtaatcaaccaagcattttggacttgtgaaacttcatttgctatatactaacatttactcacctaatctaggggtttttagatcttcgg

SEQ ID NO: 9003 - DNA, 822 bp, Zea mays
  Intron number 1 from transcript AC184783.3_FGT005 (locus A C184783.3_FG005) derived from phytozome v7.0 (chr-ID 5; po s 87108537 to 87109358)
tgggagcggccgaacggaggggacctcctcgtgcggtaaggctcggccacgtcagccgttgggcatgggcccttggcgacgcgaggccgcgaaatgcatgttcccggaaacgccccgccgtatctttgattccctggatggatgcttctagagatgcctttcgtgtctcgcgatcagtcctgccacgagcagtcattgttagaacgataataataatgaactaagtcacgccatttaatttgattactagcgatacttttgttttcaagttaactcgaaaaatacgactatccggctggcagtagtagcttaaaagaatcacagttcgtttagcggctaaatatttcttttcagattaaagtccttctatggttcttttaaaagtaggattagcctcgttaaaaataactcggcaataaaaatataaggaaaaaaatgttatgccgtcaaagctaacgtataactatactttattatttttttgctctaaaagtatataaaatattaaattataatccatcatgtgtttagagatatagaaaaatgtctaagataggatttttctctttttttgtataggacaatttagagcttcaaatgtggtatgttagtagaataaacaataatatgaggagaaaaaacactgcagcctccctaagcccgcgcgcgcgcacacacatcttgctgtagcagtgtagctgcaaccaacctggtcaaaatggataacaagaaacaaagttacttttgataattgttgacccaattctttttcgcatgtgctatttagagtagagggatctgttggcggcttcggttacaaag

SEQ ID NO: 9004 - DNA, 792 bp, Zea mays
  Intron number 2 from transcript GRMZM5G842165_T01 (locus G RMZM5G842165) derived from phytozome v7.0 (chr-ID 5; pos 3 5569564 to 35570355)
tgacagaattgtgagcttgaaggacaaggtaggttttcccgtgtatgactgacctcatgtagtgattaattcttatttacaaatggtagtattgattcaggatttttttataactataagctcaattggatattattagtttgccttattgatctcccatatatcatagtgtcttggtcattgtactatggtataacattaaagtgaggctcaattgtctcactgctttaaactttttgtcccatttgacttggtttggaataccttgtgcccttgttttatttggcttaatacaatacaacttggaagcaaagaactaaaggcatccaactaaagttcagtttcttaaatatatcatccctaggttctagtgttgaatatttgtcagaacatctgttccctgtgccaatacaatcaactggactgctataagagttgttcctgtagcagtagtgcccttgtctcatgttttcagtatctcactaggattagtcagatataatggtggatttagttaccaaatcttttctgtgttaatttgttcagaggtagctgtattcatgtgcagtttttgtggtctttgttctttaaatttgaattttgcaaagtattgttttcactatattgtgttatctgaacatcaaatatacatgattgcttgtggttcaagttactcaaatactttagtagcgtgtgttttgtctgaatcctatggaccggcctctctcccggccgcgcggggctcgtcctggtggagcccaaggcgcgcgtcctggtggccggcggcggcat

SEQ ID NO: 9005 - DNA, 856 bp, Zea mays
  Intron number 1 from transcript GRMZM2G060583_T01 (locus G RMZM2G060583) derived from phytozome v7.0 (chr-ID 5; pos 6 4778547 to 64779402 reverse strand)
gtcctgcttgccccaaccttcgttctacagtacaggtacgccaatccatccatccccctttctccaattttgttttctgcgtcctgtcctgtcagattttttctctctcttttgtttctgtacatcatttcatttttcagctccgtatcgattgttcttcaaggaagccccttctctaccccctcctccctgatctgattatattagattgggatagatgattctcgtcttttctcgcctcttttttagtttttttttctaggactaggacctggtcaataattttgctatgcttccatgcacgactgatccaaggattacttttatgaagcattcttggattaatttcctgtatgtacctgacggtgtcaactttcaaaggggaaaacgatttctttctgcaaaatcagcgtccccaaacaattattctataatggtaaatttggatctgtaccattaaaagattacaacttcagatatatagcattgctatctctcacatgagtcaatgacatgtggagtcaatggtatatatctaaattgcaatcttttaatggtatagatccaattattctataattgattaattactactagtagcgaattccatgaattgaaaccaaccagagagcctttcatcttggctggtccgtgcagaccctccgagctcttgctgatttggaaagccatacccacaaaggaaccagtgatttgcatccgcaagctgattctgccactgtgtttgcttcaaacgatggatcccattcaaatcacaaagttttctgcccgcgtgctgatgaaatttccaaccttttttccaggggccttatacctcagggcaagcaggggcacctcc

SEQ ID NO: 9006 - DNA, 819 bp, Zea mays
  Intron number 1 from transcript GRMZM2G012464_T01 (locus G RMZM2G012464) derived from phytozome v7.0 (chr-ID 5; pos 1 34785021 to 134785839)
atatctttattatcgggactacgaaggagatcaatgtaagttcagtttggtccattttatctattttcctttcttatggtatggagtcaacaaatggaattaaatagagcccatgctaagtttggaccaagtcatcacgagagaaaggaatttattggagcacctataaaattggatgtggaagctcatgctcacattcagaagcataggtatgccagttttttcttaatctgtgagaagatatcttaggctccagatcaatgcccacattattcttatccacaacttctcaatatgttggactgtaaaagagcaaaagcgcctagctgcataatcctgcccaagacacacccagttgactgacacgttttactataaaaacattgttttttactaacttctccttgtagcaatgtaaaccgcttacatttcgtatgtctaagacaaaaacaaattatttatatacttctcatagtgtaagcccgctatcatattatttgtgatgcaaaattgtgctggctttgctttactataatctagcttagaatggcaacttacagttggataagcataatcaaagcagacagttagcaacaaatttccttgtgctagatattttgcaattttgcaacactaaagattttgtatttattcagtctagatttgtctttgtagctttataggcagcactgttcgtcgattcaagctgttagttaaatcaatcagggtccatctcaaaagtttcatggtgaaaatcatacactttgtgacatgtgttatgtccctatcttgtttcagtgactgcatctaaactgtgag

SEQ ID NO: 9007 - DNA, 783 bp, Zea mays
  Intron number 2 from transcript GRMZM2G100419_T02 (locus G RMZM2G100419) derived from phytozome v7.0 (chr-ID 5; pos 1 900119 to 1900901 reverse strand)
aacaacgcgatatactttaattctattcgggagatgtaagttctacttgtaagcggatctctcttgtcacctcaaatgatttgtttagtacaatgtggcattgtggcttctaattttggccactgttgagacgtgcaatgttttattccatgattccatatgtttgtagatagaaacagcaaatatgttttatatactaacaaatatgtcagcaaccgtgcggataatctttgatgatctctagtaaataaatggattatccagtatcctctgtgaactagtgcacatgtgtccaattttatgaatatcggtctgatcccatgagtgcttcatcaattgataaacaacggagagtgatcatggttctgtctgcttttgagtgttttcttatggtaaatttgaaacaaggtggatacaatttagcagatgacctcctttttgtaaattgcaaaaaaagattttcacaggtcataatttggtattggtagtaagtttaatctttttgtttcttttaatctaatatttgataataagtctgtcttctcatgtcatagttgcctagattcttgttactcttttctttctccctttttggtgcatgctaaggtcatgaacatgtctgcctaaatagtatagtgcaaaccttaggcactgtttatctttatgtttgtgtgagtttgcccatgtgctgttggctttttttggtgctgttacagaagttcttacaactagtaatttcaaaatcagcgttttctgaaacatcacattcatgttattgcagct

SEQ ID NO: 9008 - DNA, 533 bp, Zea mays
  Intron number 1 from transcript GRMZM2G320259_T02 (locus G RMZM2G320259) derived from phytozome v7.0 (chr-ID 5; pos 1 67608886 to 167609418)
gtcagctccttcaaggtcctatacaatatagtcctgacaacattgaaatattaaatgtcaagcagcctatttaatgcaggttttatgggctaagtgagataaggaagaatgatgaaggtaggttccctttgtaacgagttcaatccgtgcattcacaattgagccaagtttgtccagttagccttcttatctgcttgttgtgcactacaatctgttctgatctgtgaactcgatgttatctggtcatctgatgctacctatcctggttattttggaagtgcataggagtttttctctcgagtttggtatggagccatgtataaagaattctcaaataattttgatctattgcttgaccgtttttcagcactatgcaactgatttgagaatttttggtctgtttgctcaaaatatttagcttatgtatgatgtgttgcctctttcttttcctacaaaacatctatgagaaatttgttgaatgttcttgatttcctcaagaagcccaacgcaagtgagcttgtctccgggactca

SEQ ID NO: 9009 - DNA, 755 bp, Zea mays
  Intron number 1 from transcript GRMZM2G350393_T01 (locus G RMZM2G350393) derived from phytozome v7.0 (chr-ID 5; pos 3 808608 to 3809362 reverse strand)
tggtggctaaggtttttgggcacaaaaatgtcggtgtttcgtatctcgttccgacaagtaaatttattgtgtgcgttctagaatctgaagggtgtgtgcaaagggcataagatttatattggttcggacagaacgtcccctacatccagtcatcattaacttgcgctactgacactattgaggatcaaacttgtagtaggggctacaagtagtcgatagagggaggagactcccagatctcttaacggggtggaagtggagcttagaagctaagagatgcaatcctagttaagtcttggcttggtggggctccggtctcctggtcctcatcggtgcttctccccatgttcatccttatgggctcgtctcctcctggtcttaatgatattcttgacactgttttcattgatgttccgctgaaggaggtaatcaccaaatgttgcattactgatggagtgatcgttaaaatggctctgttatacatatcgtctctgtggccaaaggttgcctaacagtagcagttgtaattgtaaatagtgtcatctcgagaactgggtcttgttattctcatgtttaaattaaacttcatatgcctttgatatatgaaaccttgtggagtttcttccagttataactgtatttttagtaggaaagagttgaactttgtattgaagttcaaaacatgtagttcttcatttgcttttgtattggtgattgtaggatttggacttgcagatctcccaccaaggtctctg

SEQ ID NO: 9010 - DNA, 992 bp, Zea mays
  Intron number 1 from transcript GRMZM2G046587_T02 (locus G RMZM2G046587) derived from phytozome v7.0 (chr-ID 5; pos 2 00828130 to 200829121 reverse strand)
tttgtaaaaggtgctgctgcgattattcagtacttgcgaacatatatttgtttctttgtactaccactactgcactacaatcgtgtatggtttctttctttgtaaaatgtggtgctggaactgttcagggctaggttgttcatcttgtctcgtgcggagttgtttagaatactgatgccatctcttcctatatgtcttgactaagaccatgctagtttcgattcttctgacggctgctggtagcttgcatacagaaacgctgcatgtactaaatactaatccaaccgcgcccttgggcaatcccaacccatacatacatttattccacttggcattgtttattggcctctttctttcttctgtttgcagtagcgtagaaggccactttccggttgcctttatctgcttcggtatatggctttgaagttactcaggagaaagaacttttccgcgttcccaatttgttgactgtctatggctgcaaaagttatccagtttctgattagaatcgtttcctccctcgacagagcgagaaaccaagaacttctttgttcagttattagccacttggccgtgaggccatgaatatgcggctagtatttttttttagtgtagaattgtgtaagttggttgcaaaagtctacttaggcatcgcatgttgatcttaagcaggcaatacagatcaaaagcgatccttgttctggaaataagggaattgtgtcatcgtgggtagtgggtacaggtatggtgagatcagggacagtgagctagaccgaattgttcaaatgggtttggcgtgatcagaactgctactttcggctgctgttgcagctttgacggttccagttcactttaatatttcatttcatttgatttgattacctattgtttgagaacatactctacaaagtggcgtaaactatttaacttgcctcttatggtccttgaattatagaattgttgaattaacggaactgttttaaatcgtagcc

SEQ ID NO: 9011 - DNA, 501 bp, Zea mays
  Intron number 1 from transcript GRMZM2G332562_T01 (locus G RMZM2G332562) derived from phytozome v7.0 (chr-ID 5; pos 1 01299409 to 101299909 reverse strand)
tcgcgtgttgaggaaagattcggggttcttgaaaggtatgctctttccttcctctcgtgtgttcatcttttagagctgctgttagaattatatgtttggcatcccaacatttcttttgttttcttgaagggaaatttggtgaacttgtttggatttaaggggcataataagataagtagatggtggttgagtatattagtaagtggctctatgaattaaagaaaccagatcttagcataccttacttatgtgagttgtcatgtgcatggatttctaagctcaaattagcaccccatagtgatctgaaagtcactggaacatactgtgtggttgttactactagtttcctaatatatagggaaatcacattggcgttgatcatctaatttagaactagtcaagaaataatggttgaagatgactagcaaaggttatgtcaattcaaggaccatggttccagtgtgctaactgaagtttctcacacacagttgagtgaaacaa

SEQ ID NO: 9012 - DNA, 1043 bp, Zea mays
  Intron number 1 from transcript GRMZM2G067764_T02 (locus G RMZM2G067764) derived from phytozome v7.0 (chr-ID 5; pos 2 8784726 to 28785768)
ccgcgccccgcggtggcgctgcgacccgcgacacggtgcgtcgctctgtccctccatccctcgcctcctctcggtccgcgccgcaatgcgggtccctgcctcggcccaggcggcggcggcggcggggcagccttgctcgatctgttgccgccgttcacacggcccggcgttccgtcggggttcgcccgaggtagcagccgccgtggatacgtgtgctcgcttgcgcgatttcagcccgatgcctgcgcagcggtcgcggccgaggtctatctatcccgtgttgtgattgcttccgtttggtgttttactcgtctgttaggattcggttggttccgtctgttttgggactaggcccgcaacgttcaagtggttagtttgcgatctcgctgtattccactcccatcacgcgtcgcactgccacaccgtggcgcagtgtggccgtcgctgtcgagcatttgaaccgcgtcaaattcaaagcatttttaatgcgtctcagcgtctgttgtgcgtctggctgcctaatccaaaaattgcgtcaaatccgaattttcattccgtgtatgcttggccgcctaatccaagttcttaaggttcggtgcgggggaacggaattccgaattccaagcccgcttcccccaacaagagccctcgagatcggaatccgcgagtaaaataacccgcaaaagggtgctttatttaaaggggtatggtgacctttcctcttcgtgatctgtcccccacttcactgctgctgctgctgtttctgtttcacccttgggcattgaaggttggcttacttgacaggaaatgacccgtttaattgcatcttgtacaagtcttggggcgtttggtgggagagtttatttttttctcgttgatttccgttatcggggggcttccatcttggttcagttctgcaggctgtgtttgtggtagggtttcctgcttactgatagcttcttatagtgatagggttgtttctaaggactggtgttctttgcagatcagtgtgactgagaggggagggtttccagtcagtcatt

SEQ ID NO: 9013 - DNA, 1038 bp, Zea mays
  Intron number 1 from transcript GRMZM2G067764_T01 (locus G RMZM2G067764) derived from phytozome v7.0 (chr-ID 5; pos 2 8784726 to 28785763)
ccgcgccccgcggtggcgctgcgacccgcgacacggtgcgtcgctctgtccctccatccctcgcctcctctcggtccgcgccgcaatgcgggtccctgcctcggcccaggcggcggcggcggcggggcagccttgctcgatctgttgccgccgttcacacggcccggcgttccgtcggggttcgcccgaggtagcagccgccgtggatacgtgtgctcgcttgcgcgatttcagcccgatgcctgcgcagcggtcgcggccgaggtctatctatcccgtgttgtgattgcttccgtttggtgttttactcgtctgttaggattcggttggttccgtctgttttgggactaggcccgcaacgttcaagtggttagtttgcgatctcgctgtattccactcccatcacgcgtcgcactgccacaccgtggcgcagtgtggccgtcgctgtcgagcatttgaaccgcgtcaaattcaaagcatttttaatgcgtctcagcgtctgttgtgcgtctggctgcctaatccaaaaattgcgtcaaatccgaattttcattccgtgtatgcttggccgcctaatccaagttcttaaggttcggtgcgggggaacggaattccgaattccaagcccgcttcccccaacaagagccctcgagatcggaatccgcgagtaaaataacccgcaaaagggtgctttatttaaaggggtatggtgacctttcctcttcgtgatctgtcccccacttcactgctgctgctgctgtttctgtttcacccttgggcattgaaggttggcttacttgacaggaaatgacccgtttaattgcatcttgtacaagtcttggggcgtttggtgggagagtttatttttttctcgttgatttccgttatcggggggcttccatcttggttcagttctgcaggctgtgtttgtggtagggtttcctgcttactgatagcttcttatagtgatagggttgtttctaaggactggtgttctttgcagatcagtgtgactgagaggggagggtttccagtcag

SEQ ID NO: 9014 - DNA, 610 bp, Zea mays
  Intron number 3 from transcript AC211666.3_FGT001 (locus A C211666.3_FG001) derived from phytozome v7.0 (chr-ID 5; po s 41253306 to 41253915 reverse strand)
agctaagggagaaggtgaaggagcaacaagagaaggtgatcaagtttctttgcaattattttgatatagatattatactgcactgtaccattggtaatctttgtatacaagcagttttgtactatggatgaaggaatcgtttgcaacaaggtgtcaattgaagttcttctgcactctccttttgttttaactttgttgtgcaaaatgagatacattgaccttgataattacccaaataactaataaatgtactgctggtgacttaaagtaaaaagctaaaatcgatataggatatggcaacattttgtttgtacatcgatacacaagtttgtgccatattttgatgattggatttgttgctcttgctgtagaactcttccaaaaaatgtttaaatgcttctaagcttcatttaacttatggtgtgtacattatagttgttgactctgctataccttttcaacacctctttatttattctgctcttgtgtcacctaactctcgagtgagattgaccttactgcctttgtttgatttttcgatgacttgaacaactattttctcgatgtcttgaacaactagctttgtggtggggacattcatccacatcga

SEQ ID NO: 9015 - DNA, 918 bp, Zea mays
  Intron number 2 from transcript GRMZM2G064489_T01 (locus G RMZM2G064489) derived from phytozome v7.0 (chr-ID 5; pos 3 7073695 to 37074612 reverse strand)
tcttcttatttttgcttcgacacttatcacaggaggtcaggaggattgcatgctgattggcatttggcattatggtttatggttatgggaagcacctcaataactaattcatgtgtagaatagttcatataggatttacctagctagggttacttttgaatatgccattgattatgctagattgcccatttatacatatgcatgcgtcaacatcaatttggttgtgctggatcagttttgtcagagctctatttcattcttgcaagcaaatttccacaggtttaatggttgctagcttgtatttttcgtttcctatatattttacctctgtcctataagttttgattccttgatctcaatgtgagaaataccttcgatccaaccacatgtaacttccattttcaacaaatatagcatttcatctgtcatataaactctatctcatctgtccttttcttcctatatattttttcttgcttcatataagcacccttgttctcattatcctataaatgggttgtcagatttatgcacatgaattgttatatgcaggggttggaaatctacagatggtagtcattttcaccttctattccagattctttgcattaactatgattcggcttcacaatcttgtttaaacaatatatttaacttacttgtctacttatcttgattcagttatttaaatcagtgattacttaagggtatcactgttactttacaacaaactgaacataacctttttatgtcatcatgtctgagaactaaatcatgaaataatttgttgtaggatcaactttttatatctccaagaatatttgggtttaacacaaatatttttagccacaaaacaaaattcttttttctttgtgaagatattcactacattgtacaggtcccacgaccttatcttca

SEQ ID NO: 9016 - DNA, 886 bp, Zea mays
  Intron number 1 from transcript AC195340.3_FGT001 (locus A C195340.3_FG001) derived from phytozome v7.0 (chr-ID 5; po s 5434669 to 5435554 reverse strand)
gctgggaactttactgcctcgagcacggcatccaggtgcgaccggctcgtattctcttccttgaaaagcatctccatcaccatcttcgattgttttctgatctgtcgtcgaggagtgctgcaatttgcagttgcagggcgttagtactcgaatcggggtgaagtactgaagtggcttaggttagggtttttttttcgtcagatctgttgctagtactactaggatctgaaatttcctgcacgatttaagctgccaccatcctgtgttttaggtgtatcgtggatttcgtttgttaatactttgcggcagaaataacaggatgttccgatcgaatttggcatctcgtatttgttgatggtcacgccaattcttgacagattgcgatgtcgtaataagtcatctgccgttccgtgaccggtttggatctggtttgtgtgtggatgaactgcgctatctttgtttctgttattgtcgactaggaattgattgaattcgccttttactatttcgtgaatcaagctctgattctgtaacttttactcatgttgttttcatttcttcggcctgatccaaaattttccagtggaacgatgctttcttttgtgctgtacaactgcaatatttcgtgactcaagctctgattctgtaaaatttacccatgttgttcccatttctcagatctgatgcaggaatgacgctttagttctagtttgtgctgtgcaactgtaatacgactgtactgaaatttctctctcctatgaatttgagatgctcgcctgccttctgattcaaatacttattacactaatggcacctcgcaatcatgttcctttgatcgttttatgatctgaaccacattaaacacctttctatttcacgcagcctg

SEQ ID NO: 9017 - DNA, 992 bp, Zea mays
  Intron number 1 from transcript GRMZM2G435438_T01 (locus G RMZM2G435438) derived from phytozome v7.0 (chr-ID 5; pos 1 25701764 to 125702755 reverse strand)
cggcgacgaagaaggagccccgctcccacccaccggtgtgccgccactccgcatccttgcgcgctgccggtgtttcgtggtaaccgctcctctcctcatcctcctctctctctccaaacaacacatccgtgcatgtaaagccaagttatagggatttcatttacagttcattcgaaaaatgtcactggttatgtttttctgtgacgataacattgattatttaggtctgctaaaattagggaagctatcaacactcaattggatgtgaacctgcaaaagtaacatatatggtcataacattgcaaagtaacaaaattttctgttacctcaattggatgtgaacctgcaagagcatccaacttgaaaccgctgccaactctctgcgcattcattctatcattttttcagcttttagatcggaagctaacgtcgtttgtctattggctgttgaaggttgtgctgctcttggtaaattgttggagccacaagattttgtagctcccatactttcagatattgtcaatttctcccaggtacattgctcccatgttggctcgtagttccatttttgcagcaagtaatttgctttctttgtatagaaaattgctgcaatatgtatataaaattggttagttacaatatgtacagaaaattggttagttacaatatgtacagaaaattggttagttacaatctgtcaagatatggttaggcactgcttttttttggatttcatagcatagtccccatttgtaggtggaattccccttagattacatgtttgtacttctattttgaaacaacttgtagatatctaatgcgctggctggcatatctaggaagaatatctaaatctgaaattttatgtgagggcctgaggtgaagtctcctatgtagctaaatactttttccttctctatttcagttcttctaccagttgaactttgctaattgaaggtgcaaaagtaacttcgacagcaacaaggtgagtg

SEQ ID NO: 9018 - DNA, 867 bp, Zea mays
  Intron number 1 from transcript GRMZM2G000753_T02 (locus G RMZM2G000753) derived from phytozome v7.0 (chr-ID 5; pos 4 2657712 to 42658578)
ccgagggaccgtccccgtactccggtgatcgagcggtgagattcgtacgccctgctttgccctactcccctgagatttgccccctccatttctcgtacagttttggctcatgctctgccaatttcttgattcccgtgcgaagactacgcgccaccgattaccacctacttgttctcatctgattggatttaaattggatcttagattagctacaactccaaagatgcgacctttgctggtgaattgtggctgagctgggagaatctttgttctgctcttttgcgcttcggttttctttttatttttattttttggcaaactagattaggaccagaagatcgaatatttcctgctttgcttcatccggcagttttccctcggcagtgattaattgctcttcttttcctaactggactccttgtactaccactgtgtcacatgtcacatgagctaaaattggattagattctattttgaggccctttacctttctgatgaaactgctgtattgtatcagttttctttatttccgtgtactgggtaactctgtgattatgtcaccacaagtatagctgtagaattcaattgcgtgcatatttagctcaacgtcttctgagtaatgtaataccaggccagattcagaatcttataccgcatgaattctctaggttacaccttaaagaactagcatttttaatttacggcatgtccatgtgattgtgccgcggccagacattatgaatagaattggggaaatcaaaagaggatttaatggcctgtttcagtttcgttccttttgagtttactttcttttgtcgacatgtaaatttagactccggcggacatacgggatattgtcactccatt

SEQ ID NO: 9019 - DNA, 522 bp, Zea mays
  Intron number 1 from transcript GRMZM2G167862_T01 (locus G RMZM2G167862) derived from phytozome v7.0 (chr-ID 5; pos 7 9964833 to 79965354 reverse strand)
ggtggaattcttactacatttcgagatccacaggtatatgtaaattatctcatgtaaaaatctaaattgaactgcaacatgattgtattcctagttaattgtcatttccatgtttgagtcataatactattccataaacaggtgagcaacattcttttgttctggagagggggtttgctaaattgcataggaggatatcacagaacaaaagaaaagaataatccaccttccctgatcatcatcctcactattttctttatgagatatgaagaaatggcatatgacatgtttcaaaattagcttcactaatgaacattaaacatcaaagggatatatcaaaagactagaagttattttgaccaacatttgctttagtcacttgcagctacagtatggttatagataatagtgatattcattgttaagccattccaaaataccctattttttagtttcatcaagtttcgtttgtttaacttgatagttttcctacaatctatttaggatccaacagcattaggt

SEQ ID NO: 9020 - DNA, 794 bp, Zea mays
  Intron number 2 from transcript GRMZM2G016393_T01 (locus G RMZM2G016393) derived from phytozome v7.0 (chr-ID 5; pos 1 48603924 to 148604717 reverse strand)
aaaatctttgtggcctgctatatcttgcccgacaggtaatttcacgactttgatgtatcaaatattacgattatctgtactagttcaacacagaatcaggtattgcatatggataatttttctccactgctaattgtcatccgactgacaataaacgatcgccagaaataatactgccatttgtagtgttactcccttgcaacttgcaagcgcatcggaatgatgtggttctggtcattgtttaaatttcacccacgtgagcactgtatgccctttccccttcactcacctggcaaacccctgttctatggaaggatccttgtgccaaaagacataagttttttggatcttgatagtgactagaagtttgggactgaacctgctctgccgtttaatccattggctgctagagcagccacaataagtctatcagcatttagaccatttggttttggcttcttcaatggcaagggcaaaaggcagaacaagaaacccaacaatctagatcagtcccaccagaagcctatattgcattgtacttggccttaaaatagttatattatattttacttgaatttatgtttatctttttttatctgtttggacagatctctattaaatgtcatgtgctacaatcgttaggtctattaatagatgttgctctgtctatctatccatttacattgctggaaatttccatgccctttcatagtacgccttatgaaatgctcactgctttttttattggtttgtgtgcagttcaagctctgcaaggtgaggtttgttcagtttgg

SEQ ID NO: 9021 - DNA, 541 bp, Zea mays
  Intron number 1 from transcript GRMZM2G024653_T01 (locus G RMZM2G024653) derived from phytozome v7.0 (chr-ID 5; pos 1 75693352 to 175693892)
aactttggtctttggctggcaaatacttgctgcaggtgagcttcgctctggggagttccttgccatgccttggtttatttatatataccctcttgcttcgttagattatgaaagtatattttaaggcgccacatttccaaactaaatatttagaaaacttagtgatggtcaaagtttcatgagtttgatctaaaacatcagtcatttgtagctctaggggattagtagatagtatcattcaaggtcatgtgggtatcggcaggataatttatattcactataaccatcttcaactctattttgtgcaaatgatatgtctggtttaatgctgaattgatatttggcacttgagttgtgtacttcttctgtggttttatagttttcctgattgaacaaagaccatgtgctcgtctatgttgagttcatgcttgttattctgtcaaatggcaacttatgactgagcatcactcagttacttgtgtaaataaattacttatgtctaggcttattattcatttttcaatccgcagagctcctgatt

SEQ ID NO: 9022 - DNA, 821 bp, Zea mays
  Intron number 2 from transcript GRMZM2G076437_T02 (locus G RMZM2G076437) derived from phytozome v7.0 (chr-ID 5; pos 5 8143884 to 58144704 reverse strand)
aagttctaccggaaccaggccgaggccgcacaaaggtgaaatctttactccgcacgaccacacaaccctcttccctcctttcgttgctctcctggatgtttaagtgctgatttatgtggaaacaaaagctgctcagcttttgttcaatccgatccagattgaatgctaagcgtcgtattcctgaaccaaacctggaatggagcttttgttccattcgatgcagtaccgttgtaatcttgtagattaggattctgtctgcaacttcgcatactgcatgcccacccactatctaacctggttaggcgtatgttgatgctgcagctcttcatgtcgtcatggttgcaattatggttaattgaaacggggaaagttgtttaagctgtctatttcagtatttcaaacttgattcaacatcatttgcagtttggtacaatgcctaaaggacctggaggcatcattaactgcatttttatgttcttcatgtttaccctctgggtctgggatgcctatctcaaattcctatcatttcttgtcatgcctactgttggtgctaaagtaaaactgtttgatgcaattcaaagaaaagcctagacattttcaaacttcagtgttcaatccatacaaattgatatattggtacttgattggaaaccactccatttttttactggaactataactatgtccatgtttgttccttaaaaaatgagtttttttttgtacatcttgtattgtgaatacctgcagttatattgtctcagaaactgtattttgctattgaattacttaggcatagctgggaactggatacttggataggg

SEQ ID NO: 9023 - DNA, 306 bp, Zea mays
  Intron number 2 from transcript GRMZM2G396160_T01 (locus G RMZM2G396160) derived from phytozome v7.0 (chr-ID 5; pos 1 15395438 to 115395743 reverse strand)
cctttgttaaggtaaaccttatccttcagttacaaatacttatagttaatgtgaaggccataattttatggtcctacaatgcctgcagtcctaggaacttcttttggtgggaagccaattccttactgatctaagggataacatttattgtttgcctgttaagatgatggagctggctggacaacacggtcattctgggtattatattatcatggtatgcttttctttttttgataattgaatacttttctggatatttgtttttgaagaactatgcataatttttaaatctccattttctatctc

SEQ ID NO: 9024 - DNA, 703 bp, Zea mays
  Intron number 1 from transcript GRMZM2G081826_T02 (locus G RMZM2G081826) derived from phytozome v7.0 (chr-ID 5; pos 1 83482519 to 183483221 reverse strand)
ttccgtccttgtccaggtatgctcttgtttcttcttgccctgcctgcctccattgatgcagtattgttcttggccagcttttttaagctggtactctcggttttgttggttttcttatttttaccattaattatgtttttttcagttttgccatcatgttttatagcactagaagagtaaaattaaaaaaaaacataaataaggataaaaatgaggacaccagcaaaaccagggcactaccttaaaaaaccatttattaaagctttctcaaattccagaatttagttactccatgatgttatatacggtgtattatttttccttgttagatgagaattttgcgttgttgttcctgaagccaacacgaataccgttttgtgttattttgtattctgtgcaaacttgtggtttacctaactgctataagtattcaagaatatttggttggaacttggaaccagtttacaagttcaaaacctattcgactttttgtactactgctaaacggttcaacttcttcatttgggctggaaagacccaagagaccagtacttttgaattaatatcagttgattttatttagtttactaataatagctaattttggttgtggttaatggcatcgatagtacttaattaactgacgtctgagttatatgttttttctctcataggtggacaatccgatacaagcaattggggc

SEQ ID NO: 9025 - DNA, 879 bp, Zea mays
  Intron number 1 from transcript GRMZM2G303419_T01 (locus G RMZM2G303419) derived from phytozome v7.0 (chr-ID 5; pos 7 7572039 to 77572917)
gagctactccaagaactgtaggcgtcaagtgatattctatcccttttcttattagaatatgactatattttatgtaacatgcatgtctttcgtattcaacttatcctagctagcttactgcaaatgcatacccatcgagttggtttcattcttctcatggaaagatagatgggaaactatctttatgactagtttgggatcaaggacattggagtggattaaggtggttaaaatttctttcaattcaaaattacacaataagagggttttagcctatctccaagagattctttatttttactctttattttactctgtatttatctttttataaagtttacactttatatataacatctcactccaatagaccatctatttagtttgactagtcagaggctaaatttaactagtgagtgagccaatttaaagaatcggatagcttgacgagttaaatagtatgtctgttgaagagttattttgctattgggtagttaaaatttggcttcacgagccatttggctagtctcttgtacatgtttttttagataatggaaaccaggttctggctttgtcctccacaaaaggagtgtacagccttacatataaactgacatcaaaagaccagcactctcaacatagagtgcaatcttacaccacaaacagatatactaaaacctcaaaacgtctgttcataaaacttcaaccaaaataagaaaacagttgcatagatatgctttcgatccgtcgacacgtctccttgatttgcttttaatctcctctaatttacttgctcccagactaacccttactgatttgattccttgttcttgcatcgacgcatcctatcagcaaatagctgtccgcgagactaagcca

SEQ ID NO: 9026 - DNA, 1004 bp, Zea mays
  Intron number 4 from transcript AC233960.1_FGT003 (locus A C233960.1_FG003) derived from phytozome v7.0 (chr-ID 5; po s 199979892 to 199980895)
cctagcattccatctacggccagtgacaatacggggtgagtaggtgtcaaaacccaaaatcatatcctgcatgcttcctttagcatcagtacaaaagaacatgcattcgcggtctccctgagacaccaatagttctttactaacaatctagaagctcgattatgttgcattagcaaaactaaaaaggaccaatggccatgaagtacaatagaacgaaatagcagcagcatgcagtcggcatgctctgaaataagatttgtgtatcagacatctatagatcgtgcttttttcttttttgttgaaaccaaaagttatagatcatactgtcgataaaatctacatttgctatttgtggtcttttcttgcaaaagacaaatgtcttgcaaaattcttaatcaaagcgtgcttatttaaactgtactggtcgggtaatgatttagaagacggagtcttacgaaagggacgttgacctcgcacacgaaaaaaaaagaaagggacgggactagtttgggaactacatttttctaaggtatttctattttccagggaaaatgaactaattttcctttggaaaatgaaaatctcgtgggaaaacggagttctcaaactaaccctaatgtgtcaaagcctggagttgtggcgttgattacttgattaataagctgcagaaggattttttttaatgctacaaaaacaacacagaaacagcgggtaatgaagtgatatatgatataagttaaatgctgggttaggatttcagaatcggactgtttcagtatttctgtcacccaactggagcaaccatgtctgctaggctgcatacaatatacagatcactcactgtgatgtttgaactacttgtttttagagagaaaaaaaaaggaattgtttacaaatggtttccatttgtgtaaatttacatcattcttcatctctgtcacggttctcccatttccgttcgccttatcgtttctgaacgtggatcagagaaacgccacttgcag

SEQ ID NO: 9027 - DNA, 867 bp, Zea mays
  Intron number 1 from transcript GRMZM2G147894_T01 (locus G RMZM2G147894) derived from phytozome v7.0 (chr-ID 5; pos 1 12412827 to 112413693 reverse strand)
actgatgtaagcaaacttatagccttaataattcctgctttgagctgcttcgttcaagatattgcagatcgcatctgtaggcttagtggtatttagtttgtggaatgaaattgtccattatcatctcactctttagtttttttggtttggtttatgaaatggaatgagttcatgcatcaccaacgcattcctcacaatgtaaggctaataaatagtactgttaagtcgttctactaaatttgaggaatgaattcatgatacatcaaccggtctataatgttgtgattccctaaaccaaaagactcctaaatatctcatgctttatgatgccctggatgctgaaagaacaggttctttgactgcaaactagcaagcgtgagataaaaatgactatctcaccatagtcagttttaacagttgatgtatgtatgttataaggtatagcaacactattgcacgagcatgataataacaacgtcacttgcctgcagtaccaatttatatgcatacttgcttttcgatcaaggcttggtttttcgatggtgggcgctgaaagcgctccacactgatacttaatgaactcacaacgtttcttcgcactaccataagtaagaaagtttggctacatgcttcagatttagaaggctcccagtttagctctccttctgtaagataatatatatataaagtatgtatatgatttgatactacggggaaagcatgttgttctcttgctgtggtgaaataagtttttgtagttcaaatctggtgaaaatagtctttgttatttctttataagtttgtagcatgctaactatgttcaaccgaagctataactacattttccttttcaggaacctgttgctg

SEQ ID NO: 9028 - DNA, 909 bp, Zea mays
  Intron number 1 from transcript GRMZM2G565424_T01 (locus G RMZM2G565424) derived from phytozome v7.0 (chr-ID 5; pos 7 6388194 to 76389102 reverse strand)
aaaggttatttgttggttttaaatgttaataattgctacgaagtagcacaatttatatggagcgcatccaatttttattggtgcctgactttagcaatcactccatattttgatctatcttttttataagtttgagttcatgtgacttattttagaaacttgagctcacaaactttctcttatttggtctctgtatggtggaattatattattttataatttctgttcgttcagtcagtcgttgtgaattctcttctaatcgctcactttattggccgtgttgtaccaagacatattgcatggagtaaacaataacataagttagccaaattaaaaaaatattatacgaagagcggagataatcaataaaaaatcttgaattttttttggatagtttatgtgggtattgttgtaagccgtcgcaacgcacggacaaacgactatatatatatatatatatatatatatatatatatatatatatagaataattcgggagcacgttaggtttggattacatgatgttttttcccacgcaacaagccaacaacaagaatgcaaatatctcatttggtaccgggtaaccaggttagagaatctccaagagagtctttaaacatggtcctattttaaatatagggctcaaaaccataaaacattcttctaacagcggccctattttataaaatttcatcaaatggttatagggccggtctctcgggtcctaaatatagtacccatatactggagccctatcctcattttcacttaacctctaaccatttatttcctaaatagcattatttaaggcctgactattggagtaaacatttcttttgagaccctaaacattctaaatatggttctatttcaaattttaggactctattttagggtttgttattggag

SEQ ID NO: 9029 - DNA, 699 bp, Zea mays
  Intron number 1 from transcript GRMZM2G064171_T01 (locus G RMZM2G064171) derived from phytozome v7.0 (chr-ID 5; pos 1 23681266 to 123681964)
tgctggagctcacaaggtgtcgctgctggagcagcgtacgacgacgaaggcgctgtggcagcacctggtgctagcgctacactactactgaattttgtgatgttgcaatttcatcttttattttgttttttggggtgatgcaaaaaaacaaaactcaaaagtctactaaaggccataaattgagcaatgttgctgcttcaagaaacaaattatcaacttattcccatctaacctttgatgggatttggtttagcattaaggaattctcaaaatcaaaatagcaggtacttgtcacgatctctactgtgtttctttgaggtattcacttttctatttgaagaacaccactaatcgagtttatttttcttagtttcaagtgccagatgatgcaaggctttcagctagaagtgtagctgttctctgaaatctttgccaaaaggttaatttcattctaccttgcatgctacctgtttagcatgatcgttagtttattcgctaacaaaaaactttgccgaatggatgacttccttctgagaagactgaactgaataattatgtcaaagttgtttcagtagtttggcctaatcagtattgatctatggtgtatagtctacaggttgtactatatggttgattgttctgatttcgagcttggttagtctaatgttcttaattatggatgatgatcctttgaagttc

SEQ ID NO: 9030 - DNA, 642 bp, Zea mays
  Intron number 2 from transcript GRMZM2G010861_T01 (locus G RMZM2G010861) derived from phytozome v7.0 (chr-ID 5; pos 1 603359 to 1604000)
gacgttaccttagtgaccttcaggtacgcgaagttgaataaaacaatccctaacatcataggtatgcatcctaagttgtcagtgttagctatgtcttggaagcatgtgactctatcactctaagcatatgatgttatactgcttttgatcaaaccatctttaaagagactgccttaatgcatacaatttctgggataatcttcaatttgtgttcatgctccctaaccttgaccttttccttatattggtgtggtttcaacgtgtgtttcttgccacaatgattcttcgatgtgcttccttatgccaaacttgggctattatactcttatgaaattaagtactgtaactatgtgaagagataactgctgtgcaaacaaatttctatatatttttggatattacctgcatcttaattatcaagctaatagggtagcattttcttagccaaaactgttaagataatattaggaataaggagtttcaagggggtggaaaacaaattcgtttaaatgcactagcaattcaaatgtcacctgaaagcaggtcagcattaagtattattgttctaattagtgatttttatttttcataatttataccaaagtaggctttggatctgaagagtttgacctggtccaaggt

SEQ ID NO: 9031 - DNA, 668 bp, Zea mays
  Intron number 3 from transcript GRMZM2G536668_T01 (locus G RMZM2G536668) derived from phytozome v7.0 (chr-ID 5; pos 1 94171820 to 194172487 reverse strand)
caggaaagtctaaggcccttactaagtacttccaagtaagtagagcaatcaccatcacacggatttattcaagattttttgtgttaagccaattgttcgttttcatgtaattgttgtccactaatattttattgaataatttgtgtgtcgtcgcaacgcacgatcattgtactagtagtattgaatgctccatttgtagttcctgtgatattacagtagtgcagtctaaaatactgaaacattgtacactgtaataccctgaaaggctgggccaatcaattttgactcttctttacttgggcatgtgtttattcaaaaaattcttggtagctacggtctaatttggactctatattcatgatttgacttacaaatcttcgtgcacataagtgtgaattggtttctccacacatatagtgatacaaaggtgtggagcaagaaagagggttattgccccattttaggtgaccaatatgtttccctaatcaaaatgcgatcagtatatggctgatgcttacatgatgtcagttgcatggccgtacaagaaagtaatagtctatatcttgtttatgtttagatttatatgagccatcaacttaatgatgattaacctttgatttgcaccagctgaagttggtgcataaggctgcaacaccgcctagtggagg

SEQ ID NO: 9032 - DNA, 534 bp, Zea mays
  Intron number 4 from transcript GRMZM2G462099_T01 (locus G RMZM2G462099) derived from phytozome v7.0 (chr-ID 5; pos 2 8064961 to 28065494 reverse strand)
tatattatttccgtggaaggaactatttggaggtagtaagctataagcatgccatttgttagtttctcttgttgcattctactatcatttgtgatccaaatgcagccttcaattcggtgtatttttcattcctactggatttgtggcggttaattgacttgttatgattatatttctctctacatagtctacaacggcaaaagtaatgtcagcttggatttcttttaccactattgtgccttcttctgttgttatttatcccatgttacatctgcaaagcataatctgtgatgaggacaacaggtattctagaggtcgcttttgacttgtgacctatctgtcggatttaaacttatgtttctaacctcactcgtgtgggagcctccggcattggatctgcctttttttacggtaacaacgttgcatgtgacaacataaataagttttttgtaaccccaaaaggtatattcaactctgaacagctttccctgtaattttccagcttggagctgatatcggttcatcaacagtggc

SEQ ID NO: 9033 - DNA, 677 bp, Zea mays
  Intron number 1 from transcript GRMZM2G589349_T01 (locus G RMZM2G589349) derived from phytozome v7.0 (chr-ID 5; pos 3 6310851 to 36311527)
ttttgcttgcaatattgttgcctttgttttcccaagtatgcacgtgcaggcttgtcctttttgctacttgatgaaacaaacaaagtatttataccctgaaatttacaacttgttgttttcataacctgaaattatggtgtgctagagttgctggaggcaaagcataaataactgaatataaggacaactcatggactaccttcaatttttttcttagctatttaggacccattgccgcaacatgtttttaggctttatcttacagattgaaggtaaatagaaacatattcctagaactgtgggtattccttagaatgtgtttaatatccactgtagcagcatgattttaggctgtaatataattaaactcagtttcaaaaaggatcaatcacaagcacatcatctattgtagcagcatgcttttagattgtaatataattaaattcagattaaaaaagggatcaatcacatggatgctgtctcgaaagaaaaaaataaacccacggtaaacagaatttaccatccattgtagcagcagcttatagactgtattataattaaattcagattcaaaaaggatgtcctctcttcatatatagttagatttatctgtgcttatctttatttgtttatgtactataggttggacagaaacgtggaagattgcttgcagatct

SEQ ID NO: 9034 - DNA, 556 bp, Zea mays
  Intron number 1 from transcript GRMZM2G457881_T02 (locus G RMZM2G457881) derived from phytozome v7.0 (chr-ID 5; pos 1 1946345 to 11946900)
gtaaccttgttgcttttcgttctgaaaaagtatttagccgtgttttgaacctgttttgacaaaatgaagcaatgtttactgacgagtacaagcaaattgttggttctctagaaaaaattgatttttgattaatccatttgtttttagagaatttgcatttatagttacacttgacctagctaaaataccatcttcggaatctgattgatgaagaaacggaggcgcatcatagtactacaaattcacaacaactatcatgttcatttttaattcattgtcgtcgatttgagctccagtacaggtagcagaagaatgttctatcaaaacaatagtgagagaaaaaatgctctagaaacaaggtagatgcaaacaacttaataacactggagactgatccatgagaaaaaatgtcgtccatatttgtggctcacccaattcacacgtgcgaagacagaaacataattccaactttcccgctgcagctgctcggcactgtcatcggctcctttccacgctcgtagccttcttgaacgtcgcggtgacgacagactcatta

SEQ ID NO: 9035 - DNA, 970 bp, Zea mays
  Intron number 1 from transcript GRMZM2G101502_T01 (locus G RMZM2G101502) derived from phytozome v7.0 (chr-ID 5; pos 2 16160068 to 216161037 reverse strand)
cgccgcgccgcgccctcctccaaggtctcgtctcgcttcactgaatcggctttgctactcttcaaagcttggtcgaaggctttagcagcttgtggatttagcaacagatttctggtccctgctgctttgcagaactaatcgagtagatggagtggataccatactgtgcttcactaatttggtgccttgattgcagcaccattagtcctaggtacttcgtcggttttgttccaaactctagtgtccttacagttcatactagtgctgaggtgatgaactgacgatactagaaaatttaactttgatggattctttatgttattcaccaaattgatctcaacaagctgcactagttcattttgtgctagtgctagcagtagttgtttaatgttaataatacggagtatttcataacacttgttttaggtttagactttggcgtttctgtgagatacattttggtcagcaccaaagaaagaggttagcattataggagctgccaaacatattaccaatatatttgctattagagggtttatctcaaattttggtattgtttcaatggttgagattattttatatttattgctatgtagtacatattaaattcctgaaagtttggatgactgccacttttttgttcctttcctgctatgtataactgtgagattatgttgttaactttggtctgctactctgctgtcaacaaaagccattacagacaaacctgatatctcttagatttcttttagtagtcattactgaaaaagaaaactgtactatactagttatgcaagaattgaaaagcacatcaagggcctgattcgcaaccaccacttttgcgctgctagctgtgcatattcagatttctgcaatttcatgtttgagagatcaaaagattgtgcttaagaaaacctgacatattttgtaaattgttcagctgcaagggatccttctaacttgcttgccc

SEQ ID NO: 9036 - DNA, 831 bp, Zea mays
  Intron number 2 from transcript GRMZM2G101523_T02 (locus G RMZM2G101523) derived from phytozome v7.0 (chr-ID 5; pos 1 78833382 to 178834212 reverse strand)
ggcacaaaaatagagctacaagaggttcatttccttttccttattcttctgatcactcacgtgtttcagtgaatatatgtgatttggttgacactactgctatgaaatatgtttaaatagtacatttgtggaaatcataatagcaatcaaggcctgttgtttaaaatctgactatcagcatggaaaccaatggggatgcagtttaagtcgaaatttggctatcgtcataatatagaacacatttgaccattttggatgcttgggcacaaggtttggactggttgttttttacatttgattatgctttatgggaactatatccttatgctctgaaacacagatgcttgtaatgatggtgcttgcagcttctcactagcgaacaattaaacagttttgacaatattttgttcatctcagggaaatcattttattctgtggtttacggtttaccttttgtcagctacaactacaagtgacttgcagcctaaccacttgcaacaaaataagtttgatctttgatctgatatacttacaaaatctattcgtacatatgtaaaggtgtaactttttcatatttctatattatacacagtattttgattatcattatattgcacatgaaaaattctcaaattacaatctatgggagctaacatatattgtggatttattcaaataaaatagtgtgttatgcatgcatgagactgatctatgataaatggtgcacaatcaaaccaagaaaactttttggtgttaccatgcagacatttttaatttgtaatatgtcatctatttctacagctaccacaaaatctgcttcgaaaccagagg

SEQ ID NO: 9037 - DNA, 389 bp, Zea mays
  Intron number 1 from transcript GRMZM2G477438_T01 (locus G RMZM2G477438) derived from phytozome v7.0 (chr-ID 10; pos 106390755 to 106391143 reverse strand)
gcaattcttcattcagcaataagccggtaagagttgacatttatttgatttcagtcacattattaacggtaaatactaaatgatcatgtttgtctcacgaagcatatattcataatttcttatatgttgatgtgcgtacaccagaatttcataaatgtatatgtatcagtttcttgcttgtttttttttaatttgggagcttcatctagcaataaccctgaatatgatgtcttgtaattgctccgaatatagtcagatatcataacaaaataggacagttgataatctgatttagttatgcatatctgcttatttttcttctaatgttgaattatacgaagtggctattaatctgatttaatctctattctctttgcagaaggaaggtg

SEQ ID NO: 9038 - DNA, 1051 bp, Zea mays
  Intron number 1 from transcript GRMZM2G044348_T03 (locus G RMZM2G044348) derived from phytozome v7.0 (chr-ID 5; pos 7 0023527 to 70024577)
gctcgagatccggtgactgatctcttcgttcctcggtgagtaaaccctacgttccacgggttcgtttcatgcagcgagatctctcatttctctgctgcggctgcgggtttcggttcgtaatcttactgtctgcgtcagtccagttagtttcgtgctgtgtttgttttgctgcggcctgcagattgctgttatcgtttatgccctgctaatctaacccgtacacccatggctccgttcgattatcctgaccccgtaggactaggcaatacaagttcatggtcttattctcacatatgcgttaaaaatgaaatgaaattatgcctctgggttttgcggaccagatctctgggagctgcttctgctaagttggtttcaggagacattgatgctgttaatcacgtggaaaatttgggaattgtcttatgagatgaaatacatcagaaccattacaacctgctatggcatgcattactgcatgattttacttggaacttgggagatatccttgatgcacttgtgggtttcagtgtgagtagctgaagcattccttgagcttacagtactgctgaacagaacactcagcttctggattggggactgtaaacgactaaacggaaaacaaattggataaaatcatgtctgttctattgttggatatttcttcctcggtcagccttactgattattccattgaaaactaaaacactagctgcttcagatcagaacttactctgctatctccttatttgtatgacgccggggttaacacctctcttgtgcatcatcatcttcgcaggttcactttgatattccaacaaaggtcacattgctagactcccagattggttcctaacaatgagggcacatgaacgagctgccagtttggctcttgcctgtacgttgattgtgcagttcagccatcactgcctttatagtgttccttaccttcttattttccctttgatataacaagcctgtgccgacctcagcagcatatgtattttacaaatatgcaggtctgagcttggctccacttctggttaacgtaaac

SEQ ID NO: 9039 - DNA, 998 bp, Zea mays
  Intron number 3 from transcript GRMZM2G300115_T01 (locus G RMZM2G300115) derived from phytozome v7.0 (chr-ID 5; pos 1 40460253 to 140461250)
aagcaggtatgccaccaccacaagtagtccaacaccagatcgattcctttattatcattagtttgcgaattggatccaatacttccttaatatcttcggttggttaacttcaaagttaggctctatacttgacgttgctctgctcaatttcagtatttgttctcgtcttggactgtactacattgacattgtgttcatagggaaccaggaaggatgaaacctttctatgcccataatgtgctatattctagctacacatttactaagacagccacacacggtaatctggaaaagttgtaacctttgcattccacccatttaagatcaaattttcacacctgttacttattgttcctctttccaattctaatatttgttcccctttatgctgaaattgatgctcacaaaaatatggggaagtcgacacttttctgtgccaataataatctatttcaggctcttcacaacttgggattacatactgtaatttggccaacaagttagccaattataaattgcattgcacattctttcatgtatttcttaccaagtagaaaacttcaattttgagctaagatcaggacgaagacctttatttgcatacactggaaagtctaatgttgtctgtccttgcacttgtctcgtcactataggttctagcacaagctatttgcttccatcacaaggttcctgggctttggatctatgcggcagcatgggaattcgattaaaacctgaacgtcgttgtagcacgtgcactgatgcagagcggtcttaggttctgccctcagtcagaggatatgtggatcgagtatcttcacatggagcttacctaccttaacaagctgaaggctcggaaggttgatcttggagaagatgtcaagacactacaaaagaacgataatgacgcaggccagtggaaagagaaaaaacaaggaactattaatgccattgaatgaccaggacgaagatcacaaggagctgggcttggctggaga

SEQ ID NO: 9040 - DNA, 687 bp, Zea mays
  Intron number 1 from transcript GRMZM2G139603_T01 (locus G RMZM2G139603) derived from phytozome v7.0 (chr-ID 5; pos 1 26601879 to 126602565 reverse strand)
gttggcacattcaaatcacccgcaacaagcagtaagttctatgaattaatacaatcataaacagtctcaacatgtaaggagtttgctggaaaggtacaaaaaatgaacaccaacataccatttccatttcttcggaggtaccagcatagggaggtagggtatatcaacatgccgagcctgcaagtttgaattaaaataatcctaaaattccatttatgcaaactaaaaaaaggtatcgattagaaaaagaaatttgcaatttgccatccctgcttttggcatatgagacaatgcccacagaaagaagatgatagaattgttctccatttaatcttttggttgccatgatcaataaatctattttatataaaaaaactgatgtggttggcagagcaaagtaaacttacagtgctttcaaacccctcatgcacaagatggtctatcacccaatgcttcttctttagcctcctgcaggttaaagagaaatatcacaaaaggacccttcatgcatctgcacaagcataggatggtgatgaaacaaggcatcccagtgcaacaacagcacatggaacagtgcaatacgattgtaaagaaaaaacacagccctacccattttctattataggctaacgtagcacatgcttaaatgcaggtggagaactatctggtgtttgatcagctggtggc

SEQ ID NO: 9041 - DNA, 908 bp, Zea mays
  Intron number 1 from transcript GRMZM2G033523_T01 (locus G RMZM2G033523) derived from phytozome v7.0 (chr-ID 5; pos 7 7700210 to 77701117)
gagctactccaagaactgtaggcgtcaagtgatattctatcccttttcttattggaatacaactatattttatgtaacatgcatgtctttcatattcaacttatcctagctagcttactgcaaatgcatacccatttggcttcattcttctcctggaaagatagatgggagactatctttaggactagtttgggatcaaggacattggagtagattaaggtggttaaaatttctttcaattcaaaattacataagaagagggttttagctcatctctaagagattctttattttttactctctattttattctgtatttatctttttataaagattatactctctatataacatctcactctaacaaactatctatttagtttgactagtcagagtgactagctaaatttggctagtgagagagccaatttgaaaaattagatagcttgacgagttaaatagcaagtctgttgaaaagagttattttgctgttgagcagctaaaatttgacttcacgagtcatttagctagtctcttggagatgctttttttagataatggaaactaggttccggctttgtcctccacataaggagggtacaaccttacatacaaactgatattaaaagatgagcacttccaacataaagtacaatcttacactacaaacattgacataaacacgacactcaacagatatactataacctcaaaacgtaatcctattcataaaactccaaccaaaataagaagaaaaaaattacatagatacgtcaacacgtctccttgatttgcttttaatctcctctaatttacttgctcccagactaaccttactgatttgattccttgttcttgcatcgatcgacgcatcctatcagcaaatatctgtccgggagactaggcca

SEQ ID NO: 9042 - DNA, 886 bp, Zea mays
  Intron number 2 from transcript GRMZM2G014577_T01 (locus G RMZM2G014577) derived from phytozome v7.0 (chr-ID 5; pos 1 06628537 to 106629422)
gaggagctcgcggtatttgctcgcatctctctagatttggcgagtttatatgctcgcatctcttcactgttggcagagcggcatgatttggcaagttattctgtgtaaccaccagttgagagcaaacccactagcagtttatgtgataggttggtccaatattttgagtgaactaaaaatagctggattgggtttccattgtgttcaggcagcttcatttcgaaaactatgtttcttaaaaaaaattagtcatttgcttattgcactgcacattgtgttttttctgccatttattactctattcgtatgtgaggaacacttacaatagctcaagagtacatctgtacatgcacagagagtataatatctctctaccaaatctattcttaaccagcaaaatgattatcctgttaatgtatttttgataattggtatttcaaccactaatacaggatttgctagaaagtgaaatttaggcttgaacaatttgggaaacaaaaagacctttttatacctgagttattttaatgggggacatcacaagaaacactgaatgggtgatattcacttgtttcactgttgatcatacgtggccaaacacttcaatgctgtataaacaattgcaatctgtcatgttatgcttgtgatacatcaactatttgtttcatgtttgtccttgattacttcacatgacacttactcttttaaacagttgttttcaatatttatttggcacttcttgaataacattacaaaaatagatacactgttatttgattctatatagtgtttcttacatttgtttaatgagaataatcaacatggtgttttttatgtatatgttccaacagatcagaatacaagctattcggggttttccacttct

SEQ ID NO: 9043 - DNA, 930 bp, Zea mays; identical to SEQ ID NO: 5813
  Intron number 1 from transcript GRMZM2G122199_T01 (locus G RMZM2G122199) derived from phytozome v7.0 (chr-ID 5; pos 2 3457463 to 23458392)

SEQ ID NO: 9044 - DNA, 725 bp, Zea mays
  Intron number 3 from transcript GRMZM2G063903_T01 (locus G RMZM2G063903) derived from phytozome v7.0 (chr-ID 5; pos 8 8502794 to 88503518 reverse strand)
gtgatcagatctcaacaaaagtaacaggaggaaataaaagaattgtggcacctccacaagagcgaacaattagagttactaggcaaagaattgctgaaataaaccaagaaactacccacagcttgtctattcttacgcaagccaattcatgtcctactacaaaccatgaatcgattgaaactcttgttgcttcttcgcatcctagttcaaattctaccacagatcatgacccaacccacaacatatatattgctacagagcataattctttgttacaggaggaggatgataaccacaatgttgttgaaggcaagtgggcatcttaactgtttagacattgagctatccttttgaatttgtttttttatattttcctgtatgagtttaggtatctagtatagctcaaatttgaacaaaattactcatatgttgtagtccgttttatgacaactaatgcttagctatatgcaacatcacttacatcaacaacatttttttgtcaagactaggaacaatagaaatcataccaaggagaaaaagtatgggcaagcaacttaaatcgttaagcagaggactgggaatgaagattccaatccagattactgaagggaacaaaaggccagagccaccttttcaagctgctaagtttgcatgagacgggggaatcacattgaggcaacacgttccaatatttcacaattggaaggagtacaagaagaaacaga

SEQ ID NO: 9045 - DNA, 961 bp, Zea mays
  Intron number 1 from transcript GRMZM2G312738_T01 (locus G RMZM2G312738) derived from phytozome v7.0 (chr-ID 5; pos 8 174708 to 8175668)
cggcaccttctccagcaacaagcacccaacaagtatgcccgcctcttttcttcccttcctgctgcgcgaaaccgagcagcacccaaagcgtaacctaagctatttggcccgccccttcgattcactttctgctgctcggtttaaacctaacctaagctagttgattatttgtaatgggacctgaactacttggaagcgtatacatgaattatacctactaactttgattctttttgcctaaaaaaactcatgagctgcttgctagctgcaggaagtctgggttttatttcggcacatttcagggcatttaattggttgtagcaatttggttcagataaaaatattctattcttgctacaaaacgagtaaacgttaatttaacccgtgaaactccgatagccagggtagaattgctctagggcaccctggattttaagatactattcattccctcattaaacttttgagtaaataatttatataggaattgattttttgaatgcagcaagttcttttgttcctgcatttcattctcttttgggaggacggaaccttgtttgaaggggctagtttatgttctggaggcaaggcacctaccccatatgttctttattctgcagtccaacagaaatacgcacataagagcccatacttgaaagtagaggactagaggtgtatgagattcaaatcatgacaaacctttgtttgtgtgtgcgcggctgcgtgcacaactcgtctgtgagcttaagtaactgtagcattttttcttcttcttttgtaccccccatttagcagtttccatggcgtcaattatagtttagcggctacgaaatacaagtatttttttggtatttgagtgagccccatgtggcctcaaatcaagtgataaaatgttgtctatatggagtaaatttttgatattagttgctgaaaagactatttctgttgggccgttggcaga

SEQ ID NO: 9046 - DNA, 667 bp, Zea mays
  Intron number 3 from transcript GRMZM2G364172_T02 (locus G RMZM2G364172) derived from phytozome v7.0 (chr-ID 5; pos 2 15982401 to 215983067 reverse strand)
tcgctgttaagcagttgaatcgtaaaggacttcaggcaagtgtttctcaccatcttttcttttcacccaaagaatatgtatgagagctgtgtatcgttgtattaggtataaaataattaggttttacaacacaagctgcagtagtttttgtcagttctcaccatcttttctttccttaccatttaaacgtagcaagttagtctggtcactgtttaatgttcttaaagttgttaaattatagctacatacaaaatgctattgttgtcatcgtcattctgtagaaccaccagtcttatttggacctagttatggattgtcaaactcagcatactagaaataaaccaaaaaaatccagtcttcatttcttcaggaaagtaaccatcaaataggttcacctgtttcagggaatgtacagtaatatattttaattttcttgtatttacagttccatgcttactgttctaggtttagtgagtcaactagtggccatgtagaaaagtagaaaacaaaatataaatccaagcatacctcgaaatccttgcaatcccacatgcttgatgagtcattttgaagtcacgtatgctggaatctaggtctagcttcctgtatgatttgattctaattaaatatgatctttctccaggggcagaaggagtggttaacagag

SEQ ID NO: 9047 - DNA, 713 bp, Zea mays
  Intron number 2 from transcript GRMZM2G364172_T02 (locus G RMZM2G364172) derived from phytozome v7.0 (chr-ID 5; pos 2 15983411 to 215984123 reverse strand)
ggatcgatcagctccgcctccgcaagataggcaaggtttgttgctccagttcttcctcatgcttcctcgtgtcctctccagtctcaccggttttccgtggagattgttccagggttagctaaggttggtttgagctggactcggtaggatttggggctgtccatagttacaggtttggtttctaggcttgtttgccctgttggtggttcatgttgcctgctttcttgcgctgctctccgcgtccgtgccttcagacttgttacggttgcagaactcttgcacatagattctgctacgtcagtccaagttaaggacatggtttttggcccagccttgtctgaattttaggttcgtttgagctttgtactgataattaaaggctcttcttttctccttttttttaatcaaatctgttgcagttcaacagccatggtcgctggctacagagccaattaggttctcacttgagctctcgttcgaatgcgaagtactgatagtcatgccaatttatctccactttctgcatctaataaattccaagcatttttaccatctaaaaaaactgaacctgcctacctgttcttgtctcacaccacctgttaccagaacattattttgcatgaccccaattatgtaatctttacatgtgttatatgaaggaagcatgaatcccttcctgattttgattcccagttttccactgcattgcagca

SEQ ID NO: 9048 - DNA, 613 bp, Zea mays
  Intron number 2 from transcript GRMZM2G119890_T01 (locus G RMZM2G119890) derived from phytozome v7.0 (chr-ID 5; pos 9 7173014 to 97173626 reverse strand)
gagaccagtaaagtcgagaaagacagtgttctcaggtgtgtttcttatgcttactttacagttgattactggatggacattctgccgcaaaaatgtgctactttgatctgttcttttttctgtttgtcttcgttcactatgctagattccttattccctgctgtaactcacttattcgctctctttgttgtagtagatgcaagtgccgttacaaattttcttttggaccataaccaaatgactctgagatgctcaataatcagtaaaaactatctccttgtacatgtttgtttgtaatgtttgtgcccaaaatgtaggtcttttaacttctacactttctttgttttagatgtttatatagttttgtgtatgactcgtggtgtggttctgtggccatccagtccaatggtatatctgttatggatttgtgggtttaactcttttttttgtgtaactcatggattaccaatttgaatcttgctttcttgaggccatcagtgtgctataacttgtttgttatctgatttttgtatcgcacagataataatgccatatggccatgtgggatgtctttgcagagtaacacgggaaggaaaggaacggaggaaacgtt

SEQ ID NO: 9049 - DNA, 843 bp, Zea mays
  Intron number 3 from transcript GRMZM2G112857_T01 (locus G RMZM2G112857) derived from phytozome v7.0 (chr-ID 5; pos 3 49641 to 350483 reverse strand)
agaaatttacactaccagaaacttctttccagttggtaagttaaagagaaaatctcattattatgagtagaacaatgacaaattgaatttgtaatgttctcttcagctaaaaggagttgagcttgtgtgtgcgcgctcatagctcaagttaagctgcctttatataagttttcgtgtcagatatcatttatctaagtcttcaaaatttaaatgccccttattggcaatcccaaccctgtagttaccttgtgtacttgttaaattggttgtctatagtagtgctctgcatacagtgtaaatgaatggtatagttctctagttttcatggagttccgcagccacagggatctgtgttctggtgacatgctccgagatattccccaacattggcaaaatccatagctacttcttcctcgtgttatgccaatcggatgtgcttccttagcatcaattagcttagagctgttaggctgttatggcttcgtgacattctgttactgctctgctgcatgtatgattgtgaagttctaagagattactgcatctccttaagatggatgtttgcatcaggctatcatttgtcacatgtgtacatggacacctagcgtaaattttttctaattatgtgtgcatgcaacctattgctgcatctttttcattaagcgtgactttgaattttcacattgcgcgaaaatcatttgattttatttgttattttaagaaaacatttagcatatggtaagttattacgaagcacttcccagtttctagtgtatttgggacttttgatacatggcaaaatttgcagcttggaagttttggagaattggaggatttgctttc

SEQ ID NO: 9050 - DNA, 1022 bp, Zea mays
  Intron number 4 from transcript GRMZM2G054378_T07 (locus G RMZM2G054378) derived from phytozome v7.0 (chr-ID 5; pos 2 1567 to 22588 reverse strand)
gtcaaaactaccttgggctagaaatccgccaaaaggttttattggttttaggttttagcttgttaatttggtttctggattggatgatttttcctttttttaatgtataaatgcccggatctctgactttcagtttaagagagaaaagagaagatcagaacagttttagaaacaaagcactgggaacctcaagctcaagcagccccccgccccaaagcatgacacagcacacagactgcaccctcataacacggaacaaagataatgaactgcagaatcgcatgccatcatttcgctttcaaagacacttgctttgctgtttggaacaattctcgaagatgattcagtttcattctttcctgagtcccacattacatagattgccaggccgttgaaatattttggcataaaagatataagcgtatgccagtatcacacggtccattgcgcataatgcaattatcttgatgtggccagccccttaaatccaagttgtctgctgcagaattttgtcttgtataagtgtccaagcaaaccatttaaatgtgcctttgaactgcacccggtacttatgcattgttaaatttgtagtttggtgacactctacttgttttgtttctgtagttggtggagcgggcacagttctgggtgaatgaattggagcttatgtacgtgtaggttgcctggcatccgaatttggcacttgctctttcttatcagtgcagtaatgtagcatcacttgaaattattctctttcaacagctattttatgtttgcaaatgcaacgatgtcttttgagaaaatcatatcgtcataccctggtcccctgtcacttgtttcaatactggtgagtgtagctgggtgctacatcagttccttagttatatctgttggctcagtgataattaatctgatcagtgctttgttatttcctgatgttatggaaatggaagtgagatttcagatgtctattcgctggttttgtagtgtcctgatccacacttcaaaaagagacatcacaa

SEQ ID NO: 9051 - DNA, 836 bp, Zea mays
  Intron number 1 from transcript GRMZM2G008647_T02 (locus G RMZM2G008647) derived from phytozome v7.0 (chr-ID 5; pos 1 13065193 to 113066028 reverse strand)
aaagccggtaagaccgacaattcgccgccgcatgcgtctgcgttttcctgtcgaggtggtttgcgtgcatttgaattagaaaaccagaaccccgagcagtgtcaattgttgtgtaatctgaaagaattcctcccttaaaatgatcatcaaggaggagtgctcctacctggcacagatgctctacggtagggtcatcatggatgtggtcaccaagagcaggcgtgcatcgcagattcacagtacacaactctaaggtattaaaatatgatgcatcaacgtcgtttaatttagcaagcaaaaaatgttctttcttccactcataacacagggaaatagggcatttgatttttgtgtgtatattaattacaaatgataaatcatgtaatgtgttggtatttgcccgaatgatgcctattcccttggcaccattaagccagttgggagatgctttgtgcatttatgaataagacaagaaaacatgattacttctggtgtttttaggaatgctagtaactaaaaagctaatgttatctaccgatttgtgattttcggacttgagtctaaatgtaattatgaagtttaacatagcaagactggagacgtcgtttgagagggccgatgagaaacacagccaaataacctccaactaacctttgtggtgagtagtttgtttttgctatggataagcccgtaagccatttgctatcatgcgaaagctcctcaattaattatgttttatgcacatgatgttatctttattttgattgaagtcctatcaagtgctacctgttgaagaattggatgttgtcaactaatgcacattgtttcaggtacca

SEQ ID NO: 9052 - DNA, 520 bp, Zea mays
  Intron number 1 from transcript GRMZM2G533008_T01 (locus G RMZM2G533008) derived from phytozome v7.0 (chr-ID 10; pos 71469154 to 71469673)
cactaggtatagtgccactgatattattactgtagagctccctgtataaaaacacgatatgaaggcagtgactaattttaaaaacaaaagaaagtaaccaagctatggcatgccacagtaaatggttgaggtcattagtgattaacaaaggcagtgaatgttactttgatgtcacccagttaatagtggcaacagcattgtcattttatatagaacaggctcgacatttaagacagaatatgccagtcacttattttgagaggaagatgtgctgtgtattatacctcgccagagcaacatgtgatatttagacattgtagctgcataaccttattttcatctatgtaataagtattctgaacaggatatttcttatatgagcaatcatgcctgaaatgttttcacctagaaagctaatatactcttcctccacatgcaaaatcagtatgggattacaaaacacagcaaaggaagagaacttacaggtactgcaagtttttgagctggccaagttgcggaa

SEQ ID NO: 9053 - DNA, 637 bp, Zea mays
  Intron number 3 from transcript GRMZM5G880393_T01 (locus G RMZM5G880393) derived from phytozome v7.0 (chr-ID 5; pos 2 04411863 to 204412499 reverse strand)
ggaaggaggtagaacacagagaagctcaatgccgctagggtcacaccagtgaaaggtgctcttgctgtttcctagcatatgtaaaggagataaattcacatgtactacatatagttgtgccttttatatgatatgttcttgagaaattgaacacaattcctgtcatgttgctcatcaatgatgtaatgctttctggaagtaccaggtgttgcattaggtaaaattgtctattagttttcttccacaataaaagggtttagcttgttacaactaaattatttcttacatccttttttcgtgtccatatattttggctttctttagctgttagtttacctttagggcatcttgatcaaaacttggaatctttcttgtgttaaagagagacaattgcttttattatcctaactaagtcttaatattcggatgccattaaagtataaatgttttctttttgatttattgacatcatattgaaagagctctttaccactttaaatttgtaccgtattcaaagacatacatgaccttttctttgtttattaataactactaatcttcagaatcaaaggtactatcaaaacatcaatttcctcctaatttattgtctttgattaaaatatcaggccatctctgg

SEQ ID NO: 9054 - DNA, 894 bp, Zea mays
  Intron number 5 from transcript GRMZM2G352274_T01 (locus G RMZM2G352274) derived from phytozome v7.0 (chr-ID 5; pos 1 79267235 to 179268128)
gggtcccactccgtgacatcacatcaatcgtaaaggtggtgaactatttccctagactgtatttggatgttccataaatttctttaatattgtgtatgttctgtgctaatattatgccataaacttcaccatgctagaactaatattgtgtaaccatgatttgattgaggatgacagtagcatgaaattgcaggctaagcaaatcttttatgcttaatccagtgattaacataaaagttgttgtagttcaaatggattagcgatgattttgttaggccaatcagcacccttttgttttatttgattggattttgctgttctcagtttatgcagtcagcaatatgaatgtgcttaaaactagagaaaggtctgatgctcccctctttcaaaattaagttgctttagttttgacctaagccaaactcttctaactttgctcaagtttatagaaaaaatatttaacatatacaatttacggtacataatgaatgcgttatttaagacttatttcattgtggatttaatgaaattaagttgatgttgtgatgttggtgtgtttttctataggcataatcaattttaaaacggtttgacttagaacgataaaagacttacatttttgggaccgatgtagctagcagtatgcaataaggtcaatcttatcgatatattttgcaccatttaatatatattgctgctttgcaatcttgtaaatgcagtatcatcatgcactgaataacatatcatgttagacgttcactaacatttcagtatttcactataggtagtccatgcttttgtttgtcgatgcacactcaaaaattgcttgtccaccatgctactgtactaactgcaatttacaggctcttgagaaaagaaatcgcctagaggagg

SEQ ID NO: 9055 - DNA, 709 bp, Zea mays
  Intron number 2 from transcript GRMZM2G046117_T01 (locus G RMZM2G046117) derived from phytozome v7.0 (chr-ID 5; pos 1 73637142 to 173637850)
aaagttgtgcacacgccgctgcagcgggacaacaggtactacgagcgcgaaaacttgttgatggtcatcaagaacaacccgttgtggcgccaccttagcatgggcctgggttatgatgactccaactccaacgatagtggcgtgtcgcctggctcggaccgtgcggacaacgatagtggctgtgtgttttcatgttgtcgaagcttaacgatttgttcttggtacagaatgagatgagctcgaaatgctacaaagtcttcctgataatgttggaattattaggttgtaggaatcattgtacctgttcttccccttctgttaccattaacccatgaatctgattacttgtatattttctgttaccatttacctgttctcaacatttgagattctagatgatggaaccacactactttgcttggcccatctttttcaggtatgtttgtagttctttgttaaaacattatttttccctcaccttgataatgaatcatcgatactaacttcatgtaagccagcacagtgtggcagcgccagtggccgagattaggacatgctcttagttaattttaggtgtgctttgtcatataaatcaaggcttggaagggagctttctatgattttttgtccgtttgttcctcatcctttcatcgtttagttacatgttctttcctttcattttgattatgaagctgcaaaatatttagta

SEQ ID NO: 9056 - DNA, 994 bp, Zea mays
  Intron number 1 from transcript GRMZM2G300774_T01 (locus G RMZM2G300774) derived from phytozome v7.0 (chr-ID 5; pos 1 82033551 to 182034544 reverse strand)
ctagctcatattagcaaagaaaaaacatctttcatgtcaatcaacatagcaaggcaaggaaacaaaacctaggtggtgtttggctcagtgggtgatccggtaacgacaatggaattgactcccagcgtaatccgttacggcggaacaattatttgactttgtttgtttaccggccacagcgaggtccgtaaactgataatgatgggggaggacggtatcactgctgctctagaccgtattcgatccctccgctactcattacgttatgacccaaccaaacttacagtaatgagattggatggcattgggaaacgatcacggaagaaaatcaaccaaccaaacagctccctattgtcttcctcactcagtttcctgccatttggtaaggtgaggctagctccagcaagggaccctaaagagttctgtaccctaaatatagaggatcaaatggtactctacgctctccagcagcgtcctctaaacggtcctctaaatttagaggacgatgctggattctctatgtatagagtttctctaaacggtcctctattcatttgaatactttaaataaccggtttagcaaaactaaaatatgtacaatacatttgagagtatgacaaatacgtatgtacaaaaaataaaaataaaaaatgtctctaatatagatatttgagtatagaggacgtcatttagaggatgttgtgttggagaggaaggagatatagaggatgaaatcttttagagaagactgtaaatgatggatatagaagatgaatatagaggacgttgctggagacagcctgaggctcgcctagggaaccaaatgtgcccttagtttagtcttttatttttttgtacttgtacgaagcaaggcatctatgcaagcaaatgcatacgtacatgcataaggatgtatatatttgagtacatttaggtagtttcggggttttttttgaaagtacagttacgtagtttctactagtgcagaaatagg

SEQ ID NO: 9057 - DNA, 270 bp, Zea mays
  Intron number 4 from transcript GRMZM2G049194_T02 (locus G RMZM2G049194) derived from phytozome v7.0 (chr-ID 5; pos 2 11707441 to 211707710)
aagcacacacacaaaaattgggtgccaacttagaggtatgttgtttgtctcttgttcggcgtaattatcttatctgccataatatgtttgtgctacattgctactagatagtgtttttttgtagaattttgagttcaatttgccccgcttgaataattttttctatatattatgttaaatttaactgaaactacttttgtacatattcaagtcaactcaactttaagaagatccacataattgcacaggaaaacatattacagtcattgg

SEQ ID NO: 9058 - DNA, 897 bp, Zea mays
  Intron number 2 from transcript GRMZM2G145594_T01 (locus G RMZM2G145594) derived from phytozome v7.0 (chr-ID 5; pos 2 04426256 to 204427152)
ccaggcacgccacacttgtcctctcggcagtcaaggttttctcatcatgaaatatctccattcactaaacatcgtttgtgtcattgcggattagtctgtcctcgggttgataggtcggtgaatggtgatgaatccaagggcgtacagtatagatttgcaaatatgatgaagtatgcgtgcattgattattgagatggcaaagttatataaagctgagcttatagcatttgcacgtgcagagtgagggaactggatatgtcatttgtgacaataaaacattgatgcattggcactcttaaataatgttgatttcaactcatgggagtcatatattcatctatgacatttatatctacgttttatatctttatatttttagattaagtaatgaagatgaagcattgctggatatattagcaaatggaatatggtggtatgataatatgtaaaacttggacatttagatatgttatacttttgcatgtttgcggtaaactgatcaagggattagcaagaaactctagtcattccaattgaggttgcatgtagaatctgcagggacctgcaatttgggtaagagactgggtcaagtggcgatagaagtatgatgtttaaaatcgcggcagttaccattttgatattgaactgagctggttcttagttcaaatctgattaaatcctaagatgtctgaatgtagttttcttttaacgatggcggtccataatctcttcactctctgttctgcacttgcttcatattgatattcttcttgtgtatgagttttttccatttaacttgcaatgcggaccaatacaaatctctattttctgaccacctaattatttgtttctattaactggtgctgtcttttgttcaggaaatatcgaagttcagat

SEQ ID NO: 9059 - DNA, 406 bp, Zea mays
  Intron number 6 from transcript GRMZM2G016890_T04 (locus G RMZM2G016890) derived from phytozome v7.0 (chr-ID 10; pos 34234720 to 34235125)
ggcggcttcctagataagagtcataagagcattgtgtaagtagtacacacccagcttaattgatattctcctatctatcatcgttgttcagtctagttgctcttattccgtcgacatacaaaataaaaaaatactgttacttacattttgattttggacaatgaatttgtgtgcccaatattaaaaaaacattatctaggcagactacaaacattgttgtattgtcattcatggaagtgttatatgctaatatgctatcacattttttcagagaagattacacctacttcgctaaggtgtgctttgataacttcggcgacaaggtgaagaattggttgacctttaatgagccccagacatttacttccttttcctacggaactggggtctttgccccagggcggtg

SEQ ID NO: 9060 - DNA, 974 bp, Zea mays
  Intron number 3 from transcript GRMZM2G077576_T01 (locus G RMZM2G077576) derived from phytozome v7.0 (chr-ID 5; pos 1 07488130 to 107489103)
gagccacgcagtaccattgacacttaacctcaagggtaaaaacacaaatatcattgacattgtgcacatagtcttcatcagtatttcactgtcaagtcattgttccatcttcctaggaactgatatacgtaaagatacacagtatattcttatacaatagtatattcatatgaagagaccttgagtacattccactgtataatcttatacaatagtatattcttaggaactgatatacgtaaagatgcacagtatattctaaagattctactgcgaatctgcgatggactataccatcatttttgagaaaatagattgtatcccaatcatgtttgtttgctcagatgaataagtttgcttttgagactgattgcactattcttgattggtgtttataactgttgcctgcacaataacatagtttgtctatctgagaactaagttcctgtttttttagagtgcagcaccattatctttttatttttgtcaaacatagctgtcttggtaacttcatatttttgtcctgctagcctacagttgttgtaattgaagcgggtcaagacatagcatttgcaaagatttagttcattctgatcactctgcaatatttcgggtatctcacataaagtttttattacagttctatttccttttctcatgttgtgcatctttcttatttttgttcaaacaatataatgataagttcatttacttattactgtgattgtttggagcagcacacatgttatcctaaattataagtcaaattattctcgacatgtgattcagttcatggcctatagtaaaaaggatagtttacagtaataacatgtgtgctgctccaaacattatgaggatagtaagctagtttatttttagtttagaattggctctctcttatttttggtcaaattctagaatgatcagatgctcgacaattcttattactgtgattgtttgctcattttcagttc

SEQ ID NO: 9061 - DNA, 985 bp, Zea mays
  Intron number 8 from transcript GRMZM2G055619_T01 (locus G RMZM2G055619) derived from phytozome v7.0 (chr-ID 5; pos 6 5210441 to 65211425 reverse strand)
tccaggtgcgttaggagtgtatttacactggaatttttcctttatgtactgactatttctttggtagctctgggcagttgaaatatggatgtaaatgtaactcatattttctgtccataagtttgtttgagaataatttgggagctctggatccatcgagtactgctcccataagactctgtggtctcctgtagagtagatgtttatgcaaacactaggtatgtgcctgtgcgttgccacgaggtgggagagcgtggagagcggcgcctaggctacaaatatatttttttgtttatttttaaacactaaggtacgtgtggtctagtggttagtcccaaatttctggaacagaggtgtgtgagttcgagtgctcgttctgcactgtttttttgcgggcgctgggcatggggagggtgaagccgtggtagcaccaggtgcccacattaggttcttaatagactagtatagattaagcaaatgagttggagtgctttagggattcaaattaaatccttcttgaaggagaagtactctctatctatccttatagtttgatttgtttttatatcggtttatcccagtatgtcataaaacgagttcaaatgaattgtatttcttggatgtgtttttatcttgtatatctcatgtgtaatgtgcaaaaactgtgcacacaataatataatggtgcaggaatctccttggctaaaaattaaagtatcagacattttgtttactgtaaatttgatgtctaggactttattttagggatgacagaattaacatgtgccattaggaagacagatccaacttagagctgttataatatcttttacctatttggttcttgttacttttaaggtgattgacgtgcattgggctgagcacttgctagctgcaactgcaacaatgttttttttattgttggtgcatccacttgtagaagtgatggctgatagtgatgttttgctgtaggttgttggtggaa

SEQ ID NO: 9062 - DNA, 506 bp, Zea mays
  Intron number 4 from transcript GRMZM2G055619_T01 (locus G RMZM2G055619) derived from phytozome v7.0 (chr-ID 5; pos 6 5212286 to 65212791 reverse strand)
ccctcaatagtcatcaacctggtcaggtgaacaatgtgttctccaatcttaatagcgaataactacgagcagtgcttatctttgagcaagtcttgtgtcaatgcttcctctgctctttgttgcttggtttatgtatttgactattttaagggtcgtcttctgacagatttttgtatctacctgaattcttcattatgatcaacaggaagcctgggatatatgttgccatcattttattcttgcttggaaaacatgaatttcttgcttatctgcacactccttaatggtagcatgttataaactaaaaatgtgttatgtttagacttgaaaggtagtgtttcctaatgaagtttgctacctatttttggtttgatttgagaatatacatggcaaatgtgttgttcttagcttatcttttgacccaggcagatgctaagcatttagttcacacagtggcattttagccaattggaaactaacatgtcacttgttaattttcagttcga

SEQ ID NO: 9063 - DNA, 361 bp, Zea mays
  Intron number 4 from transcript GRMZM2G105391_T01 (locus G RMZM2G105391) derived from phytozome v7.0 (chr-ID 5; pos 1 57149046 to 157149406 reverse strand)
gtggggattttattgtgatcaatttcttcgctttggtaaggaatatctttgttcatgtatcagctggaacttatctggcattcagttctattattttcttcaaaatattattttctgttaaaaatggcattgatgatatcaaaaccctgattcacaacacatgttgaaatcatggatttttttcatcacacatgacagaggatatatccactatgcatttaaccaatcacttctacatctaggaaatcagaatcatttctaataacctgattcagcaaaaaaaatgttttttatgctatcataatatgagttatctcatgatttaggaaggttggcaccttgcagaactattccaagtaaa

SEQ ID NO: 9064 - DNA, 970 bp, Zea mays
  Intron number 1 from transcript AC214363.3_FGT012 (locus A C214363.3_FG012) derived from phytozome v7.0 (chr-ID 5; po s 205326236 to 205327205 reverse strand)
ggaattcagaataccaaggacctacagaccataatgtaagtgaccatgataatatatctcatccaactgctacataatctgctagtgttgatgaaccgccagtagtgactatagacatatatgatccaagaaattggaataatcttgataacaaagcaagagatacattagtcgagaagggaccgataagagaaaagaatcttgtctttccaatggatggcaactctaggcatttttcctattcccattattttagaaaattaagcaatggtgaggaacatgacagaaaatggttagtttagtcaaagcatgttgatagagtgttttgcttctgttgtaaacttttcaattctgatagttgcacaagttcattagcacatgatggatatagagattggaaacatattagtgagagactgaaagaacatgaaaatagtgctgagcacattactggtatgaacagttggaatgaattgagggatagactaagaaaacaagaaacaatcgataaagatttggaacgacaaattacaaaggagaaagaccacatgagacaagttttattcagaatagttgccatcgtgaaatttcttggtaaacgcaatttagcgtttcgagggtccaataatcatctttaaatgaacaaaatggaaatttcttggcttgtgttgagatggttgcagaatttgatttggtaatgcaagatcaccttaggcgaattgaaagaaaggatattcattaccattatcttagtaataaaattcagaatgagctgatattttttttggcttctgatattactaatactatcataaagattattaaagaggcaaaatacttctctatcattctcgattgtactccaaagatgttagtcatgaagaacaaatgcctttgatagttcgatgtgtcaacatatctagcaacaaaattgaggttgaggagtactttctgggttttctaaaggtgg

SEQ ID NO: 9065 - DNA, 1048 bp, Zea mays
  Intron number 1 from transcript GRMZM2G133407_T01 (locus G RMZM2G133407) derived from phytozome v7.0 (chr-ID 5; pos 1 819127 to 1820174 reverse strand)
tcgccctgctcgacgcgctcggcatccacaacaaggtccttccttttccgtatcaacgttgacttcttcaattcctctcgtgtgtactactgctataagcctataacacacttcgtactcatccatcctctgtgaagtgtgtgaacatatatacaaacgcctctacttctataattttttttaattttgaaaactaactaaaacaataattctaaaactgataaaaatcatctactcatcttaaaactaataataagccaataatatggaattcttcgcatccgtgtttcttcgaaattaaatttgatttttttattaattacgatctcccgtacgtacgtattgtttgctatccagccttttgttccgaggttaaagtaacaagctaattaagttaaagttaaactaagttcattttactgtaatctggtgagtctaatcagtacaccaagctagttaataggctgtttggtttgagaaatgagttagttcattatcttctcactcctcactttcctcactttttttgtttggtttgtggaatggaatgagttgatccatcatcacctcattcctcatagttagttagttagtagtaatataaggaatgaggtcatcccaccaaatttaaggaatggacccatgatgcaccactatattttggatgtagtgattcctcaaaccaaacacccctaagtttctttctttctatccctaagtggtgcagcgtatggccaggcatccgagaatatccaagaatatgtgtataaaacgcacatgttacatgtacgatagaataaagcggtggttgtagcatcagcatcatcaatttagcgtgtgcacatatgtaatcaaactagctagcatgcatgcttatcaaataattgcctgatctctcatcggtgacacaatggagcaataatcaatgtttgtgcctgatctcatcatcggtgtttgatttgatttcgcttcttcacggatcggatagatgtttgcattgcatggcgaagcaggtgttcgtggtgggtcacgactggggcgccatcat

SEQ ID NO: 9066 - DNA, 958 bp, Zea mays
  Intron number 2 from transcript GRMZM2G109039_T03 (locus G RMZM2G109039) derived from phytozome v7.0 (chr-ID 5; pos 2 03821550 to 203822507 reverse strand)
gacaaccagtgtgtttccttttcttttttcatatactgcatgtgctatcgagtcttcacatagcttttgagatgcacaattcttattggacgagtataatatcatcaacggctacaatacaagcttgtaccattttgaatgctgatttagcatatctcttgcatatgctgcattgctacttgcaatggtagcgcaatatgcagcaaaccagtgagatatttatttgctgcatgatgctccaatgttaccaacatgctacttctaacagtagcactatatgcttttctcatgtgcaaatcttattggctaggtagcatgtaattctgctgatgtacatcaatgttcttgttttacatactgcatgtactttataacctcgtgcagttgtctgttttctttatcatagagtgatgtcctcacacagttgcaaaatgtcctgctgaaaattgcaactacccaaattatggatttggtactactactactcttttatctttctaaaagtgctcctctctatccttaatctccgttggctttgctatgttgttgcttattttgtcttggtgtctgagcccttggtaaattgctgtcattttaggtttgtctttggaagcataatagtatataagatgatggttgtgttcatggtttattctatgactttataatatttagcttctagttttacagacacaattttgtatgagtttggtttccttctattgtaccacccttggtttcccatgcaaatgaattgtgagattgaacttgctgtttgacatggaaaagctatgatacaatccattccaagaaaaccaatgctatattgttattgtgcacttcgttgcatccaaaaccctggcatggtgtatcatttgtgttacaactcaaacattgtttgagttgcttatacagtcgcttatattgctctaaatgattgtctattttcccctttaga

SEQ ID NO: 9067 - DNA, 721 bp, Zea mays
  Intron number 3 from transcript GRMZM2G702155_T02 (locus G RMZM2G702155) derived from phytozome v7.0 (chr-ID 5; pos 1 95859258 to 195859978)
gatagggatgtaagtctcatattttgggttattggtccttccagaacttgataaaagaaactaaagtggcatgccacctgattaatttagcatttaggtggagaactgaatcttctgaaatcaatgtatggtgtgctgacattctcaatactgaatagcactggatctgatgttttcaattttttcaccaatttaaagacacttctatgctctccatcaaggatttccctgttttgctgcattcattatatacttaaaagaagggaattttatagtaaaaagtcacaagttataacaatttaagaggctacaactttctggagctttacatccttgttatggttctataagtcaggtttttttaaatcttagagattgagaaagaaaagactaatgtgttttcactttattttctaattgcacactatcattaacatgatcaaaggtgattgattcttaaatggttaacaatataataccttccaaattgatgctactatttaatgcaaactgtattttccttaataaattccttatatttgactatagatttggaatgcatgtataccctatattatattgcaggatggagggagtaatgtgttagttgcatttttgccattaaccaaggttcatgtattttgttttggccagccggttcactattacctacaaactttattcattcactttacttttatttgttttcagtgggttttgc

SEQ ID NO: 9068 - DNA, 911 bp, Zea mays
  Intron number 3 from transcript GRMZM2G150374_T04 (locus G RMZM2G150374) derived from phytozome v7.0 (chr-ID 5; pos 2 00684675 to 200685585)
gctacttatcttgctttacaggtattagtaattttcaggttgctgagatacttaggttgatgtctaacatttgggatgcttgattgtttggtttgaggatgagtccgttcctcaaatttaggggaattactatttactacatttttcatactagtactaattattatattataaagaatgaggtagtgatggatcaacttattctatttccaaaaccatttcacaaaccagacaaaaaattagagagtggagtgatgatggaccacttcattgaacaaaccaaacacagtgtaagtttctaatttccaatcaaacgtcgacccagtgtaagttctacatgcctctttgggttctactagttgtttaagaggaagaattatatggatcgagtttaccgagagcgctatggttgatatacgttcagctttaatagcttgctggttgccttccctcctggaatcctgggtgttcagccttaatagcttgttggttgccttccctcctggagtccttgcacccctgcagctgtaacgatgatgaaagtttaccttatttcttctggaaggagcacaccgtacattctatgtagccagctgctaatcagaaattcagagcattcaatattgaatttggcccaagatttagataacaacataacaagtagatggtttgtcgtggacagaaaaaattaacttcctgtagtgattccaaatagtctttatagaagtagattatctctcagacaatatcgggttaacattatcttatgccacatacttgcatttgagtttgcctttcactttcttggtatgcgtatgttttacagaaagctctcttaattattattcttataatgtccgtatcttaatgtatcaggctccaattttggtgaaatatccttcaagtctgtc

SEQ ID NO: 9069 - DNA, 607 bp, Zea mays
  Intron number 1 from transcript GRMZM2G074826_T01 (locus G RMZM2G074826) derived from phytozome v7.0 (chr-ID 5; pos 1 9144398 to 19145004)
gctgtgaggacgatgtagttggaagtatgttgccaccatcgatttctgcgtttatagcattcacttggaaggaaacactgctataaataattgtgctttcagtgaagctaacattccactcgaaagacttttccagtagatttgtaatttctcttggaatgaaaccgggtggattagtcgagatgagggcgtccacattttttttaatgaggcgctgcgccattcgtccaaagaagataaactcggcggtgtcagtatcgtcttcagcggtgagggatatcttgtacctgcacagagcggtttgattgttggacatcacaaatcatgaaatttgtagacggtgaaacccttagttcaatttagttctaaattttgtcctagacactaaaggtctcctttagttgccatagtttgctttcacggcttttctttcagctatatcagcaaaacaagcacacttgcaaaaactggcataggccattctacacagaaattgatgaaactgaagtttctcagtgatgtaaatggatattgatgaaactatgatgtgcgctgacaatctcttttttaatgcagatctgaattaaactacaagatatcagggcag

SEQ ID NO: 9070 - DNA, 654 bp, Zea mays
  Intron number 1 from transcript AC210013.4_FGT014 (locus A C210013.4_FG014) derived from phytozome v7.0 (chr-ID 5; po s 3411011 to 3411664 reverse strand)
cgaaccatcgttgaggtcgtccaggtgagcatctctctcttcccttttcttggttcttgtttgctactactactagcttcttgtttactacagtactagtactaaagttgcatggttgctactagtagtgtctgttactcttttgtattcatttatacgaaattagagttcagacagtcagactaggaaacctctttgcttattgctcaagttggcactggctgatattttgatgaattggtgactggtcatgaatcatgaacgggtattgatcatttttgtctcatctgacgaccatgaaacgtgctttcagctgagccagataagcttcaatgggttttcaacctttggttctagtttttgcaataaatgcttgattagatcgtaataaattagcttgattaggtcgtaataaattagcttgattagatcgtagtaaattagctttgaggaactattttagtcaaacacattttactacaaatatctgtagtagagttacattggcaacacaacatcattttttctactttattcattgcactgtttttttttgtttttttttacagaaacagtataacttgattttttgcttcattccatgtctcgtgacattaatcattgttcttttcattgtgcagaagtgccacaggc

SEQ ID NO: 9071 - DNA, 1034 bp, Zea mays
  Intron number 1 from transcript GRMZM2G423734_T01 (locus G RMZM2G423734) derived from phytozome v7.0 (chr-ID 5; pos 4 010229 to 4011262 reverse strand)
tcctgacggctggcagtgacggttgggtgggcggctgagcggtaggccaacaatgatgagttgactgttggatggcgattggacattgggcacaatgctaggacgtgctaaacagggggttggatgctacggacgtgcggttgatgcctttctcattctgtgttttagtcgacataggtcgtggcctaggatgatgtgctagaccttatgagttagtcaatggtatgatgtggtagacctgatgtttatctaatttggtctcatatacctaatattttttatttattatatatacaaaaggtagttataaaaagtctaaaaattaaggtggggccatggcccactttgcccacatggtggatccgcccctgtttgtttgggcactctgtatcggcggtgagtgtggtgtcgtttgatgtcccaatccaatcggcgagttaagttgtatggtgtcagcgtgttgacgtcccaatctaatcgcctggtgtttgttgtttagtccgatccagaccacttctcagtttagaaaaaataatcgacaactctcctgcctggttcgtttaaaaaatagtttagaaacatgattggaagtttagaactgtaatagttattcattcaagtgcagttaactgagtagtttaattgtcaagtacagattgttagtaactggactccaaattatgcaacaaaaaggcttaaccaacaatattagggcaaaaagttctatcgagattttctttcattcggacaaactttcaagcttctgcaggcctccctatgtgtcttaccctaagagaggacattgattcatttagatcttacttttgatggcaatgctccttatggtggcttaaatttgagggctttcaaatattcatatacaaatacaatgagtgaagatttttctcaagaacaaactattagggttcattttttgagttgattggatagttagagtgaaggtggcaactcatacttgatgattttaatcatctccaggaccgaaaacgtgaagctgtagttttggagcatca

SEQ ID NO: 9072 - DNA, 702 bp, Zea mays
  Intron number 1 from transcript GRMZM2G069923_T01 (locus G RMZM2G069923) derived from phytozome v7.0 (chr-ID 5; pos 6 1801620 to 61802321)
ctgccgcggcgtcatcaccttcatcttcgccatcggtacgtacgtctgaaacctctcgctccccatgttgctcaccgtcctcctcctatccgtaccttctgctcgatctgaattctgatccgcgctctctctctctccctctctgctctgtccttgcttactcttctgtttctgcaagggaagaggggagagattttcttcttcagttcttcttgtttggtttctgcccccatctggcagcctgatgacaggattggggcagctcatgattctggctgggcctccaaagttttcacttcatcctgcttgctttcaatcccaacaaattttcttcatggcttgactctgtttcagcttctacattcaaaaaaaaaactctgtttcagcttttgaagtgtttgcactttgtacatcactgggttcatcggtttgcaatttgttcagacaacctcatctatgcaaccatacatcaaacaagaaatacagaatcagccttgtgtgtgtgtcgtcttcagccaccagatctttgcgctgcgacataggatcaaatttgacttttttttctgaggtttcatttgctctaatctgaagaaagccaataagtatctgtgcacgcatgtctgatgctgcaaacttaatctgagaaggcggtgggtgcatgatgcagctgggctgttcctgggagcggtgaccggcggtctg

SEQ ID NO: 9073 - DNA, 932 bp, Zea mays
  Intron number 2 from transcript AC205703.4_FGT004 (locus A C205703.4_FG004) derived from phytozome v7.0 (chr-ID 5; po s 181122629 to 181123560 reverse strand)
tccgactcaccttccctgctctctggttccgcgaagtacgcaatcctcgccatccgcccggatccacagacgcaatccctgctctctcctgtccaccgcttcctccagatctctccagcagcgaggaattgtgtccgcttcctccgcccattccctattctttccatccgtgaagtttgctacctcctggcgcaatcctctccatccgcgttcgtgccgcgctatccatgaaggcgaatcagacgccccagatcgacgcaccgactctcgatccgcgctctcaagggaaggtgagtcgccttggcaccgaccggcctcgcccccatcaaaaaccttccctgtaggatgcggcagacacacattcgcgcatataaaatgtcaagaaacattacataacaaatgcatctcttcatactactgctaggtacgtccggatcttgtatacactatttgcatcactaaaccttgattatgagacatctgtagtgagactgttcttttcctatgaatttctgttggtcagctacaatttcagtattttggtgtttcaataaggtttcagtttttttggtatttaactgttctagacaagcagtgttgtagatatatagaactcgcactcattttgtccaagagaaactgttttctctacccgcactcattttcccgccaagagaaactgttttctctacaatttcagtactactgctaggttgaagctgttacagtacatgtgactcagaagtattttgtgagtgcttccaaggataactcttggtgcttctatgatatttcaacaggatcttgcctgacacaggttacctccctcacacacatgcacacatatttttactacatttgagtatgcatatcattgtgcatgattatttttatcaggttggcgaggcttcaggacaagagggatatacatc

SEQ ID NO: 9074 - DNA, 699 bp, Zea mays
  Intron number 2 from transcript GRMZM2G430224_T01 (locus G RMZM2G430224) derived from phytozome v7.0 (chr-ID 5; pos 1 45335869 to 145336567 reverse strand)
gatctccgcaccagaagtcatatctagggtgtctggtatgttctctgattactggcgtcataataatcagggataaagcatgctttgctcgtataagagtatctggacaaacgagtttaggctgctagtgacatgtaaaggttttggagacattctaacaacctagagcttggatcttgcataagcatcagaaacaattccttgtttgagctcagtagctgtagggcatcaatgaattctctggacctagtttcatcaccactgtttatgtattttttgtttgcagattgatgtcttataactgcttcagcaacatcttctagagatctctggatactagatgggatctgatagtgatgagcaggagggtcaatattcttctcttcgttagtcgaaatggaactgcgacctgactcaatcgacctcctggttctgaaaacttacattagcagatatgtttccatggatatcgtcaagacctttttgatctcttttgactgcatgctccagctcatcagctcaacccttcgtgtcgagcagggatctctcaccggcgagaccgcttcggttaacaagaccagccacaagttcgagttggaggacactaacatttaacaagaccagccacaagattgagttgttttagttaaattgtttttctactgcgaaattatcttgcatgtagctttggagcaggta

SEQ ID NO: 9075 - DNA, 1014 bp, Zea mays
  Intron number 3 from transcript GRMZM2G169516_T06 (locus G RMZM2G169516) derived from phytozome v7.0 (chr-ID 10; pos 124062191 to 124063204 reverse strand)
ccggggtgttatcagggagaattttgatccggtgggtgagtttaggacgtaaatccaatcatttcatttttgttatcttagggggtgtttggtttgtagggactaatttttagtccctacattttattccattttagttccaaaattactaaatatagaaaataaaactttattttagtttctatatttagcaatttatagactaaaatagaataaaatgaagggactaaatattagtctctagaaaccaaacacccctttagttcatatattatatatatatgtgtgtgcgaaatgatccttgtgtcttgtcttgggagctcattcgtgggactgcactaatgtgaacctgatatactattgttgactgaactgatcgttgacagtaacataataagccaaatagtaattattaattaataatacaacagaaccatgagtatggcaggatgccgttcctttgcatcacagacatgtgctacgaaccttcagagagatgcaaagattggaaattggaatagccaagtcttgaagttttatcatatggatgcatgctgaggtcctgagttcgaattcccgtggaaatgaatttcaagctgagattaaaaaaatccctttgaccgactctgcgacaaagcacggcttaaggctcggcccacgctcacatgggcaacttggccgccatgaaagggtggaggaaagaagatttagaggttttcttgatctgcatgagattttccctatcaggcaatgcttggtgtccatcttaccccagcaatttttttggatgttgcatgccccacacctgctaaaaaaactgggaaataagcgaaaagtcatctgaattcatgttgcttttgaataatccctaggattaggaatagtgattggttttacttgttgacattctgaaatccaaatggacatatatgatgttgttttgaaaccaagcagcttctcttgccgtctggtaatacttgttgtgacataaacaggttcagatcgctcaggcat

SEQ ID NO: 9076 - DNA, 465 bp, Zea mays
  Intron number 2 from transcript GRMZM2G702206_T01 (locus G RMZM2G702206) derived from phytozome v7.0 (chr-ID 5; pos 2 05309051 to 205309515 reverse strand)
gttgttcttggggagacttcaatcttataagggaggtgagtgagaagaactctcttctatacgaccataagctgatggatagcttcaatgattttataaggaagtttaatttgagggagattcccatgggtggcctcaaattcacatggacaagttaaccccgtgttgataattatccaagttagtgttttgtgtttttgatgtaagagacatttctaataatgttggttttcctcgtgttgctctatcagtcgatgttggcagtctatagggcctctaatagtgtggatgttcaaattatagatgataggattgtaagagccattgattcaatgatggaacacctactgtagcactaacagaacaagatattgagctaagcaaatgttttttctctaaccaaagatcccattgttcatgaattcaatgatgttagtaattcacataattcttatgcaggaggag

SEQ ID NO: 9077 - DNA, 490 bp, Zea mays
  Intron number 2 from transcript GRMZM5G884287_T01 (locus G RMZM5G884287) derived from phytozome v7.0 (chr-ID 10; pos 141352209 to 141352698 reverse strand)
agatcaactccctgacactcttcaagtttgggtacctaaacaagatttgccactttagtaaggtcatcagaagcagatgagtcaccaagctaagatgcaggaactactccaggcactgtctgctttatgtttttttcaaattttatctattgtagtattgtttagcaggaactatttgaatatgcatgcatcactgtgcattttcactttagtaaaagcaaatactatcaccaaaatcactgatgggaagtgctaatgtaacctaacaattttgaacaagaactgaagtactgaacatagaaactcacagccttgattaagattgcaatctaagtccacatttagtattttaacacactattctattgtaaaaattcactcaagcaacaagtgcaacagtatgatctgctttcaactctgtattttcaatggaggatatatcaaaataagcggcaacggaagaattaaatcagctagaaaacttacccat

SEQ ID NO: 9078 - DNA, 1043 bp, Zea mays
  Intron number 2 from transcript GRMZM2G451806_T01 (locus G RMZM2G451806) derived from phytozome v7.0 (chr-ID 5; pos 1 21053572 to 121054614)
ttgtgccgtcagttgtggattttactcttctgcacgttagttttcaacccttaagcctttcagaaatccatctgaaatactaattttgagatttaagtgacatttaaattagtatattactcttctgaaatccatctaaaaattagtatattgctcttctgcacgtgagtaacatttaagtgatggattcgatttgactaattttcttgtcaaaacttagcatagatgtataccgctctcgcttttgttacaatttaacaattattgtctctatcagtcaacccggtcatgcctgcaagtgttggtgcatcaactcaatactgtgctaccttttttgcttatcggaccaggttaggtttctgagtggatgacagctttgtcctcatacaatattagtatcagcattctaatgcaccaagtaatgtcgtggtggcatggaagcttgtgtaatgcctatcacaatataatctttggcttattttttaatgatagccaaaggaagaagtgccagccatcacatacctgcactaaccaagcaaacatgcattatcgacaggattccagcgtattgctcgagtgatcttagctaggaaaccattgttttgcaaataaaatttctgccctaactgatggtaacgcacaactcatgcaatcattgggaagatgctaatcttgcatcattattgcagtgacatcattactgcggttgctgctatttgatctcataccaataccagataccgtgttgcctaggaaaagcacattctgggccaattctcgtagggcaggctttcgtcgttcttcaaagaccatatcctacagtcatgtcttctctcagaaattattggcaatggcagctgaaatgcagatggctgcttctttttgaagcgccaacctgccagcacaacaaactgcttcttcgcgttttgtttctgaataaactggagcttctttttgtagctggtatttctttgttgtcgataaggtatttctttacaccagttttaggtatctacagtgaagtctaccatccttgaggttgg

SEQ ID NO: 9079 - DNA, 623 bp, Zea mays
  Intron number 1 from transcript GRMZM2G137495_T01 (locus G RMZM2G137495) derived from phytozome v7.0 (chr-ID 5; pos 1 58623321 to 158623943 reverse strand)
aggttcgcgcgaccgcttcgtggccccattgggcctctgatctgcgctggtgctcatagatgctcgctgacaaatgaatgtgcatcggttgatgcgcttactaggaaggattgttgatgcgcttactaggaaggatcgtttgcatttcctcttattattgattgtgtagctgattgtagtgctgtgctcgccattgtgtgaacattgctcttctgtgcaaaaagatctaatcccacccacccaccttttggtcagaattttagccgatgtaagcttcgtgtgtggcgttacttgtggtagtttaaggtttggtcacgcaacaaatcacgtaagtccgactctggcttttgtcagtcatttttaggagtctatatgtttgtgctatttgtcctgaattttggcactacattcttctctatttttccacttcctgagcgcatgggcaattattttgattttctcctgctcacctgtacacttatcagtgatcactatggcaccaatgagctaattgtggcatctttttagcagtaaaccctttctgcttgagtacattaattcaaccaatgcttttttcctgatctgcttgcaggtgctaagtgattcccaaaagcgggcaatct

SEQ ID NO: 9080 - DNA, 893 bp, Zea mays
  Intron number 2 from transcript GRMZM2G048455_T01 (locus G RMZM2G048455) derived from phytozome v7.0 (chr-ID 5; pos 5 6014867 to 56015759)
cggacgaccgcgcccccccggcccctactcccgaggtacctacgacctgtgcccgcttcctatgccttgcgtgcgttcggttctcggtccggccgatccgccgcggcactcgactccgcacgctgccagaccggcgacgagcggcggcggaagggagggacgggtggggatccgagcttgagcttccaccctccgtgtttctttttctttatatctgtttgtttatcggtggcggtgctcactgctctgcctcctcgtcggacgatcttagctcggggagccgcgtccgactatggtggagtccaatcaacgctgcctgccgcgggaattggcgctccagtgaggttgggactggattaggggtgcgtgtgcgtatgacgtgctcgtttaatgcatgctccctccacgaaccaaaaaaaaagatttggacataagacagactcttgcctctcttttcgttttgtcaaagtcgtttcagagagattagggaattgggggttacagcatgttatcaaagtgggaccttgccttcgcttaggaagtatgcttatcaaagtccaactggtcaaaaaaaaacgaacaatttgaattcttcgtagcatcattgcaaagagcatattcattcattatttttgttcatgctactagcaaaagtaagaaatttgcacaagttcactctgttgtctgttaaacggtttgtacaacctgactgggtcttcccagtgtacagtattaagaaaattacacggttcgtatgacatgacttggtgttccctgcgtgtagtattaggaaagctaacctattctcttaaaagagttgatgacgcttcaccttttggtttcttataattttatctcctactaggtcattggcgtgtgctccttggcagaaa

SEQ ID NO: 9081 - DNA, 456 bp, Zea mays
  Intron number 1 from transcript GRMZM2G445936_T01 (locus G RMZM2G445936) derived from phytozome v7.0 (chr-ID 5; pos 2 16588412 to 216588867 reverse strand)
tgtattgcttgctgcttgaggaggtacaactttgggtaatggctggagcccatagggttttccctcttgagttaccttacacctattgattatgcttcgattatgatcattagtatttcagtcacagactcacatgcatggatgtaaagctaagaattcactttccaaattcaaaagccactcaatcacaatcagcttgttgatgagacacaaatcaaacattcaaactttttttttttgcaatattcagttctgtaagaagtaggtagtaggtgttgttcattatttgttctgattgtggaccttttctgttctctgatatttctacagcatcatgtgttacaaatttgatgcctggctaacaacatttattaaccttagttttctgtttgtttggcttcctggtgcgcttgatcgacaggagcaaatattgagttcaaaaccctcccttgccgc

SEQ ID NO: 9082 - DNA, 817 bp, Zea mays
  Intron number 2 from transcript GRMZM2G170362_T01 (locus G RMZM2G170362) derived from phytozome v7.0 (chr-ID 5; pos 1 3408142 to 13408958 reverse strand)
ggtatgccatattcttttctgaaggccgcttattgaagtatgtcagactgtattattgctgcattgcatagtgttaaataatcttgctactctaccatagaatttgaggaatgccactaaatttcattgtgctccagttctcctttgctaaaaagaatttgattctgctcttaagtaagataggatggatgtccttacctccttatctctgattccggtacacaatattttttataggatacacaatacatgatttatatgtattagttatctctgttgggtgtgtcctctatagctggtcatcagtgatcagattgggctaatcccaactatctatctccttaaacggacccttgattgagaggggccacgttaacctcggttggagcctccgggcacacaacgctataaatataggactaaaggtcgcaggaaagactaacactagtacctcgccccaaaaccctagtccccagaggccccatcacctaagcgtcggagtgcctggaaacgctacaacccacagcggctcgaatccgatgcctgctgcttctctgcagggcaacggtatgaagacggcaactgcgacaacgctccaacaacaacaacaaaagtgtgtttccctattgatctcagtagatcagatctactcgtcatcgaggttttactttctgttacggattagtattagggacttaggaatcgatcttaggcaccatagaaactaacaatctccaatagagaaaaccaaacactctagtttttgctgttccaactctacacctcttaacaacctctgaacccaaatgccatcagg

SEQ ID NO: 9083 - DNA, 907 bp, Zea mays
  Intron number 1 from transcript GRMZM2G443836_T01 (locus G RMZM2G443836) derived from phytozome v7.0 (chr-ID 10; pos 144436987 to 144437893)
acctcaagagcaaggtaatccccttcctgccctccaaaatctcactcctgtttcctcctcttacttgcagaatcaaatcgtacatggcctagagaagatcatagggatttgatttaccgttttgtatttctgatttttgctgaagaaaattcgtgtctttgtggtgttccctaagggatgaatgccttctagatggaggatggcgcatgggcagaggaactgccggtgcaacggtgtgcattaccaaatgcagcagatactgcatttatttcactaaatggtaactccacactacagacatgtgaagcatttaagaaataaaacatcatttctcataataaaaaatatcctaaataggtgtagttgtcatatcttcagtagcacctgttgtttagtatgcttgcttgcctcgagtctaattagatagcttgctaggtgatctattttgaattgcatcctttgcatggcattcctttctgttggtctactgcaccacgagtgtgctgttgacaatgacccactgtaaaaagaacttgtggaattatgcacttgcttttggacttagcagactcgattgttgcactgttattttggagaggttagatttttaattcatcaagctgcagattttgagaggctttgaaatgtcaattcttattaccaacatttgtaatggtttgatctgtagtttctttgtcgtttaagttccacttctttcactgcaagaagatcgcctgttgcttttttggagtagcactgagactgaaattttcaccctcagttgacttgttcattagttgtaccgtgctactgtctgcaattcacccatgtacttctatgaatattgtttgattttgtttagagtatattacttatgatcccattattgtagtgcagtgacctaaaa

SEQ ID NO: 9084 - DNA, 937 bp, Zea mays
  Intron number 1 from transcript GRMZM2G701832_T01 (locus G RMZM2G701832) derived from phytozome v7.0 (chr-ID 5; pos 1 36903057 to 136903993 reverse strand)
cacttggctcagctactcaaattttgcttcttgtggtgagaattaagaaatctttcttcttgctcagtaggttatccttgggcaaccgattagattaggaattcgattcttgttaggaaacaaatcttgttcttaactgctagcaaattttcagttcaagagttttgtattcaaaatccttcaaaatatgcgtgtcaatgctaaggtaaaatatatttgttcctccaaaagatggtaaccaaattgggccactaaatcgatgttatggccttttatccttgttgggagagggccctcatggccgaaggtctctaagtcactaacttcataaaaaagaacaagttttaggtaaaagcgtccatctttgtcaccaagtcaaagataacaacagaggcaaagtccttatgattcaagtctatgaaagcgttaggccggacgatggtaaagaaggtagctttgggtgatgcgcttcagcgtacgaagcagagacgaagataaatgttgcatgggactttatcagcaatatatatagatggagaagtacaatattgccttcataatattcgtagttaccatgtataggctttgatggcatgtttgtaatttcatacgaagttgtactccgcaactataaatagaggaacagtgccatgcataacacacgttctcgagcctatagcactgatccgcttagccttcgaagatacattcgagctcttgcttgtgtgaagccgaaggtatacttgtaatcatttgatatcttgaaaagaacaagataaatacgagtatgcacgtccagatgagcaatatatcttacttttctcaatttacattttgccttcattatcttgttatcatacattttcttcttctctcttgaattaaccttcgaagaaaagttaattgaagggagaagattttcaattttcaattttag

SEQ ID NO: 9085 - DNA, 839 bp, Zea mays
  Intron number 1 from transcript GRMZM2G159013_T01 (locus G RMZM2G159013) derived from phytozome v7.0 (chr-ID 5; pos 6 7735103 to 67735941 reverse strand)
ggccttttgccggcgacgggaacccatcacaccaggtatgccgtatgcccgcccgcaccttctcttccctccccttccccatgtgcaaaatcgagcgccgtaaccccctaacatgacccgccgtttggctctctgtatccggatctcggatctcggtaaagccgtgggattctggaattattcatgatgattatttggtttcccattctgatattctttttttccccactagtgatccatcgttaacccatcagagcaaccctcgtttaggaaattagtacccaagatcaatttctgttcgatcctcaaatcaagatatgttactggaaggtttgctttgcgaacaatgttatttgggtttgtattttctgggagaaggtttttatgctatgtgacccaccccaaaaaatgttatttgtcgattattttgttatacacagaaaactgaaatatatgaatcttaaaggaccattttaattttatattgctaaatcagggcatgatgcaattggacattcaagttatgtaagcatttaagaatatgaaagcatttgattatattgctaaatcaaatttgatgctagctagtgacattcagatttgaacccatagtggatcagggctcgatgctatttaacactttacacttcacccctccacatcactactgtgcggtcttttagagatgtgttacaggctgtgcttagacgatattgccactgcagatggacagacggaattgcccttttttcttcttccaattggacgatatgttctgttggcatcaaagcatacatcataggttctatatttgattgtttttctactattggcaggtc

SEQ ID NO: 9086 - DNA, 1024 bp, Zea mays
  Intron number 1 from transcript GRMZM2G149698_T04 (locus G RMZM2G149698) derived from phytozome v7.0 (chr-ID 10; pos 92780631 to 92781654)
gtggctaccccgcgccggggactggatctgcaccggtaacacctctcctgccacgctacccttcattattacccagccctgaatcacccgtcacttgttgtagatgctggctctcatccatccctatgcagcgcattgatagtctagtgaatctagcatttctccttcatcccttgtgttcgctctaggtttagtatgttggcatagccctggttattattgtagacttcttagctagactttgggtctgtttggattcaagatctaattactagctagctaaaattagctaaaattgattctagtgcatccaaacaagagggctaatagacgtgataattttttagccaagtttttaactagctgttagccaactagctagccaaactcagctagattttaacccatctagtagccctaactcatccaaacatgatcttttctagtcatgcagacaacattttaataaggtaagttagttgcattttaaatgatgagtgtttattttttaaaacagaacaggtgtaaataaaggaactagaaacttcattcaaactaagaaaggaaactctacaaattatttgaccaccgctccttaagctttccatgcaaatcagttcattcaccctctttgatctatatttttttttgaccaaactgtatacctctcttataagcacggtaatcagggtatttagtactactatatgttctgaaagtatcttggatgatctttgtttgtgttttaattgttgctactacctattagaaatattttcattattccttctgtttattttgttcattgaatgctgctatatgtagataatattagaaaaaaaactttaccaatgagtgtgctaagtaatgactagtgtgcgtgtgtctattcctttctatgggtttgtgcgtgatggctggtcatggtggtggtgggtgtgggtgtgcttcggtgcgttttgctgcctactgtgctggtgggtttatgcggcaaatggatgaataggttgcagtaacaataatt

SEQ ID NO: 9087 - DNA, 625 bp, Zea mays
  Intron number 1 from transcript GRMZM2G110952_T05 (locus G RMZM2G110952) derived from phytozome v7.0 (chr-ID 5; pos 2 590221 to 2590845)
ctggcttcgacaagtggcaacctcgtgctatacaagtaatcatgttttttgtcagtgagttcgtttcttttgtcacctacggtgcatctggctataagaagataagatttggtaaagacgtttgttctgagttatccaacctagagaccgagcataacgaccttacatatagggattgtataaagtcaagctatcaaggctagctaccatgctgcatccagtggagaactagagattaacacgtattttatggatgcatgtttacatccttaaaacattaatatataggattagaataaaactgcagagttgtttgagggatatggccatatcatacatgaactgattgtcaatcgtgcgatccgtacagaggaaaatgtaacctattttagcctttttgatttgagatggagtttttgttgttcatatatgagcaattaatatttgtgattttgaattgtttgatgagtcatactgtaccttcctataaaatgggatatttaaagttcatgtgaaagttcaatcttgttttctctaatcgtgtgacttggactgttggagaaatgttggctaatttcacttgttttcaggaaataggtggattgctctggttgttgagaagttt

SEQ ID NO: 9088 - DNA, 767 bp, Zea mays
  Intron number 1 from transcript GRMZM2G702159_T01 (locus G RMZM2G702159) derived from phytozome v7.0 (chr-ID 5; pos 1 96259080 to 196259846)
gcgctgtcctacctggaggccgtgctttgtaagtccccgcctccctgccgctcttttatggtggagcagttgtgttttgcttgccttggcgaattctagtgagcgtaatgcggtgtgtgcctgacgactgcgataagtttgggagagtggtggcgtgcgtgaattatgatctcaaaaacgctgaacttgtcctgttgtggtgcataccgactggggttgttttccctgcaactctaaaaaaatcatgcacaccggattataatattgagtgattgaatgtagcatgatgtaacattttttttttaaaaaaaaagatgtagcacgatgttatcgagtgattcagtgttaatagggtagtagagtacacttcaaaacttgaattgaagagcccccatgatttttagttagtggagcaatggagtgagtgaagggacgcctgtaagatgctaactcaatcatctcgctctgagaacttatgcttgtgatgcaaatatccgttcttctccatcaatatgcaatatcttgcaaatttgataattaatgtaaaatggttcctagcaattaaatttggtaatcgttgacctttcatatggggatgtgttagtttagagtttgttggcgattattacaaataaaatccacaatttagattatattccttgattacatgatatgcctaatgtcatcattatttacttggtattgttgttgttgtttacttggtgtgactgatgctcttttaaacatgaatctgtgttgcaggcttt

SEQ ID NO: 9089 - DNA, 843 bp, Zea mays
  Intron number 1 from transcript GRMZM2G027816_T01 (locus G RMZM2G027816) derived from phytozome v7.0 (chr-ID nd; pos 555977 to 556819 reverse strand)
gttctactcagtcgtattgtaagtgtgtgttctcttgtaataattgctttaattgtgtattagtgggtattatgattttctagggaaaattatcactagattttgaggagaatttactagtgatgagatctggtgcctatctagttataggcttgctatggggcatggaaatgcttgtagcatgatcacattcagtaactttggttttgaatttattttggttgttgatgacttaagaagtaaggactatggatgcgttctagaggtctgacaccatctttttctttgccaaggttaaatttcatggtacattaagaggatatatgaaagatgataattagtggaaacttatttatcagaccatttgtaaagctataaatacatatgttaaataccattctgttagattatccatccactgaccagtgcgaaatatataatatatgtagtatgattcttcggatggtattgcgtcaagcagttttgaattgcatttggtgtttatgaaggttgcaaactagactaattggtagttcgcagtaactatgcaccagttttgaattgcctttggtgtttatgaaggttgcaaaatagactaattggtagttggcagtaactatgcaccaattccaagctaaaccactctctccgatcattggtggttctgtttcttatagtagcagttccgagctgaaaacattcgttgttcccatgtatcatattcaactgtctagtttagtgtgagcttgtggtgattgatacttgtgtggaatataacaatctaatgtttttgctttgtctagtttagtgtctggttcaacaacttcaacttcaaccaaggga

SEQ ID NO: 9090 - DNA, 723 bp, Zea mays
  Intron number 1 from transcript GRMZM2G179981_T01 (locus G RMZM2G179981) derived from phytozome v7.0 (chr-ID 5; pos 1 30658675 to 130659397)
cggctacaccgtccgcgccaccgtgcgagacaccggtgcgcatcccggcccgtcctccccagtccccttgtcttcccttttccactgtttccttgtggtagctagcagaatcgctatgatgttttgtgagattggttaggttagactgggaattgattagttggcacgggactggatatcctaccttggtaaatttgggatggcagatttggtactattttgcttatggatccacttgccggaggcacccgaaatctttgattgcatctgtagactgaaaaatgctgctaccgatcaacttgtttggtcagtttcttaaggattacttttgtatccccatacatatcggtacaccaaattccaaaagggagagaataagcccctctctggagaaaaaaagaacaggaactctatgtccaatgtaaccctcgggaacaaaagagtgtcatgaatatcggctgaaacatatggctcaagtgtccaacctcatcttcactctcttcagttttatgtgtacttcttacttcccttccaagtggctacgtataaacgaattttaccggactctgcagttctctatgttgcgctaccaaactattattttttactattttcgcactctctgttcttcatttcacatacgcaatattacctttggcatacagtcattgttgtcttcacttttcagctgacccaaagaaaacattgcacctgactgcgttg

SEQ ID NO: 9091 - DNA, 944 bp, Zea mays
  Intron number 4 from transcript AC207231.3_FGT001 (locus A C207231.3_FG001) derived from phytozome v7.0 (chr-ID 5; po s 71570624 to 71571567)
tcaatagctggcgtgttctagagcaactcgggtttgtcgcagagtttagggagacttgtcaaccttgtcatcgcgtaagtttctgtctctgcttggaaatcaacatgttctgatgtgataaccaaagcagaccgatagtttcaacatgttggtctactttagttattcaaaaaagagtgcaggtaaggttgcttcagaccgaatcagtgttagctatcagtttgctgcttgttaaggttatctgagtcaccatatatatcaccacaatggtttcttcacattattagtgggaactactacctcacacactacgacaatattgtgttgtgccctgtcagtctaaatttgttcaataaccaactttaaaacaaaagggcgctaagatttctatcagtagggtatgatgccttcattttggaaatgggtaacaatcgagttgaagataactttgcatcaagtttggttttgcaactaattttgttaaataggttaagctacacctttttctctgttcagtgtacaacacatcgggggaagatgtgattctggtttcatggcaatcagagtcggatttgtattttcacatgattttgaaaataggccaaactgcagttttctctcttagtgtatagaagcgggtcatgctcgctttttttgagtccagtagcaaatcaactaccttgatagatgcaattttatttgttctttgtaagactatagcatcgacgacttaaaaaattcataatctattttgccgatatattttgtattctctactgttatttatttgtatcgataggtcttgctttctttaggtaaggttttcatatgcttgctgatgaaattggtagaatcatgacacgtttctttccctctattgcgcctgatcaatcccttgtttctctacagtttgtcgctggcattcgtggggaagctcattcctg

SEQ ID NO: 9092 - DNA, 979 bp, Zea mays
  Intron number 1 from transcript GRMZM5G821668_T01 (locus G RMZM5G821668) derived from phytozome v7.0 (chr-ID 5; pos 5 2505066 to 52506044)
cgttaatcctgcaagagtagaagtccactgattcataactcatcagagagatgaactgaatggaatcgttggtaaggaatattggatattcgagttcactttcatcgaatgcttaaaccatatcttcaactcataaattcggatcgaagcaatacatatcaactacctgtcatatctagaagtgaactgataggaatggggcgcctaattcaagtttaaatgacgtcatattaaaagcagatatgattcctaaggatcttctatgttttttaaaagatgcaaaaaatcattgctagaaatccattaaaataccatgtaagaatcaaggagtaacccaaccgccagtgatcctgatcttcaagataagagccatcactccacctcataacttaaatagcaagaacattttccttgtctggatcacaaggatggcagcaatcggtaatttcaaactcagatggcagcctgctagcctgactgcgccataagaactattgtctccaaagtgtcctaaaaaggaaaaaagaaaaaaaagcgggcagccagcagcccaacactcctaatcataaccaaaatatataagctatcatattttggggtgcaatttgaaaaactatgttcctataaaaaacaaaattgtctacatctaagcaaaacaattcacaacagtaaaacatgatttataagtttggggagtggaagaacttcacttctttcaaatagagagtagaagatactaaatggaaactaaaatgctgaagagatgtatacatgtaaactttttggataccgcacgataaacaatttgtggttgcatattatcgtgtattccacttcttaatagacaacaaccttttaaggggagcacacagaagttatgaatcaaatattgaaatagataccagcaaattaatcccatgaaaggaacatcaaatacacattaagatgtacaaatagagcgaacattaacctgatcaca

SEQ ID NO: 9093 - DNA, 887 bp, Zea mays
  Intron number 1 from transcript GRMZM2G088124_T01 (locus G RMZM2G088124) derived from phytozome v7.0 (chr-ID 5; pos 1 56206362 to 156207248)
ccaaattcccagggagagttctggatttggttttggtgagcaggggaaacacgacgcccggtttttatagcacggggggagaaaggatggattcctcgcggttgttgcggtgttcttgttgctcccggaatccccgccggatgcgcaggagatagttgcaacagaccttgagttcggcaggggagaaaaggaagaccggccatggcacggagaatccggcagcagataaactcatgcccaagactacaggtggtagcggtgagtttgttaggatttgtttgatgtcccacctatcccaatcttcggtaacagaaaccagcaggagcagttgaccgcacggatgggagtttgggctagctttcagcaatcgcagttggctcgatctggactctagagatagaagatgaatgtgacacatatggaggctggtaccgacaaagcggaccccatgtcagcgatactgcttaacaggctagtgcacggtgagaagctggccgagcgacctgcctggtggcaacgcgcaccgtgtgggattagtttagtgggtcaagtggccggaaaaatactaaacaaatgacttgtgggctgggcgtttgggatatctggacaaggagttggtcggctggtgcttttagtcccaaggcagttagcgttctttttttttgtgtgtgtctccatttttcacaatccaaattcaaatcagatttagacaaagttcaaatttcaagcttaattcaaatgctcagtcaaaaaaatccagaataccatgcaaagtttattttatttatttattgattaattattcacctagataaatacttctatatacataatttcataagagaataattgacacatttttttattttagggaaatattattttgg

SEQ ID NO: 9094 - DNA, 874 bp, Zea mays
  Intron number 2 from transcript AC184780.3_FGT004 (locus A C184780.3_FG004) derived from phytozome v7.0 (chr-ID 5; po s 72154072 to 72154945)
gtgtagatcacttacacacatcttggtaagattgcagataagggaacagtgtgcaaaatttcagtgcttctagaattctacaaggtctcgagtatatcatcacacaatgagcaattgcagaaaaccgctggtgtatctaagaatgatgtagacacagtaatagaggattgtacaggtcagggaacgatcagtcgcttcaatgccatcagcgagaaaccttgagtgtctatgaacaaaggattgagtacagtgccaggtgatgtcgaacctccctctggctctgcctctgaacaggaagaatctgctggtgtagtttcaggccgcagtggattgcaagatgctgttcagacacaaccttagggcagtgtcgttcaggatggagtcaatgctgtgcaaaatcatatgtttcatgagaatgccaagcacccaattgaaaacggcccttcgaactctgcagttgtgcagaaacacattgctttatacctgctgaagattgcttatcactagtgttggagagagaacccatagaggtgtcgattcattcacaggagaaaaagaatgatatgatttggcagggatggttctgctggcgttgaggaccatggaaatttatgcccaaaagaaatgattaaaaagggagaaaattacatgaaaattctgagatacgtccaaccatagagcctactaaaacaagaacttcaaaaacagagaagacaaagtgacaagaattggcagtggccggttaggtaatttgattcaccacatcactacaagcacatattgccttgacaggtaatttgattcatctgcaaaggcgtcaaggcatttgggtttttgccactcctttcgttgctgcagccccagaagcagtgag

SEQ ID NO: 9095 - DNA, 1027 bp, Zea mays
  Intron number 1 from transcript GRMZM2G109902_T01 (locus G RMZM2G109902) derived from phytozome v7.0 (chr-ID 5; pos 9 4986515 to 94987541)
tgcacggaccagggcgacaggcggcccccggcgccgtacgcggccgccgcgcgctcggggaagttgagcgccgcgacgtctctcgcgccgccgccgcggaggaagtagacgactgtgtcatgcgcgacggcgacggcctcgggcgtggcgtaggagccgagtcacaggcgctcccgcgagccgagcacccggatctccgacacccacttgccccaccgccgccgccgcacgcccttgtacccgctcatccgccgctccgtgtccgcctgctcgccgactggctccgcgcgcctcatcgttaagctctcttctcttgggcctcgaggctccggtcctctctcctgagactgagatggttctcagctcaactctctcggatgaaggtttgaagctcaatgcagacaaactgctcaagatgaatcctgcagtgactattatctatgttgactattatggacctgcaatggaaattttccatttctctgaaccatttggtgctcgttgctgatgtagtattttttattatcaatatccatgtgctcaagatgaatcctgcagtgactattatctatgctgactattatggagttgcaatggaaattttccatttctctgaaccatttggtgctcgttgctgatgtagtgttttttattatcaatatccatgtgtggtgaacaggttttgtttagtaatttagtttctttatattggacttagtgtgtttaaagatactcactagatccaacttgttttacctgtttgtgccacttgttgcaagtgcacagttcggagctatgtctaactttccttctatatatctaaatattgatgcattatctttaccgggtattgcatttatatcattttttacacacacggaagagcgcccgatagggccttactgtatgcattatattttttgatctacttgtgcatatatgcctaatatatcgcaatatattttctgatatgcttatataccttcttgtaggttgttcagctgaaggctttcgataggtttgagaa

SEQ ID NO: 9096 - DNA, 793 bp, Zea mays
  Intron number 1 from transcript GRMZM2G419992_T01 (locus G RMZM2G419992) derived from phytozome v7.0 (chr-ID 5; pos 1 46925807 to 146926599 reverse strand)
ggtgagcgggcagcggcctagatctgtgtcccccggtactccacgagctttttttggaaatctcgtgcggatctgtggtgtttggttggttgggaaggttagccgtaggcttgagatctcgatttcgtctccgtgatctggatgttgcaaatctagccacatcctgcgtgactatgcgtgtagatttacttcctgtgtgcatcggtaattcggtttcctttccacttgtgagattcgttggttcaaacttgtgcttgatgtttttttaaaaaaagtactagtttggtagtttgctagcttagtagcttttgtgtggattgctataatgcagggcttgttctgactgcttaaagtaggtttgtgaatacgtggctagacctgtgactaaatttttgctaccaatatagttctggaaattagttggaaaatatgataattgcatgtagatttgtaatttgaagtactattatacaatttcaaattattaaatttaaaccttcctttgtaatagtgcatacatatgctacacccacctccgccagcatttagcatcattgtattatcataaaaccataatttccaggtagtatttagttgtgctagtctattaggtgaatgcttttaatcattataccattttctgttgagctttactaaggaaagtagtgactcgactcgtgaatagctgaacaagactgatctcagtatgctggcgaaaaaatggtgaattagagtaatcaatcatattatcttccatatttgcatataattatactttttgcaggtggtatta

SEQ ID NO: 9097 - DNA, 622 bp, Zea mays
  Intron number 3 from transcript GRMZM2G009928_T01 (locus G RMZM2G009928) derived from phytozome v7.0 (chr-ID 5; pos 3 953648 to 3954269)
ggaaggaggtaagccgtgtggttggggccaagaaggacgagcttgagaggaagatccggatgttcacgtcatcttcctcatcgtaaactcctgtggttcgcctgggacggagttgctgaagtgaaatggttcccttctctgaatgctgaaaaaaagaaaaaaaaaactatgtgaaaatgatggtagacgtgtctgggtcagtaataagagtttctaaaatctgaatgagatttgaatcgctccccgttgatgaatttctcatggtctgtgtattccaccatgattcataaggtcattctcagtgatgagttttaatacactgtttctaatgctgccacatcaaatttaaactaaccagggaactgtatagacagagtttcatccctataaagtctatcattttctatgaaattctctctatatctctcttattaattacattgctgtgtcaccaagtggaatgatgtatcactgtttaatgagtatgaaatgaaacttctgttgaaaatgacctaataattcttctatcaataaagcgtgactttcgaactgtttcacgccaattttgacttctatttctcccgcagcgagcttcgtcccaccttcttattacagtatcaca

SEQ ID NO: 9098 - DNA, 873 bp, Zea mays
  Intron number 4 from transcript GRMZM2G162461_T01 (locus G RMZM2G162461) derived from phytozome v7.0 (chr-ID 5; pos 1 65658647 to 165659519 reverse strand)
ggagaaaggagttcggtgcagataccattctcgaggtaactataatcagatcgagtatttgtaatcatatattactttctaaaacgtcttagataaaatatatatttgtttaactttaaattttggaaaattggataaataaggaaaattttagttatatatctttatttagatccaattgatgtgtacgagatctattggatactctatttttttatttttgcaactttgaatatgacataatttagtcagcttatataaactatctgttttttatgcaagtaatcccagttatatgtatgtgccaaacatactgaaacgtgtacatgcccaacgtggatgcaactctacatacagagaacattacgcggccattttagatcttcaatatatatacgtgacaaccaattatttttattagaaggccctctgaattatctaacacggtattaaatacacacacacacacacattatataaggcgttagtgtgtaacataatttagattaccaaagttcacacaaattgattaacatgttagccattaatattatccgtggatataacttatttcttaattgagtatatattatgtatctaaccattataagacaaaaataccaaaacaaattaaaatatataaaataatttcatccatatataaatagattaaagtattttctcaagggtattcaattgaataccattatttttaccaaaaaagtttatacatacagtatacatatacacaaaaaagagaagcaatcttaggaattatttacaggctattagttcataaacttttgtaaccttttccttttctctaatgcaatcttaggaattcgaattcgaagaagctgataaggtggcaga

SEQ ID NO: 9099 - DNA, 895 bp, Zea mays
  Intron number 2 from transcript GRMZM2G020146_T01 (locus G RMZM2G020146) derived from phytozome v7.0 (chr-ID 5; pos 6 9099837 to 69100731 reverse strand)
tgtcgcttgtctggaacaaattcggttgggacacggtaagtaatgaaaccgtacctcttttatgatcccctgtctcgttagagtagcaaagttgcaaactgaacattccagttttgcttgcagtcagttttaagaagaaaatgacagagcttaattacttcaacctatgttcactatggtagcaatagtcaggttaagccgttagtgaaaataaggtcacttttaaagtttctgttggagctgctagcatttgttgaagaaaatgttttcttgtccataaaccagaataggcatattagttactagtactactatctatatttaactgtatttactaactttaggtaatcggttataatcagctcaccatgtttgctgtctttatctacttaggccctgtttgtttatcctattagattatataatctagcttaaataaattgagaggtaaacaaacaacacattattaagtggattatataatctagatatctagattataataatccataagctggattatataatcctgaaaggaaacgaacagaaccttattgggccctcttaatcaaccaacttccaatagccccacggtattagttagctacaattacaagtccagcagcagcaagtatgcttactatagtagtgcagcttaactgtttagagagttgtttcccaatttccagaaagtgtctgctaaattcatcttgcgcaggcaagaaaaaaaaagaaaaagagactgctaaattcagtatatcattgtagtaatttcttattgctgtacaggtcccaccttatgttgagttacatagatcatgtcaatttcctctgtttctgatatgatttgatgtctgcagatctcaaatatcatatttgttgatcagccaaccgg

SEQ ID NO: 9100 - DNA, 591 bp, Zea mays
  Intron number 1 from transcript GRMZM2G168920_T01 (locus G RMZM2G168920) derived from phytozome v7.0 (chr-ID 5; pos 5 2758001 to 52758591)
gcaccgttacaacctcaagcgcaaggtaacgtcgccccctccgcatcctactttctgccgctagcgagttctaggtattaggtatttaggttcatcggttcatgcggcatgacttgtgactagaatgagaggaattgaggattaagacactccggtatcgggattttgggtttcttaacaggtaaggcctttgaatgtttgcaaaacatcagcctctgcacctgagccttgtagttttttttatgatttcgtgatgtttgtatgtgaataactagaggtactactgtggatttctaatttctaaaattgggtccgtgagatacttgaagagttccagttcagtcatgaaataattagattaagaaacaacatgatattttcatattcttatgaacaaaaaaacaaacatatattggtaaatttgtgtgctggttataattgggattacgtgtttagaactgttcaacttcttcttgtctgttttattatgttattgcttccttgcgttgcgtgttgaacttcagtcatgttttgttttgatatgtaaattcttcaggtggctggagttcctggtgtcacagaggctctgtt

SEQ ID NO: 9101 - DNA, 1024 bp, Zea mays
  Intron number 1 from transcript GRMZM2G135904_T01 (locus G RMZM2G135904) derived from phytozome v7.0 (chr-ID 5; pos 5 9035823 to 59036846)
ccgctgcccgtcgagagccacaggaaggtgagcgaccgactggacccgcctccgttgccttgccttgctcgctcgctcgcttctgtggactgtggactgggtgggggcgggcggacgactctgccttcctcctgctgctccttgacccgcgggtcacgggaaatctcttgccaaggtcggattttcttgggatctggctgctcgcgtgccgtgcaatttcttgccatgtagtaggactgtagctgtaggagggcaggagagtgactgcctcgtttccttccgcgtatgcattggggagctgtgcgggtgatgcttttctattttcgatctgatcggtgctgcctttactccgatttcccagcttatgaaataatcgtatatatatgctcctacttactgtaatagtagtatggtgctctcgtcttgcgccgtcaaacttcagttattagctctatatctcggcaattgctggcatcgtccgcgttatactgatcctgtggggaaatcttctctaagttgcccacttgtgtttttgataatctgatcagctgaccagggcaccggctcggcttcaatgaggtagacttgatctgcacctgtacctccagttttcctttgcctgttgctgttagggattcgactagctcaatgagaaaaagtcttgtcctcgcgtgtgttcctactgaattagctgaccgcgtctttagtgaaaagtcaatttttagttggtcggtcatggcccaggggaaagatcctagctttataaacttgtagatgcatgtcatgcggccattccatttgatttgctgacgaacatctctcagcgataggatacactactgttcagttagccataggttgtttcactacaggtattttgtaacaagtcattccttggatactcatcattctgtatatctctggttaacttcaatatgtacttgaaattgcggtcttacagaactcagtagaaatggagttcttcacagagtacggagaggcaagccagtaccagatccaagaa

SEQ ID NO: 9102 - DNA, 566 bp, Zea mays
  Intron number 1 from transcript AC209835.4_FGT007 (locus A C209835.4_FG007) derived from phytozome v7.0 (chr-ID 5; po s 21905159 to 21905724)
cagcgaaaaagtctccagcagggacagggctcctcgtagacgccgggccggacagccaggccatggctgtcttggtgtgcgagacctcgcgtcgccttgtgtgcaggcagtgtccgccgcgcgcatgcggacacgggcagggcgggcgcgggagtggccggctcgactctcgagcgcgcgccggcgccggtttaggcgggctgaatcattttgcaatcgattacctgagcgtatggtcctgactcctgacgccgcttcaaagaatgacaactgttttttttacggagagagtatgcattagctgtcccgatatattgattccaacaccgaaggcattgcttctctggccgtgtctggttccttttgtttttttcttccatccttttgacttgaaagaaccgtttctgttttatgaatccaaatgccaagtcacgggcagcggccacaacgataaagtacggcctaacgtattgggtcattattttatgctaccattttaaaaacaaaaggtactggaaagcacccgtgttttttgcttcaaattatttaattacaggttattttga

SEQ ID NO: 9103 - DNA, 966 bp, Zea mays
  Intron number 1 from transcript GRMZM2G024415_T01 (locus G RMZM2G024415) derived from phytozome v7.0 (chr-ID 5; pos 2 03190870 to 203191835)
tctcctcaccatcattctcggtatgacttgttgccactgattcgccgtgttcatagcttcgtgtagctccatttaatttgatggtggtgctcgggggagaccgattgggtcacggtcgatctcctccaccgcgcggtcatggcggaggcgcccctgcttggttggtgggggggagatgaacggcgaccgttgatgtggcctgggtggccacgattaaatggttcgcgtaccggttcgctgggtgaacctgggccgttgatcaaagaatgggcgggcaagatttaatgatagggaattaagatctagccgtcgatctggaatcgaacgaccagcgtggtgtaccggttcgtgagacttggatctaatcagagccatagatggggaatccaacggctcaaaacacaagttaccctttcggccgtcaatgttgcatatgagccatcgtccttttagtgaatcgacccgaagtccacacagtagcgctatgtgtcttaggatttcttatgcgttagcccctgcgctttcctataattgacgcccagtccagaaaaatagaaaatcggggaaaatgaaataggaatttatttttaatgcaaaaataaatactagaaacttgtgtaaatcatagaaaattcattttaactcgtttttgacccgttccaatttctataattttgtattaatattgtttagcacttaatgactctgttttagcatgaaaactatattaaatttgaccacttaattatttccgtatcaaacacataaaatcttcagaaattcataactccttaaccgtaactccgattttaggggttctcattcccacgatctcgtagcaacgcgtagatcattattatgtagtatattcttatgtttggtgtgatgttaattttatctataccatgtttgtttgtattgctacgactagcgcgaggacacgtgtcatctgagcaaattggtacc

SEQ ID NO: 9104 - DNA, 850 bp, Zea mays
  Intron number 1 from transcript GRMZM2G395392_T01 (locus G RMZM2G395392) derived from phytozome v7.0 (chr-ID 5; pos 1 41158413 to 141159262)
acaaacaaggctcacaaaagtgttactggaaaaaggttagtttcatgccaagcaatctacctagactgttattcccgtaccatctcatcacttttgcatgcatgccatggggccaaacttttcatagggctcggacatcaccatccaacaaggttgccaagaaactttttagagatgaagacacaggagatgacgatgttgctggttctggagacgttgatgctgagtagcggtatgtccaattctgccctacaacttcataacatatatgcttccaggtgttccaattgcatgtaatataaggcaattggtactacgcaaatcaaaagcccaatgatcagcaataactacttttacctaactaaaacactgtgatgcataggaacgacattcaaagcaagctgacaggtcatcagatatctcaaacaagcattctaaagctaacaacaggtccatatgcggttgattgaactaatatataaataaaagagaaaatggtgtaaccttctaccgatataggtgaaatagaaattagcaagttttcggaaaaaaggtcaataggctaaaacatcagcaagtcaaaaaaacgatagtcaagtggtttcgaatggattaccttcatagacctcttcagtcgagatctacgggaaaaaagtagacattatatttgagattgtaatgtttgccaaaacttgttaattgattgatacccttttttagttgcagtgcttttggacatgagcgccaccagctatggagacccgcttttgggaactgaagatcgcttttgggaactagcccagttcatctaggttactcttagaacttgcccccctgctgtgcagggagt

SEQ ID NO: 9105 - DNA, 1057 bp, Zea mays
  Intron number 2 from transcript GRMZM2G113453_T01 (locus G RMZM2G113453) derived from phytozome v7.0 (chr-ID 5; pos 1 74317737 to 174318793)
gcgcccaagcgcccgcgcgtccccgccctcgctaggtgcgcgtgtgttaatgctttgattctgctacctagagttttgtcattggttaaggtttgggttccatccctagttttggtattgttattgctttgattgattgagatgactgggaagtagtgatttctattctagtgctgccgtttctattaagcttagtagtatcggtagttcggtacaagtgagtgcaggaacaggaagtttgcctatgagtctttttgtcgatttgattacctgtcggaggcacaaattgccagaaaaaggatgtccatgtgaaagggatgtttttttgggagttatgagtgtttgctcttttggctgttgggtgcgctccagctcaataagagcaccaaatcactgagagcaaagatggtagagacattatgctgtagaaagtggatgatcagtgctaatagaactgaagctcaatattggcatattttttgcattttgaccacgcagacagttggtaacttcaatttgcctggctagcaggctggtcttgccatgatgttcttgagacaattatcctgactcagaaatcaatactttgtttacttgagttagtagattatcaatcggtgccaaaaccatgacctaggttatcactccactcttattattatcaatactaccttttgactgttactaacacatatgttttcttcttcttttaccatgttatttatttctttatttattttggtgcctggtgttgggttttcatctctagcatgccccaagtcccaactttcttcggataaagaggttttagttctggagctctgccaagaaggcctatactagtgtgggaactgaatcggggtgcacagttagggttagctaatacattagatgcaacaatttttataatcaaatgagatgctgataatacataaaagtaaatttggtagagtttattggtaggttctggtttttgatctaccgctcttcaaactacaaatatgtttgttgcttagctaacgaaacatttttcagtgtcattgtggaagctctcaag

SEQ ID NO: 9106 - DNA, 1056 bp, Zea mays
  Intron number 2 from transcript GRMZM2G178892_T01 (locus G RMZM2G178892) derived from phytozome v7.0 (chr-ID 5; pos 2 14280660 to 214281715)
ttctacctcgccgctctcgcctcattctacgccaagtaaggaaggacacacgtataatttctctctagtgttccgcagctcaaccagatttggtgactggacgccgattcgtcctttggaacgtctcccttgttctgttccatcctctctgcatcgggattataaacaacacgatcatttgtcgtctgtggagtatccacgttgctgttgttggtggcatactgcacattgctcacctaatcgcctaatttgtctaatggacccagcaattttgtcatcatcgtgtacgctttttattataatgtcggatctcaacgcgtgactctgtgccaataatttttatagccctcagcccattctcttgagtgcactcaacgaattgtgaggttggaccttgtctatggatgctcaaatatccatgctgaaatcactgtcattcatcgtatgattttgcaactcaaactcaatttcaaatagactgtcactgaggtgagagataccacagtcctatctagccacttggtatgggctgccagggtgtaggacaagggcatgatgaagaatcccaacaaactaattagtgccatgtgcttcagggtacgaaaactgatggccactctggcaccagatggatctggctaacatttgcatacttggggacttgggggttggggtgactgtaaatctgtagttcattgcggtgctgccattccttgtgcagcatttatcttaacatgtgtcctttcagaatggtcagaatttgctttcatataattgtttcgttgttttttatataccatgatcacggggttggggtggctgtaaatctgtagttcattgtggtgctgccattccttgtgcagcatttatcttaacatgtgtcctttcagaattgtcagtatttgcttttatataattgtttcgttgttttttatataccatgatcatgttccacatcttatctgctgcatgatctgttgcttatgttatctttttctgaatgctttgtttatggatgaaggaaggtggaggctggactgaagaagtacaagccag

SEQ ID NO: 9107 - DNA, 904 bp, Zea mays
  Intron number 1 from transcript GRMZM2G174572_T01 (locus G RMZM2G174572) derived from phytozome v7.0 (chr-ID 5; pos 1 30949278 to 130950181)
cacgcgccggcattgtcgtgccgctcccatccggggtaactaaaataaaattctccttcgtctcaatttactggaacaagtcttcttgatcgattgcaatgtgtttgcactagactaattgattgcgttttcgttgtgtgcaatagaaaaatgtttttgaatatccgttgcattgagctggttgaaattacttatacttcactagtttaatcgaggggggataatgtggcaagatgcttttcaagatgatcgctgaactttcataaaaaatcacactttgattggttgacctctctctttttcctctgtggatttaacagaagcttgctgttggtttcgctgagcagatttaacaaattggagcatgtaccatatattcccatgttttcagaaaatgaagtttagcaggcatactgtagcacaaaatcttaacacgtcgaaaaaatctatatgccattgtagacttaagtttcaattggaatttaaagtgctcagcacattttgagttaagacatgtctacactgttacaaggtaaatattgaattatagtttatgacgacaaccacattcactttctttggttaacctttcttgagcacccatgttgttattaattgagtttttatgcagtaatttccttaatagttatatgtggcaactgctgtctgctgatactattaactatttttttctgattttaggaaaaccaaatttggaatatgtgtttttttcatctgtggatagtttagtgttaatgtgcttatttccaggatgttatgatactgattctgtgttagctatttctgaaaataaggtatatatgctattttgtcagagtaatatttgactgtactttctacatcaacaggtttacttccaggatttatctggctctgaaccagt

SEQ ID NO: 9108 - DNA, 672 bp, Zea mays
  Intron number 2 from transcript GRMZM2G097746_T03 (locus G RMZM2G097746) derived from phytozome v7.0 (chr-ID 5; pos 1 91071406 to 191072077)
cttgcttctcagatttgcagtaagaactatttcttatcataatcattcattggtactttctatgctgaagtgttgcatttttttagtgtagctgttgcaatttaaataaatgtactccctctattccaaattataagtcatttaaactttcttggagaattaaagattcttacaaagatttatgacatcaaatagatagactatacaagaacaacaacaaagccttttgtcccaagcaatttggggtaggctagagttaaaacccaatagaacctacaatcatggttcgggcacatcaataactgtttttcattcacttctattcaaggctaaatctttaggtatattttcattgctatcgcgctttaggatcctaccatgcactgacatcaaataggtatactatgaaaatataattaataaaaaaactgctgatacttatttggtatcataaatgttattattttatcatacaaatttggtcaaattcgagatgttttgactcttcaagaaagttagaatgacttataatctgggatgaaaggagtacattgaagaaacatgcattgtgacttaaccttgcaagttacaacacctggtgcggtcatattgatgtttctatttcatcatgttgcagggccttagtttacttatatcaaagcatcatcctta

SEQ ID NO: 9109 - DNA, 497 bp, Zea mays
  Intron number 1 from transcript GRMZM2G347645_T01 (locus G RMZM2G347645) derived from phytozome v7.0 (chr-ID 5; pos 1 0674932 to 10675428)
aaggacaataacaaaattctcggaggttcagatctcactgttcactgtaattctgcagagccacatgccttttattgtgataatttgatggtcctttcaccactcctcgttctagagaacccctgaatttcttagatggtcttgcttcatttctgtgatatgaacaaagtagaacatgacatgctgcctgtgaagtttgttgcatcctagagaattagagcattaggctggaaagacgtcacagtctgaaatactaattgctggtccattcttggcggattttgatatctgactaaatttgggagatctgatcacaaaacagaataatggatttagtggaccaattttcattgcactggtagattcaaattgaattctgatttaataccatgctattgtatattgagttaacaagccctagatatgcatattcacacatctataaaccatttgctgttgcagaatttgagcgccttgacaaatcaccattcagatac

SEQ ID NO: 9110 - DNA, 823 bp, Zea mays
  Intron number 2 from transcript GRMZM2G040329_T01 (locus G RMZM2G040329) derived from phytozome v7.0 (chr-ID 5; pos 3 6066761 to 36067583)
ttacactcgggtaacgacggcaaatattaacaactgcaaaaacaacatattaaaacatgaatagcgtcaagtaaatcctgtaggatctcaaaagttgctaaatattgataagcatgggtacattctgcgagacataaccttccaaaacaatacataatttagaggaaggcaattcatatttaactacaaatcatagtcattagtcatagtcttcaaaccaacggctttaacctaacgccccatttggatccttggaattgaattccattctaataattgtaatttagatataggtcaattaagctaaaatggttttatatacatgatacaatatatttgtatactactattggccttatgggggagatatttatatgctgcatttctactataggggagcaaaccaaagagcgtgttataagctgctgagtagaaacataaactagtgatacataaaatcaattttcacccccctcatcctatgaattttggataggcttatatataaactttgaaaagtgctcgaatatcaaattccaaaccaaataacttaatctattaagtaaattccaattccttcaagatgaagggatccaaacagcccctaattgcatttccctcctatgaatttctaaaaattaacggacaagtttgaattatgaagtcagtgtgtctgtcattttgcaaaagtgaggtggtaggaaataagtagcaagcacactattctgacttccaactattggcggtagtgatgtggtagaaaacaataccaagaaactgacttacagttctgcagtgatatcctagtgttttcaaatttcaa

SEQ ID NO: 9111 - DNA, 719 bp, Zea mays
  Intron number 2 from transcript GRMZM2G075624_T01 (locus G RMZM2G075624) derived from phytozome v7.0 (chr-ID 5; pos 6 7823644 to 67824362 reverse strand)
tcgagaacggcgtcctgtgggaggtcgagggaaaggtatgttcgctccatcatcggatggctagcttgtgttgtgatccgatattctgatatcatttgtttgatgcagtcagtatcatatgtgtttagacagtacctgtgtggttggtatgtgacctatggcgctgttaggttctttcctgcgctaggttttttagtctagatgtaatttgcttgatgtggcatgccatatagtttacccaaactattatgctatttttagtttattttagttgcctttacatcccaggacttattactgacctgcagctgcaccaaaacttaattttgatgtgtgccaacttctccacatttgtaactttcttgctgtggtatgccatgtagtcaatatgtagtttacccttcgttcagattgatgtatgctaccgttagtttggtctcattgtcttcacaggctagaacttctatgttggttcatgagtgtaacctggaggtgcatcaacatgatttcatgcgcacccctggcctgagtgtgtttttttttctgtatgcttggtgttgtaccaacatttattggtctcccttattaagttatgtagacatgattgtgcagcgataatactctgttttgcttaatccattacttggttagctgtttttgtgtgattgttacttacgtttgtgctggatgattgcagtgggtcacccaaggtcctgttg

SEQ ID NO: 9112 - DNA, 771 bp, Zea mays
  Intron number 1 from transcript GRMZM5G835863_T01 (locus G RMZM5G835863) derived from phytozome v7.0 (chr-ID 5; pos 1 54986369 to 154987139 reverse strand)
tttctttggttcagccttctttatttcaacctgaaaacagaaaccatacaaaaaaaataactgacatgacaaacatatacaactgaaacgacagaaaaaccacttcaaattagacaaaaacaaacactcttctgttgatcagcacaaccatcttggaccaaaagtttcaattctctgactcatccgaaaaatgattaaataccatacgtgaaacataaggtggttaagatcaggtgagagcaataccaataaatgtgaatttagaagggaaagaaaaatgctgattttcctcgtagaagagctatagagctccatttggaatttcgaatcacccattatatagccaaaatagaggtcacatatcaaaacctaagtcgtattctagaatttcaatatccttcactccagtagcatacaaagttatgaacatttctaagtctatttcatttagctttcttgttctacttcactagtaagtgaaacataagtttacaccaaaaaaattaaaaatctaacctgcttcccaccaagatcacgcattctcccctctgatatgactctttcaacagaatcttcactttcaaaagtgacaaaaccaaaccctctagaacgcccagtgctatgatcaagcattatctgatgttcaagcaccttaccatacaatgaaaagtgatccttcaactcatctgaaattttgtgccttctcagtatcataaacaaaatgaattcgacatttgtttgttgatagcaaacaccaaccttcagtaagag

SEQ ID NO: 9113 - DNA, 657 bp, Zea mays
  Intron number 3 from transcript AC194618.2_FGT008 (locus A C194618.2_FG008) derived from phytozome v7.0 (chr-ID 5; po s 13584664 to 13585320 reverse strand)
ctcaaggtaccatgccaacagaatgcttagcttttacgcaccaggtgtgttctctttaggatttgaaactgtcttgtgatttcttttcaatgaacaaaattttgatttttcagacttcttttctggatgctaagttgtacatagagtagtttagtgctcgcatgtgtggttaatcatacaacataggttcttcaagctcatattctggatgcatgctattgttactttgttagtgtgtttcacagattttgtgttcagttgtgcaaataaccacctcatagccttatgccatgccacacctgttttagagaacctgaagatagcttgcctcacttcacagacttgtagatgttcataagcgtaatgttttacccctaagtcgttgtttgtctaaactattgcttagatgttttatgcatgtctattggatatctcagcttttatgactggaataatggaatcacaatcatgtgtgctcgctagaaacattctgtagctgtttaactagatgctggtttcttgcaaaagttgtggtctgtgtacatatagaagtcactgatgtttcctatttttcagggtcaatgttatatatttattattaagaattgttcgatgtttataatcttcctgtttttttactgtcaagcgtgtgacgcc

SEQ ID NO: 9114 - DNA, 448 bp, Zea mays
  Intron number 1 from transcript GRMZM2G097846_T01 (locus G RMZM2G097846) derived from phytozome v7.0 (chr-ID 5; pos 1 90999378 to 190999825)
ctagacgatcccaccaccagcagaatcctcaagaggttggtggtaatcttctattacatattctgctattttccatcgtgtttggtcaatggtatataaatcacaataatattgctaattagcaacaagacaccaacctttttagcctctaataacttgataagtaagcaatcagactcctttggagtgtgacaactgacaagaaatgcatttagttacttgcaactagagcaatcaggtaacaagctttgtaggcaacaagcaacatatcaaattcaacagcctggcagttctaaaagtaatagctagcaatcagtagcaatagcgggatgtagttgattaaactcaaaagaaacttgtgtttgttgtagagaaaagtagaaaaaacttccctattttgcttttcattattagtgtgttttactggtccactgcatccttgtagctt

SEQ ID NO: 9115 - DNA, 892 bp, Zea mays
  Intron number 1 from transcript GRMZM2G001887_T03 (locus G RMZM2G001887) derived from phytozome v7.0 (chr-ID 5; pos 2 7393532 to 27394423)
tgctggatctgcacgtttagcccggttacgtacatgtgcgtttgcacgatttaaggtcgttgtaactggaggctatctttgggctgttttgttgtttgatttgtggtccgaactagcgggaaagcactggggcttagtagatcccatgtttattagatttgggatatcgtgttcggggaaaaagacgtaccttggtcctgattaatcgcttgatatgctgtttgaaagcaggagccgtgctagattacgcagtgttggagggtacaagaagtcattggtttagtttccgcactctgggagtgatactgtggtagactcgtagcgttttgtcctgggtaacagctgcatggatagttctagtaaatgaatgcagttagctccagagaagttaggttaagaccgatttactagtggctcagaagatttctactgcgtggcttcccttaagcactgcgtctgccatgttttattgttcaaatagtcagggtgcatgcgtatttttattgctgaaatagccagggtccatgctattggttgtctgaactggtgcgatttggcattatgccgtttttgtctatggttacttgtttatgtcgtggcatattgttgtattttgccactttttataacttcctttatgcacttctacgctatgttatagcatttatttttgattgcaccttttccttttctatgtgcaaatatgttttatttgacattgtaatttctgcttccgttacttcttccggacaaatgttactacatattggttctgtccgctgcgttactgaacaaattgtgtactgattccggacaaatgttactacatattggttctatccgttgccgttactgaacaaattgtgtactgatttttttgtgtttcatacag

SEQ ID NO: 9116 - DNA, 544 bp, Zea mays
  Intron number 1 from transcript GRMZM2G569948_T01 (locus G RMZM2G569948) derived from phytozome v7.0 (chr-ID 5; pos 1 58544985 to 158545528)
gaggcggcggcggcggctcctctgctgttcgattggtacgcatcgggttgccttttcctcttctgttgatcgcgcgcgtggcgtatctgatccgtcgttgctcgtttctcctaccatcgaggaacccccgtagccatttgatcttgagcacgcgagaaagattcttcgtcttgattagtttcttccgcgctgccgattgggaacggaaagaaaacctgtctcgtctagtgtggtggccatttctgttctggattgctcttcttccccccccccccccccccgcacgtaggacaactgataattcagatttcaaaaaagaaatatgatgtcattttttgtttggtcgatttcgtggcagtttcttgactcggatgcttaagaaactagcggaaacgccttcagctagccacatctctccactcagatccttacacaatcgacaagcgcaagattgtgaaacttaatctcggcgttgttatttttattcgcgttttactgaccgaccgaccgaactcaaactgtgtgttacagagggagaggggcc

SEQ ID NO: 9117 - DNA, 563 bp, Zea mays
  Intron number 1 from transcript GRMZM2G448566_T01 (locus G RMZM2G448566) derived from phytozome v7.0 (chr-ID 5; pos 1 20557921 to 120558483)
attgcttcacaggtaaattaatgtctaaggcaataacctgaaattcaaaaaagcattactcgtgttattaaaaaaacttaaaactgaaaaaaccatgggtcgattttaagctcctttcaatctacataacagtagtaaacaaatgccaaaataaaacccacaagtagcatattagttccataatccaagatgaatgcagactgagagtgttagcacttatttcatcacattgactaataattctgttatgttaaaaggattattagaacatattagaacctcccctcatgatcttggaagaaaaatcctcagaccatctttatttaggatgtaaatatttgtgctcatccttttttagaagaaatatatgtgctcagctaccaatgtcactatttatattagtgtatatgaaaattgtcctctgatgggttgacttcattatttttctatgtaggtgatttttgttgatgctgatcaaattatttcagaaaatgaagaagcattatggtttcgtttgatggttgtcaggcaagggcattttctggcaggaggacatcatcccc

SEQ ID NO: 9118 - DNA, 458 bp, Zea mays
  Intron number 1 from transcript AC225718.2_FGT008 (locus A C225718.2_FG008) derived from phytozome v7.0 (chr-ID 5; po s 48599666 to 48600123 reverse strand)
caatcacatgtaagtttgacaacaatccatgttctgcacatgaacctattctcacccgcctcctcctccccttatatgaaagaataatgctatcttctatgtgaatttcttaagttttttttggatgcgatggtaggtgtacataattttgatatgatatttcgacattgcagccaagaaccataacagtagggtgctatttcctgtgtgaatttcttaattgttggtgctatgcatgacagtagggtccctcaacattgcagtgttgattttatttcgaacatgcatgatggacctaaaaatgttccagtcactgagcaagatctgaaaaacatgtaagtattatgttttgtgatgtttgtatgtaaccaacaaatataataatatgagtggtagtggggtttgttgatttggagttggtgatgttttatttgaaaaatgtgcaggagggcagctag

SEQ ID NO: 9119 - DNA, 694 bp, Zea mays
  Intron number 4 from transcript GRMZM2G115621_T03 (locus G RMZM2G115621) derived from phytozome v7.0 (chr-ID 5; pos 6 0778098 to 60778791 reverse strand)
cgatgtaatatatttgtgttatgctaatttgattcactacaatgccacaatccttaccgttcataatattttgcttctctgtctcctgtgatcgcttaaaaaagtacactgttcctagtttaagctaacttagtttgaacgcaagggatgtagcagtacttaaggtttcatctgtaatttctcaatggatgagcgagctagagtttttatttaaggcccctttggaatgcgggtttttttagttgcagtgctttggccaaaattataaattcatcgcaggaacttttaccaattcttacgcaaatgtagttgcttttacagttatttcataaccgagtatcctctacttggacgtgatggggtgaaccatgccaaacatctctgctgccatagtatcatattattggcttaaagtttacaaaatgacttcatcttctatggccacattaccctaccccgtcccccctcccacacacactgatttgctcgccaagttcgtttttcatagcaccgtttcctctatttggatgctacagagtatcttatagagttaacaaaacaaccttgttttttatggcggcattatcttgtttagctttgctgaactatcttcaggtacatgtagcaagattctgtacaccaaaatgttgtactaatggcaattgtgccttgtagatcgagatcatctacaatt

SEQ ID NO: 9120 - DNA, 530 bp, Zea mays
  Intron number 2 from transcript GRMZM2G170129_T01 (locus G RMZM2G170129) derived from phytozome v7.0 (chr-ID 5; pos 1 53769334 to 153769863 reverse strand)
ggacacaactcttgtgtgtggacacttgctttcaggtaattattatatgctgttgtaacttcttcagttcaccccaagtttctttttatctgaacgcctcttgcatgagcttgcccaaagagcaagtgttcattacagttaaaggaaaacctggcttgataagctggtaagtccacccgtcactcataaccagtttaatcagcaggaccatctacttttacaatagtgttgtatcatggaatcagtgctaaacatttcataatccttgttggtagtatttaatttgaagatcatgtaatttgatctcatgaaatgatatcgtaaaactgactccttatgtgacgtaacggaaggagtatattatttcttcctgttaatgttcatgatgtgcgctgttctgacgcaaggttgaactgcatttttgtaattttaagggattttattttatatgatatcgtgacttatgctgttggttaatatatcctgttgttttagctgtgaaggagcattgcttgaatcggggtcggccg

SEQ ID NO: 9121 - DNA, 541 bp, Zea mays
  Intron number 1 from transcript GRMZM5G816047_T01 (locus G RMZM5G816047) derived from phytozome v7.0 (chr-ID 5; pos 1 79580954 to 179581494 reverse strand)
tttctgtgtcaaccaaagggcaacagaataaaactttgataagcagccatgtaacgtgaaaccagacatgtataaaaagcgaatggaatgaccattgaaacagttttgcagtcatgataaattatccaaagaaagagacaagtctaatgttctgaagtcatgaaatgcaattgcaaacaatgtttctctccgtgtatgtcgctcagaaaatatgcaagatatatgactatgtgagcccattagtaccagattaaacgacatactagctcagaaccctgcagatcaaaaataagtcactgacttgatattctaaagatatttttacttgttttttctctcaaaacaatatattgtatgaaattaaatgaaactaaacttcattcacatcgtcccatgtgtaggaatgatgcctcccctccttcagttttctgcgtgaagcactatcaagcataggtgtgaggaccgaaactatatactatgttacatcaatgtcgttcaaattcatcttccacaccctatacaattagaaagtcacctgata

SEQ ID NO: 9122 - DNA, 772 bp, Zea mays
  Intron number 2 from transcript GRMZM2G338813_T01 (locus G RMZM2G338813) derived from phytozome v7.0 (chr-ID 5; pos 5 9785822 to 59786593 reverse strand)
atcaaggtatattagtgataacttgatgtttgaatggagctatagtttattttacaattgcaatcctatcactgtgttagacacaatagtctacaaattgagttatttgagtttaacattataaaaacaagattgctagctgggtacttatacatgtttggctaaaaagcattatgatcattatgttgtcagctgtcgctgtgttagacacaatagtctacacattcagttatttgagtttaatattataggagaagattgctagctggttaatcgtgcatgttttcaaaaaacagcaaaagtgctaaactattatgttcaaacaacttaccttatatgacttctgttgtctaatgtgcaccttgaattaatgagcaaatattgtgtatgtggatgcgtctccactggtcacatctatcttagatggttacaatgtatgcatctttgcttacggacagacatgaacaggaaagacttttaccatggaagggactgagagtaataggggtgttaaatatagaactctagaagaattgttcaatattgcagaggagaggaaagaaattgtcacatatgacttatctgttagtgttcttgaggtttacaatgaacaaatcagagacctattttcttgctctgtttgtgtggtgttatatgctgtttaatttaaccatttaagttacttcttcgttcaagagatacatttttagttgttattgtttgacttcgctctgtaggtctactcagttgaggacagtgatcagtgtctcat

SEQ ID NO: 9123 - DNA, 519 bp, Zea mays
  Intron number 1 from transcript GRMZM2G444319_T01 (locus G RMZM2G444319) derived from phytozome v7.0 (chr-ID 5; pos 1 96834949 to 196835467)
ccgcacctcagaggcggtcgatagcggagagcacggtgaaagatgcgcgatttgtgggggaggcgcccgtgcgcggagcgagcgcggttgggaacgacataggtgcggtggcagaattggcgcacgggtgtggacgcctacaataggctcttatagagtagtagggatataaatgaagcttgagtattaaagaaagataaaaaaataagcatccacaaacttgcagaatgatggattgcttttctattttatggagtatttatattttaactctgtatagaagctagccaaaatataagctaacaacgagacatgaattatgttttaagttaccttgttctcaaactctgaacatatgtttatatttttgtgggaattgtccatacttcattccaaggatgctttgacttgctaagtttattttaccttactggtcactattgttttcagatggtacaacttcttcttagctacgaatcacttgaaattaatgctatcaatattcaaaatgaaacagct

SEQ ID NO: 9124 - DNA, 402 bp, Zea mays
  Intron number 2 from transcript GRMZM2G110626_T01 (locus G RMZM2G110626) derived from phytozome v7.0 (chr-ID 5; pos 2 13171929 to 213172330)
taaaatcctcgctcggccccgtcggtctcgacaaggtatgcataccttcggctccgatgtttagtgttgattacatatctcgcccgcagcctttggtgatcctaacttttgtatataaaccgctgcatgtcatggccatgatctgtattgctagaatggaatttattctccttcaagtttagtttattgtgctgaagatggcgtggatatgaaaacgtagtcagctcggttttaacttacaacacattggctgattaattcatagaatgtattcatttttttaaaagaaaaatcaaacaaacaagaaaaatcaccgatacataaaagagcatgagtctatgatgtatgaaatgcacttcaatcaggagaaatgaaaactaattcagtacattctgcttacag

SEQ ID NO: 9125 - DNA, 721 bp, Zea mays
  Intron number 2 from transcript GRMZM2G042438_T02 (locus G RMZM2G042438) derived from phytozome v7.0 (chr-ID 5; pos 2 04631666 to 204632386 reverse strand)
caggtaaaatgttatgtttattttctccgtattttgtctttttaggcatttcttaataaatcaatctttcattctatgcattaggactcagttttcctaaagcttcttttaggtatgttcttaatctttttcagaacagcgccataacctactaatagttgtttatcacgatattcttttgttccaatcattccttgtagtttactagggagttttggtgctggtaggattttggtaatagtccatggtggaaaaagttatagcagaaaaagctctattttcagttttccatcgaacatcattttgataggttgaagagccaaggctggcatatttgtctaaaaatgagaattatatatgtcaataaatattgctttactagcctgaaatagccgaaatgtcacactacaccgtaacaaagaacagagcttaacaaagcaagaacatattaaaccaagtagttattatctgcagctcctttaagctacagtggggggggacaaagtcatgttatatttcaagtaaacgaaagaaaacaaaacaaaggagatgtgtgttcacacaaagaactacatgcatttacctcactttttgtttcatttattctatatttttcacactttattgtaggtggttcgaagttctatgatcataagacgcattcaggtcgatctcactcttcatgttcgtgctcgctgcgcagaacgccactgcagcaccg

SEQ ID NO: 9126 - DNA, 748 bp, Zea mays
  Intron number 1 from transcript GRMZM2G037308_T01 (locus G RMZM2G037308) derived from phytozome v7.0 (chr-ID 5; pos 9 3580485 to 93581232 reverse strand)
cgtgcttccttcggccgtggcgcctcctcccttaggtaggcagtaggctggaatgctgtatcaaaacctcgcgcttcttcttcttcttttgcggggtttcagtgtgtttttgaagtaatgttcctgggttcttcatcctcgctgaagcaaaattgcgccttttggtcgcaatttgctcattttttttggtggggactggggaggcgaaatttagtgctcatttggtgggcaaaccacgttataaatcgtagggcgaaaatcgtcgggatcatattctattattacaagtttttgagcgtatactgggatagtctattacaagttgcacagaaaacgcggatcattcgttttcggattttccattcaggaagttgaatctactggagtttcatttgcttattcaactctaataatcctattcaactctataaggaaacagtcgactgcgtcaataatattgtcgtatataactcaattgcagaaaatatatgttcttcctttcggagtttattaaggaaccgtgtcacctttgaaactccaaatttacctagttcagtttggtttcgaagcatccatatttctgcgacgcccgaatgaattttgctgtgttcatcatcattcattaatttgtactcctaatatacatacaaagtgcgccagtgtctaaaaccacctacctgtattatcgttttgcttttgtgctgttgttgcaggtgtggttgtggcggagaggcaccaccacctcagc

SEQ ID NO: 9127 - DNA, 919 bp, Zea mays; identical to SEQ ID NO: 4522
  Intron number 3 from transcript GRMZM2G304079_T01 (locus G RMZM2G304079) derived from phytozome v7.0 (chr-ID 7; pos 8 8153791 to 88154709)

SEQ ID NO: 9128 - DNA, 919 bp, Zea mays; identical to SEQ ID NO: 4522
  Intron number 3 from transcript GRMZM5G897073_T05 (locus G RMZM5G897073) derived from phytozome v7.0 (chr-ID 9; pos 2 7542005 to 27542923 reverse strand)

SEQ ID NO: 9129 - DNA, 522 bp, Zea mays; identical to SEQ ID NO: 6192
  Intron number 4 from transcript GRMZM2G044368_T03 (locus G RMZM2G044368) derived from phytozome v7.0 (chr-ID 6; pos 1 58948778 to 158949299)

SEQ ID NO: 9130 - DNA, 476 bp, Zea mays
  Intron number 1 from transcript GRMZM2G055899_T05 (locus G RMZM2G055899) derived from phytozome v7.0 (chr-ID 9; pos 1 54957186 to 154957661)
aagaagtctcttcctgcaatatttttgttgtgaaagtatgatccttcactttgatgtctttgctattttggcggtatatctccttcatagctgcagttaagagtagactttaggtgctgtttggttcacatatttgtaacatgataggtaactgataacgttaaaccatgttttttaagtctaactgtaatcaaataccacactagaaattgataccggcatattcaaacatattaccgctggtactcgagtgtgaatcgttaccgttgccatttacggctttacgctacatttcgtgaatcaaacaacaccttagtgtccaagggatgcagtagtgataacataccattttatcagcattctatttatccacaaacttttctctaacctatgcaatatcctttggttgattaacataccatttcatgggacaatgccatgatgggcttgttttcttgtctttttgcaccaggaca

SEQ ID NO: 9131 - DNA, 678 bp, Zea mays; identical to SEQ ID NO: 7047
  Intron number 1 from transcript GRMZM2G176604_T04 (locus G RMZM2G176604) derived from phytozome v7.0 (chr-ID 1; pos 5 408445 to 5409122)

SEQ ID NO: 9132 - DNA, 749 bp, Zea mays
  Intron number 2 from transcript GRMZM2G008730_T02 (locus G RMZM2G008730) derived from phytozome v7.0 (chr-ID 10; pos 146727241 to 146727989)
ttgttaaattcaaggtatgttgatccaagtacttgtacaccctctacgtctttgatgctgagaaagcaaacaagttgaagcaatctcttcccttagatagcgcagctttaattgacatgatattgtttctattctggtatatgaaaacttcattttggtagtattgtctttttggttggattggtgtcattttctttgttttaagtttctgtcaattagcggttccagtgaaatatgtgattggcttaaggaagactggttttagcttcaagtcaactaacatgtcattctcgattaatgggtggcttgtggctaaaactaattttgagaaccatccatgatggccaataatagctatgagatccgagggacttgtatgatcacttttttcagtttcttttctgaatcaattttgagaaccatccatgatggccaataatagctgtgagatccgaggtgttagtcatagacgtcgcttgtgccagcggctcttgtcgaagtaagaggagcgtgtagcagtttgttgtactacgctgacggctccaacgaagaacctcgacagctagcgtcgcgccgacgatagcggcagccaccacgggcggtggcactagcaaatctgaatcaagctaaccaacacaaatatctgacattactatgataagagtatctaagtgcactattaaattgatctatgtttgaataaatatcttatttaaacaatatttatttgtgcctctgcagttacccaa

SEQ ID NO: 9133 - DNA, 678 bp, Zea mays; identical to SEQ ID NO: 7047
  Intron number 1 from transcript GRMZM2G014366_T02 (locus G RMZM2G014366) derived from phytozome v7.0 (chr-ID 1; pos 6 365312 to 6365989)

SEQ ID NO: 9134 - DNA, 1023 bp, Zea mays
  Intron number 6 from transcript GRMZM2G313678_T03 (locus G RMZM2G313678) derived from phytozome v7.0 (chr-ID 5; pos 1 034734 to 1035756)
tgttttctatccaggtgaattttttcatgagctattatccctactgcagtatgcattcgttattcaattatgatgtttcttcgaccttgattagggatactagttttttttcatgggttattgggttgatcaaaacttaagttgaaatatttttgattagtgcatattgttgcattaaattaaagtagtgacccgaaattactcatcgagtacccattgacatctttagtctggtgtttagctggtcacatttgatttggaagagcctaaaccattggaattagatcatattatttgtacagtttaacttaacgctgatattttcaacaccactgtattaggcattgtatattccctatttgtgtgaacaaatgtttctattcatcaactacttttgttaaataatttaagtttgcaccaagaaaatctgagaatttacatagattgacagtttgaatttgttgttgttgaatgaaaacacataaatagtattagtttgttttaaaataaggtcattaaagagatcactggtctaagtgttgtcttggagattgtgtcaatatgttaaagtacttatatttttatcatactaatataaaacgagaataaaaaaacattgataggaatatatacaatcaggtcatatgtattttatatttgccaactatttctgagacggacattcttgtttccagtcacatactgattcttgtatttatattcctattgtgtagaactaagagtaatttcagtagacattcttgattaaaccatacttgtgctctttttctttttcttttagtattttaagtattttctttggcttttataattttctctttgtgctgtcatgttcttagagtaaacatgaattgagttactgatggagttattaggcattccaatgcaatattgccattgaatcaccaaagaaaaattattgtgagggaattgtttatatgttttaagtagcctgtttggtctgcagggtcgtggaactgttgttactgggcgtgttgagca

SEQ ID NO: 9135 - DNA, 704 bp, Oryza sativa
  Intron number 2 from transcript LOC_Os01g27340.1 (locus LO C_Os01g27340) derived from phytozome v7.0 (chr-ID Chr1; po s 15258251 to 15258954 reverse strand)
gccagctttccaggacggggatctgcttctcttcggtctgtagttcttctgtactcttggacaggagtcgtgaatagtttgggagacatcatgagaacacagaactaaaccaatcgactggcatgcatattcggcagctaattgagattttacaactaaacagagctttttgcagggagttccactgcgatgctctctatcggtagtataaagtaatctgaatcgttgatttcatttgatcgaagtgcttaaatctaagttttactagcatcaaagctatcagtagtagaaacgtgaagggaaattatttaaaaaaatgccagccggaggactggggatccagagccctttttccttttgtttttcttgatagaatatgagcgatatccgcgatagtgagatggatgatcaccgaccaacctatatagagaaaaacataaattaccctagtcactgtatgagtaaattattaatttacctttaataataaataattcagattatttccaccgataatataatactacaaatacatagcatcacatcgctcatttgcggcacaatagattttcatatgtttacattacaaataaatttttttcacagatttaccatctaaaatattcagatttaagcaaataaaactggctaaatgcatttccttttcagagtcccgcgcggtaggaaggtacatccttcgcaag

SEQ ID NO: 9136 - DNA, 846 bp, Oryza sativa
  Intron number 1 from transcript LOC_Os01g55400.1 (locus LO C_Os01g55400) derived from phytozome v7.0 (chr-ID Chr1; po s 31916168 to 31917013 reverse strand)
caacggcgagtagcacgggtgcatcgcttgctacgggcgggcccacgtcctcgagccatgcgtacagccgggcgactaattagtcgcccgcttgcgccctctcccctccagctcagcagaaaatcctacatggatctcctatcgcctattattgtacgacccgataataattggtttgttggttgtggattgattcatgtttgtaattaatttagcctttaaatttcaaatcaatctagcatagaatgatgatgtgtactgctaatccgtcaggcaaacgcatagtcgttctactgctaaaatcatgccttgtttagtttcatcaatataaaaaaaacggtgtttcgtcgctgaatcaatatttctactaacatttaaaaagtttcgcaacatggacaaaccaactacattaattattaagttccaacaacttaaacattaaaaaaattataaaatcaaaacttaccatgtgcaagggagaaaacattgattttttaagataatgaaaagaatcttggtctttacatcaaagaagctacaaccgaagaaaaaaaaacagtgataggggttcataatgtcaattaccagaattactccttagcggttttctctattttctcaaaaaaaaaacactcatatccgactaaaaacgatgaaatttgaataggttttataaaaaactgaaattcaatgttatttttagtttaactgatgtaccgagtagtttgtcagttcgaacagggttgaaatctcaaaatttggcagaaaaacgaccggtttttcttcttttttttttagggaacgaccggtttttgttggttttatagtgtctggccctggacgcac

SEQ ID NO: 9137 - DNA, 446 bp, Oryza sativa
  Intron number 1 from transcript LOC_Os01g28989.5 (locus LO C_Os01g28989) derived from phytozome v7.0 (chr-ID Chr1; po s 16231523 to 16231968)
cgccgattacgagtgctacgtccactacaccgagtgtaagcgacctcgccctcaccaggatgcttcgtttctagggttaggtttggggtgcttcagattgaggaaatctggggcttaaatggtcaattaggtttaggggttatgaaatatatgtaaatatacgtgcggtagtagtactgatggaataacaaaaaagattagggcattttgttcgccacagcagcatggttggtaccattaggaactagaaactgaagaatacaaatccaattgatctgttataatgatgcatgaaagatgtttttctttcttttcttctattggggtgggttcatttcagaaatacccaatttgttaggttgaccacatgtccccattttgatctgcgacgtcacagacaattctcttgtaatgtatatgtgcattgtttgtcagaaacctgtcga

SEQ ID NO: 9138 - DNA, 521 bp, Oryza sativa
  Intron number 2 from transcript LOC_Os01g28989.5 (locus LO C_Os01g28989) derived from phytozome v7.0 (chr-ID Chr1; po s 16232008 to 16232528)
aagtaaccatcaactgatctaagctgggaggtaatttctaaacctcacctctgatgtttgatgaatttcattttcttgtaaatactttttttgaccagatttcctgccatatatatttacatatatgatcgtgtagatactagctagatctttcctcttagagcatggacaatataatggttcaggcgactattgtctacataatctagacgacgcacacaatagaatattttaagcagatttttcataagtgccaaccactgcctatgttagaaaaatcttctcaagcatataagcatatagtctgatggtcatttcataaaaatctcttgatatgattttataagtgaacatgatcaaattaatttgaatgtacaagctgatatgaaattaaaagaagtagaagtttatgacatgctattaagaaaatttaggtgaactaaatccttattatgccttttttgttttcttctgacacaattgtaagtttgtttagagtactgtaagctgtggcaccgggg

SEQ ID NO: 9139 - DNA, 914 bp, Oryza sativa
  Intron number 2 from transcript LOC_Os01g25920.1 (locus LO C_Os01g25920) derived from phytozome v7.0 (chr-ID Chr1; po s 14703111 to 14704024 reverse strand)
ataacaaaatagctttcatacttgaatttggagtggtaagcattaggagcatggttaggcatgttagtattatcaaggattggtcttagcttcttaggtcaagcgtgctaaattgcatagtttctttaacaaaatatgggtgatccatgtttgacttgtgggtttaacaatgttcactgggaaagtagggaggcaactacctatttaatatagcttttctacatttaataactaaaataatccaaagagttagtttgggtcagagtttgacttggtctagaaagaaaccgtgtttcaaaaatgcatggttaactaattataattaggaagatgtttatgcctgcccaaccgatcacagctgctgtttactgttttgatctctactctgtaccaaacttaccacatgcattcttcttgaaaaacaaacaccttcttttttattaatgttaggtgtggtagcattaatatgaactcagttcaatccaagtatatagatcatgatatctccaaggaagaaattttttctagcttggatcctttagtgcagttggtagttgaagtaggaagggaagctactgctgcatctccccctcagtctgtagttcataaagcagaaaatgtcactggtaaaagggaagcatcacctcctgagaagaaaggtcatggctagcatctctttgattccttctataatccaatataatgtctgtcacagaaatatccccgtaagaatgtaaataagatgtgagatttttactaaattggctataaacttgctcaaagagtatatgttccttaaaatcactcaactcacagatttgcctagcaaaaacagttactagtcacaagcttctgcaactctaatgcaatgttctgatcttttcttctgatcctttcttcatctgtcttgcaga

SEQ ID NO: 9140 - DNA, 680 bp, Oryza sativa
  Intron number 2 from transcript LOC_Os01g24090.2 (locus LO C_Os01g24090) derived from phytozome v7.0 (chr-ID Chr1; po s 13582247 to 13582926 reverse strand)
gggtagacgaagcaaggaagcgcttcctggaggtaagttttccagctaaagatatgttttctgaatgctagatttcttgatgtgttctacttcttactaatgaggtatggtgcgtgacgtgaagaagtacgtaattaatgtcctcaagtaagatgcaaaatctttgccacttctgtagactttcatggtcttatcaatttagtttgttggcatgaactaacttcctaaatggtgtttttactgtccattatacactatctttacattgcgtacttcattctagcaatcaaaactgaagctttcaaatctaatgaatcgttcataatatatgctgtggaaacatctatgcctccatggtgactgcagtacataacaaattcaaattatcaattgactaaaagtgtcttaagctgagatcagctggcagagtactaaacgaatacagtgctattgggcgtccgtactcacttgatgatgaccacatttataaatttcttaaaattttctatgcatacgacataacgcgtcctacatgtacaaatttctaatattcttcttgacaaatctctcccaaatataaatggcctgcagcactatgtgtaaacagcccacactaattgctggtaaatgtaaactttattgcgcttcactttcaggttggtttagactcaaggtctgta

SEQ ID NO: 9141 - DNA, 1014 bp, Oryza sativa
  Intron number 1 from transcript LOC_Os02g34150.1 (locus LO C_Os02g34150) derived from phytozome v7.0 (chr-ID Chr2; po s 20417150 to 20418163 reverse strand)
ggtccttcggatactacgttcaagacctcactgaggtattggatcctactctcctttagattccctgtttattctcatgcaaatgctacttactcctatgtgaatctgatgtagcctctatttggaataatgagttgtgttgggttggcattaaactatatttagagctgcagattttgtgctgttcagtgaggatttttttttttttggatggggggaggggcatatattgatttggggggtttgaaagtgtagccctgattctttttgttacggcatgacagaaaattaggactgctagatggtattcctcggctagctgcaatttgggcagaaaaggcagtctttgttgtgaatgatagatcaagtttcttgggtcagcttctcctgggtacttcttaggattatccatggactgaattgaaccgagttttgccgagctccaatccctatacctacttaatgactttgaacttctgtatgcagaatctattttttaatgtctccagattaaaaaggatgcggctgcgtgttttgattattttttgctgttgcaaaggtgcaaaccgcagctcgtgtccctggcgcaagcagggaatgagatcgcccgggagagtctgaagcatgaaagttgtttttcttgagggtttcttgtgtgagattggggtttcatgtctgtatgtgcgtgttcgtgtggacatcaaaatttttggtggtgttttgcagacctaagtagcttggatccgtctgtgatggaagctgtcttaacaaactacttgctgtaagtttacattctatggctttggtgcagttctaatggatttcaacatctcactgtgatgttgcaacggatgcttcattttcaaagatcaaggccattgcaaagggagtaaacccagaagaaaatggaaagaaatatgctcccatgtactcgatgaatgatgttagtggtgcactactgcagtttgctgttcaacaactcaatgattttgtacctttttatttgatatgcag

SEQ ID NO: 9142 - DNA, 817 bp, Oryza sativa
  Intron number 2 from transcript LOC_Os02g43850.4 (locus LO C_Os02g43850) derived from phytozome v7.0 (chr-ID Chr2; po s 26473620 to 26474436 reverse strand)
tgaaaagttgctgtcagacaaagttatagttcatcgtaagcttctccctattcgcgagtgtgtatatcatttttctgaatggtgtttggtgagcaattgtactgccacttttctatatatacttcagtaagaccattatggcatcttatctaatagcaatacctgttacaacttacaaagtgtgatacgatgggaatgtgcccaatggacacctctcattggtgccatcttttttgttttgcaattttggtgatcataatgaaaaaagaaaagaattttacctcatcttccatgttttttgggatctccttgctcagaggctacttgtaagactgcaagagggagcatgcccctctacgcggttacaacagactctcggctgccttgcacacccataattcctcacggatcacccaaacaatatcctctattgtccaattcaaacaaccattgaatatcctaactttgcactctttccaaatcattcattgcaacaagatcaccaaggtgtgttgcgcttgtagaatatgtccctacctgtgagcaacagttacaaagttatgattcattaaggggattgttgcaaataattattttgctttccatatgtgaaacacaaattcaaatatagtagataactttgttatcccagtcaatgcacaatcatatgtgtctttgtatttgcactacagcattggaggctggagtcatacagcatatgttccataattaagatggatgttttcttgctttgaaccatttcattatggttaccttacttcagtgatattttaattttgtaggtagcaatcgcaac

SEQ ID NO: 9143 - DNA, 635 bp, Oryza sativa
  Intron number 1 from transcript LOC_Os01g25880.1 (locus LO C_Os01g25880) derived from phytozome v7.0 (chr-ID Chr1; po s 14681658 to 14682292 reverse strand)
gcgatctccatcgcagcggaggggaggggatcctggtgcgtcctctttctgattcatctctctctctctctctctcccaccccaccgggactggaatttgcttgcgttcgtgaaccctactagcttctcttctagatcttctcctcctccttaatttgatagccttaaacctctcttaaataattcaggtaataacagtttgtttgttcacccaaaagtttgggggttcaactgaacccccatgtcccaagttggatccgcccctgggtctaggccacatctttaattttgtgcagattttcttcaattcaaagtggtttgcgattaggagataaagttttatttggaaaaaaacactattattattgggctgtgtattagcgaaacagtactgtaattgtgtttgaaaaccgaccgatcagttcctttttcctaaaaaatattctaggcgctatagcggtggaattaaaacttttgcgtaacatgaatgttgtaaaggttttttttgtagatgtttgaagtagtatcactttctgtgtttggtttaatggtttgaattattgttaaaggataatacaaaattttcagcccttataattctttacttcaaaaaaatgtaggagtgaaataaaagg

SEQ ID NO: 9144 - DNA, 910 bp, Oryza sativa
  Intron number 1 from transcript LOC_Os01g55880.1 (locus LO C_Os01g55880) derived from phytozome v7.0 (chr-ID Chr1; po s 32179376 to 32180285 reverse strand)
caattgccccaaaattgtaaccaaatcttgatgaagggaagggaaggagaaggcgaggtcagagaatcctaaacgttcgctggttcttggacggtcagtttcacccaagtgcttaacctgcagtcgatgcactcctgatccaggtcacacattctatccggtatcccgtcgacgaccgccacactttgagccagtggtagttacggccgagaagcgcgcggccctccccctttcttccccgttcgccgagactcgtcgacgcttccccgcctcctcctcccaccgaagcgcgcgccgcctcggccagaaaaggtatctatccttctctccacgctcgctacatggccggcggcgtagaccggagtcccattaggatttcttccttctgaaaagggttggattggtttcgtttcttcggttggtgatgaactgtggcttctttgattggtttcgtagcttttttttttttctggcgttttatcttgctgcgggcaaccccttacctctcccgtataacccattagtttttgaggattttgtttttttgcgtgatagtagagagcactgatagatattactcgaaacaaagcgtactggtaggttctagcactttattatttccaaagagtttgagggtttctttgcttactcgcctggaccacgttaggtgcgatttaccttcaataattcagaatagattgatcagtatctacggacaaaaaaaaaagaagatagtaaaatgtttattgcacatttacgatatggtagggttccaggcactacttgttagtttgttagttaatagtagtttgtaattatttagatgccacaattcaaagcctttcttagttacctagtgcattttgtactagttttaagcaaaatgtttttgttctctgcgcagctggag

SEQ ID NO: 9145 - DNA, 940 bp, Oryza sativa
  Intron number 4 from transcript LOC_Os02g11030.3 (locus LO C_Os02g11030) derived from phytozome v7.0 (chr-ID Chr2; po s 5907423 to 5908362 reverse strand)
gtagctggtgttggagtcgagtctgtctttccactgtaagtgagcgaatattcgcttccctttcttcattcttttttttaaagtgcatatagaaattggcacttattgttttttgctattctattactgcatgagactgattgctcattcaaatttgagagccttgcatcatgcttaatacttaaaggtttgagcaggctattctccactagtcttttgcttggcagacaggatcatttttctttgattgtgcataaacaaacattcagttccatatggccacaagtgcacatagaactatatgcatgttattttgcattagaagtgtagttagttccttgcaaattttggaaatgctcatttaaagttggtgtctgtttcttgggtatcctttggcttcctcatatccctgataggctgatgataacagtggcatgctgacactaccttcattgtttgcattctgtaaaaccatgtataactttcttaatcatatatatatattgataaatacctggttaacaaaatcctaagaaagtgaatgtggagatttgatacctatagtacagatgtgcaataaattcctgtgttgtttgagctccattgcacatggagcttgtagtttcataaatatgcatgtctctcacgaaactgcaattttcacccctgcaaacatatattccttaacccctgcggtgctgtgggtatatttgtagaatggaagtaatgcaataggatgttttcatgtatttactcaatatttcttccttgttttgtagttcatctgaatttttcatacaaaattatcataagttgctgaaatcaaatatgaaagatatcattacacctgattcattttgttttgtcttttgtctttcttgatgcaacttttctcttgtgctcagttactctccaaacatcaaggaaatcaaggtcttgg

SEQ ID NO: 9146 - DNA, 616 bp, Oryza sativa
  Intron number 1 from transcript LOC_Os02g40830.3 (locus LO C_Os02g40830) derived from phytozome v7.0 (chr-ID Chr2; po s 24737176 to 24737791)
tattgttaaggcagaggaagctgaaagcctcgcaggtacgagttaatgtcagagacttacgaatatattgaacagcagcttgacaagtttctcccagtatgtgcttcagttgtttgttgcttcagatgataatgggcagctgatttagaagtttatacataactgttccatgcacactagtctagcttcacagtctacacagtaacctccaatgcaatttattgctattatttggttttggcaattacatgtgttataatgaaatatgcaagtaaagataatcttattgtatgaagtctgacatccttgatactaccttcagatttgaataaatccatatatgataggtgatttattccttcaattgattaattagttccttacctttctcaccaacttaagatttggttatttgttgttttggttctgagtttgactgcctcgatgccttatgatttgaagtgaatggccttttaagtgacatgcaatgctctcttttcttcatagtcattcaattcttttcttcgtagtcattcaattaagttgtatactatacatgttatttgtgtatgtactcctacttttaagtgtttatgttatctcctctgcagcaaaa

SEQ ID NO: 9147 - DNA, 951 bp, Oryza sativa
  Intron number 2 from transcript LOC_Os01g51210.2 (locus LO C_Os01g51210) derived from phytozome v7.0 (chr-ID Chr1; po s 29437265 to 29438215 reverse strand)
cccaccgaggtatgcaattcttttttgtcttctcttcttctttgtgcattgttcagaagtatttattgccgactttccactatgccttctaatctagcagcacctaattggctaattggttattaggcacaagggtctatcacgtactcgtatagaatgtaaaatgactgaaaatctccccgtttaaacaaattaaggagtgatagcatcttagaacgcttgctgtcagatgggtcatctcaatccatgccatcgatgtatcaaggttttcatgagcattgcatcagctatacagctcttatatcagtggccactagaatcaacacgactgttagtccagcttgattcacctttgcctatcagcttagagataagtggtcattaaggaaataaggagacaaggaattcggactagaatttaggtggtataattgcagaatttaggtggtgtaattgcagcctaacagtttagacttttgggcagtacaacttggcatttttaaactttgccactcggtggatgtgatataatagaatctgtaacttgccaataggacagcacaagttgtgagaaaaaagtaacaagcagtaggtaattcaaataatgtaatcgctctggtaggcaggtgacgataggcattggaatgattgcaaatcttagttcagaaactgaacatatgtagtcatggtcatatggatagggtaaacgtaaacaaaacgatgctctctcgacctttatcaaggtgaagttatatctccagaattttctgacgacatgtactgtaactgtttgcccatgtttgaagaatagtgacaagtcacaaaagattaagagtagtctcaaaaacttatccttgaaactacgagattacggcctacttatgttaccatttgacacaccaaaactctaatgtagatatcaggtgcaagtgttggagaagtgaaaattgt

SEQ ID NO: 9148 - DNA, 897 bp, Oryza sativa
  Intron number 3 from transcript LOC_Os02g46710.1 (locus LO C_Os02g46710) derived from phytozome v7.0 (chr-ID Chr2; po s 28517863 to 28518759)
gtggattgccttgccatcttcgtggtaagtatggagttttcagtggttaaaagtttttattagtacaaaagccaaacaagaaaaaaagattgttgactgtaatttactcgagtctgaatgtagttgtctgctatggtaccagaaccagcatagtataccatgggtaatgcagtttgaaattacagtacagcaaagtaatttaggtgtccgttgaattccttaattgtagactaacaaatgtccacatctgtagtaactgaatatcacatcgcatttgtgttaatatatattttatattgtgattgggtaaaaaaagagctttacgtaaggaattagatggtgaggctgacttcgaatggatcgagtactgtggtttttatttgtacgttttttgtgattttcttttgctatggcttccatttgggtgcagattttgagtcctattgtttggattagattgttcaaaatggatattccaaatggataggttggctgggattattagaaatgtagtttcagatcaagctaatcctgaaaattccacgaggtgtgatttatgtctttacaaatttcagacaaattgatactctcttcgttatatttttcctgtgcaggtcatgagacaatgcacagctcggttgatgaagccctcttgctaaatgtaccgcataatcaaatcaagatgcaccttgttttttgtttttttttgttttttgtttgcataagaactttcatttgagctttcagtgtatactagatcgactcccgccgcaagcttgtcccattgaatagtgatccaccataaccattcaccaattcggttgcaaatctgaaattctatgatcttagattcttggtacagctggtgcttcttctccaagactctcgccgagcgcg

SEQ ID NO: 9149 - DNA, 667 bp, Oryza sativa
  Intron number 4 from transcript LOC_Os02g50910.1 (locus LO C_Os02g50910) derived from phytozome v7.0 (chr-ID Chr2; po s 31116949 to 31117615 reverse strand)
caagagtaagtctttgtcttcatgatggatggacttccacagggtacatttattttttttaggtataacacattcatgtatcaaataaatgggtttcagtaccttaattacaaaaggtagcccctagaactcgacggtatggatacagcctgagttaggtcacatgatgttttttttttttttttgggggggggggggtgagcttaagctgccattgaagttagggtggttggtcttcttcgcacatccagttggacttcttttctcttaataatgcaatggcacacaaacttttgcatattctttttttttttttttggggggggtgagcttaagctgccattgaagttagggtggttggtcttcttcgcacatccagttggacttcttttctcttaataatgcaatggtacacaaacttttgcatattcctagaaaactgtcttgatcttttcatctaaattttaaccaaacttcttttgtttccaaaaaaaaaaaccttttgctttgagccaatccacaatacatcattctgatcagtgcagttcaaataattgttcctaactttcattctggttgagaaattgtttctcattattctcctctaatatcattttgtttttctttaacaggagagcagcaatctccaaggaaatagcaaagctga

SEQ ID NO: 9150 - DNA, 503 bp, Oryza sativa
  Intron number 1 from transcript LOC_Os02g04440.4 (locus LO C_Os02g04440) derived from phytozome v7.0 (chr-ID Chr2; po s 1957460 to 1957962)
gacttgattttaccgtaaaggttgtagtgtaaacttcttccttggtttctgttgttagggtatcaccatgattaagcaggaatagtggttctttggaatctgaattccctatacttctatacaaattccctatacttctatacacagctcgattatcctaaattaatgggattgagatgtactccctccgtttctattttaagtttgatcaagtttctagaaaaatttagcaatatctaaaatatcaaattagtttcattaaatctaacattgaatatattttgataatatgtttgttttgttttgaaaatattactgtattatattgttctataaacttggtcaaacttaaataagtttgactaggaaaaaagtcaaacggcttataatattaaatagagggagtacatgtttagtcatcaatcaatatcccctattcctggcgcttatgtacttcccttatgtggtttgctcatttgtgctatgctctgcagattaatttg

SEQ ID NO: 9151 - DNA, 1026 bp, Oryza sativa
  Intron number 1 from transcript LOC_Os01g70920.2 (locus LO C_Os01g70920) derived from phytozome v7.0 (chr-ID Chr1; po s 41051413 to 41052438)
atcaggacccgatcctcaccggcgcacttctcctggttagaagctcctcctcctcctcttcctccccctcgagttcctggttgattggattgatggttggttggttcgctttcccccctaatctggttgaatcgggttgtgttccgagcaatctgatccaatccgatgggcgttctccggcgaggtggatgccgcccgcccgccccctaggttatgcgagattttctaggaagtagccctcgccccttcgccttcttcggtgctcaacacgtagggatgaatcgcggctatcggcttccccgttagtctgaccgatccctcaccggcaaaggctttcgagtaggcctccccgtgcgcaccactgatccatcgctgaggggatggatttggataggttagtacgtttgttggtggtgaactctaatcaaaatattttcgtcttgcgtgggttctcatcttgagttttggtgtgggctatctaatcgaaatattttttctctccagtcatccagtttgttgaggattcgtttgatgcgtggtggttttgttcatttcggaagttttttggaaatcggcttaatccccatgcccctacgttaggttgtcctctgtctactgtaacgattgacatggatgctgaattgttgttaggtcctttatatgtatctatctgtatgacatcatttttatagctccttgatttggatggaaatagggtttgtggtacatgacaggttgattgttatgtgtcgcatactgcacatggatgaaatttgtagttggatactactcaggagtgctactgtctattgaattaagaaaaacaggagtattattttcatgtcatcatgcaacattattgaaatttttaataagaaactactttgtgttattttgcctatttgtataaaacttctacgttctctgaatccccttgcataacaaacattgctggatacataaaaatcgattcctcttattgatatttccatcgcttcagttcattgcaggagcaaagcagtaaaa

SEQ ID NO: 9152 - DNA, 931 bp, Oryza sativa
  Intron number 1 from transcript LOC_Os01g13530.1 (locus LO C_Os01g13530) derived from phytozome v7.0 (chr-ID Chr1; po s 7556812 to 7557742)
tgcaggaaggcctcctcttctcggacagcctcaaggtatggtgatgaatgcgatgtgtcacaccgtgtgtgtgtgtgtcttggcctcctcaagccgtcaagatgccgcaatctttgcttcttgccttcttcttctcccacctccttttgccatggatctaggtagaaatcgggctgcgatttgttgatttcttggcgaggtttaagaaaagtaaaaacctgatgatgatgatgggtcttgttctgggggtcacactcagttgtgtctcgtgtgccgttttgtccatgtcaatcacaagattttgtccctagtttggtagcaaaacatgataggctctctctacttgtacacctttccaagcttcactgtagttgtaatgtttgaaagttcttactatgccttctacttttactatgtggttataaatttctgatcttgtagtgtactacactattactctctgtaatgtagataatcatctgtttcttgcataattggctgtgcaactctgcactggctgaatctttttaattgatttctccctaattgagcaaatggagcctagaagacagaaacccagttccaagggcttttactagaaagcagcaaaattacttgtaaattcatggtctccttgtccattttgaattttggacggcttaatttcctttagcaagttgatcagtctattggtgtgaaccaatggcgtgcacagttgcattcctttgtcaaaattttcggtgctcaggataaagaagttaggatccttgttcacaacgaaaccccacatgccttcgcatgagttaattagtaatgtttctcccatatgtagctgagctggcatttcttatagtactgtatctcctgtgctgggcttaaattatatttctttgtaggacctgaggaatctgcgttcacagctatactcagc

SEQ ID NO: 9153 - DNA, 534 bp, Oryza sativa
  Intron number 2 from transcript LOC_Os01g46120.3 (locus LO C_Os01g46120) derived from phytozome v7.0 (chr-ID Chr1; po s 26222274 to 26222807)
gacggtatgtttgaatcaaaaaacacctctcgccttgcacccacctttgacaatgacgttttgaacgagagatcgtggcagttctccttttctaagcacaaatcgtagcggttgctatttagtaggtggggctttattgtctagaaaggtgcgtgcctggagatataccacaatcattaacaatattttgagtatactagtatatgataatacacaccatgccactgccaaatatttggtaaacattatatgatttccacgtgatcaattgttttacccttgagttggttgcatagaacaaaattgaaaaaaaaaacaaatatgtcaggtcaatgattcatgattgtgttgctacaaatgaacaaaatctgtctagtttataataggataataaacggacatgctggaagtagtaggtgaagatagtttctctaccatataaagcaacaattttgatagttaaaggtccctttcaactattattatccatacatacggattctaaacgatgtttatcgcacaggttgcaagggc

SEQ ID NO: 9154 - DNA, 704 bp, Oryza sativa
  Intron number 2 from transcript LOC_Os01g05660.2 (locus LO C_Os01g05660) derived from phytozome v7.0 (chr-ID Chr1; po s 2701239 to 2701942 reverse strand)
tgacaagaaacagagtcagggaaaaggcagtggtggtaagtttactgcttcatttttttgttacctgctagttgctataggaccttgaatactatggtgcaacagagtgtagttgaataatacaactgtgcaaattcatgtggttggaaaggttttttgcttgaaaaaaaaacacacacaagacaccaaggagaaacgctggacactaaagaggaacttggtgtcaattaattaagaagaaatgcgagcgtgcactagagtcgaacacgggacttcggggttgaatccgcatacctctgccactgcgctagcaagcgcttctcttccatttgatatttaggcgaattatgtaacttatgagaaatattaccataaaaaacccattggatatgagaggaggggctctcatataagaaattattaagaggagtgaggctcgaacccggaccggctagcccactaccttgtggtgctagccggaataccccaggggccttctcatgagcaatattactaaaacagtgtgaaatttactatttgactcttagtggtagtacagtagatacttaattccttgttatgtaaaacttaccaaaacagtgttctgctttgattatgatttttattataaattattctccttgcacgattataatttgcattagatgaaaaaataattgtaggaagtagacgccgaggttcat

SEQ ID NO: 9155 - DNA, 746 bp, Oryza sativa
  Intron number 4 from transcript LOC_Os01g54620.1 (locus LO C_Os01g54620) derived from phytozome v7.0 (chr-ID Chr1; po s 31422827 to 31423572)
aaaaagagtaaggaacatggaaccatttcatagatccatgtgatccatcaaaaacttaacatttcttgattcatatacattatttacagttacaaatgaaaattcttgtgtatattaaaatatatctgattagatcaataggctaagaatactcttgatccttgttgacatataaaaaaacaaactttatggtttgggtaaatttagaatctggctatatctaaccttttctttgaatgtactagatgccagatcatgtgcatttagaactgaacttgttgtcttatgcagacgttattcgtttagaactgaactaataaatccctaatgcagatattatctcacaatgctaaaatataaaacgtctaattggattactacagaaaaaccctttagctaatttcgagatcagcatatgtagtcaatcttaagttcttaacacatcatatttcatacttcattaataaggtttcattttggtgcagcttatctttttctggtataacactaggccttcttattttgtgatgcgaacagtacatgttcatctttgttcctccagtatactatcctagcctattatgcaacctttttaacttcgtgttcatatcctgataatgtgccagtaaagtctcagtttcagaaactcttgttacttcaggttttaaatgctgattgttgacataacactgtacttggagaattgattgtaataccaagcaatttgcccttttgcagcttgacag

SEQ ID NO: 9156 - DNA, 412 bp, Oryza sativa
  Intron number 3 from transcript LOC_Os01g66840.1 (locus LO C_Os01g66840) derived from phytozome v7.0 (chr-ID Chr1; po s 38808190 to 38808601 reverse strand)
ggggatactcagcaataaccaaacagtgaattctggtacatgcagataacagatggttccttatgtcctgataagccattgccttttctttcttttctttctttttttctttttgcaaggaacctttggcttgtatttgtttacttatgagccaatttataagccaaaaaactaaagcctacacatatagactttaccataaaagaaaaaaagtcagcttagaaatctaaaccaataaacctaatctaaaataaatggggcgttcagtggtaaacatattttttttcttattaacatttagaaggcttttgatatatgtcctttttttaggattgaatacttcatacttttactaattttcaataattgtgtattagatttttacaactggaacaaagttgtcataaggtat

SEQ ID NO: 9157 - DNA, 391 bp, Oryza sativa
  Intron number 1 from transcript LOC_Os01g66840.1 (locus LO C_Os01g66840) derived from phytozome v7.0 (chr-ID Chr1; po s 38808917 to 38809307 reverse strand)
gatcctcctcaccggcgctcaggagaagggcgcaggtatagtgaattattggtttctgatgttagagactaaggcaattatcatagtatgccgacatcttcaccaagggtcttgctagttttgtaagattgttcgccttcaactaccggggtgttagttttgtatctagttatctctttgttcgttttctctgattttctctcgattctgtttctataagttggttgtaaagataaggatttaccatgtgtccgtttctatatatatactcgttgttcgtgattaatcgaattataccatgttaactcaaatacgctttcgcttgaaccttgatagcatcaagtcctcctgaactcatgaactgtgtgttgcatgcttgcagtgtgcttgg

SEQ ID NO: 9158 - DNA, 858 bp, Oryza sativa
  Intron number 2 from transcript LOC_Os01g55350.1 (locus LO C_Os01g55350) derived from phytozome v7.0 (chr-ID Chr1; po s 31862823 to 31863680 reverse strand)
gggaggacatcagggagacggtaaatgatcccccgatcgctccatgccataatgcattttggtttctccttatttttctcttgttgatctgggtggggtgagtactgcatgctcgaagatcgctttgtgcgcaaatcggaggtggtttggccacttatcttaaggcattttggatttgtgtgtttcactgattttattctctgcatgttatattatttgcatgttttatgcgctttggtagtggaaatgttatttttttaaaaaaaacatagtgtcaaatcctttcttctgttgtcatctccgttttcctggaattgtactctcgtatgcaactcatgttttagccagggagtagattgccatgctgttcaaagtagtagctatgcaaagatgggcggatcgcttgctgtcattgcgactttccgatggtccagtggaattacgcccctttatttgaggaatggggtcttgttataaccttttgttattgttgatatgttgcagtctgtgaacaaatgtgtcacgatttgttaatggtgtatagttttccatacttctaccttcatcttgtttctgtatgttgttctacatgatttcactgtgcagtttcgacatcattgagttgtctggacacgtgttggctaatccagtcaagcaatctataaaactatgaggcctgcgagtgttctgctagtatcattgagtttttgtgtcatctgtttgctataccgttgcgctgattttttttaatgaatagcttgattctttcaatttctgcaatataatgagctttcttcaattaaacatctataatgtgttcaaaattttgcacttctgttggtatatgtaggttcaaga

SEQ ID NO: 9159 - DNA, 719 bp, Oryza sativa
  Intron number 1 from transcript LOC_Os02g13280.1 (locus LO C_Os02g13280) derived from phytozome v7.0 (chr-ID Chr2; po s 7071617 to 7072335)
gtgcgtgccattgttaaaccaaaggttatcttcaacaaaaaaaaaaagaaaagaagaagaaaggacatcacagaaatgggagagtctctgctttaccagaataaaaaaggaacaccaaatcttattccactgaacgttattgcttctcgacatagacgcatctaaggtgctccttttccgggtttgtttgaattaaaagatggagagagcaaatatctgctgaataagttactattaggttggtgtatgaggggatacatgtacttttaaattatttaagttcccatcaaaataagtgaattccagagtatgtgggctgctaaggattttgttcctaatttgtggtatgatatcttcggttgagatactgagagtcgtcaaatcaacaatataaagtttggcacctacgtatctctttaattagagcccataaattagtattatcttttttccaacatccaaatgacactttgaacttggtgtttttatttctttttgtgaattaagaaacatgaaacctaaacttatactactgttaagcccaatgcatcttgttgcagaggctagattgatttttattattgaaaaaaaatgatactactagtattgttttcttctggtctaagcagactaattatgtactgtaataaggtactcaatttcctctgttttttttccttgcaggaattagggataaacaagttccatcattacattgg

SEQ ID NO: 9160 - DNA, 821 bp, Oryza sativa
  Intron number 1 from transcript LOC_Os01g52020.1 (locus LO C_Os01g52020) derived from phytozome v7.0 (chr-ID Chr1; po s 29900134 to 29900954 reverse strand)
cgagcggaggggaagaatcggttgagggaggtattttcggcttgaactggcccgtcaattatatatattctaagaagatagcgagcccattgtttcgcttagaataagccaaatggcatatttgcatacgaaaagtaatttgtgaaaaaaaaatatatacgtgttcttagcttagcgatctaaaagcaaaagctaaaaaataaacttcgatgaaaaaaccttatcagctcgaaatttaagattataaattaaaattttggttgataagcataaaagatgaggatgtgttttgacaaatcaacaacgattttataggagacccgattataagaatgaaaggatggacacatatcttattttagatactaattaatgaataaacagaacggacacaaagcagacaagcaaaactatctactccagggaaagggctctcgcatcgccctctccacgggcgacacgagaggtgacgccgccaccgtcttcttcctcctcctcccctccttctctgcctcgccgccgcctgagcgggcgccggcaaagtcgcgcggccgcagggacggtggcggcggggcttcgcctcagcgcgcgctcggcggcccggggagctggccgggcggcgacggtggcaaaccgtccgaatccgcgcccgcctggccggatccggcggggcagcgcttggcggcggggcggagtggtggcggcggtgactggcggtgcctggtggtggcgtatagggccggcggcggcggaaacccccgcccagatccgcgctattttggccagatttggtggggctgacgccgggcgacggcgggcgg

SEQ ID NO: 9161 - DNA, 656 bp, Oryza sativa
  Intron number 1 from transcript LOC_Os02g02710.2 (locus LO C_Os02g02710) derived from phytozome v7.0 (chr-ID Chr2; po s 1017711 to 1018366)
gtcaccccgatctcccgcaccctctaccactccaggtgcgcctccctcccacgaacgaacccctccctgccgtctactcttctcgggggggtttcgattcggaatttgggggtgatttcataccatttcgaacctaggtcgatgccctgcttcagtatactatacctcgtggttgacgaatcgagagagtgtccctgtttgcttaggtatcatttgctgctgcgcgtgatttcactgcgatttgttctcgttttccccctcattaagtgtagtctcagattggtgtggtggccattgctttgtataaacggcatcatacatcggtcctggcaccactaatgtggtggtttctaggaaaaaaaaagaatacgattctttttattttttttcagcaagtggtatactggcaccacaagcctgtatcttaatgcaaacgtttgcaggcctagttgtgagcatgtgagctgatctgaattttgtacgagtgtgttcaaccttgcattgcttgcttgcttgagccggtctgatgaggagcatatagatacaatgtatcggctttttgattctgtctcctgtgtgcagagcatcatgttaactgttccttttgtttttcctcttcagtgattcccttctgagtgatatcaaggccttggttg

SEQ ID NO: 9162 - DNA, 658 bp, Oryza sativa
  Intron number 1 from transcript LOC_Os01g49026.2 (locus LO C_Os01g49026) derived from phytozome v7.0 (chr-ID Chr1; po s 28172938 to 28173595)
aacctcaccagcaacgtcaaatccatctactacaggttccgctcgttctcttcccccccccccccccccccccaaccaaagtttagaattcgatctgatctgataagtagggtcatgcttatgtctgttcgattggatctgggatttatgcgacgacatggtttgatctgctcagattagccctaattctttcgattcaatccggaaccgtgcgacctggtagtttcactgtaggcatgcttccgctcttcttgcggcaatttcgaaatctcggggtgcagtttaggatcaaaatctaagtactatgaataataagaaaaggatcaagtaattctgtgggccagttcatactgccagaaactgtgggtcaaattgcacacttacactaggatctactaaaattagagtaatcaggcttcatgaatcaactgaaagttttcaatgtttacatgcttttctacttcatgctcagatagatgctagatacctcccattaactattaactcttttcgtaaccctttcagcaattctagtcattgatgattatttttgactgcttcacttttataccaagatggcaaggtgatatgtcttaaccgtgaggattgattttgcgttgcagtcggacattcttgtcaattatcagtggagttgttg

SEQ ID NO: 9163 - DNA, 948 bp, Oryza sativa
  Intron number 1 from transcript LOC_Os01g66800.1 (locus LO C_Os01g66800) derived from phytozome v7.0 (chr-ID Chr1; po s 38786350 to 38787297 reverse strand)
gaggaaagccatcagccggaggaggaggctggcaggtaagggtggtggtggcggattatttttcccaggcggatggatctactgtctgcgaaattgatctattttctcatgcctttgcttagaggcagttatttcccacctgaaaaaactatttttggtcgtttgggaaaatgattttttctactagtggtatagaaagttaatccttcttttccgatatcaagcaaggagagccgcgcacgagcataacgaaaaccaagcatagggaatgctatcatttcacggaaagcatgtgaaaccctttgatttgtttatagactcaaaaccactatctagtgtctttcttgtttcccttgcaaggcaaggaaaagataccagtttccttgttgcaactttttttttaacctaatttgacaacagggcagcctcggtgttagggatgcaaatggatcaactgcaaatcccttatagtcaaaattagtggataacctacggatttacccatggtttactcatatattttgcttataattagcatgggactcataagttacccacttatttaatatataagtgagtttgtgagtcgatctacttgtattcctacttgatatcttaactatgcgcgaccatggcagatgaatgggaacgtggagagcgggtggcttacttgctacacaataggcaaaaattgaccactgtccgtgtctcagctgtcggcaggaggtgttagtttttggagctgttataagcaagcgtggagtttttgcctgcgtggcagttgtaaccctaaaacttttcctaatcttgacaaacttcaggcggttctaccccggcccggtgatttctttttacctaagagaaaaagctacgcacaaattctcattggatcttggttgttcttaattaacagtgacggctattcatttaagtcttcgggtagcacca

SEQ ID NO: 9164 - DNA, 800 bp, Oryza sativa
  Intron number 2 from transcript LOC_Os01g55260.2 (locus LO C_Os01g55260) derived from phytozome v7.0 (chr-ID Chr1; po s 31806675 to 31807474)
cgatgtgaggactcttttcagttcattgttttctcttttttcctgatggaatctcgaagcaatgcatgtgtgatagagcatctggctggggattgcttattagattagatctgaacttttaggtttgaattagcctcgtttttgtaagaaagggattttgattcgctgaaaattcagagagatctaaccatcgtactactttggactggaatatgtaaccattggcacttcatacagacaagatgttaagttccttgaatcatggatgtgtgatcctgttcttcaaaggagtagcatcagaggaaccttagagctagaaaaaggttgtgtaaggaaaaatccctgctgatgaacattggtgaaattatcctggaaagataccaagctgataatttggtttggacttgtggcttaagcattatatctcaccctgctgatgaaggctagattaaattgaattagggcgtgcaggctttcttctgccttgtcaaaagcctatacaagattgacatgcagtttatttgttaaaggaaatagcatcaatcatctttaaatatgcttaaagtagcacacaacaaagtggcaaactaacatatgaaaaatcatagatactaacactctaaagtctcggtgattcattactggcatttcaagacacttattcctgaaataatgcttttctcatggccaactttgatttattaagacattaactcaataaaattatgctctcaaacattacgattttggagttttcttttgcagccagaagcccctcctaccttcgtttgagtcagctg

SEQ ID NO: 9165 - DNA, 892 bp, Oryza sativa
  Intron number 2 from transcript LOC_Os02g47820.1 (locus LO C_Os02g47820) derived from phytozome v7.0 (chr-ID Chr2; po s 29248042 to 29248933)
atttccaggtcatcctacgctcaggcagttctgtggtggagtctagcagtttatctgtttgtagaaataaggctttataggccatatatgtaatggtttgtatttatgttgtgttgtgaagtaagtgacttaagtattgtataatcgaagtttatgtttttatatcatttcatgcgtaactgaacatcctgggcagttacgtattcgtgggacaccatgactttatcgagtgtccccatagtaaggttgccaaaattttggcaagatttcatatgtacttactaaaatttggcaacaaactaaatgtagccacttttttggtaactttgccaaaaaaaaggttaaaaatggtagcaaagtgaacaagccctataatatacattaatttgtttattttattgtaacttgtagaaatcaaaatttaacttgtatgtttgcgtagtgatatataacatagtaatttatcttgttgaatgtttttaatattttttcataattatttaaatgacatgtaaaaaactcgagagtttataattcatttcccttttacgtttgaattgaggcaggaaaacgttttcagaagggtaaatgggtaggaaaaagtacgaattaccccctaaactatcgcggtcgtccgaattaccccctgaaccacaaaactggagattcttcacccctaactatgcaaaccggccgaattacccccctcaacccaatctgcggtggttttggtctacatggcgtacgcgtggcagtccagtcagcaatttatttattaaaaaaatgtgggacccacttgtcatactcctattgcacattttctctctctcttctctcactctgtctcacgcgcacagcggcaggcgggggtggcgagcggtggcggcggcgg

SEQ ID NO: 9166 - DNA, 952 bp, Oryza sativa
  Intron number 2 from transcript LOC_Os01g62650.1 (locus LO C_Os01g62650) derived from phytozome v7.0 (chr-ID Chr1; po s 36279003 to 36279954)
ttgggcggcagcgcagctttgctgatatccttcaggtttgtctcgattaccagttgtgacctggtggataattctttgtatgacgttgctgctgtgagctactggtggtaattattgtgcatgttaatattttactggcttatgttggaatgctgaatttagtcaacagcaaacacacaatggattatcacggatagaattttgcagtttgttgcttcatgtttttgttagcactgggttttggatccactttgtttggcaggctattcccttgtttcttcatgttatccatttttaagttggatatgtcatgggaaaaagatgcagctgtcccataagaagttttgaatcaatgaattgttccagctcgagtataattattggcaaagccactggatgaactttaagccagttgttggaatcctgtaatgtcagctcttgaagtcttgtgagaacactgacttcatttctgatcttcctgatcatccgatagtttttatgtagtttttagtatacccgaacaacattgtgaaattatgcacctaataaagcatgccattgaaattacacatttctaaagagggaagttctatacactcatcagtgtcatgaatgctattttaccttttaatacttttatcttttcgtcatttaatagtgcagtaaatttgtgtttagtttctgctgacttcggtgaattgcatgtttgattgaggagtcatcagacatcaattggtttgatctgtcatgggttcaaaacttccaatagcttggatttattttattctattgtctttggacataattgatcccttgtaacgtagctagcattttctatctttgatagatagattactttgcaattacttctcaagctctatggtttttataaccctagagtatttttctcgttgcaggacaatattggccgcagaactcctgcttcagagca

SEQ ID NO: 9167 - DNA, 852 bp, Oryza sativa
  Intron number 2 from transcript LOC_Os02g21660.3 (locus LO C_Os02g21660) derived from phytozome v7.0 (chr-ID Chr2; po s 12869638 to 12870489)
aggtacggatttcacttgttcacagtttctcagtgttcgttctgcccattcgtagttgcctgactaggcgccgcatttgcctgcggagctgcgccgccgcgaattgggggtaaaaaaaaatctggggatttaggtaggaagagcggcctcggcaaatgtaggagcgttggatctaggcgggttgattgaactacatgccagatttggccggctgcaccgcggattgcggcgttggtcgtgggtgtggggtggtgggaaatgattttcgatgctgcatcacctgcgggcaacaaccatagaagaccatcgggaggtggtcgcgttgatagtgtcgaagaggctgggttctaggatcctgatattttccacattgtgatgaagtgttagggtatgttgatctccctaatggtgggattaggtttttctccgcctactcacatctagtgcagctctcagccatggagcttgttccttatgtctggtggtctagctaacaggattgtgattgcgccgttttatgtcatgtattttcttaaatattttgatgaagctcttattttaactgtaagatggccttttgtcattgtttgggctaaaccgtggcaatgccagctaacctgtatagcttcagtagatgctggatttgttgttccatacttgtagttagctgttggctgcattatcttatagaaatgcttgaaagggaacttgttgtatttgatttttgcaattctatgctcttgtaagaaaaagatctatctcttgtagtgaacaattcacaataatagactcctcacatgttcattaatgccaaacttattattgtctactgttgcagtaagttgcagagtg

SEQ ID NO: 9168 - DNA, 988 bp, Oryza sativa
  Intron number 1 from transcript LOC_Os01g61710.3 (locus LO C_Os01g61710) derived from phytozome v7.0 (chr-ID Chr1; po s 35705532 to 35706519 reverse strand)
cgcagggcgctggccttgttgattcatttcgctgggtgcgtttgcctgtcggaatctctcgggttggagtccaggctcgtgttgggagtgccggtggggtttgcacgagttcttcgtagcgtctcttaattgcttagaaaatttagtttgtgcgccaccggggcgttccgtttgtctggatggtcggtttacgtgtgcagtatgaggatcgtccgatagtgtgcgtttttgcgaggagtgttgcatgccaagcagtttggttgtgagattttcttcctgtgattcagtactttgtgagtctggatctctggatatacgcacgttatgcttagaatttctgcactagttggacgttgcttaattaggaaaactagcttgagccttacgttgtttcaattaggcattgatatcatattttttctgttacgtgggtttgtattatgtgattttttttaacatggttgttataaatctatgaaagtttgtatttttttcatcacatcggatgtagtaacgtctagtggtatgctgattgatgcctatccatcatcagcaatttatgctatataaattcctaataaccagtattcccaaatatgtctgatttcatctgtgttcacgatggtcactaacttcatgcagtttttccttgttattgtgttttagtaactttgattggcctcaattggatcttgaacttttgatgcaattcaagtgtgctggtttttatttagtttatgcatcacaacagcggcagtattctctggtcattaataaagtttgttaaatcctgttggacatgtgacgcaaaagcataagaaacattgtacttattgacaaactcattatttatgttttctgtggttatgcatctgcagtgttgacaaatttattttgttcagttgtctcgcatggatcgattgctttggaactcattactttccgtcttgcagttctatatcttgtcaacttggatttggtaatccct

SEQ ID NO: 9169 - DNA, 757 bp, Oryza sativa
  Intron number 1 from transcript LOC_Os01g36870.1 (locus LO C_Os01g36870) derived from phytozome v7.0 (chr-ID Chr1; po s 20536793 to 20537549 reverse strand)
ttctcccgcggccgccggagccggatcccacccaggtcggttcttctcctttgtctcttgacatccaagaacttgtttctgtgtagtaggtgacttactaggaggttaatctgcacgattttaacggtcaatttgtacttgtcggatgcaattaagctttaggtgggacggatgactagcagcagtggcttatatgcagttagtatgtatgcttcgaatgtttgatctcttagtttgtttttttttttgttcatgtaaaatgcattgggcgacttgggcaaggtttcttggcaagaaacggaacatatatactgcaagcagtgcagaattgcattggcggtagcttccgtgcttcgcggatatctttcatctttgctcgtggagtcatttaacctttaggcatcaaaatcatagtacccatctgtttctcatctcaactacgcttcagtttcttttaacttcgaatttactgagataacacatcgaaatagcctgtctgttaaagtagatggcctactagttctacttgtacaaatcgaaaacctttcacgtagtggtgaaagcattaatcaatacgaattataccatcttttgaagatttcttccagttgacagttgacctgtacataaaggagataaagattgttgttgctccattgcctgatcaaattgatgtatttaatctagcaccaaccagcagttttctgtcacattcttgaattgacatgtatactcccaatctaggtggacaaccttg

SEQ ID NO: 9170 - DNA, 713 bp, Oryza sativa
  Intron number 1 from transcript LOC_Os02g17350.2 (locus LO C_Os02g17350) derived from phytozome v7.0 (chr-ID Chr2; po s 9973123 to 9973835)
ctggagatctgcgacaccctcaatcgagacccagggtgaggaaaatagaaagattattcgttctttttctgtattttgttcatgcggttttctttctttactgttgtattggttgagaggcgtcgcattcgttagcggattttgttgattttggtgagggttccaccttttgttttctccgtcttgagcgaattctgttctttcttattggcggtttggctaattttcttcatgtttgttttggtattgagacaaaatatttcgtaattgaattcagtgacttttgattgattcgtgtgagttttcgatcgaaaagtacgtattctgtttcattgtggattatcctgtttgggttgggaatctatgtgttcagatgatttctatgtgaaagccgaccttgagtccttgacagttgagaaatgttggttttaaatttaaacagcaacgtcctaattatacatcagttacaactagggcatcgaagtttgatcttgaaaagatctctttttttctagttctggagttagtttcatgtaaaaataggatcgaattaaagttttcatgtgactgtaattctgaatttcgagcttttcctataacatgcaaacttgatcaacattttggtcttgcggccagttctgtgtgaagttctacgaaaatttcagtctaagaagttctcaaacttcactgctatattcataggcaagcaaaag

SEQ ID NO: 9171 - DNA, 600 bp, Oryza sativa
  Intron number 3 from transcript LOC_Os02g39800.1 (locus LO C_Os02g39800) derived from phytozome v7.0 (chr-ID Chr2; po s 24046206 to 24046805 reverse strand)
caggtaaacagtcttactttgtcaatacatttcatacagaagttttcatgaaagctttagtttgattcgtgcacaaattcttcattgcgctctaaagatggcaccaatgtcctcttctaacaaaacagggtgcatgtctcagcatgtagctatgtcctctgttctttttacctgtatttttgtacattatgtatgctgggaatttaatgccaaatttatcaatatcattatcatataatgaactagtcttaaaatgttgaccatgcattcaaggactagtaagactggataccatttttccaatttgttttaatcaaatgtagcctgacatttgtttcttcaaaatatcattacgttacgtatgtgtgaaggttgccgttgttgttttcctatataaatctttatctgcttttgatagctgtactgctgtagctaatgctactgtagctgagggtgctttagcatcttttttgccactcatttcaaccactctcttctgccatccaaaaattgccactctctcgttaccactcttctgttgcctttttacatgtttctctgagttctaattttttcctgcactttatcaggggcctttac

SEQ ID NO: 9172 - DNA, 510 bp, Oryza sativa
  Intron number 2 from transcript LOC_Os02g46990.1 (locus LO C_Os02g46990) derived from phytozome v7.0 (chr-ID Chr2; po s 28684177 to 28684686)
tggagtttcagaaggagcttgcggcgatcgaactggtgagatatttctcggcctatctttttttttctgtgctcttactttcttagtcatggtgagctgatgatttgaacgaattggaattggttccagtcataaaccattgcaacaagtaaaagagaagaaagcggaacgttttgagacatttaggattatgaaggaacactttgtaggatcagtaatatttttgcgattgaacgtcacagctataatattttgtgttcttatggtaataattttttattcagttctgaccgacattcagtttgacttatatgacttccatatggtgtttattggtgatatttatgtctagctaatctaattagctgccaaagccatttccttgatcatttagccctgtacacattcagggtgtcatcaccagggcaattctgtatgcgaattcacaagttaggacatacttttgttatttaccataaggaattttgcaggagaagacacgcgttgatt

SEQ ID NO: 9173 - DNA, 1070 bp, Oryza sativa
  Intron number 1 from transcript LOC_Os02g05530.1 (locus LO C_Os02g05530) derived from phytozome v7.0 (chr-ID Chr2; po s 2674211 to 2675280)
tcaggtggctttacactttttcattttactccaacgtaagattgttttttatattttagtccttctcaagtgtgggagcacacgcacgaatcacgctgtgccacgtggcatcctaatcgctcgataatttgcacggatttcgatggtaagggattgattcggcgttaattgaaaaaaaggttagatgaggtgtcgaaaaaggggcttttttcgtgcgataattcctcttaataaagccggcgctatgtattcattagaaacccctttccatatacatcatatgcttggtatccttacagagtaaaaaattaacttggtatgacaagaaaattttgactgaacatatacatcctcacaatctataagaataagttaaatttttattggcgcttgctccggacattgacagtggcgcgtcatggaggtggccgctgctgctcctccatatccatcggagtctaggctcgccgccgcggaggtcgcgccgtgtgcgtggggcagagtggtggccggatccgccgccgcctcgcctcccgcccgcagtcgctcgtcacagtcgtgtccgccattacccgtgcaagaaccacgctggatccgccgtcatgccgcccgcatccacatcggacacaccccagcgcagctggatccgcgcacgtggggtgcggagcggcggccggatccgccatctcctcgcctcccacccgtctatcccttgttcagtttttgcacagcatcacatatatgggataaagatggtgatcaaactaaacattaacgtgcgtgcattctagatgagagtgaaaatgatcctacttagaaaggtggtacaacagaattcagatggtatgtaaagtaagtagtaatgcgcaagtagaataaagaatccaagcttgccacaatcttacaagcataatatagctctctcaagaagaaagaatcaaaactacggcagactgataataactattaacaagtaatcatttcagaactgaatacatacatctgtgctcactttcttgaccaatacatatacaggtggatagtgcagaactcagcccactggagacact

SEQ ID NO: 9174 - DNA, 804 bp, Oryza sativa
  Intron number 1 from transcript LOC_Os01g45450.1 (locus LO C_Os01g45450) derived from phytozome v7.0 (chr-ID Chr1; po s 25788598 to 25789401)
ctgacggaagcaacccgccttccgtgaatcgtaaggtcagtattagtagtgcttagtagtactaattaatacacctcattagctctgtaactgtaaattgtgcatggtaagcgaaacaaaaggcttaaactttgaactagccaaacgacaggctaaattacttgttcttgtgagattcgaagcgtaaattcctgattctaaatcaggacaggctagcagggtaaaatctttgttcgggaaaacaatcatggttaaaacttatattaaagatgtaataactaaagcttttctaaaatctagtgcgtacacatgcacatgcacttgtagattacaaatcttcctttctaaaaagcacacaaattttatactcgttctcataatatcttactactactagttgttttactgtttcacaactttaagagagcgcataatttttgtttggtttgtctcgcgtgcgttgtcaactttgccattttgtgaggtacaacaagaatacaatcatacgtacaccatcggccatgaccccgcactaaaaatgaacacacacgcatcagtcacgtcttgaaaacaaacaaatttggtgataagctcaatcgttttcacagtctcagcaccattgcaaaggaagatcagattaagagacatccaaaaagagaaatcccaaccatcaattcaatctcaaacttaggttagcaaaactgatcagatgctaccgtgtcgcttacaaagctgtgcgttttttttttttgtgttgccatgtaccgcgcgacgtcgcaggtgactttgtctgggctgctcaac

SEQ ID NO: 9175 - DNA, 804 bp, Oryza sativa
  Intron number 2 from transcript LOC_Os02g35640.1 (locus LO C_Os02g35640) derived from phytozome v7.0 (chr-ID Chr2; po s 21427815 to 21428618 reverse strand)
cttggctgccggattgacgtgcaccttcttggtaagtttcacagtttgatgctgtacatatctgtttgtttccacttcagggtgattttttttttggtacaaagtaatgtagggagcaatgagattccatgctttctgacgattgacgatacttcatccttgcagtatgttaatgcagccgtagtttgattcatgttgttcgaattgtcgtaatgccgcgtttttggtcttggactctcagttcaatatatctgattgccgtagacatgcttcacacagttagcagtaaccatcctttttcaatagtaggacagggtgcataattgttccccatgctttttttaacataaagttctcaaaccattttctatggtactgtttttgcctttgggagcgcaaataaatacctcaaatgttggaagctgtgtaatttccgtgcagcgtacaacagttagtagtactaatacttgtatcacatgatatttctgatgatctagctgtggcagaacaagaaaaacacacaataatatatttttagataatgggaaacacacaataatatatacatgattgtacttcacattttacttgggtttcatctctagtctagttcctgcagcctactctagcttgtttgggactaaagggtatccttttttttgggcaactttactaagggctgttcttattatattgttggttattcttcagattttctctgtctaccaatttttgttgtgtttgattttcatttccctccagccactgtgggttatttgatatttttgatctccattgcagtca

SEQ ID NO: 9176 - DNA, 994 bp, Oryza sativa
  Intron number 3 from transcript LOC_Os01g19800.1 (locus LO C_Os01g19800) derived from phytozome v7.0 (chr-ID Chr1; po s 11231786 to 11232779 reverse strand)
tcgcagtgaccatcaggtgagcctctcttccctctggaattcacaatatttcacgttgatagctgggaatttgcactgtagattatagaacaaggtgaatgttgagttagtgtctggtactctggttggtagctagtgctatgcaactgtcatcaaccacccgtacggctctggctggctcagctggagaatcaacaaagaacttgaacactattctagagatagtagcaaattcaacgatggatggactggttgtaatcataaacaaaagaaagaaattccaggcttccaacacggatgtcaagcctatccacaaatctcctcattgcccccacataccaaccgaacaaacacgcacattctgaattttctgatatcatcttaattgccagataggatttcagattttttatgcgtagaagaaatcatgccacgcaaaacgaacaacaattatgcatcgtgttgcaatcaaggcatagtggtccggctcattctctttggcagctacacattgcagcatcttgtggatcatggtgtgtgtggctggcaggtgggtccagcctagctgtttccgttagccatgtccctcccaacaacccaagtcctaatcatttttccttcatgagaatgagatggcagctaagatgccgatgccttgcacatcaatacagtcctgcaaactacaaaccgtgtcctctactacagcagcctttcaaatgagtcaaactgtgccttcatctatacaactgtacaactcacaatgcataaatgcaatgcaatgtgataagaaaaagatgggattcagagtcaaatgttcagttttgccatgctcagctgcacaaccaacatctcctaactgaatcttggatgaaattcagagtcaaatgttcagctcagccatgttaaggtgcacaacaaccatctcctaactgaatctttattcttttcttttgatgcagagagagccttgaggttcccaggccaagctacgagc

SEQ ID NO: 9177 - DNA, 955 bp, Oryza sativa
  Intron number 1 from transcript LOC_Os01g57920.1 (locus LO C_Os01g57920) derived from phytozome v7.0 (chr-ID Chr1; po s 33485771 to 33486725 reverse strand)
tccaagggagcagtcccctgttccctccattgctggtgagatcgccgtcctgcagttcctatttatttcttttggtgtgtgtgtgtttcgcatcgcgtgatagtactcgagcgatcgagctagttcttccccacttcacccgcaagtttgcttaagcctgttctgccagcgtacatgtagatgtaggcagaaccgcagaagccagtttttagcattaccgatctttgatggtttttttttgtctaaaaaaacttctttttttagtttgagggttttttgttggtttagaatcatctttttctttggtggtttgagtacccttcaccacctgggagcacaaagattatggtgtgatcttacgatgaagggaccaacccgccctaatatagcagggatgcaatctttcaaatgaaacattggttgcagttgtttttttttctcaagaatctatttctctaggctccttatggtttagtattcaaagataaacataataacggttttgaatttcggatcggtgtaccaaagcctgagtgacaacgtttgatggtaagtgggatttatatcaatctgatccgatttgctactgtaagagaagacttgattaggtgttagtggttttatgttttatcaatctgataaggtatttaagcaatggatcattctattgtgtgctgtgcaaagcagtttaggtctgctagagattgccctgctctgtgaacacaaatttggtggcccagtcattgcaatcatgatgagagtccaccaaacttcattgcatcatgaaggggccaattgaacaaatataagctttacatgatatgggccgtccccagaacattgcactttaaagaaggggggggggggggggggatatcattacttaatgtgttaataactgtgaaccgtgtgcatggcaggtgtcaggtggttaaggaatctgaagtagggttga

SEQ ID NO: 9178 - DNA, 404 bp, Oryza sativa
  Intron number 2 from transcript LOC_Os02g07580.1 (locus LO C_Os02g07580) derived from phytozome v7.0 (chr-ID Chr2; po s 3928149 to 3928552)
gatcatcaccggtgagatcctgatggtcgattggtcactgaagacgccggcagaaggagatataactatgtactccctccgtcccataatataagggattttgactttttgcttgcattatttgaccactcgtcttatttaaaaaatttgtacaaatataaaaaacgaaaagttgtacttaaagtactttagataataaagtaagtcacaaatagaataaataataatttcaaatttttttgaataaaataaattgtcaaacagtaaaaaaaaaagtcaaaaccccttatattatgggatggagggagtatacttgatggcagtacggctgatcaagatattagggatggattggaaagaataattagtgttgaagcatggtgtaagttaagtttttcagttga

SEQ ID NO: 9179 - DNA, 409 bp, Oryza sativa
  Intron number 2 from transcript LOC_Os01g73980.2 (locus LO C_Os01g73980) derived from phytozome v7.0 (chr-ID Chr1; po s 42855507 to 42855915)
aggcctcaggcaggaacttccagttctacagcggggtatgaaacaattaatcaacaatgttctctcttcaatagctaaaaaaacacaaatgctttgctatagataaaagaaaatatattatagtatgtaataaatattataaaaattatcgaacatattagtaccacttgtttatttgtttgaactgaatatttgggctattccataataacaaaagatatcagcagtcaatttttaaaaacagcagtgggtgtttgattcactgccaccatcactagagactttataggagtataggttaatggaatttaattgtagtagtaaattgtttgtaattacttcttaatttgccattttcttcttgtcctgacttgaaattaatggtgattaatcggtcagggtgtgtttg

SEQ ID NO: 9180 - DNA, 462 bp, Oryza sativa
  Intron number 2 from transcript LOC_Os02g48800.1 (locus LO C_Os02g48800) derived from phytozome v7.0 (chr-ID Chr2; po s 29862969 to 29863430)
tactggtaagcttctgttactcctgtttaactttggtctgatatggtttgtttgccttcctagtgttgctggcttgttgcccactaagataatttactttgcttccccgtgttttgagtatatattcgtgttaagtgatggaggaaatcctttatatgccaatcaaaattcatgagtttccttatgggaaaatcggttccataacaccggaagatcctgagttcacaaatataccatataaattcatcggtacacttcaatactatccaaagttttccatggttgggcatataccactctgttgcctcttttccgtttaatgatttttcttctgtcaataatccgacgaaaaagatggttttgtccttacaatggatatgtctatcctgtgctggattgacactacatagtgaagcagcccactggcctggcatccaccgtacttgcgttcgcctctgcagc

SEQ ID NO: 9181 - DNA, 541 bp, Oryza sativa
  Intron number 3 from transcript LOC_Os02g32570.1 (locus LO C_Os02g32570) derived from phytozome v7.0 (chr-ID Chr2; po s 19289102 to 19289642)
ttttcaagttaactggtctttcgccctttaagaaggtgagtgttgtttggcttatgtgtctcttgttcattgtgttatctagcaaaatatataaaaaaaagtgctgccaaagtttcttgttagaagaattgagactgctttagatcatggtacgcatgggtgtagaaccccactcagtaagttttagtcatctttggctcgaagttgagtgtcaactgtctatcattcgatcaaattgatgccaagttgcttcttgatgcttcacaaagttcaccgctataattacactcttggaatggataaaattatcactgataaacattgtaaaaaaattgaaaagtatgaaaaagggtactattctgctcagcactgatatatgtataaataggtaacgtagaaaaccatatggttgtttctttttaagcctgcttgctcttttgcaaaaaaaaaaaaacagcatattttaattgttaagatcttctcttttttgttctaatcaaaaccaggcagcatttactccagaagatctctattccagaaa

SEQ ID NO: 9182 - DNA, 928 bp, Oryza sativa
  Intron number 3 from transcript LOC_Os01g53880.6 (locus LO C_Os01g53880) derived from phytozome v7.0 (chr-ID Chr1; po s 30976178 to 30977105)
acacctgcgcgcaacagaccacagacccagggaaggtactgatagcctatatggtgctttttccatcttttctgctctcagccaaggaacacatgctcgtttattcctgtcactcatttatagttcattcgaaggattgcatatagtccctccatgctcttttccaggttcccagaaatcgcaggtgtcctatgtccatttcaatcttttgattttaacgtgacgtgcaatggctaatttacttagctgttcttggtcgatatgaacctcaaagaatatactacttcttttatccctcaaaaagcacccctttttttatagaaagagagttgtcctttttctaaacactaaacttaattcctacgctcatagtcttgtctatttatcacttattcaactaagggcattcccgacccaatgactaggatggtgtccatagcattaaataagctgccacctaggataaaaaatgatgtggcaaatgaattaatgaggaaagagaaggaaaccatgtcttgcatgagacatgatttctacataacatccaagatattatgtgagataagtagcattaaatttaagtatggaatagtagtgtttgcattggaagagtagtgtctagtactagtttcttgatgatgtagagtttatggaaactatatctagtgtcttgggttgagaatgccctaagtctccttgggcacatatattcttggattataatcactctaacagtttaattggttggaacaatagcagtacaaatagaaaaatatatatactagtacaaccaattaaattattttaactattttattttattaatattatgcaatcatttatctcgatggcctttcagagacgaactcaccagttttctaacctgtttgtagaggagctgcagcaccagtggttggttggcctccaa

SEQ ID NO: 9183 - DNA, 880 bp, Oryza sativa
  Intron number 3 from transcript LOC_Os02g14000.2 (locus LO C_Os02g14000) derived from phytozome v7.0 (chr-ID Chr2; po s 7644752 to 7645631)
tcttttcactctaccccaatctcaggaggaagcaggtatatgacttcatccgccactaccacatttgtgtgcttgtattctcttttactccctccgggttgataatacttgtcgttttggacaagagcacgctttccaaaaaacaactttggccattatttttaattataatatgtataaaggtgttaacaaatatatgattttattaaagtactttttaagactaatctatacatgtagtcaccatattttaaaaatgattcataatcaaagattctaaaatttgacctcacccttgtctaaaacgataagtattatcagtccgaagggagtagtttctcaactgtgtgaaatcattgttgctttttattcctagagaaaagcttgccttatttctcgaatagttagtttttcttcttttcccccaattgtttatccatgctgcttttcttctataccatactatttgtcctggctagggaaaaaacaaaagaatgaagcctattggaaatttagcttttgtgagattacaaggggacctttccaaactacagcaatttatgtcttagatacttttattttggatttaactaaatctgtagtgaactccttatttgatgtcctgtatatatgttttttttttgtcaatttctatggtctaaactataagtctgctctgggtatagaagcaataagttgcttactgactattgacaactgtttttaggaacatccaagttgtaattgcatcagttttttttttacttctagggactaaataaaacagtaactttccatctctcatggaatgtgatctcaattaagcatttctctgttggattcagaactattgaggaattatctgaagcagataagggag

SEQ ID NO: 9184 - DNA, 1000 bp, Oryza sativa
  Intron number 1 from transcript LOC_Os01g10610.1 (locus LO C_Os01g10610) derived from phytozome v7.0 (chr-ID Chr1; po s 5669074 to 5670073 reverse strand)
gggtcgtcgagcccgacggcaccacctaccgcaaggtacccccagatctcccccctcccctcccctctccgccccaccggatccgccgcgcaggccgccgccgccgcggcgacgatgtgaactgtgattccgtttttttttttttttttttttgcgccgtggagatgcacgtggtggcgactggcaaaggtggggtgaagatgccgccagtctggacccgcgcacgggtgtggtgggtgggtggggcgcgggtggtggaatttccggggggaattttcgcgcggagagcattgcagttcgcggattcgtggaatcctttgctagggcgattgttaccaccactccacccggtgattcccgctttgcttttgtttgcataagcaaaagcggcggatcctggctcctgattggccgatgggatttgtggtggagcgggggatgcatgaactcggggcgtgtgtgtatgtgtggatcggatcggccttatgcttgcgtgatgttgaccttgtctttgcccttggatttggggatagatatgcgcttgtgttaacatagtggttttgtaacgacgattgaccgtgagtatctgctcttcaagactgggcattagcatttgtgttgttgcattagcaagcgttgctaggttgtctcttcagaatttcatggctactgctgatttgctcttctagaactgaaacaatacaattagtactactttcgaatctgctgatgattgtaaattaatgaatcataaggtcatttttagagttgagttgaacaatggggcattggagttgcatgatctataaaagcttggaggttgtttgtgttgttagttcactcaccttgttctgtatcaaatgtgcttgtctgcgtcccaaacatcctgagaaacaatgcatttgacttaatttcagctaattgaataatttgatgaatgattttatttatgtgtaaccgattgtgcctttttccacagggatacaagcctcctgaacgc

SEQ ID NO: 9185 - DNA, 568 bp, Oryza sativa
  Intron number 1 from transcript LOC_Os01g04840.1 (locus LO C_Os01g04840) derived from phytozome v7.0 (chr-ID Chr1; po s 2227585 to 2228152 reverse strand)
catattgcctatcaagtttccacacttctttacaggtgaaggatgtttagagcttgttcagtttgttgtcgaaattaacctaaccaaaatatcttggcatattttggtgtaacaaattttggcaaagttgaatagtactaaattttggtagagtgataatgacaagagtgtatttgttttggtaccatactaaaatttagtaacacctataattagtactacctccatcccaaaatataacagcctagatacatattgtccagatacattgttaggatgtgtctcattccattttaggttgttatattttatgacgaagggaggaggtttggatgttgtaacaaagtggtcaacaagtagtccccccaaaaaagtaatcaacaatcccataaagccttatcctatcttcttcttttttctttgagcaaatttcatagtactgtactaatgttttgttgcattatctgtttgctgcttatttctgtttcaagtgttaatggtgaaaagtttgaaatttaatttgattttaatattggagatgataatgtactttaggcaagcgaagccc

SEQ ID NO: 9186 - DNA, 983 bp, Oryza sativa
  Intron number 1 from transcript LOC_Os02g15970.3 (locus LO C_Os02g15970) derived from phytozome v7.0 (chr-ID Chr2; po s 9055284 to 9056266 reverse strand)
tattgcggctgcgccgcctctcgccggaagcacacgtacgtgagtctcctcctcccactgcatcctctcgctcgttcgaactgtctaagctgcgtggtgcactgcgtcacagcgtgtggcgccgaatgcagccgccatgggctagggcttgtggtatagctgaggcgctagtcgcggccgcgaccgccgcgtagggtccggcgagatatggggcagcacggggaggcggcgcagcaaagggaggcgggaggtggctagacacagcagcaggccaatccacaaagcagctgtgcattcttctgatttctgttcttctgatttctgaacaagtagagattaaactcgatccatccatccattcggcgagccagccaacgcattcatatgtatgatgacttggtcttcgatctagtgatatccatcttgtctaattagctatcgaactactccatatttaaccaactgacaatggaattagcatgtgcaagatgatgggaagaacaattcagtgagctactgtaattgttatctaatctaccggactacccctgtatactcgtctttgagcttattggccaattgtgtttagcagtatgcacacacatgcacgttgctgattaatttggtttataagtttagtttgtgaagcaacactaataatccgtcagctgcaatagatgcctgtaaacattaattgggacgttgctgacctgcttatatatatgtatgtaatctggctagttcgatgtaggaaattgtagttgatgatctctctagtgccatataatttcattgtgttaaaacaactttgtgtgttctttcatcattacgcctcatcttttttgtcctccgccctctctgtttgtgttattgaagtttcctgcattccttacatcaactgactggagttctcgcccctctttatttttcttggtttttcatttatagtttccttcggtgttccctaccagaacaagagaagg

SEQ ID NO: 9187 - DNA, 1027 bp, Oryza sativa
  Intron number 3 from transcript LOC_Os01g15470.3 (locus LO C_Os01g15470) derived from phytozome v7.0 (chr-ID Chr1; po s 8683627 to 8684653)
ccattgggatcactagaagaccgccttcacggttagtattttattggaaattgtataatatcctctgttagctcctagaaaaacctgaaagttccctaagaatctgtagttgtgttagaaaacattttatatttttcattgttacatcatcgtgatttaaagcacatctaaccacttgaacatggtgaaaagaactgtcttctaggtgagaagaaataaaaaaaaataaagagctgataatttggcacctctttcagcattttaaagatcagtagctgatagtacataataacttcaatatagaaagagttcacaacttctgtacttttggatttccctgaattcgaagtgtgttttctgcattctatcttggcaaagaaaacaattggttttcttcaatgttccatccatcatattttctaaatttgaatttctattataatctgttgtatctgaagatggcttgaagtaattcctttaaatgataaacatcgcaaccttttaccttcaaatggctattactatgccttgctaaaacatcatttgacctttttattatgtatgatgaaggtgctattgtttttggcattgaaaattattatccagtattttggtagacctgtctaggatccagattagttttgtttccattgtcttatgcatctgatcaaaagctaaagctagcatggaatgttcaactttaggcagatctgtctagaattcagtgaggattcgagggcataacttttcataaccatccataaccacttttttttttttggtttgacgagaggaccctgcagtgtatattcaataataaagagatagattcagcatgtcgctgtttatcacccttcatgtccgtttctaccattagaccacatggttcaaaaagaattaaattgttctttacattccagtaagctacttaatttccttaagtattattactggataccctgttaaaaatttgctgccgatgctttttacagatctcagacccggccaagaaccactagattggaca

SEQ ID NO: 9188 - DNA, 885 bp, Oryza sativa
  Intron number 1 from transcript LOC_Os02g15270.1 (locus LO C_Os02g15270) derived from phytozome v7.0 (chr-ID Chr2; po s 8536509 to 8537393)
tgcggccgcttgggtggtcggatctaacatctagggtatgtaccttgaatcctggatttccctgctccgatttcatcttcttggcgtcttcatctctgggacgaacccttgttttctgtatatatgtatataataatagtcagcccgcaatcgtttctgtgttaattagctgggggccagaatttggttggattactactattagtcctgatgtgaaggtattattatatacgtcaatcttttgctgctgctgctgctgctaatatttggtttcgtgctgcttcgttaatcgtattttgttttactttttcgccaatcattgagtttataatccttgtagctattgagtttaatatcaggccgaaatcttgctgctggataggatggcagattgtcctttcctgaatttcttaatggaatagtaatccttaatcacggtgcaatcttgatagtttaggcaacagtagataaactaggatactcaccaaaattagggaattggtactaattatatatcttttatctaattgtaaccgggctatgctactctgggtgctgcatcttcttcgcgtgtgcgccacccgtatctactcccatagcgctggtccataacaagtgagcacattgtgatcatgtttgcctttccaatactgaatacagttgtgttcttcatttatgagtaattactattcactgcaacctatagaaacggtattttctttttgaattgaaaagtcactatttatgtttgcacataaatgaatatctcaacagcaacattgcaaagcttggactttatttatgtttgcacattaccaagcactgtagaaacaccacttgtgtcttaactgttactaatgcaggggtgagcaaatcaaccaggag

SEQ ID NO: 9189 - DNA, 798 bp, Oryza sativa
  Intron number 2 from transcript LOC_Os02g40090.5 (locus LO C_Os02g40090) derived from phytozome v7.0 (chr-ID Chr2; po s 24264889 to 24265686 reverse strand)
gagttgatactttcaattacacaacaatagttacggtatgtgattcttgttttgaatcagttctctgcttattctcttgtgaacttgttgcattacagtcccatttggctctatgcagctatttcggcattataaactgtacatagctgtagatgaatccgttttgagttagatactgatgaccatgaagagtttaccatatcctgtaaccaccagatttatctcctggatttggtccatgaattacgatttaggctggaaaggaatattttaagttctgttttgatataagtttacagcagctttaaagatattttttttgaacattgtattatccaagtgttattagatattagagtactggcagtgattcttttcaatcccttttgtgcatgttcattacctctctataatggatcaaccacctaactgctagtagttagtaagctaccttgcacattacagttgaaacttgaaatgtgtttttacagtatggtccctccttcaaatagtacagaagtatatgaatagttctttgttgcacaatagcaattttgcttcttatatatacttcatggagattaagagatacctagttgcctacactgtttcttctatctatgaataaaattttatggaatgagcatgacatgtatggttttttatcatagcagtgcagacctgatgttcccttgacttttacatattccttacatgagcaaactgggactaatgctttcttcttcactcacttaatttccagttcttcattgtattgtcgtgcacaattgctgttgg

SEQ ID NO: 9190 - DNA, 416 bp, Oryza sativa
  Intron number 1 from transcript LOC_Os01g59600.2 (locus LO C_Os01g59600) derived from phytozome v7.0 (chr-ID Chr1; po s 34470205 to 34470620)
tctgcacgcaggggccgatttcttctcttcgtaaggtatgccctagctcttccctgggatcgatttcgctcctgatctagttcgttctggtctccgctgtgaatttcaggaaatctgttccaaatataggtgtttctaggggaattattccgtccaattagtgtacatgccctgcccatggtttaggcgtggagccccgtagatgaagaaccccctcttgactattttgtaggatgtttttttagttaagaatttagttcatttgatgcgcagtaagatcttctttcatgcattgctgagcgcagtatggggtgatcttctgttttgattgattgtgtggatgtggattatagacagctaatccttagggttttttcgtgttttcttcaggagtagataacacagaatagttgaag

SEQ ID NO: 9191 - DNA, 687 bp, Oryza sativa
  Intron number 1 from transcript LOC_Os02g20170.1 (locus LO C_Os02g20170) derived from phytozome v7.0 (chr-ID Chr2; po s 11884961 to 11885647 reverse strand)
cgccaccgccaccgccgcgtcgcactcccacctcggtataccttgccttgatttcttcccctttcttgatccggcgtagaaagccaagccgcgattttttgtttccctgagcggaagattttggtctggccgcggaggatggatgtcccctttccggatctctcgattcgtcgtcgctagtttgagtcttttgaggctcggtttgtgatgggttgatttctaggaattcgattgatttgtgtttggattcatgttgtttcggtgaggaccaataagaggaggattgagcatgcatcgttgtttcgtctcatttggctccatttcttggttttgaacttttgatgggggcctatttgactcgtctgaaagatttgacctttgatgaaatgcacctatgccaaacgtgataatcttttgaatactcagtgcgttcatattgattttccgtttttgaaatgctacgttttccctgttcaaatgtaagtcgcgaaatgacgctttcggatttggtttgacaatattgcgttatttctttcttcggatatttgcaattatttgagattggtttgctttcttctggttcttgatgttctatttgtttgccttatggagacctgattgaaattaacattcattttatactatctaacttttgcatgtcttaaattaattcacttgcagatcggt

SEQ ID NO: 9192 - DNA, 842 bp, Oryza sativa
  Intron number 1 from transcript LOC_Os01g48830.3 (locus LO C_Os01g48830) derived from phytozome v7.0 (chr-ID Chr1; po s 28019197 to 28020038 reverse strand)
aggtagacggcagatctccaggccctcgagcctctcgtccttgttcggttgttcctgcggttcctcgtttcttgctctcttctgtgtcagatcgctatgttgtttctatggttcgcgttcggttttgttttcctctttcggttttttgttcggctggtgaagcgatttggttgatttgcttgcctgccggccggtgatggccggcctccttgtcgaattgctgtcctttgtgattctacttgttaatctgtctgatggttttgttctgttcgtttgatttttggatttcatggtgttgctgctgttgcggttcgattgatctctacttgactgtttctatgccggtttcgctaattcgcgtggaattcgtgcgtctcgttttgacccgatttcattctctccgtatttcgcagtcttctgctcataatctcagtataatcgtcttttgcttttcttggttcctctctggctgttttagagtctgggtacaaaagcatcggatcgtttggtcgttttgcaaccatgggtactctttctgggatgatgagagccatagttcatgtcagtttgttcatgttctttgtggccgtgttccctttcaagaactggttggtttgttgtcaaattttcggtcattttggtgcctcctgttcaaccctgcttctgttgcatctgcagagttcgatctgttcgttttatttccattccatgtgatggtctgagaaggcccgatttgcgactcgcattttgtagcagatctctttcctccgatcaaatcgctaatcggcgcgttttgattcactgcaggtaccaaaggcttagcccggactgcctcccgctag

SEQ ID NO: 9193 - DNA, 906 bp, Oryza sativa
  Intron number 4 from transcript LOC_Os01g23680.2 (locus LO C_Os01g23680) derived from phytozome v7.0 (chr-ID Chr1; po s 13319208 to 13320113 reverse strand)
agcaacctcctgaaagtcaagagcttttatctaaagtaagatttcatgatattccagtcccgaattgatcatttcttacctgttccatttttatcaaaatcttttactagagagctctacatggaccagtttctcttctgtgattttgtattgctagatgctgctataggcacagaagtcccaacatttttggcaataagttatgggaaggatttattaagtgggaactccatgtcaaatgggagaaaatggactctgaatcctttgatcaacttgtggacgatttgtgtttatagaatctttattatggtcaaagtagatgattatcactaccacaccaattaaatagcttgcaattgtgactcatgaattcatgtgcttccattatcagcagagttttcaccagaacttagaaatgaggccccttggaacccagaaaagcatgcatttctttagtagtgttcctctattactaaaaggttgtttaatcaattatgctaaaattctgtcttgtcatctccagtcctctatccttttggtttgccataggttcggtcttacatcaggtattcatggtctttttgtattctttggatatttcctagctatctttatcaaacatgaacatcatttttttaaggatatgagttcagggtattatagatggtgtgagaatgaaatgtatcatgaattcttcatacaccatctaaagtatccgacagttcttagaagctgaccagaccttcaccgtaacttttattgaattccaacaatgtacctctgcagaaaacatcattgttttactttaccatgtaaagctaatcttttgtccatatggtaagctgaatatgaattggtgggattttgaaattttgtaggtacaaaacttaattgagaagcctcaat

SEQ ID NO: 9194 - DNA, 532 bp, Oryza sativa
  Intron number 3 from transcript LOC_Os02g04690.1 (locus LO C_Os02g04690) derived from phytozome v7.0 (chr-ID Chr2; po s 2119280 to 2119811 reverse strand)
gcaaaaccgaagaaatcaactttggtttggattgggtaagaaaaacacacatccaacttccagtcccatcgatatatttttttatgtttaattaggttttttggaaatacggttagaaaaaaagtttatttataattatattatattaatattgtttgaaaatgagtcaccatactcgttctagatgtctaaatattaccatattaattgaagaaaaaacaaatcattatattgagatgaatctagattgataagtacaattgtatctatagaaacataagataagagttatatatcaacactcgttttgtatatctaatatacattatgtacaaaatataattatatacgtggaaatagatgtaaagagtcgtgtatataaatctaagattgaattgcactttgactatctttcattatcaaagttttaagttggaccactctttatctaatcattttagtttagactagttaatgttacctctgtactggtttagactatctcagctcacttatctcttcataccaacta

SEQ ID NO: 9195 - DNA, 1015 bp, Oryza sativa
  Intron number 2 from transcript LOC_Os01g70310.1 (locus LO C_Os01g70310) derived from phytozome v7.0 (chr-ID Chr1; po s 40714411 to 40715425 reverse strand)
ctgcgctccgtggtgcccaagatcagcaaggtgattaatgacctcatttctattttttcactgttcattgctaattatttaattaatcagcagctccagtttctactagactgtatcttattaattaaattaatcagcattttctatttctacttttctaatttcagttttggcaacatgtttcagttcttgagtgatgtatactggtgtaggtcctgtaggagtgtgtttgtcatgatatttgtcactgaaattggttccaattttggtgctgaattcttgaattggctccacttcagatccaaaaaaacatccttttttcattagatctatgtcataccttgtcatgttcacatggtaacatgaggagttcctattcagcttgctggatggttgttttacagttcagttatggtaatttcagttctgaaattatacttcaatgtcttttttctaggactttataatttgtcgtagcttgagattacacatattatggggaactttgattctgatccatggccagatttagtgatgcatgattaacacagtgccatgcacaagatgtagttgaaagtgaccagataccagataactcacaaattcttttcccccttttctttctgttttttttttgtagttcttcgtgttggatgttttgtctttaacttttgttggtttccttgaaaaaagtcgttcactttggaagtttcggcatgcgaagtgcatattcagttctctgcagtcctttcgtgtgaagaacttactactttccttcacagcgatcaagatggttttgaacaataaagaaagacctgatgtactacagttcttgggatattatgacaagttgcagtctaacaattcagcgccatgtacgatgtgccgttttttagtgtagcagtacaaaacaatttatgtcaaagtgttcttaatgccaactatgtctgactcgtttcatgttaatatctatagtttatcatctcattaccagttttcttctcctttgtgacag

SEQ ID NO: 9196 - DNA, 532 bp, Oryza sativa
  Intron number 6 from transcript LOC_Os02g16660.2 (locus LO C_Os02g16660) derived from phytozome v7.0 (chr-ID Chr2; po s 9515187 to 9515718 reverse strand)
ttgtggggcacactggaccaaaaactaggcgaaaggtagctatgttctctgttcaattgagttctgaattttgttcccgtgtgactatacaaactctatccttaaaaatggaaatcggagtattaaagctccaactatttatctgttattactagttatgcaaactattacttatttcttacactggtccttagtatttggattcttatgttttgcaaatacttgcttttgtcagaagacttggtttctcaattatcaatttgagataaagtggaaaagaaaaaaaattgttaaatctggaaataaatactccctccatcccaaaatatagtaactttgtccagattcgtagtactagattgtgtctaatccggtcctaggttgctatattttgggacggagggagtaggttttagggacattggataaatacatgggtagatttgactttggagttattatgattaaatttgtcattgctctacttaattaacttatacatcataatgtgtatacattctacagatacagg

SEQ ID NO: 9197 - DNA, 583 bp, Oryza sativa
  Intron number 3 from transcript LOC_Os01g47256.1 (locus LO C_Os01g47256) derived from phytozome v7.0 (chr-ID Chr1; po s 27003716 to 27004298)
ccagcaaatactgggtcgagagctcgcagaagagggtgagcgctcctgtttgatctcatatataacacaatggaaaaaaaaatgtttacctcatgtgtgtcaactttgtctgcttgagaggtatataggggtccatggatcgttataaggactaatgagaatgtgaattgatcaaatacgctcactgtgtctgtatggcgtgctgctttatgcccatgtattgcttttcttagtgcggcagaaggttgtttgccccttccttaatgtttcatgattgaacagaaagataattatgttgctattcccactatattacctttgacacagtatgcaaattggttaggtagatggcatatgcgtgtgccatcctgagtttatttccagtttaatgttatgatttgtttcccatgtggaatgggttatgcttgccatgtttttagcctttatatcttctcaaaggtagaatggggatttcacatagttctttactctctttgtccttcagcgcttagcctgttcactggcttttattcttatttcttttgcagtatataccttctgtagaagatacagttcttggtgt

SEQ ID NO: 9198 - DNA, 1029 bp, Oryza sativa
  Intron number 2 from transcript LOC_Os02g39600.1 (locus LO C_Os02g39600) derived from phytozome v7.0 (chr-ID Chr2; po s 23891005 to 23892033 reverse strand)
gtctggtgagtaccaagtttcatggatttgatctttttggtttgtttgtttgataaaagttctgtcaaggttcagtggtcataatcgtatcagttttgcagtcggtgctataccttacaaatatatatatatatatatatatatatatatatatatatatatatatatatatatatatatatatatatatatatatatatatatatatatatataggacactcatatggggcaccatggtatcaaatacacaaaatcactcaaatttttcaaaattttcaaattgtgagtatatacctagttataataactcgattcatacctatacctatcaacaaaacaactcaaatttaactttatttcacaatccatgattacatacctaactaattatatgtatggatgctatatacctagaatcaaaatctaacaaaaacaagttcaaattcagttcaaacttgctttgaactagttagtaaagtagctaatgttaatatctaagtaattgaaaaagtttcatactcatttgaattaggtatatactcaatttcaacaatggtgcccgggcaccatggagcaccaaacaaatttactatatatatatatatatatatatatatatatatatatatatatatatatataattttttatatcgtgatgataatgcactttagccattggttctgaatgggcttacagatcacttttatccctcaggcagaactctatgctataaaaaatgctgactagtcgccccgcttttcaaaagtcatttcatgtttcatattgtaggtattgttgtttaggctcttctatgtatatttctcctgcatccaatggatcatatatcctgaaggttcaattttgagggtttgtagaagaatatgatctttggcaactagaattcatgctaatttagttttttttttttactagcataaggcatataaaccctgttacatgtagaataaaatcctgattgttgtacgcagccgagagcaaccctccactttcctattggtcaagt

SEQ ID NO: 9199 - DNA, 695 bp, Oryza sativa
  Intron number 1 from transcript LOC_Os01g59490.1 (locus LO C_Os01g59490) derived from phytozome v7.0 (chr-ID Chr1; po s 34405578 to 34406272)
acgccggcatctactaccctcccggcagcctaaaggtgagatcggttaataattttgtgattatgggaattttggatgtatccctgaaatttgctctagatgttgtactgtaaaatagatttagaaaggaatttagtctatcactggagcttagacatgtgaatatgtgatggatttgggttattcatgcaaatcatttgcaggcagtttatcattctcactgcttggggtagttcacactaatctgaaaaaattcaggctcgtaagtgtcagagtttgggatttgggttgttacacaaataatagtatgggatttatgcatctattgtgcaaagcattcaactaatttaccaagtgcaatggcatggtgagttccattactgttttgggtttccagtttctatgcatcacactgaacattctggttcatacctggcaagtacactattctataatggaactgtaggttttgttgactgtatgctgtgatgaatcactcattgctaaggcatttgattgcgatgctacaactaagaagacaagacttttcccttgaatagtacagaagggcttaagttcttatagctacatggtacacaaaaaggaacttattcaaaccctatcacattcgtgttttattgatttacctactaaatgttcttttgtaggctagtctttgtgtaagaggaagggaa

SEQ ID NO: 9200 - DNA, 612 bp, Oryza sativa
  Intron number 1 from transcript LOC_Os02g26090.1 (locus LO C_Os02g26090) derived from phytozome v7.0 (chr-ID Chr2; po s 15316874 to 15317485)
gtaacttcgttaatataatgatacatcggacttttggaagggaaactattttgatccctcgagggaatatctcctcgttgtttgcatgttacccaaatggttatgaaaaaaactaaaaaattttgggaagatgtattaacatgtgatacaacactctacaaacatgcaagtttaaattcaacttctatgtctcgcaacgaaaaaaaattaaactatagctagttaacgtatattcaccgttaattttttttttacatagaagttgaatttgaacttgtatgtttgtggagtgatatatcacatgttaatacatcttcttttcttttcaaattttttcacaactatttaagtggcatgtcccacttcccttttggaggtgctcatataagtataggacgagtgtaccgtggtgaaaaaagaaaaactaaaattacacgttacattacatggcattgtaattttaggcttggccattagccatctgcaattctaagttactaaaaaaattgttttaaaaaaaaactaaaaaagttgcaaatcccaactatttacgctgtgtgtgtgtcatggtttgcagtcggtgatcccgctgtggaagcaagtagactactt

SEQ ID NO: 9201 - DNA, 952 bp, Oryza sativa
  Intron number 1 from transcript LOC_Os01g73230.1 (locus LO C_Os01g73230) derived from phytozome v7.0 (chr-ID Chr1; po s 42448780 to 42449731 reverse strand)
cgttctacatcgtccgggaggagatccaggactcggtaattcttgctctttctctcctttgtccctttctccgcttccagcaaatgcgaaattagttgccgtcgtcctgtatgcatatggatcaaaaccaaaaattcgagcgtttgcgcgcagacataccccttagttgcttgattctgaccgattttgtagattatgccgatcgtcctgtttctgttcagatgctacctgtgatttgggatgtcttttatgtctagcgatgccaccaaaaggattaagagtacagatttgtcggtacactgtaagaaatgtctatccaatttagagtagttccaacgtatgctaggatgacatgttgtgtccaatgggcttgaggaatgggactgggtgacagggcgtgggaaattgacaacagtctggtgttgcatttttaacatttttgatgtaatgatggaagaattgtaattatgttcttgaacagaccttgaacagatttgtgttaagttggtagctgatacacttatattatcactgaattgccatgttacagactccatcactaattggtcctattaagctcataactcatgaccccttaagattaagaactgttggagtagcttttctgtttaactcatagtttcagaaacattctgcaccatcatgctgttcactgtgctattctaccattcctgaatatacatcttccttgcatctctattgttaactccctcacacattcagaaacatatttcatcctcatgcattttactatgctagattttgttatcgctgaagatatagccccttcgtgttattgtgctgcttatttccttcataacttcgaaaacatatcacaccatcaacacacatgcatctatcttattcttctaatactgaggataaagatatttctgtgacagattgataagttgcaaactactttccatcg

SEQ ID NO: 9202 - DNA, 987 bp, Oryza sativa
  Intron number 3 from transcript LOC_Os02g12480.3 (locus LO C_Os02g12480) derived from phytozome v7.0 (chr-ID Chr2; po s 6510349 to 6511335 reverse strand)
ctgtaatgatatactggaactcctttttatgggctccataatggccgcacttggcatccgactatctgagcacggaaattttcagtggcaaaaccttactgcgaatagaagcaaagcactgcaaaatctagagctttgcatgggtcaagtactcaagtttatgacctttttcagacaagggatacaatctggcttggcccaaagaacacattacagagacagagacaatgggctccataatcttccattgaaaagaaaaataagaaactggagctggagtgggagatgtttcaagaagaattgagccatcaatctctctctctctggtttcctactggccctggagcctccatatgcaaacattcttttaataaatatgcaaattttctgcactaaaatccgccacacatcaataaaaagggcagtccttttgatgataaaacagcgccattatattaaaacaaaacctttaatataatatcgatatattaagggcatattcggtaagctgggactgcagctgcagctgctacagcccctgctatcttggagctagtccagccgaacagccctaagaagcaaaaagagtgtgtcgagagtcgaacacggtttgttgggacttgggagcacaatgacagccctacccactcaaacatatataaatttgacgataactagtatttgtaccaaacaaagttactcgaatgagaaaactggaacagagctcaaccaatcaaacgaaagtgacaacaccccattcaacatgctggtacagcagctaggatcatactagtgacttgagcaaatgcacattccatctcctccctttgtaccttaatttcttctttagatgatttgcagtttaaattaccttgttctcggttttgtcgatatataggtcatctctcctgtggcagtctaattaaccctggtttgttgttcaattgtgcagggataggcaaaatacttgatagggctttctggctg

SEQ ID NO: 9203 - DNA, 443 bp, Oryza sativa
  Intron number 1 from transcript LOC_Os02g08130.3 (locus LO C_Os02g08130) derived from phytozome v7.0 (chr-ID Chr2; po s 4302221 to 4302663)
cggagtcgacgtcggcaccggcagcgctcgcgcaggcccgtcatcctatcccccccactttgaagtttgaacccccacctcttcttcgctttgagatagtcgcatatgcgtttctggatttagctgttcagtggtagtggagatgcttttgtttttttggagtgcggaattcggaatcggagaagaaattgaatgtccagtgatgaggaaagttgattgtttcgtcgtctgaaaaattaaaaagagaaaacgataggtttcatggggaaaatggtagtatgaattatgcgagaatttgctgtggtggaagggggatattgcagggatacgtgttcagtgaatttatttcctacagtggacgtgtttaaaattcagttggtgtatgcacaagaggcatgaacttactaatatgttcttaatttaaattcattcaggtctctttg

SEQ ID NO: 9204 - DNA, 833 bp, Oryza sativa
  Intron number 2 from transcript LOC_Os01g29180.2 (locus LO C_Os01g29180) derived from phytozome v7.0 (chr-ID Chr1; po s 16346926 to 16347758 reverse strand)
ttgactcgccgtcactcccagcctttgccgcccaggtactttaattttttttaggatgcaagtgatgcttcagcgaaaaaagttgaactggacatatagattttgattagtgttaattatgagttacttttctcatcttgaatgggttatgattgctatatgtatttttcctttatatcttctcaacttctgagatccctgtttgcatgcaagagaagggcttgtagataccaggtcaggaactaatgcaagtgatatgtatccgaattggtttttgataatcaggatacgatgtgcaaacaggcagcaaaaccatggcaatctagagaacaggttggcaatttggcatattcatgtgagaatacgatgtgctacggagctaaggatggaaggagacctctccaagcagattttttttttgtttctccatgcttcttttgcctgcaagtctgtaaccaaactactcctctttcaactcacggtctagcatccgctcaatctgtatagaatgtgtcttaactatctaagctcaataattaattgagagcaatatttagttctatttagttattgaatccttagtgcctcctccatcctccctgtctctctctcctcttaactgtttgtaatgctctggattttggtggtggcaggaggatttggtctggtctgaatatgtttccagtctaaaccaagtctaaatcagtagtagactatcactgttgttgatttgagagtatttatatttgttgttgatttccttttatataattaacttgaaattgaaattgcattcaggtcacaaatctaggttcactaaacccaaaggcttt

SEQ ID NO: 9205 - DNA, 661 bp, Oryza sativa
  Intron number 5 from transcript LOC_Os02g06290.1 (locus LO C_Os02g06290) derived from phytozome v7.0 (chr-ID Chr2; po s 3142955 to 3143615)
agcacctgattgtggtaagctcaccatcacatatagcactgtattactgacaattaaccatagtcatgtttttttcagctacttcaccggattattgtcacggattatttgctccatgcctttaaaaatatgttttctcaaaaaaaaattctactgtgttgcttagattgcttgttcaaagctatttgttaagtttattatgagaatatttagtttatatctataatcatttaggtaatccactgtaataatacggtcaataatctgttttaaactagacctgtcaaggtcgaaaagctgaagctattgatgtagctaatatactccctccgtttcaaaatgtttgacaccgttgactttttagtacgtgtttgaccattcgtcttattcaaaaaatttaagtaattatttattcttttcatttcatttgattcattgttaaatatactttcatgtacacatatagttttgcatatttcacaattttttttaataagacgaacggtcaaacatgtgctaaaaagtcaatggtatcaaacattttgaaacggagggagtatataataatataaaaccgcaaatttgacattggaatatctgcaatttctaccatggtttgggcacaggcttgcaacacaggtgtgcgatccaggctcgcgac

SEQ ID NO: 9206 - DNA, 762 bp, Oryza sativa
  Intron number 1 from transcript LOC_Os02g52630.1 (locus LO C_Os02g52630) derived from phytozome v7.0 (chr-ID Chr2; po s 32185690 to 32186451)
cgtctggatcgccgccaccaaggccctgcgtcgaggtgagtgtttcgtccttcttcccacgagcagccatgtatttcttgtttcacgagtcgcgctgacttcagctactactacagcatcgtgctcgtgcagttttgcactagtcagtgtacccgttattttagtcctgggctgttcagtacgcgctgaaactgaacacgacgatgcactctctcatgatgattttcagcgtggaatttcgcactcgctcttatgtactcctagtagatctgatcagcatgattttcagcgttttactcctgtttaactgcgatatttgtttcgtgtccaacgtttgaccgtccgtcttatttaaaaaaattatgaaaaaaattaaaaagacaagtcacgcataaaatattaatcatgttttatcatataacaataatgaaaatacgaattataaaaaaatttcatataaaacggacagtcaaaattggacacgcaaatatatggtttgacttttttttttttggacggagggagtatgttgcctgcaaaatgcacattattgtgattgagctaggtggccctaatatgaagtttcaggcagggtgggtaacttcacaattggaaatgtttacagcctaaaatttatctgggcttccttgcaccgttctaaggcccgttagatgtttggtgcacacgtgtatacggtacaccttacaaaatcgtttgttctgtgcaggttccgacgataaatcgattccattggcacgaagc

SEQ ID NO: 9207 - DNA, 730 bp, Oryza sativa
  Intron number 1 from transcript LOC_Os02g07350.1 (locus LO C_Os02g07350) derived from phytozome v7.0 (chr-ID Chr2; po s 3795730 to 3796459 reverse strand)
gcgtcatccaggacgcagccagggccggagccgaggtgcgttcgaggttctttgcttggtagctctcccttcttgggttggtttctgacagaaaattggagcttcagaggttgtgatgaacggttgagcagttgggtaataaaattcaggcttaatcttgttatttccgacaaaagatgcatatttctgtgaaaccttataagaaatttccgttatggttaatgttctttgatgtgaggaactagtgattctattggtttctagagaggtcaggttgagaactggattgaaatattggctattctacaagtaaatatggagatcacggtagttcgtaatgcactaatgttataaatgctcaaggttcatcgaatcttcgtagccttctctacaaggaaaaaatatggaccgtggtctcgagtttccatgctagtgcattttatccttcttataattttttggtgggatacaaagaatgaattaggtatctatttaattaagaatcgagccaaacaaaaattaaacttaggtgttctgggctttcttgcaaaggccgaggcgtttgaaatgtaatcatcccagctctaaaaaaaaattggacttcggtggtggggttgtacaccggtacacatctcacctagtgagctaagctcatttccttttaactctattttttgatgtgccaattctcaaggcagcttacattgtcttctcctcattttaggttata

SEQ ID NO: 9208 - DNA, 585 bp, Oryza sativa
  Intron number 2 from transcript LOC_Os02g09070.1 (locus LO C_Os02g09070) derived from phytozome v7.0 (chr-ID Chr2; po s 4640429 to 4641013 reverse strand)
aagaaccctatttccactgctctctggattgcaaggtgattggctggaattatgatatcgttattctgtgtttagatgcaactgaatttcggtgagcatgagcatgctaaataagataacataattatggaattatgatctagaaggcacttaggaagaacattatcttaccttgtttcacatgcatatacacattggtccggctacccgaagaaaccaatcacagattaactgagaactagaaagaacttttaaaaaaaaaacaaatcatattagcagctttatgccaattaccaagaggaaaatgcttcagatgcaacaattatgtgccatatccatattgcaagtgatctcagcttcgataatttctcatttccttaatatataacaacttccttcaatatgcattgttaagattaaatgtagtatgcatgtattctaaacttgtaatatgtaaatatgttcagatagtcattaaacacaatttgagcttacttagatttttgggggagcacatatggaaattattaacattatgcatccatttcaggtggaatatatattacggcaaaagaaagacctgtc

SEQ ID NO: 9209 - DNA, 611 bp, Oryza sativa
  Intron number 4 from transcript LOC_Os01g25990.3 (locus LO C_Os01g25990) derived from phytozome v7.0 (chr-ID Chr1; po s 14734313 to 14734923 reverse strand)
tgtcactctccctcaccttctcagatatttgattggtatattttcttgtcttcctaattttgtccctcttttggaatactagtccctataaatcgatggcagaacttttaccttttaactccagctgtgttttaataatgatattgatagatttatgttcaaagtaaactgttgaagatataatatttcaattattttgtttgcagttcatgctcaaacttatttcatactgtaaaacgtccatgtttacagacaactcaaagttgcctttcttctgcattttctacaattatcccgagttgcaaaggtcatcaatatgtaaaataaacatctttcatacaatttagtttagcagaatagaagcagaaatataaatgaaaatagtctcaacaaacagcattttctaattctttaagtttttattttttcatccatgtgtgaaccactctagctcagctcctgaagtatagtttttttttcctttcttttttattttggtgctaaaatgttaatcaatggttgactctggatctgcctagctggtttagtcaacttgagaaatcaaaacctttttaagatgttcttgttgtgaaataggtgatcctcttaag

SEQ ID NO: 9210 - DNA, 816 bp, Oryza sativa
  Intron number 1 from transcript LOC_Os02g12050.1 (locus LO C_Os02g12050) derived from phytozome v7.0 (chr-ID Chr2; po s 6259086 to 6259901)
tctcgccggccgtcgtgagcacgccggaggtgagctctcttgcaaatttgtttctttaattaattgccatgtccttttgttttgtctttttttacattttattaatcaggtgtaatttggttgtcttgattttgaatggattaatgggacttggagatgaacaaagttacacttcgaaggggccggaaattatatatagtgttatcgcttttgatggctaaaaattgatggaaaatcttccagtagctattttcccatttactactgtaatgaaataaatgcatgcatgatcagttgttaaatagtatgaaacagacattacgttttgaaaaattctacaattttcattatattgtcaagttctacaatataccctctgtttttccccctttttttttccatcaccgccagtcaacctccattatctctttgtatttttcataatacctaaaatacccttgcaatatctaatgccattttgctgccagttgcaaataatacaataaaatctactattatttcaatatcagtgaagaaaatatgtgcttgcttagtgtatgttacatttttttaaaggcagaatggacttttcgttggggctaatagaggtcaacaaatggtcaactcatgacaatgacaaaacggtaaaaaaaaatggcttatgtgatggtatattataaaactcgtactcgtcaatgataaatcatataatcgactgtttgttaaggcaaatcatacaatttcacttttattctttttttggaaaacacgaatggcttattgtgctcatctttattttgtttttggttgcagtga

SEQ ID NO: 9211 - DNA, 225 bp, Oryza sativa
  Intron number 1 from transcript LOC_Os01g53020.1 (locus LO C_Os01g53020) derived from phytozome v7.0 (chr-ID Chr1; po s 30471874 to 30472098)
gcgtcgccgaagactactacgctgttcttggcgttgtaagtttgattttccattttctgtgcattaaacccatattacctattttcagtttttctctgttttattttctatactttggaattgttagaaaagaatggtagatggtacatatatattgcattattcagtattcacagttctgcagaataccgagaagttaatgaattcaactttcaatgctttcag

SEQ ID NO: 9212 - DNA, 505 bp, Oryza sativa
  Intron number 3 from transcript LOC_Os02g50630.1 (locus LO C_Os02g50630) derived from phytozome v7.0 (chr-ID Chr2; po s 30920945 to 30921449 reverse strand)
gcattgcgagaactcaaggtttgtgttgccattccatgtgataattctgcaagaaactgttggtctaatgcatctaaagcgtggaagaggattttgatccctcgaggggatatcctctcgttgtttgcatgtcactcaaatggttataaaaaaatttgaaaaaaattaagaagatgtattaatatatgatatatcactccacaaacatgcaagtaaaaattcaacttctacatctcgcaacgaaaaaaaaacaaatttgactctggatatacgttaactagctgcggttcaatttgttttttttcgttacgagatgtagaagttgaatttgaacttgtatgtttgtggagtgttatatcacatgttaatacacttttccaatttttttcaaatttttttataaccatttaagtgacatacaaacagtttacccctaaagcgtcttcttttcttcctcttggctttatcaggagagggcattgagagagaagtctggattggctcc

SEQ ID NO: 9213 - DNA, 875 bp, Oryza sativa
  Intron number 1 from transcript LOC_Os01g07170.1 (locus LO C_Os01g07170) derived from phytozome v7.0 (chr-ID Chr1; po s 3388658 to 3389532 reverse strand)
cctctccctccccttggctcccgacgacctctccggtgtgtccgtgcacgatgtccaccacggcctggtccttctactaccctgcgagcttcccgacattctcctgctccgcatactggtgctcgatccggcatccggacgccgggctctgctccctcctccgccgcgcgacgctctgcccgacgaccagtggcgccaaacccggcgcatcatcggcgccgcggtgctctcgcgcgcgcatcccagtaggctgcacttccaggcggtctgcgtcaccatcgacgacgaccgccctcgcgcctgggtcgccttcgtcaacggcgaggattgcctctggtgcatccttccacgctccaagcatgttagggttcttcgttttgatctcagcatgtgctgtgccgcccacgatcagggacagatctgctggatcgcctccaactccaaccaagtgctcgcactggaaccttcatctttggagtttcagttcataacttcttctccagctgctgtgccggttgatgtatttgcatattttctgtcttggccacctgcatttcttagcctgctcgaggttgttttctcacggttccaacctatttaataatttagatttgtccatgcaacaattgtgtttgctaaactaatttattgttgctaaacttattttaggagaatgatgatgcgctaactgacagcttgatgagtcttattaaaatagtcttctacaatatatgctacgtgagaggattgttttctaaggagttcttctctgatatgccttttctaccgacaggttgaaatcttatttgaatctatacctattcttttgtcacacttgtagcaatgaactgataagtttgtttcttatgacaggg

SEQ ID NO: 9214 - DNA, 783 bp, Oryza sativa
  Intron number 3 from transcript LOC_Os01g42350.1 (locus LO C_Os01g42350) derived from phytozome v7.0 (chr-ID Chr1; po s 24053162 to 24053944 reverse strand)
tacttgctttggccggaaggctcaaagacctcaaggtttgcaataatctttcttcacttgttttgcagtaactgcaatgtaatgaggcctttagctttagcaaaccagtctccacttcatctttaatgtagtatatagttcgccaaaaaacagagagctttgtttggggaatgcgtaaaaggcccaggcattattgcattaagatagtgggtaattttataatccttgaaaatgtatctagaggtaccatattttctagtataaaatttgatatctttagatactaaggctgcgttcagaactgctagttcccaacccctatctctcgtttttcgcgcgcacgccttttaaactgttaaacgatgtgtttttttgcaaaaagtttttatacgaaaattgcttaaaaaatcaaattaatccattttcaaaaaaaaattagctaatacttaattaatcatgtgttaatggactgctccgttttctatgcggggagatgggttcctaacccccaagtaatgaacatagcctaagtatctcgaggcaccaaaaattttagtgtaaaatttaggtacctcaaagtactttttcaaggactgtaaaattcctctaagatactagaaacaaagttctcgcgaacagagaacttatcttaggggacatgtcccaaaagaatgtaaacctcgctgtagagtgacattactgattaccaacatacacaatttatactgggagtaaaaatatcgtgcagttctctggccaagtaacttacaacggacaccagat

SEQ ID NO: 9215 - DNA, 1003 bp, Oryza sativa
  Intron number 5 from transcript LOC_Os02g27440.3 (locus LO C_Os02g27440) derived from phytozome v7.0 (chr-ID Chr2; po s 16170331 to 16171333)
cagatctcagctttactgctaacttggagactgaggtagtgaacaattctcagtttgtaggttatatctacatcccctttctttcttattcttgagatcagaaaccagcataagctggctagttactgccacagatttggtcaatgtgaatcccagtaattttgcagtttgatatcagtatgaaagtttagtcacacttgtttcagaagagaatcttaaaccccatgtgcatagaatagtttttaaaaaatgtttgtttccttgtccgtaattgttcttgcatttgagacacattggtggtattttatagaaatgtgaaaatgactaaatacagaagttttacttgagactggagcttgtttggtaagtttttgcctgaacttgagactggagcagggctgtcctggaaaagcgctttacaccaaataactggacaatacatttattgtgtaaacccctctactttgtgatgttgttcatatgctaatgtgcaccccttgtcaattctttttaacaaacaatgttgttactaccaggatgtcattttctgatatgcccatttctcttgcactttctgtttgagcaacatcaagcagtgtatctgacttgtgttaaaaatagaattgttggcatattgataaaaatacacaaagaaagaaaaggttgatgaatatatgaacatcttgaatgagatatgctagtatatatgatgtcaatgaaagtattcttgaaaatattcttatcactctacgtccactgacatgggctggtatatgtgaaaccataaaaacttggagatagatctaaaaaatctgattaaattttgaaatttttctccaagtttttcccatcatgataacttaaccagcaattgttatattcttatgaacagctagcccgcttcactagtcctaatatgataattctgaagttggtataaacatactaatatccctttcctactgctttattagcttgataacgtctctgctggatcaactga

SEQ ID NO: 9216 - DNA, 862 bp, Oryza sativa
  Intron number 1 from transcript LOC_Os02g47410.2 (locus LO C_Os02g47410) derived from phytozome v7.0 (chr-ID Chr2; po s 28940986 to 28941847 reverse strand)
gctcaagcaacctcagctccgtcaggaagaggcctgtacgtttcctgcaccttccccttctcacagggctacctaagatgcttgcttgatgcggctgcggtcaggcctcgctttgctgaattgtcaattgcattgagctattcgcacatggttacttagctggaatgcgattagcatcaggtgcttgcaaggaaccaatagcttaaactctggtcgcttgaactagctgtatcatatgatcacccattgttgctgccattttttcttattgcttgcacgcatggtctagattattcgattgctcagattttctattgattcttcagctacaaacttcatttctgaaagctctcagcattgctaaccagaaatccgacccctgttttctgctaaattcgaatgcactgttaagtttaatgtacactagatttgtttgcttagcttgttcttctaatcgtatagtcactagaacaggtactttactgctacaggcggtcctaattactttgatcataattcatgagcgaatgggaggcattgcacaactcaaattgacttgaggatcctagctttttgctaagttaagatgttcctttaaattggtatttattttttggcagcataactttgctatctcatccaggggtaagcacaatactttagggacaattttcaactttgttgatattctgaatgtattatattgtaaaatgatgagggaacagtctatgtgacattttttttgttacaattgttcaactgtgtatgacacctccttcatatacttgtgatgcttcactctaaattatattttcttattcctgcagtttgttgcaagattaaccacagacattgtccaaac

SEQ ID NO: 9217 - DNA, 931 bp, Oryza sativa
  Intron number 1 from transcript LOC_Os01g49490.1 (locus LO C_Os01g49490) derived from phytozome v7.0 (chr-ID Chr1; po s 28469067 to 28469997 reverse strand)
ccaagctgtcacaagatcggctcgacaagttcaaggtttccctcttttacattttgctggtttttttttcttgatccagagttccagactcggaatccgttcgaaagaccaagtcacggtagtttacgcagaagctcgattaattcgctaatcgctatccgcatgggaagaaaattgtctgtttgtccttatttgttgatgcacaaaggaacatattagtgcttcttttttgtgaagatatctgtggaattgaggtcatgttactttgatgatatgccaatgtttgagttttttttgtgtgttttaagtatatgaacaagactgttaaagtgtactcaaacaggaacgattaactaggaggagacatgctattgttatttcttaggcgataatgttctaggcttctagctagaggctttagttgacgtcaatgctaacggcgagaatgcctgataagctatgagttggttttgattttaatgaacatatggatttcagggagaacttttggttccttttcggagcagggaaatgcttcgttggttctgatggagtttggagtatgcagattgtatgctagaattttggttggaacagaaaatatccacaccctatcagttaccggtgctagagacctagagtgtatgtgttttttggtttcaaaatttatttgtttggattatcggtctagtaaagatccagtatggccctttctttaagaaaaagacattcaactgcataatttcccttctcataaccataagtaacatgacaaatttctgagcgagtgtttctcttggccatgatggtttcctttgtaaggcctgctgttcatgcatttgattgtttccttctgattctaccgggtctattgtttgatttgtttagcatcacaggaattacacaagaaacggttgcaaataaaggaaaa

SEQ ID NO: 9218 - DNA, 1024 bp, Oryza sativa
  Intron number 1 from transcript LOC_Os01g50610.2 (locus LO C_Os01g50610) derived from phytozome v7.0 (chr-ID Chr1; po s 29051318 to 29052341 reverse strand)
cccgggccggcagatatcctgtctgaaacccttaggtatgtattttccctcaaatggctggttaatttcggctccgaaatggcagttcgcatactatcatgcgaatggcattgtcttcttcgccatcacttgtataaagtcactagtgcacatgtagctttcaagaatcaagaggatgatcactgctagctagcttatgcgtctgtttagttaggccaagcagcagcctgtgttgtgttacctactcatttccaattgcacccattgcatcaggaaccttccatctttcacttgtaaaaatcttactgcatctgttttgcctgttcaaacatggattttccatgctctctcaagtgtgaagcagatcgtttgcaacttgcagttgtgtttaggagccatagtagacagggtatcaattaagcacaaaggtcatgttgcatgcatgactcaaagtttttttttccttcatttttttttgggtgggaagaaaaagtttggaccaatggttttacgccagcttttatctcctgtagcatttcacgcactttcacgttgtgttttttctccctcccgggagtcaatctttcgccgtacgtgatatgataatatcgaatccgagcccatatgtccttgaagagactgacagaattgtactttatctgaaacccggttgctcggtcggtcacaccaaactgagccaaaaaggagatccgagttagacaaatcgcgccttgtttgcataaagcggcctaaacttagatgcccatattactatcacattattctgaagaatttttgttcagaaaacaaacattattctgaagaatctcttttgcacatcgcgtgtagcaattgttcgtcagtagcttgctacgttctacagttctctgcacgagtggcctaggtagatactgtatttttttttaatatcttgtgcgaaatgggtgtacaaaagcagagtcctgaacatgtacgcactgcattgcgtgatcacagggacagggacttcgaattcttggaggca

SEQ ID NO: 9219 - DNA, 424 bp, Oryza sativa
  Intron number 1 from transcript LOC_Os02g50860.1 (locus LO C_Os02g50860) derived from phytozome v7.0 (chr-ID Chr2; po s 31081577 to 31082000 reverse strand)
tgctcatctgctacaccagcaacaagttccccactgtaaagcaaatctttctccttctcattctcttcttttcttttgttttctcctctctctcccccttccctgttgctgtatcaggattttttgggtgcaaaagacttgatctttcttgatcggtttcttgccaaacgagtaggaactttcgtttggagtcaaaaggcttcctctacttccttttttttgctgattttgttttcttgaagttacacagaatttcgatttttctcggtatatttttgttggaggtgtttccttgtagcgggtatttttgctccgttcttgtagtgaattttggataattatcactgtttttttaaaaaaaaaaatctgacgggcatttgatttggcaggactacataccaacggtgttcgacaatttcagcgc

SEQ ID NO: 9220 - DNA, 751 bp, Oryza sativa
  Intron number 2 from transcript LOC_Os01g64650.1 (locus LO C_Os01g64650) derived from phytozome v7.0 (chr-ID Chr1; po s 37514773 to 37515523)
atcctgtacgaagtgcattttctcttctgaataaggtatgagcctttgttcttgacattcctgtattgcatatccttgtatttgacctaggatcagattcacaagcaataagggattgtctccttgctattctcagtgggataaaacatttgatcttctgaacaggcacaaaaaattatgttgtgcatacaagggtgatgctaagctgatgcatcttatttcacccaacattagcagtcctttttcttcacttctgttcaatatgtttctgcagtggtttgttgaaaattaatagaaacaacctatgtacaattttctatggcctggttctatgttgaacagaacatacatcttgttgtgttcggatactttgaagcttacccttctatctaggaactccttttcattcacctagctatataatggatcttcgaggctgaaacctggcacactatatcattccgaaactcctgagtcctgataacaagtatacacctgaatcaatgttttagtcaatgagtagttcagttctatttatttcatgcaaccactctacgtcatctttcatacatctacatacatgtgaatacgtgattagataatttattaatgatccatgaccctttgatctgctagagtaagtttcatgatgcaacacatcagtagttaagaattatcctaattatccagttattgatagaattcattttatgaaggtacttgacgaataccagaaggctttcggggactc

SEQ ID NO: 9221 - DNA, 564 bp, Oryza sativa
  Intron number 3 from transcript LOC_Os01g54870.1 (locus LO C_Os01g54870) derived from phytozome v7.0 (chr-ID Chr1; po s 31558752 to 31559315 reverse strand)
agaagagcaacgggcagatccttgccatcaacgaggtgatctattctttcccaccttaccttagtctcatgcgtgcatctcggtgctttcctttctgcagagtataatggcgtattaatatcaatgttgagcgaactacttagttctgcacttttgactctatatagtgtgttcttaatcggtgaaacgaaatgtactagtcatttcatgtgccatacaatgttattgctaatttttacacgaatgctagtctatttcactgatgtctttttttccatgctcggtgttagatttgattgcctactgctagacttattgtcgttttttttcctgatgtacaactgtgtatacttgtattatgacttattctgattcttctgctgtacatttaccccttggagattttatgataaattatgattgtggatacacaatgatttaaattggctgagttagttcacgcttagtttattatcagctttttcaatagtttacctgataatatttccttttgttgttttatctgcagatttttgagaagaacccaacaactatcaagaacta

SEQ ID NO: 9222 - DNA, 874 bp, Oryza sativa
  Intron number 2 from transcript LOC_Os02g36220.1 (locus LO C_Os02g36220) derived from phytozome v7.0 (chr-ID Chr2; po s 21855335 to 21856208 reverse strand)
caacagagcacctcctcttcgtgtgagcataagaggtatgaggtacctcccaagcgctacaaaatatctcatatgatttattgtatatatatgtatgtatgcatatgtatatgtgtatacatacacatatatataggacactcatatgggacaccatggtatgaaatacacaaatccgctcaaatttttcaaaaatttcaaattgtgagtatatacctagttataagtattcgattcatacctatacctatcaacaaaacaactcaaatttaactttatttcacaatccaatattacatacctaactaattatatgtttggatgctatatacctagaatcgaattctaataaaaacatgtttaaattcagttaaaacttgttttgaactagtcagtaaagtagttaatattaatacctaaccatttaaaaaaaatcataatcatttgaattgagtacacacatatatatatacctctttgctactccctctctatttcatattataagtcgcttgatttttttttctaatcaaactttgttaagtttgatcaagtttataaaaaaattagcaacgtctaaaatattatgttctaacattgaatacattatgataatatgtttgttttgtgttgaaaatactattatatttttctataaatttggacaaactcaaagaaatctaactaagaaaaaagtcaaatgacttataatatgaaactgatgggagtatttgagagtacagttgttgaggttgttactagacagataaattttattgtctatcacaatccttacaagtgcaaagaggtatctcacgcatattcttcgctttccccaggagctgcaggtgttgagaagagcctgggattaggg

SEQ ID NO: 9223 - DNA, 483 bp, Oryza sativa
  Intron number 1 from transcript LOC_Os02g25900.1 (locus LO C_Os02g25900) derived from phytozome v7.0 (chr-ID Chr2; po s 15186726 to 15187208)
tctcgctcgccccccggtctagcttctttctgcaggtattcaatcgatcgagcaatcagttattttcgtttttgttcttgttttttcttttttatcatggaagctctctgttcatctgattttggtagtgaatctttaatttgtttgtatggcacgattcacccataaatcaatcgataattttgatacgattcagagagtgattgatttactgcactggtttcatccagggaagaggggaataaaattactctttttgcaaaaaaaaaatctgaaaatagggaaaataatccagcaaaatcgcatgtaattttgatgtttgttcatcgtttcaaactatacgtattaggagaaaccaatctctactgctcctggctgattttgtgatgaaaaatggccagtttcctctaaaacaatgaccaaatttgacaccctcttgttcttgaagggccggacggaaaaaacaaaacaaaagaaggcacc

SEQ ID NO: 9224 - DNA, 703 bp, Oryza sativa
  Intron number 3 from transcript LOC_Os01g52110.4 (locus LO C_Os01g52110) derived from phytozome v7.0 (chr-ID Chr1; po s 29966650 to 29967352 reverse strand)
aaacaaaggtatggttttcgagttgatgtggaagtgcaatagttaaaaagtatgtactcttttatccatactttcctaggtggttttgatgtaggaatagtcagttactcacaaaggctttgattaactgctgttcatattaatgcatatgtttgaagagcactagtgagtataaaacgtttcctttaaaaaaatcaaatagtgagcataaaatggtttaaaaaaacctaacaatgttctgatcattaactcattttatagctggatatgatttagaaatcagataaatggtatggttgtgacataaaatgaagacacagaatagaactactaaactgctgccagccgtccattatgactttggattatcatccatctgtaacagttgaaatctgttgtattttccattcttacattgaaacagtaatttgatgtatttgcttatgggctgttacatgtacacgacttatttgtattgtaccagcaatttgttggcaactataatatatccttttgttcttttcctggtgaaatatctgaatcgtcactgttttggtttatactgcatacttggaccttccttgggcagttcccaagctgaactatacaagtatctattctttatcatggtattaactgttggtttaaaaatgtggaaagttgttgacatccaaactgttttgacagaattcaattaaaattg

SEQ ID NO: 9225 - DNA, 706 bp, Oryza sativa
  Intron number 1 from transcript LOC_Os02g40420.1 (locus LO C_Os02g40420) derived from phytozome v7.0 (chr-ID Chr2; po s 24480759 to 24481464 reverse strand)
ggtgccgaggccccttccagagccctcctccccaggtatcgcccagctccatcggtggcgcttcttgtttctttctttcttggctttagggatctttttattgccggtgcatgatgcgagctaggttcgtggatcgaggtagaagtttctagtttctgggctggttgagttgggattgcgtgggattgggggttcgtgaatgaagtcgccgagttcaattaatccgcggttcaattctaaacaactcgcaatgcgattccttgcctcttgctgaatacaaaagagaggcgttcatggcttttatgtgtagatttgggatcatttcattggcaatttggtacgatttggtgttggtttaagatcgtgagccgctgatctccacttttaagtttttttaaaaaaaattaatctgccctttcaagaaaaatatttatttgttattagctatactgtttcggaattgatgagctttgatttctctataagtttctaataagcattttttttggggtgcctttgcttatagtcctcttgtagtctttgttaatttccagctaatttatccctaagtactatcatgttggttattgcaacctttattcaatgagattttctccagaaaattagtccgcatttctaatttgattaaatagttgagtatctaatgacaggtgggaggccaaggaaaagggttcgatttgctagt

SEQ ID NO: 9226 - DNA, 817 bp, Oryza sativa
  Intron number 2 from transcript LOC_Os01g28680.13 (locus L OC_Os01g28680) derived from phytozome v7.0 (chr-ID Chr1; p os 16046272 to 16047088)
gcttgtgtccacgttaaagtcttgttcttttcgaggtgaatgcgaaatttatatttgtttttttccctcctcctttcagttcctatttgaacagatttagttgtaatcatctgtacaaagtgtatgtcagatatccttttttgggggaaattagctcatcaccacccatcagcgattgtgcattgccaaaaaaaaaaagaaaaaaaagaagaggtttttaaaaacgaccagaatacccttaggtatttgttcattgtttcattttcactaaggccaagtttgattttgactcttgcccctcccatcgagaacatggcttctttaattgagatggacgaaggctttattctgttcattttgagttgtgtcatttccaaactgaactgtttttctagtattgttttgtagtgatgctcattttgaatactattttcgtggtcatattggtgttgctgagctactcagccatttccttttttgtattattaaattaataataaaaaactgatttacctctacaagcatgcatgtcccgtttttattctgtaatgaaagatgcagcggaagagtatcattaatatcctagaaatataatataataaacgattacaaccttttataactataattttcttggagttacttttgaagttaagcacagtagctgtctttctgtcatgcagactgctgtactagtatatcaattgatcattctttggaggtgttaggtattcagtgaatatttagcataggaaagttgtttgattattgtcagaagtgacaaacttcatcatgctcataatttcagtatccaaac

SEQ ID NO: 9227 - DNA, 1065 bp, Oryza sativa
  Intron number 4 from transcript LOC_Os01g28680.13 (locus L OC_Os01g28680) derived from phytozome v7.0 (chr-ID Chr1; p os 16047675 to 16048739)
cagatattgctctttcacctgatcaacgatacctagtaagactcttatgcattgttctcattctttcttttcttttgtgtgctgtttactcattgacatctagtgaactcactcttttcaggataacatatatgattccattttttgtaaataaaaattcgcatcaatgtgcttgaataatatttattacagtctgactatttttagttccatagtgtgtttcttttttccccttcatacatggatttgagccctttgtttgggtaatgcaagtttgaacctattgtgcatgaagaaaatatgagtgttctctgagttagaataacatatttgattcctagatatactaaaatttgcagattaccaccttcaaaatccatgcaatctgcatatttttataagcattttggctccattgctgtccatgttatgtaccctataagcaaggtggactctgagtaactcaacatttgattccccttttttctaaaaaaaatgtggtaaatagaaatatagaccatgaaaaattgaccagggaactgacagcctctttagggatatatcatgatagatttataaattccaaaacaaatcatggaccatatggattgtcagttcccctgggtactaagactgtactatatggaccatagctttaattattacagtccactatgattatacaacaaactgttattgcacttcatatatctcatcaaataattgttgcttatgtttgtatcttctggaccttttctagtagcctgtccctacagaacttatgatacatgtgttctttgagaactgagtaagattagatagactaatttctacatgtaatttttcaactttgcacttctttattttctttcactagcttagaagtatttacaagagttcttcctataattcctaacaagctacctttagatgtctccctaagttctattcatgaagttacacttgagactagttcaggtctttttgtatatttgttttatatcattaactaagtgttactcgttctttttgcaggcttattccagtctgtcacctatcgttcat

SEQ ID NO: 9228 - DNA, 584 bp, Oryza sativa
  Intron number 1 from transcript LOC_Os01g45960.2 (locus LO C_Os01g45960) derived from phytozome v7.0 (chr-ID Chr1; po s 26106358 to 26106941)
gcttgtctccatcgctcgatccgtcgtcattacctgtaagcagcgactagctccccctcattgctgttctaatgcgctcgcaggatattggggaatctgttcgtatgagttggatttcttttcatcttctgagaatttttgtattggttatgtgtgttatttttttaaatattctaatttcattatattttgggatatgggatttccctcaagattctttatttttttcccttttcgtatggggatttgtccatctgaaagctacagttcttgctacgtccgtgcttgtcttcattcgtagacgaaaggatgaaaactttcgtgaaaaaaaccgtgtctatttctaaagctattaatctgatttcgtatctgttgcctgctattcttttcactttccgtatttgaattcagttaaatcccgtcatttgattcgctgaattagtaatagatttgctgaatctgttgcctactatttcccggcagtttgaagtgcgcgccaacaaatttccgcactcggatttggggagaaaaactacgagatgcgactaacagatccgatgtttgctcgtgcaggtgtatacctc

SEQ ID NO: 9229 - DNA, 907 bp, Oryza sativa
  Intron number 1 from transcript LOC_Os02g48810.1 (locus LO C_Os02g48810) derived from phytozome v7.0 (chr-ID Chr2; po s 29865794 to 29866700)
gtcctcctaatctagtacgcaccggaggtactgctccaccttatctacaccatcagttatgcatttattttttgagcattcacttttttttagagtaaatttcacaaaactacgtattttatggtccaagttgcagaaaaccacatacactttgacacttggcacttaagtacatatattttggtagtgtagtttcacaaaaccacactatcaatgaatggattcacccgcgagatgatgtggctctttcacataggacgaggacatgacatcctattaccagccatctcacgaaattaataggatataccacgtcatcatcctagatggagcaaccacgtcatctcacgggtgaatccattcatcgatagtgtggttttgtgaaactaaactaccaaaatatatgtacttaagtgtcaagtgtcaaaatatgtgtggttttctgcaacttgaaccataaaacatgtagttttgtgaaatttactcttttttttattaattcctcattccatctaattctaagtaagatgcttgctttggtcttggtcttctggaatattgtttagagcttttgggtaaagcctcatatgtaaatgttctactaccattcccttcagattccagaccaagagaagtatcccttttcctggacctggagttgattattcagaagcgcagaaacaaacctgaaattcaacagtttttatgatttcaactttggacatagaaactattaagctcttctttatgtatcatttatatctttcttaaacactcttgcctagaagaatttctttcttgtgtctcaaaagtactttacatttataattctgattatgaaaaagagattcactttgattctcctagctcagaaactaattaggtgtatttccccctgcagcaacct

SEQ ID NO: 9230 - DNA, 444 bp, Oryza sativa
  Intron number 2 from transcript LOC_Os01g64350.1 (locus LO C_Os01g64350) derived from phytozome v7.0 (chr-ID Chr1; po s 37353356 to 37353799 reverse strand)
caattgactcccccgcagtagaggtgcttgaactggtgagtttttttaagttgatttgagttttcactattttttttgtcataataattagatcagaccctagtttatttgatttgtttggtttgagtagatcaaccaagagcacatgtgtaggtggagtagtgtaacaatattgattaaaaacttgtcttgttactctatattggttgaatgccgatgctttcatgtgatattttttgttgaaataggaaacaatggcatttcagcacatagagacaaatacatcttaactaatcaaagatgagattcagatctgtaattttcatcagtttcaggacacatgcagtatttgacactgtctaattctatgtcttccaactgacaccaaaacttttcttgcgggtcacaaatctaggttcactaaacccaaaggcttttgtagca

SEQ ID NO: 9231 - DNA, 895 bp, Oryza sativa
  Intron number 2 from transcript LOC_Os02g15690.1 (locus LO C_Os02g15690) derived from phytozome v7.0 (chr-ID Chr2; po s 8835121 to 8836015)
ccacggcgacggcctccgcgacatcgtgattacaggtgaagaattgaagctcagcttagctcagctccggtatttctagttgttgcatggtggtagcttctctgctgctcactttctcccctgttgttttggtatactgtgttcttgtgatggtcttgattgtcaattcttaagtctcaaccaactaactttggtctcctggtcagagaatattcaaagagacatgcatacatcctgcaaaaaagaattctgcacacaccgaggaaaaaaagattatatgatagcatgggagtgagtgactaaaggaagactactttgttgcttacacgcatcagacataatagggtaataaataaaaggaaccgaaaagataatagacctagttaacgcaactttagataaatagtagtaagggatttgtccatcatggttaaaatatgtactcttccatggtggtttgtcagaggtttgttattttaaggtttaggccattactgagagatttagaatacaaacataccttggtgggtagcacggtggacgacctgttgtcggtaaagttgaatcttgctcctgttccatatctagtggatgtacatgcatgccaagaacaggaaatggaacagtgaactgatttgattctgtaccactctggtacagtttacatcacttctactattaagttggtgactggtttaagccagcattatatgctcaagcagacaacaagcagtcaggcttactctcaccaggcaactgaactaactgtgctcttatttcgtctgtagcaattttctctgactgttcctgcaaaagaactcattaagattgatgcaagtaattaacatgtcagattttttttatattaaaaaaaaaggtgacaagggaatcatcg

SEQ ID NO: 9232 - DNA, 776 bp, Oryza sativa
  Intron number 3 from transcript LOC_Os01g52810.1 (locus LO C_Os01g52810) derived from phytozome v7.0 (chr-ID Chr1; po s 30380748 to 30381523)
aatcagggaattcaggtaagatcatgacttccagcaatttggtactatacaacgaagttttgtccaattgtcctcttcaatatgtatttcagtaatgctgagtttattttctaatttgtcaaccatagcgagagatatcagtaaacaaatatcgcaattgtttttgtcgaactgccactgttaataagagttctggagtaatatatatttataataggtacacaggatggttaagtaaatgtacttatttagattgctatgcctaacatccttagttcatctgatgttgctacatccttcttcaactttaaggtctgctgtgcatctttgtattttgaaatcatgggccattgaaaatgtagcactagcaattactttgtctcttgtccagtaccttttctagatttctattatgtacttgtttgggatgattttttttgttacttcgaccaactagactctagagcgctgtgtgtcttttgatcaatgctgaacagtgcttataaaataattgttgtaaacacagtgctgctttgatcatgtatttgagtctaacaatctctagatgcaccatgcaaaagtagtttttttgttatgctcttatagctgttagacataagaatttccttactgttcgactaaaaaattctctttctacttcgataaaagaaaaacttgatgtgaccaggcatacatgtcatcagtgcttcatacagtagttgatctatgaaatttctttagtttcaggtataaaaacgacttggacttctatttca

SEQ ID NO: 9233 - DNA, 677 bp, Oryza sativa
  Intron number 1 from transcript LOC_Os02g04320.1 (locus LO C_Os02g04320) derived from phytozome v7.0 (chr-ID Chr2; po s 1903158 to 1903834)
gctccctctcctccgcccctgcgtctcggcccacggtgaggtgccctccctcctctccgcaaggtctctgtgcggatcctcctcttcttccctcccgccctcgtacgccgcgcgctagggttagtcaggattcggtttggggggagagtttgcgtggttagcgtagcaaaactagcaataggagatttacgcagtgacgcctcttaatcctcgcgtttctgtgggatgttttgctgttgggataaacgagcaatcgagatttgttcatatttcgtcaaataaattattattactttttgaatctgctcgtgatgtgcgttgcgcttgggttattcggagatgaatcatcctgcttgtgtaaacagctgatagcattttggggaattaaggtctgccttgcaatgctcataaaaaaatactaatcatgttggtttttcagtatttttctaactctggctagcatatcaactcctgctactttatttgctgcacaacatattagttccttataatgtgcttctctgtttgatgcgtctgttgcgtggcaccgtagctgcacatgtgaaagacacgccgtttatatttttcatctacttgatctgtaccccatctgatcttagcttctctattcctatcaaataggttacctgaggtgaatacattggagttggctggga

SEQ ID NO: 9234 - DNA, 735 bp, Oryza sativa
  Intron number 2 from transcript LOC_Os02g52160.1 (locus LO C_Os02g52160) derived from phytozome v7.0 (chr-ID Chr2; po s 31919098 to 31919832)
agttggtcgtattggagcacatttatcctaacgtatgctgtcattaatttatcactatcaagtatcaacatgtcttgcaccatttgttccatggttgtgatgcttctgatcctcacagccatctgcaacagttattgatgtgaatgccattatacaataggttgtttcttagaatgatatgttagcactattaccaaatattcaaaacgcatgattcctttcttttgatatgcttcttatttttctgctgccagagcagtgatttagaatatcattcctttggtatcaatgcaatttgtttgatttttaactaaactaagtccatacttgaaaaattattgagtgtgttgcagttctactgcatggtctgtcaatagaatgcttgaataacccttctttgagtgccttctcctgtgatatattgcctgtttgatatttcatagtacttaagctcatgctgttcctgtacagtggcttatactatttgcagtaggacaatccatggtctttcttggctagtaatttagttatgcattagtttgtgttagcatttctagaattctagactatatagatgctgggtgtactaatattgttctatagcttgcaatggtgtttatatttcagaagagcgtttatgtttattttctctaaacatgcatttgctttatttctctaaacaatatccataacatgtatccctaaacagggctgtagtacctactattcaaggct

SEQ ID NO: 9235 - DNA, 897 bp, Oryza sativa
  Intron number 1 from transcript LOC_Os01g04814.4 (locus LO C_Os01g04814) derived from phytozome v7.0 (chr-ID Chr1; po s 2220255 to 2221151 reverse strand)
catattgcctgtcaagttcccgcagttctttacgggtgagcggctgctgcgaggataaccagtatattttcattctccttgttgtagagaatagaggtgattgcaaaattggtggtggatccgatcgtataggccgtacatggatattgatctcgatcaaaacggatagggcgagtattgttgattgccaacactaatcattccatgttgatggttgctcggtgtgcagggttagctcgcgtaattactgtattttgtttgtagatgactgtttgggtgtcgactatagttcagagtccacttctagagggtgctgggtgcaactattatgttgtgtagtcttggtggaaatcttgaaagttacatcctagaggattgctaaaattgatattaacatgatcttggtactagacaaacaatgtggagtaaaaccataatttacagctagtagtttgaattgaaaggcagttatggaaacaagggaaaaaatgctgctttagtgataggtgcattggttgttacagtgtaatctataatcatgcagcaagttactagcttgacatacattcaattgtttaatcttgcaaatagttattttcaaatattgagggtctgttttcctcgtgcttctagtgaccttcttaatgacttacaagatacagtaagtgaattttctaacagctactaagataaaagtaccattattctcaactctcaaccattgttcaagtgttcatgactaacatcttgcgcatcttctttgttacatgataaatttctccatggtaaacaacgactataaaaaaatgtgtacatgaactcatcttaagtctgggatctggtgttgttagctattttatactaatggagatttctttcttaaggtaaacggagacc

SEQ ID NO: 9236 - DNA, 500 bp, Oryza sativa
  Intron number 1 from transcript LOC_Os01g71340.1 (locus LO C_Os01g71340) derived from phytozome v7.0 (chr-ID Chr1; po s 41345741 to 41346240)
ggcattggtccttggagttgcggccattcctacaggtaataattgtatattgtcttaataaaattcggtttgtctaaaactcttagtcctctcgtttgtttaaaacccattcaaatagttatggaaatttctgaaacagattgacgacattcatagaaaatatgtatatactaattcactaaattttagatcctaacacaactcatcacacattatggtataaaaaaagataaatacgaacgaaatttatcttcttttttttcttaatgtggatggtgaaatttgaacttgatttttggtgtagtggtacatgttactgtactctatattattaatttgattaaattttttcttaactatttgtgttgaatttggaaaaaaaagttataagatggaatattctctaaagggattaataatccactcccaaacaaaaaggagtctaatatatcaaatcaaacacagtggtgcaatctatcggcgtgtgctacggcgtgatc

SEQ ID NO: 9237 - DNA, 841 bp, Oryza sativa
  Intron number 1 from transcript LOC_Os01g56550.2 (locus LO C_Os01g56550) derived from phytozome v7.0 (chr-ID Chr1; po s 32599589 to 32600429 reverse strand)
tcgacccgctccgctccgaagatcagcagctccaggcaagccgttgatccgtctctcctcccggcccacgctgttcgctcctgttccgtgcgctcggtcgatttattcgtgcacgtggagggtggtttcgtttcccccttctattatgctgcttcaatttttagggtagttcaatggttggggcgagatgtagcggtttgatttggattgggggacctgtttgatgtggaaggttaagttgattggttgctttatcatagattgccacattctgaaatccaaaacaagaccaatggatcattgctattgattttgtgcttttaaatgctaacactagacagtttgcttcaatttccatctcatcattggttaactctgtattgtgtatttcactggccatggtggctaagcaatcttgttgcaacttaaacatttttgaattcaagcaattagtacatgtgttgttgcagaatatatttctttgataaatgattatactacaattcttcttatagtttttgggagaaaagcccaaagcaatttggaggcataaaccaactactgtttgagcgtttgaaaccaaaatgaatcttaaaaggttttaacagaatgtaactttgtaattaacttcaaatgatttgttatgttgcagcatagttaggattacatccttgtttccttgacgtttagatatgttcatgccttaaaagcagaagctactgtcatggatttgcattttctgtattcttgtataatagtagaaattgacttacggcttctatacttgtacacacacccagtgcctgtttcttatatgttgttagtgaaataacagttcaag

SEQ ID NO: 9238 - DNA, 840 bp, Oryza sativa
  Intron number 1 from transcript LOC_Os01g72670.4 (locus LO C_Os01g72670) derived from phytozome v7.0 (chr-ID Chr1; po s 42164423 to 42165262 reverse strand)
cgtcgatccttaccttactccctcacgccccctaggtatgaagccgccgtactccaacccaacttctatcgcctttgaaaccctaggcaggtaggcggttgctttgccttcggtgcggttgttgtgctgactctctcctcgccctcgccctcgccctcgccctcaccctcgtcgccggcgattcctccgccgtactccaaccctagctgtcgcctttgaaaccctaagtaggcacctaattaagtgctaactctttctgaatgtaatatcacaaatctttcccaactaattcagtagcattcggttaagcccaacaccatacagttgttggtactgaaacttttttcccccttttccgttatcttcagaagtaacaatcagtcagttacttcagtaacctgacacttgtgttctgattgcctgatccaagttgtgatcttagttatctgcttcttagcttgtgaatacgagtaagtagtagtaaaattggtgtgttttggtagattttgcttgtaattcctagcggttggtaacttggtatattcataattcggctaaggtttgataaaagctgcagtgctgcacatcagcctttttttccctgtgcacatttgcttttcttgtgtttatgctacttgcttgatttattgctattgttcctttgctcctggaggtggccaggggtagcctgcctgcctgcctcattcatgttttctatcatttagtggctattcgctttgaagaaattaatgatttatgcagctgttcctttaaataattattggttaatcccttgaatttatagctgtctcctcgagaagaatcctgcttaagttgatt

SEQ ID NO: 9239 - DNA, 643 bp, Oryza sativa
  Intron number 2 from transcript LOC_Os02g07680.4 (locus LO C_Os02g07680) derived from phytozome v7.0 (chr-ID Chr2; po s 3998164 to 3998806)
ataaggtattcttctaatgcacattttatgaatatcctttgttggctcaactgtaggtggtattggatcataattttttttttaccatgatggctgtcaggtgtcagctgatttatagcatgtgctctgttgtagcaactgaattttacctgtattaatatatatcatggataactaatgttgctactagactactgtttagtttgttaggtttctttcttacatatttatgtacttgaaatcagggagttcttgctgaaattttaaaaccaataatggggaagggtcttatacctgctgaccttgatacctggaagcaaaggagaaaaggttagaaaggttggatattgaatcttagtttgtgcacttttgggtttgttctgagtgaaatgttgcatgtttctgtgtgctcatctaaggccatactgtttgactttttaaaggtataaaaattgcagttgccaatagtaatgggcctatttatcagacaattgactgatataattaaactatttcctgcctttttatgaaccaaactgtttcatagcctattgcggactttatgtttgtatttcactcaatggcatgctcatggtgcaccttttccaatttctttgttgtgcagttataacccccgggttcc

SEQ ID NO: 9240 - DNA, 864 bp, Oryza sativa
  Intron number 3 from transcript LOC_Os01g05510.5 (locus LO C_Os01g05510) derived from phytozome v7.0 (chr-ID Chr1; po s 2617029 to 2617892 reverse strand)
ctcggcgaaagctaaggaaatttcaggtatagatctcatctttgcttgcttatttccctccttgctttgattgtccactaccctatgttatagtttccttaaacaaggggtttgcagcagttgcagcttatgttgattttactggttgcctcctgatgacttgttagaaaccaacactagattacggtggtttctgtaaactaatttgcaatattggatagcttgcttctgctagctgtgacatgaattggggaatttgggagaggagcggggctcagacgtttcagttaatttggtcgggcgtcttgctaagagatttgtttgttcttacccaaagaaaaaaaaaggggcttagtggaagctgcagtctgttgtgttggtttttgtatgagctaaggcttgttcttttgctcttgttttcagggattcatattgttgattttacacctacttgtaagctatttactacaagatttttcgtatacttaagaactcacgatatttcgtcaagctagaaagtatccatgttatgctctaggtagaagcaatgcgttactggcatatggtgcacaattgttacaccggaaaagctttagtgatccttccatgcttcatttgctaactcttttaggttttgtaggagaactggagaataattttatagcccctgcagttttcattcttgtcgcggacatttgttgctttgcttgtgtgcatatttggcaaggatcagtttcttttcttttcctttttaccgcaggctctctttctgtgagttggtagaaaaaaaaagtttggtgctggtctggctccatatgttgttgattttgtttgttgttttgaattgcagctgagccaaaactg

SEQ ID NO: 9241 - DNA, 890 bp, Oryza sativa
  Intron number 2 from transcript LOC_Os02g18820.1 (locus LO C_Os02g18820) derived from phytozome v7.0 (chr-ID Chr2; po s 10982629 to 10983518 reverse strand)
agatatcaagcaacatctgcaagatctaggcaaaggtaattgtctacttaacatcatcatttagttttctgctagagaagttggtacaatcctatgagaaactaactgttacaattcaattgataaaatgtattctttcttttgattctgtgtttggaaccaatattgcatccatgtgcaatatttgacacagtaaaggtggaattatatctgcaaaccctcttgtgacttattaagtttgattagcaccctggccttatttatcttcttctactcttggtacagtatttgttagcatacaaagcccttttaaaacaacatttgtgaaaagaacctcacatatttgttccagaaaatggaccaaagctatgggaatatattctgcatactgttacaccacttcacctagaggtcagctgtgttggattaagtgtcgtctccactggtagaaatgtcaaaaggtcaataccacatgaattagcattagtattttgataatgttatggcctattggactataacattagcattatgcctaaccaatttcagggtaacattcatcttgaatgtaatttgcaaaagctcctttgaccaacacattgttgttatcataatacttaagtactgcgggaatagcttaatggcaaatgcaactccctgatagagtagcaccatcagtgttaatgccaccattgagccattgtggtatccccatggccccctccaaaaataaactgcatgaggggtcatcttctggataatataaaaacattttcagtaacctgttttctaatggcattataatatgagatcacttgttaaatatataacctttggtttgcccattattgtcaggaacatcttcgatctattagctcagcgagagattt

SEQ ID NO: 9242 - DNA, 894 bp, Oryza sativa
  Intron number 1 from transcript LOC_Os02g07960.4 (locus LO C_Os02g07960) derived from phytozome v7.0 (chr-ID Chr2; po s 4173984 to 4174877 reverse strand)
ccggcgggcgctcgcggccaccgtcgccgccggtaagtgctccgcgctcgcgcttcgtgcttggatgctttgctcgtacgtgttgcactagcttttggttggtggccgttggtcgttgcactgtttgcggaggcgatgattcgagctaagtactgttcggggtgaacatgggatttgtcggtggaagcgaggtcaaggtggggattgatttcgatgcagtgctgtactgtgcactagagattgggcgggtggtgagaaacgtgtggggggtttaggttgggtcgatcgattcaatttgattgtgcggattggcaggggatatcttgcggtacttcttcttctggacttgatgcggcggttgaattttcgtgtgcttttgcttgtggaagcaaatgaagtggttaaatgctgcaatcgagctgctattttcggtctgaagggatgttttaggattgttatgtgaactgttctctttggattagtaatcgtcattattgacgacaatggttgatggataaagtgatggatgatttagttaggctagttgtggtagaatgagaaatggtcttattattactctcgcttacatgaatctttaattaaaaagttcctttcaaactgtttgcataaaaaggggtcttagttgtaaaaagtcggctgaaggtgatatgatgactaatttccactctcacccttggtttttggtgaaatgctgggttctgttttacctgaattaactggcccatttgcacactctgcactctacttactatgtaggttcatttcattaagtaccttaaaatggtgttgatttggtgtgaatccatgtcagggataattatgtttgttactaatgactgtttttgcttgatttatgggcagttgctgctataa

SEQ ID NO: 9243 - DNA, 859 bp, Oryza sativa
  Intron number 1 from transcript LOC_Os02g25000.1 (locus LO C_Os02g25000) derived from phytozome v7.0 (chr-ID Chr2; po s 14491414 to 14492272)
aaggccatcatgtgtgtgttcgaacaactctcagggctgaaaataaactttcataaaagtggtttttttgcattggaaaagccaaggaagtagaggatcaatatagacaactatttggttataattctggatctttcccctttagatatcttggtattcccattcattatcgaaaactccagaatgttgattggaaaggagttgaagatagatttgagaggaaacttagcacatggaagggcaaaaacatatcatacgtgggagattggtccttctaaactcagttctttcgagccttcccctgtttatgttatccttctttgaacgttcacgaggtgtgcttaaaagattggattactttaggtcacattttttttggagtaatgatgattggaaaagaaaatatagactaactaagtgggaaaacacatgccggccaaaaaatcaaggtggactaggtgtccctaaccctgatatcaaaaatagctgcttattatgcaaatggcttttccagttgcttaatggtgaaggtgtatggcaagaacttttgcgtaataaatacttcaagggtaaacctctctctagtatgtccagcaagatatgtatttcttagttctgggccggtttaatgaaagtcaaagaccaatttcttacgtttgggtcttttacatgtggcaatgggacagacataagattttagaaagacatgtggttgggattgcgtgctttcaaatatcaataccctactttatataatgtggctcgaaagaagcagtctgctgtggcagaggttatgagcacaacccgctaaatatctcttttaggagagccattgttggccaaaagctaattgagtgga

SEQ ID NO: 9244 - DNA, 1012 bp, Oryza sativa
  Intron number 1 from transcript LOC_Os02g44540.4 (locus LO C_Os02g44540) derived from phytozome v7.0 (chr-ID Chr2; po s 26979771 to 26980782 reverse strand)
gcgtcctcctgcttccaccgcatcgtctatcgccggtgaccatccctccctccctatccacacctcatcaggtattctgcgttatccctcaaaaaagtttgggggttcaaccgaaaaccgacccctcaaccgaaacagggttagatctgcctctgcccagttccacctactttcaacttgttaattttgatttttgtttttagcagatgtaatttggttactgaatctcatccaaacacccttagaatagttgcattagaacggaaaatgtaagctcacataatttgtactcatcctaactcacataaatttcttaagaagaatctataccacaaactactcatagtcactcaaaaaatctttttattaaggtatatattcttataagaagttttcattccataaaattttctaaaggacatactgtgacacttggcattaatctaagggtgtgtttagatccaaactttgaatccaaagtttgcaaaattccatcacatcaacatgtcatacacacacaacttttcagtcacatcatctctaatttcaactaaaatccaaactttggatggaactaaacgcagcctaatttaacatttttttctttattaggttataaattttctaaaaaacatattgtgccacttggcattaatctaatttaacattctttatcaggttataaattgaaaccatcgaacgtactttgtcttcccgtttctaaaacattgcgatatatctataatattttaatttcaaaaataatttagactaacagtatagatatttaaattaggtaattaataaattcaaataaactatagtttagaataaaaaacaaaataatatatgccaagtacaatctaataacaatagaatgttagagacaatgtgaattcaatatttttataaagtttattttgggacggaggtagtagtaaattagccgggaaggcacactctggttgatctaaccccgagtcaaaaccatttctctacctggcaaactcag

SEQ ID NO: 9245 - DNA, 415 bp, Oryza sativa
  Intron number 2 from transcript LOC_Os02g02810.1 (locus LO C_Os02g02810) derived from phytozome v7.0 (chr-ID Chr2; po s 1070860 to 1071274 reverse strand)
tgtaccgccatccaaacgggtgagctcccaagaaatcaaaattagtcttccttagaaaaaaaaatgttagaatgggtttgttgatgaacttttcatattcacaaggtggatccaaagcaggtcataattcactgtggtgtgttttccccaatgagattatatgtaggcaataggcaactatgtctagtgcattcttaaggaatatcatcataccattggtttatctttttgaggcatgcttcaattttgtggtagttaattattttcatatgtagcttgagctgaaacgtgccactccatccttcgttttaattaccgcgtctatgatgaagctgaactttttttttctcgctggtttcttctgtttctcaaaagatcagattgtgtgtggttggtttagcttcagcccatattg

SEQ ID NO: 9246 - DNA, 902 bp, Oryza sativa
  Intron number 2 from transcript LOC_Os02g38970.1 (locus LO C_Os02g38970) derived from phytozome v7.0 (chr-ID Chr2; po s 23540675 to 23541576)
ctgctgcagggagagggcagctagaggtgaggcatctacttcttggccattgcttacttcactacttctgcaaaatgcaccatagtgaacttctgtttgtgccaatatgcatggatgacaaggtagatgcccatttcatcaggatgtttgggtgaaaatatttctaaactcgatatctttcaacgttatgaaaccaattttgccttttgatgcgctgcaggttcttacccggtaatcgatttcaacataaatattaaggaacaaattattttcattcgtcctatgtgatgattagtttgagcttggaaggatattgttcagctagaatgctgcgtgtaacccaaggagacattgagatatgtagatagttgtcattaaagaacattttttttatcttatataataagcataccacgcccagatgataaaggctcatttagttaatatcgtcatgctcaactctccagtgtattatgaaccaaagaataattataaagaccatactgatttggcctctttgacatggacttcaagttgtgcaattcatgaccagattttctttaggaattttagttagaagcaacaaaagctccaatcattgatctctctccaataattcgagttgaaaagtggatgtactccttgtcgatccagtttagatgggggtaaaatcacactttttagatatatacggttcctttctgtctcttgatgttgatattcagccaactttctttctgtttcttgatgctgatattcagccaatatttcttgccacaaatcattgtaatgttaggtgtgcaaagctccagttatatgcaaactagaatggaagtttccttctcccagtattatgcccttatgtatgtaaaacatacctcttgcaggttgtcaagtacctt

SEQ ID NO: 9247 - DNA, 855 bp, Oryza sativa
  Intron number 2 from transcript LOC_Os02g40000.2 (locus LO C_Os02g40000) derived from phytozome v7.0 (chr-ID Chr2; po s 24190439 to 24191293)
tggcgagcagagcagggggaggggaggggatcctggtgagcatccacatcctcttcctgattcatctctctcccgccgcgactacttttgtctggaatttgctttcgttcgttaaccctagcttctcttcagagccttaacctttgtttgttcccccaaaagtttgggggttcaactgaaccccccatgtcccaagttggatccggcccctggaggaaggtggatgttagattgtagggtttcttacctccttttgtcgaactagatgcattgttgtttgctgtagaatggacccatgagatcagtgtggaagagtggccagtcctcgttctagataaatccggcaaccgaaagcgcgcatcacatatttggagtcatcttttctactagggttatcaataataacctcaggcgcttttgcggaacaggaattgtgccatgtttgttgttggggacagattttcagtcaacccccatgttagatcagggcaaagctgtaccttcttctctactgttgctcggagccctgttccctctaaaccaaaatgccaaatgcttttaagtggatagaacttattttttagaattcttagcggggaggtcagaggtcgtagttttaatcggaataactatgctctgtcatcttttgtgttcgtgctatgctgtgcgatacttaaaccattttaccattcttaggtcttagctattagggtggccattggtgaagcctggtatcctgtttcatgcttatgaaaatctatgaaatcatgtattgttaatgtttcataccttgtgggtgcacaattcaaactgttttgagagttgagaccaataaattcaatcttactagcagag

SEQ ID NO: 9248 - DNA, 975 bp, Oryza sativa
  Intron number 1 from transcript LOC_Os02g08544.2 (locus LO C_Os02g08544) derived from phytozome v7.0 (chr-ID Chr2; po s 4625856 to 4626830)
gcccctccggtggcgaggagctcgacctcttcgtacgcctctccgctcccaggcccctccttatgcccctttccgcgtgcagaattttctgctgcaggtcggggaaacggcgatgggaggaaaagaaatggacaattaagtttgtttggattatctgcaataagatttttcaattgctttgctattgtatggactttatatggtagtagtagtagtaagtttgcacgtttcccctatgcttatgattggttgtcatccaaattggacaaaaaatctcaggataaagttcaaacagtctcactataccttgaaaatcaccacaagggtgaacttgtactatggttattttgttgcaaagcccgttttgttgttgtagatgactttgatatgccactgatgtcttagtgacatccttatagtgagtggcacgtagtggagatagttgaaacttagtggcatattgtggatttgtcctagtgattatgaagttgttacaagaattgtttgcttgaaaggattctatcacccgttgataattattgctactcccgcatccattgataccttctaaacgggacacagtcatataaataagaaataaatccacaaattcaaaggctcataaatctagaccaaaagctatcaaagtggaaaaatagctgaggcccatttctctagtttctgagatgatgtaaaaccttgcatgaatgaaagttccctgccaagattattgatttgctattaatatctgtgctatgctaatctcatctaatgacaataccttgttctcatcatgctgttaactggaaaaataagctcatgtattgatgccattacctctctttctacgaaatttgctgtgacgttatgacccctgtgttactccttatcttggaaatgaacatgtcattgtgtttttcacatggcagcccttcttgtggactctaacatacttctcttaattgcagacacatt

SEQ ID NO: 9249 - DNA, 974 bp, Oryza sativa
  Intron number 1 from transcript LOC_Os01g43650.2 (locus LO C_Os01g43650) derived from phytozome v7.0 (chr-ID Chr1; po s 25009013 to 25009986)
gagagaactccaagaaaccgtatgttaaatttccattgattctactctatactttgtctgattcttgtcttgatttcttgcttgattaattcttttttgatgcgtgtcttgagatggggatactttcttggggctagatctggttggtcatactgttgcggagttgcaaaatttgacctgaaattttctttcgtttatgctttctctctactgcatgcatggtgtgaacattagggtttgctagaattttggttccttagggttctttttagtagatccgtctatcctcttgttccccttttcttctgattccgttttgacccaatttccaatatgatctttcagacgatggggctactactattcgatttaatttaatagacaaccaacctatgctccataatagatcttgcgtagaatgaatcaattttacgagttatagcttcaatttttgacttgctaggtctttgaagattatattatgatttccccttttagaaatgattcaaattaagatatattttcgtatcaccaccaaccacctaaatctacaatagttcctcagtacttttgcaaaattaacgctgatcttgccccataacatgcaatccaacagatatctagctagctagctaacttattagaccctaattaatactatatatcaaaataacaactatttctagcaaaacctggtgctaatctaacatgaaatagctagctattcccatagtccaccatgatcctacctatctagcaagctagttagctagtttgattgttggtgctctgaaaaagcccaaactaattaataattaggcctgattgagcttgtcaccgcagaaatatcaactgatcttctgaatccatatcatctctctgtttctagctaatccacctgaccttatttttgatattttgtaccatgcatctacacaggaacaagcccaagaagaaagctgagaagaggcagc

SEQ ID NO: 9250 - DNA, 899 bp, Oryza sativa
  Intron number 2 from transcript LOC_Os01g23710.1 (locus LO C_Os01g23710) derived from phytozome v7.0 (chr-ID Chr1; po s 13343173 to 13344071 reverse strand)
caggatcctcgaattccaccctgccctcctccgtatgcccgcttcgccgccgcctctctacctctctctttcacccttcatcaatcaccgtcctcctcctcttcttcttctatggtgatgacgtgtgtagagacgtacatcgggaatgaggaggatgggtacatctacttctttagcaggaggcagttcacgacaaaggcaaggaacaagaggcggccgacacgggtggcgaagggcgggacgtggaaggcgtctggtgggagcaagacgttgaggagcaagaaggttggcggtatcgacgtcggccagaagctcaccatggtgttctacgagcgtaggttcgagggtgaccagaaccccatcaagaccaattggggcatgcacgagtttaccaagatcattgatggctcaaaaaaccaagtagtccttgttgatctaattcgaatttaaacttaaatcaatctgcgttacgttgcaatctacttcctccattatattttgtattataagtcgttttgacatttttttcaagttaaactcattttcaacatctacaatataaaatcattttcattaaatgtaaacattgaatattgaatatattttgataatatgtttgttttatgttaaaagtattattatattttggttaaacttaaaaagttttacttaaaaaaagagaaagtcaagatcgacttgtatataatataaaacagagcgagtatatttaaacattttgttatgttcgtcttgtaatttactaattatgctcaagtggattgatcgatttttgttgtttgaatttgaattttggatgcaatttgtgctaatttgggcggatcaatttctgtggattttgccaagcttgaggaccttgccgtgtaccgcttgtacaagat

SEQ ID NO: 9251 - DNA, 632 bp, Oryza sativa
  Intron number 3 from transcript LOC_Os02g07880.2 (locus LO C_Os02g07880) derived from phytozome v7.0 (chr-ID Chr2; po s 4130419 to 4131050)
ctttgtttgttggccgagagattcatagtgaaaaggtactaatgttcacccccacactgtgtacttgtttgtttcttttcttgctttatcttaactcatctgcttagcaaggtgttatgaacaataagaaatgttgttatgcattgacaactgttccttttgtttatactaagaaagaagaaaattgtgttattgcttggattagttttcgatgactataagtgagattacatttgcaaccaatgacctgcatataaggcaagcttttaacaaagaaactctatgttgttaaaataaagaaaaagaaatatctaaattcaaaaagaagaagatttgagcctaggtggtggtagtgtacacaacccacacccatcagatgagctaggcttagttcacttttttttttaatctggcttgtacttcctgtgtttaggaaattccatgttggttctcctaagaagttcttactttttagtagtacattttgcagcaaataagcaaaaggactgtgatttgtcttttgaaatttttgctatcagtgattcctgtgatttcttttacatccaacatagtattttataatttgttttgcagaactaaagcattgcattgtctttgtatgtgcaggttgt

SEQ ID NO: 9252 - DNA, 689 bp, Oryza sativa
  Intron number 2 from transcript LOC_Os02g29774.1 (locus LO C_Os02g29774) derived from phytozome v7.0 (chr-ID Chr2; po s 17712943 to 17713631 reverse strand)
caactagagttcatctcatcatcggtgaaggcaagtaaacatagcggtggtttgctacagctttgacttgttatttgattctacctccacgttgaaattatatatcatcaaccaagattattatatattacacggaggatttacctatctgaatcatacttattgattttacgctgtttatagttatactttatgctcttggttataataaccttatactgatctccatcgaaggaatgtggttccgatgttatactctagaattcatactgcatttgcatcacttgcattgcatttgaagttatgtcgtgaacctatggttgcgaccgtaccggtacatcatcgtatattgtcgtaataagatgcagcttcacaccttgttggttgtgaaggcatgagtacatatcattgcattgcatatgcacatattgcgggacgttatgaaaattattgatcgaagatgtctttgagaagtgttttcttctctgggatttgtgagtatatggatttgattggtgacgctatgatgttttagttccttggattttgaacttgtctttatgtgaatcataacttggtatttaaattatttatataataaacatgtggtttaaatagcttgttaaagctgtttgcttgctgagatttattctcaccccattatagtcttttcaggtacttgctgtgac

SEQ ID NO: 9253 - DNA, 790 bp, Oryza sativa
  Intron number 1 from transcript LOC_Os02g29774.1 (locus LO C_Os02g29774) derived from phytozome v7.0 (chr-ID Chr2; po s 17713648 to 17714437 reverse strand)
gaggcttaggtatctaatacatgatcttttccccctgttttggttttctattagggtttagatcaagtgttggaagcgagtaagtttgggatcaaccgatttattcctcagccaggtttttgctgatctgtcccctgcacagttctggtttggatgccttttcggccatcataatgggatttcctgcgaaaagtgtatatacaaaagttgtagataacgtgtagatctatcttctgaccaaatggcatgagtttatatcaagtggtttaggagatatcaatttctgaatttggctgtctgaatatagatgcatttttctgtagtcgaggttcagagggattttagaggatcttaatgatggaatcagagaatcttgtttttacagaagttgtagcatatgttgtgatctacctcctacataaaaattgttagcttttatcttgtagtttgttgtcagtgctcttttgaatggttgttgcacagttttctgggcagatgcacttctctgttttgtgccatattttaggccagctaaatggaagaattcaattttgttatctaaaagaaagttgtaactctttttctgtagatgtcagaaatgatatattttgctgtgttatgtgatgtagaattggaggtatcgaattgttaatctatgctgcttttataagaagattatcggttatttgctttatgttgtttggggtgggatcccagcgtaggaagcgtatgtgtgtttcttgaatgattatgcatgttgtttgagtctgagccggtgtttattcaggtg

SEQ ID NO: 9254 - DNA, 874 bp, Oryza sativa
  Intron number 1 from transcript LOC_Os01g05585.1 (locus LO C_Os01g05585) derived from phytozome v7.0 (chr-ID Chr1; po s 2664534 to 2665407 reverse strand)
ggtgttgcaccttccaaggggtatgtgcactaatcctttccttcttcatatcctgtacttgttgttcatgggcaaaatccatgtgttatattactgaatttgttgaatagtataaggagagggaaatattgtgattattgacaccgttgtattgagtctcagggatcactatatatagaagtacatggtgtagagataagaaagaattacggatatggaagaagtccacgtaaatcaatcttatcctactctaactaccatatatatactttaatagaacagaattgagtacctccatctttctagctaccaacctcttttgtcaattatcatatgtttcctgccttttttccccttctgaatcacagagaacaaaagtacaaaacattttgttgagaggctcactgccttccattttacgtgtacgtatgacaaaattgcagcgctagctacagccaatgaaaaacgactaaaaacttcatgcacgttatgacaaaaactctctcctttatctgaagaaaacgattatgccttttactctgaaaactgcgtagcaacaatccaagatcgtttcatgtttcgctgagttctactcccttcgtttctaaatgtttgacaccattaattttttaacacatgttagattatttgtcttatttaaaaaattttgtggaatatgtaaaactatatgaatacattaaagtatatttaataataaatcaaatgataggaaaataattaataatttcttaatttttttaataagacgaatggtcaaatatatttagaaaagttaacggcgtcaaatatttagaaacggagggagtaattaattactgatctatggttggttaattctctgatggatgcagtc

SEQ ID NO: 9255 - DNA, 788 bp, Oryza sativa
  Intron number 1 from transcript LOC_Os01g66960.1 (locus LO C_Os01g66960) derived from phytozome v7.0 (chr-ID Chr1; po s 38890441 to 38891228)
ctgcaacgccctcgcggagttcgtcaaggaccaaggtatgggggtacctgtggattcctcctcccatgtagctgctgctagtatttgcgatctgaaccgggaacgcgtaggagcctttcggatgcgttttttcttttcctacgccttggaattgtttgttgtgaatctgttaggtgcgatctggatcgaaatgttcactgaatttctctgattaatataaaaggaagcttaattagagtgggaaaaagttttagaacacaaaaccatattggtcgatttgtgcttcttggatgataacttcctcaaaggagattctgcgctgtgtcattaagaaaccgtgttgttttgttattgggatattgtggattgaagagctcatctcgtcctgattggactggaaaatcttagggttgtcctttggtctgcagactgcagctgtagggtggtgtcaagtatggaacttcccttctcttttttttttcctttttattgtttgtctctgttgtttcgattagtctgtcgagtagcattctgaagctagttgaatcggaaagttgatttatttttcgacttaactagaaatttggtttattatatttttatatcagatacactagttgcttctctgatatgaaatccattcatttgcttgctctgttaggacttaggattcagtcttcatctactggcaaagcaaattcatgtggattcaactagttgtgtcaaccagcttttctgattaattcatttgcttgtttggttgcagaattggtggaggactgccgtaa

SEQ ID NO: 9256 - DNA, 709 bp, Oryza sativa
  Intron number 2 from transcript LOC_Os01g69030.2 (locus LO C_Os01g69030) derived from phytozome v7.0 (chr-ID Chr1; po s 40104822 to 40105530 reverse strand)
ggcgcatctggcacctcgcgagaaagaagaagcaggcatgcatcgatctctccctgtctttttctttctttctcgtgttcatggttgatttaatttagtttctcgtgctctctgcatgactgaattaattatctccgagatacttctgaactttctattcgacagaaaattcagattttgattttaaaagaaaatcttgtcggaactatgttatacggagtgctttaactattcatcaacacgataccatataatatcctttacaaggattcagataatttttagtggtaacgatagatcggctaaattgtcgtgtagggctagatcaggccgttggcatgattcttttctgctttcaagaaaagatcagagtgttcaattaatttcagatatgattatagtcccttgtagatcatgtagtttgtattatgcaccacacacgtttgtggaaagaagaaagtatggcaacccaacggtgtcagtaatggacgatgagtgtgctatcttttttccttttccaagagtaggaaacaggatctttttaaaaccactcaattggccatgccaaaagtgagtttattgtgttcttttcgatgagaaaaaaaattatgactgttcatgatgctcctaaaaggtatttgtttctgagattgcctaaatttttatgtgagcagctggagcttgagggaatcctgaggatttctgcacg

SEQ ID NO: 9257 - DNA, 1025 bp, Oryza sativa
  Intron number 2 from transcript LOC_Os02g03620.1 (locus LO C_Os02g03620) derived from phytozome v7.0 (chr-ID Chr2; po s 1482463 to 1483487 reverse strand)
cgcccacctatactgcaggtttgcgtactgatgatatcttcttctctttatgatccttcagaggcagctgattatttgattatttccatctacataattgcacatttcatcctgagaaaaatgtagttgctagttttcatctagctctattggatatttaagtgggatcagtctagaaagctttactggtcccaccacttttgacattttactttgaatatattttgtatacaaggtatatgtgttgcacatacaccaagttaggacatgtaagttgtcattggatttgttgttatttgaatgttgtgttggtgaagtttacctgttctttcattcgaagacaagtattgactgctttgtcctgttttcacaataaactcagccgtttgttagtataatagtgcatgttctttaatttctatgttctaatcattgacaagttttacattgcacatgtaactcaattgttttgtgcttattgtccctgtccttacaatactgggttcatgatcttcaaagtgatctgtgaatgttcaagacttcatctgtccaggaaactttcacatttctgctcatagaaatggaggggtaccacccttttgataaaaaaaaaactctgtccaggaaagaatagcaatgcattctttaacattggcatgttgtctactctcaacagttgcacgacttttctgtgttttcatgaaagcgattattagtttttcttgtatgcaagctccctccacctgtgtatataatgctgtttgtactttattttacctttctttgccagatgagttgtgtaagtttgttgtgatcattcaattcaactttgtaaatgcctccacctctggtctttcattcgaattgaatgaactgtaggcgttattgcataactttcgtagcactggtgttatatttcttggatcatgatatttggaacgacttctgtgaactgaaaagtgaacacacaaagtaagaaaggtaataatcaattgattcatttgtgttcctcttgcagtgcccaa

SEQ ID NO: 9258 - DNA, 882 bp, Oryza sativa
  Intron number 2 from transcript LOC_Os02g35700.1 (locus LO C_Os02g35700) derived from phytozome v7.0 (chr-ID Chr2; po s 21448059 to 21448940)
acaaggtacctttgtcgaaagacttgtgtattttgttccttgcttaagtcctcacagtcacaggctatagtgaatcgtttcgacagtgaggccatatcaacatgaaaagtatggaatgcatgacatgtgatacttttttttaagaaactatttagctcgctaagtatgagatttgaatttgtgggcagaggaaggagcatgtgtggtaccatattttcaaattattaggagtttatcatttttgaaatttggctgttagggcagctagatatcatgtttagacaactattcgatacatgaatctatatccggacattcagaaattctaagctgcttgacaggtagaaagctagtactagacacatacgttgtagacagtgagaacgcaagtgcagatgtagaaatttattcctccgtaatcaagaaccccactgaatattgtataatttatcctaaaatcagtttatggtacctcttaggtcatggtactaagatgtactcctcccaatgcatgttcttgagctaaatcagttcattgggaatcttcaaaatgttagcaacttctgggaatacaaacacagtaagctggttttcctatttgcgaatgcaatgcagttttttctttcaggtggcaattttttgctgcagaaagccccaacaaatttagttttactgaacaatttagaatgctaatttaacaagttctctaaaggattggcaaacatggctgaacatttttttttttgtttgctgaatatatcaatcttcattcttcttttttttttaatatggattggactcctttatcctgatctgcctcaatgatactgaacagttttgacatgcttgtttatgttgttctttagtggtccagttctcgtt

SEQ ID NO: 9259 - DNA, 721 bp, Oryza sativa
  Intron number 3 from transcript LOC_Os02g14929.1 (locus LO C_Os02g14929) derived from phytozome v7.0 (chr-ID Chr2; po s 8341759 to 8342479 reverse strand)
ctgcaggaggtgcgcgactcaatctatgaagtttttgttcaaatcattattgttttgcagtttgtacgattgtctatgctatgttagcttggactgaatgagtggcttcgtagcaatattttgatataggtgatattgctaaccttcatgttgtaacatgatagcatcgtatgagttgcaatttacaactgccctgttcatggtatgatagaatatgtgtcctttctctttttgtttcagaacctttcaggtgcattgtacaactctagcttcattggtttcatggaaattacctagtgatgttgggaagattatgtttcattaccttttctgggtcataatgaaaagaagctgaatatttatctttggaccaacttttgcattcttttccaacttatttgggtttcttatctaccttctttattttatctgcatccaacttgtcctataatcataattaatacaataattctatcgaattatttggacaatgcattaaggattgtgttctttaaatgtaacttctatggttatacagttgtttcaaggaatagtttgaatggtgcattaagcattttatttagagttgatggtggatagatttttgcattcatatgtcagtaaaacactccgaatatagatgctacatttgtagaactgtcaggacatttttcaccatatttgaattatttccttggttctgcaggtattgttgtaacta

SEQ ID NO: 9260 - DNA, 416 bp, Oryza sativa; identical to SEQ ID NO: 9190
  Intron number 1 from transcript LOC_Os01g59600.1 (locus LO C_Os01g59600) derived from phytozome v7.0 (chr-ID Chr1; po s 34470205 to 34470620)

SEQ ID NO: 9261 - DNA, 904 bp, Oryza sativa
  Intron number 1 from transcript LOC_Os01g07920.1 (locus LO C_Os01g07920) derived from phytozome v7.0 (chr-ID Chr1; po s 3828313 to 3829216 reverse strand)
tttgcgccgcctggtgctctggcttcttcgcgcaggtattgctgttcttgctcttgctaatttttgatgcaaggttctctgattggatttggcgcccaagaaatctgcttgtgtttagggaggaatattgtgtatggatagcatgattcagtttctcaaggttggattttcatgagtgtcgatgtcttttgcaacagttgctgttgtgggtaattttgacccacccgcacactcaaaaggaagaacattgtaggctagtggtagtgaacaaaaacatgtctttgaagtctaaagtataatgttgcctgtcttatattgttccctgatgatcttgtgttgattatgatcatggtattgatgcattaggattgatttagaaggtcttatgtaatgtaaagagcaatagagcattatctgaatgctggtgttgttagtataaaactttggatgaatcgcttcgattatcgtgggttgatgcaaccatttggtggcatatgtgagattcctattataaaactgagtccataccaattaaatgattacaatcaagaggcagtggagaaggggcaacatagatgggggaaatggtaatgagggctaagcctgtcatctaaaagaatggtaatgagggccatgagagaagggggagacttctattttgtctatggatgttccttctaatttttttatgggggtctggaaggcgctagaaaattataaaaaagcatacgaaggaggggagaatggaggagaaaatgttctaacattgataagaacaggaaactgagatgtaaaaaggaaaacacggttttgagttatttttctttgcagaaacttatattatggaattcatgtattactcctttcaggtttgatctgagtattgcacaagaaaagttagtga

SEQ ID NO: 9262 - DNA, 832 bp, Oryza sativa
  Intron number 2 from transcript LOC_Os02g15880.1 (locus LO C_Os02g15880) derived from phytozome v7.0 (chr-ID Chr2; po s 8986779 to 8987610 reverse strand)
aagcataagtgggccattgcttctggcttttactggtaataaacataggcttcaacttcaagttactctatcttaaggaattaatagttcatatataagtgcattatcgagcttgaattggcctgttatcattgccgtaacaaaggatcagggtattttttttgtttgtagctatttcacttcaattgatgaaattttactttagatttgttgatgcaaccagacttcctatattttgttaatacacttgctatacagtaagtttgaatcctgtttttatcatctgaattttagacaaaattttggagtactctcttttttaagagtacaacgaaaagccacacaaacatatgcccctcaaatgcatgagaggcatgtagagatcctgctatcatatgaacttttgtatcttctcttcatgtgtgtagcagcatataacatcctaattttctttatatgtgtttgttgtcctcttttttttttgtgtgtatgagttgtattatcatgatcattgatcatatctttgtccttttgttatctgcagaacgtaactcacttggccaaatgaaatccatggtagttggttattctgaagcatagaattgttactgctttgtgaacgaataacatctatctatctagagcactggaagatggatcatagagatacttctgggtttgtcagtggaggttgcaaagaatcaacgaactgcatcaccctaggatttctaactttttagctttgttaaccattatttaatctggaagtgaggttatctggtacttggcaaaaaaattggctgtgttttgtctcctgagaaattctctagca

SEQ ID NO: 9263 - DNA, 770 bp, Oryza sativa
  Intron number 2 from transcript LOC_Os02g36740.7 (locus LO C_Os02g36740) derived from phytozome v7.0 (chr-ID Chr2; po s 22160166 to 22160935 reverse strand)
tcgagagcccctgcgcttgtagcggtagcctcaaggtatgttgtttcttctatccaagcgagcagttcttgttccaatccatattaacgataaaattatttttgcctcaatttcatgggatcgttgttgatatataatgaattatagtgttgcaaagaatgaggaggtcgtgaaaccatatatccataccaatgcatgtgtatatgacgatgtgctatgcacacacgctatgctttgcgctttggggcttaaagctatgtaggacaaatagcttagcggttggactgcatgctgattggaacctcacatcccataaaccagacattactggagtatttgatgtgacttttaatcacatccgtgtattattagttgtgttttggatacaatcttttctgctgctatggctactgatattatcaggaaaagtagcgccataaagtgattccagtatgagtaaataggtgcatgcttgttatcatcattgttgcttaaagagttggacaacctttttttcttggtggtagctacttgaggcaaacttatggatgaagtgataatggctagatatcttttgtgaactgccttcaatttaaggcacccaagtcactgtcatgatctaactgctcaccataattaactttgatagcatgctgtgattgaatctgttaaggattttttttttgttttactgtatttcttttgtacgtcatgtctatatttctactttttgatctacaagattttattgtgcagtacgctcatagaga

SEQ ID NO: 9264 - DNA, 792 bp, Oryza sativa
  Intron number 2 from transcript LOC_Os02g54960.1 (locus LO C_Os02g54960) derived from phytozome v7.0 (chr-ID Chr2; po s 33657989 to 33658780)
aaattcaggtaaaccactttctcaaagctattatttgctttcacatggtggctaaatttgatttagtttaatttcgtccaaaaattatatgtagattctttcaaattcatgattatatataataaataggtactgcaagttgtagctaaaatcatgatagcaaaattctttaaattggtttttattcacgacaagccatactatttgcttcccattcgttgcatattataaaacgttttgggtttgcccaaggtcaaatttcttcaagcttgaacatgtctataggaaaagtagcagcatctacaacacacaattagtttgattaaattcaccattgaatatattctatagtatattttgttttctattgaaaatattactatatttttatataaagttggttaaacttgaacaaatttgacttagaacaaacccaaaacaactgacaacatgaaacggagggagtgcattttattaatattcattatttatctactacttaaactctcatttaacattaagaaatgaaataattaacttatttttgtaactatgctattatcaactatacatgcgaagacttcatggatgtcttttgtcaagtctatattgagaatgttatttgtgcatgtaaaaatcaccctatcccttattgcccatgacgagtcattgacacctgggcccaaaacccgcatatcattgagaataagggatacggtcaactttcaagagcaaataaggattttatccaatcatttactatacggtgacacagttttacatctcaaatag

SEQ ID NO: 9265 - DNA, 481 bp, Oryza sativa
  Intron number 2 from transcript LOC_Os02g26814.1 (locus LO C_Os02g26814) derived from phytozome v7.0 (chr-ID Chr2; po s 15735097 to 15735577)
ttccatctaaggtcaatgaatttctctttcattccttttaaattgccactttaccagcacggaattccagcttgttctgcatgttaattcttcttttggtgctttttttttgtctgtgtgcgtgttctgttcttggggttaattcttgatgagttgtcagatgaacagaagttgcgcggtttgatttcttgtgaagagttctgtttggattgcacatttcttattttcagttttatataaccagtttcgagtgaatgtttctaagttgaatgggtagggactatatccaatcattgaatgattaggggatgttcctaacatgtggcatgaatttatgttatattagcagataataattgctttactctgctagtgattcctctgttctacctgaaacatttgtaagcaccatgttgatggttgtgaaagtgaagtgaaaccagccagaaactttgatatatttgaatacaggtctcaggag

SEQ ID NO: 9266 - DNA, 1006 bp, Oryza sativa
  Intron number 3 from transcript LOC_Os02g26814.1 (locus LO C_Os02g26814) derived from phytozome v7.0 (chr-ID Chr2; po s 15735662 to 15736667)
caggtaattgtacatgtttataggacataccaggtgaaatgtatttcattcaaataacatttttacccaatataatggttttctcaattgaaggattactccactgcaccatgaatatgctctcattgtttataggtcataccttgtgtaaagtctgtcttcatggccaattctattctgttggacatgaggagtgtacacccttaccgtataagcttatatacaaaactgggtttaaagatcttcatgccaatagtttgaacttgattaaggcatatgctatctcatttttttcttaagtgctgcagtggagtattatatcgtgtggaacgctttggtgcattacatgaaatcctttctaaacttggtagtttgtgccaacaaattgagcataattggtgtctttaaatggctgacgcctgaagagaatagctacacttgtactgttttaacgccatattggctgctcgatttttatttacaaaacatcttctgatattataagcacttttttgttaaccaatttatgttttttcacctctagatcatactgctatttgagttcatttgaactaataaacatgccatttttacttcgcttcacaatatttatctgacgcgtacaaagaagcataatatttaagtaagctgaccatacttgctattgttaggtagagttgtaatatttctacctgccgttatggtcaaatttcattaaatgttacataaattctgtgctgccttgatatgtgctctggataaatactgtgaattttagcaagtatatcatcaattttgcatctttgttacttcctccatttcataatgtaagactttctagcattgcccacattcatatgtttctagattcattaacatccataaaaatgtgggcaatgctagaaagtcttacattatgaaactgagggagtagttgtcaatgctgattgcaattaaccagattgagctctagcaggttcaggaagcatattcgagacgttgcgac

SEQ ID NO: 9267 - DNA, 1070 bp, Oryza sativa
  Intron number 1 from transcript LOC_Os01g48940.1 (locus LO C_Os01g48940) derived from phytozome v7.0 (chr-ID Chr1; po s 28083984 to 28085053 reverse strand)
ggccgggcgcagagcctggcgccgatccaggagaggtagctatgcatactgccatgtctgagcttgcaccttctgcaagctttgatcatggaggaggagaagattagttaatactttgtaccgtgacgtcgtaattgtggttttgtagcgatatacgtacgattttgcctggtcacccggccattgatctgctgtacatatacgtagtggagaagtggtggcgacgtatatgtatatagttcgtgacctcgtgttacgatcgagtaatgtatatcctactttcttttttgttaataaacacaaaagtttgcatcactactatactgtcgatcgaagcaatctgattgaatatatcccagtcagaatgagcgtcacgtcatcacgggccccccacttctcccttttcttgcataaacaaacacgaggcaagtatcgcgccctcgaaccggactagaaacaggaaacataactgtcacacgcaggtacacccccagaggctaaagtgctaaacaccaaggcacaccaagacaaaaaaccgaagctcatcggcggccaaacaaccagtacaagcaagcaaacgtggcacacaggcacacacgatcacacatcaagctaattgttgctgcgcggctgcgcccaaaaaaacaaacgattagtagaagcttcaccgcaacgctgaaaatcgcgacaggatcacgagatcgcatcgtccacaggctcgcgccgccgtttcaccgacacgggagtggtaaaccgaacccgaccacaggctcgcgcccggcgtttcgacactgtcactctcgcgtagggatgtaaatggctaactcgcgaatcgactttaaatatcaaaataaacaggttcacgatttattttagtttataaatagatttagcgggttaatcacttgttagccagatgagtcccccggccggagatgcatcggaattctgcggatattttccaaccggtgtaaagcgcacgcacggcggcctttgatcgatcatgcgactggctaggtcgatcggattttgcagttgtagaggcttcggagttttggggagtttggagt

SEQ ID NO: 9268 - DNA, 933 bp, Oryza sativa
  Intron number 1 from transcript LOC_Os02g46090.1 (locus LO C_Os02g46090) derived from phytozome v7.0 (chr-ID Chr2; po s 28081564 to 28082496)
catcgatttcggcttgtctgtgttcttcaagcctggtgagtcacccctgctgttagaaactcaattatttatttctgtgactgttgcgcttgctccatcactttctgagcaatcgttgatggtaatagtccaatagatggaatggtttggttggtggaattaatgatacatagttgctttagctcatctgactagagaatgtatggaaattaagatttgagaatagagaataggaatatagtttagtcgtttaaaatcatttcattcattcattgggactcaacatatactgatccaatctgataattagatgttaacatttacgcatcagatggtgaaggctgctcttggtctggggttctctcttttttgggtacaattgttgttcgtaaatgagattgctagcaaaatatgggtttttgcattcatttaaaaagtttatgaatactaaagaaaaatagttaaacttacagtttttcaaaaaagataaattaattatgggacaaatatgtgaagatcgatttctgaattgtttcctgctgctggtggatgaataataaaaagaaaagaagaagaaattgattgtttggtgctttgctgtacagactacagcaataggaacaatcaaaatcgaacctgtctttgtacacttatttgaatctaaatatatgttattcaccgatatactgatttgaccacttctaaaagggctaaaactaactgtttcattgcaactaatagaagctactttacatatagctaaaagtaccatctatcgcgaaatccacttcctatgaatctctcttctataaatctatttaccatttatgtgcatcttatgcagcatttactgtattaatttttcagtgtaattagttatcttataaagaaattccgtttgttgtttactattcttaggtcaagtttttactg

SEQ ID NO: 9269 - DNA, 934 bp, Oryza sativa
  Intron number 1 from transcript LOC_Os01g49470.1 (locus LO C_Os01g49470) derived from phytozome v7.0 (chr-ID Chr1; po s 28456528 to 28457461 reverse strand)
acatctacaagcaccactgcgacgccgaggacgcggtacggatgcttccccccgtgcagagcttctttttttttttgttatggtttcggtgtttttttgtggtgtcgagcagctttggatttgggcgtggaaacgcgtgggctaatcccaattttggtggtgtttgggtttagggttgcggaattgtttccttaggtttggaggaactgagtgctattggattaaatgtggcgaacactggtaggatctgaaattggatgaagctcataccatggtgttggaatttgttatgatcttgctttggttggaaagcctagaggatagtcatgctagtatgaacgttttttgttttttttttttgccactgtggccatttctatgtttatgtcatgaataaacattgacttaattgtacaaacagttacacgaaatccactgtttaattgaaatcacgatgggaatttcgacctatatcatcatgtgtgcctttctctgtctaatttatggataacactgatgttttgtgttgattggagcacagtaactttcacatttatcacatatcagattgaataggattatcttgtcttagttttcaacatcttaataaaatgcttaatacctattcccctaataggggagattgacttttatctgcccttgtttgagtggcggaggtttagctgacaaacaaaggtacttttaccttctttgccttaattgctgcaaaaagtagaggtctatgtgttcaagtgcaaaaacgtttctgttgctgtaagttgtaactgctttaacattatattctgtagctttttttttgaaaaatcttctattccttctaaatggcagcaatcaataacaatttcttcatgttatatattttgttctgagtattgcaggttatctttccagcacttgatatccgagtcaagaa

SEQ ID NO: 9270 - DNA, 670 bp, Oryza sativa
  Intron number 1 from transcript LOC_Os01g42679.1 (locus LO C_Os01g42679) derived from phytozome v7.0 (chr-ID Chr1; po s 24272089 to 24272758 reverse strand)
cacaggtatgtgataactgacaggaacacttaactgtaaattgcccatcaagagaaactacaaggacctattctttcgttataaatctcatcaagttttacatcgacgatctgccaaaaaaatattcctcagcagcatacctgcttctcctttgaggcaagcttttctaacaaactgctattcttaggttcggcttgcgaaaaaagtgacgtaactttggccagggttgctttcagtgtagagaggtaggcagtaggctttgatcccctctcgacgatggaaatttaaaagggattaaacaaagagctaagtcaaatctaaacaaaacccctggggaatttgtgatagaagaatgatgcaaagctctgcacatttgcacctagtttttccctcccgtgtaagctccactacacacaggaagaatcatatgcacttcacctctgtattttctatgcattgagattagcagtgtgggaggcagcttgaggctaaactatgtgggctatgtgagatttttgtccctatatgttattttttttattctttttagtgtagtccctatctgagcttgagagattagagtctacatagattagggactaggtgaagtttctcactgaaacacttgcttattaactacctaatcctttctccatgctagagattatag

SEQ ID NO: 9271 - DNA, 638 bp, Oryza sativa
  Intron number 2 from transcript LOC_Os01g70370.1 (locus LO C_Os01g70370) derived from phytozome v7.0 (chr-ID Chr1; po s 40769448 to 40770085 reverse strand)
atttctattaccgacgattcgttcgtcgcgttcaggtaagctatagtaacctacatttcctatatttctaaagatgattaataaaaccctatatttctgaagaggattaataaaagtgtacatgtgcacacagatatattaatttaaactttaaattttaatttgatgtttttactttttttttttctttttaagtcggtaaaaacaaacatatataaaaattttacatatgaattagtttttaatcagtaataagtactccctccatttcgaaatgtttgacaccgttaattttttagcacatgtttgaccgttcgtcttattcaaaaacttttgtaaaatatgtaaaattatatgcctacataaaaatatatttagcaatgaatcaaatgataggaaaagatgtaataattatttaaaatttttgaataagacaaacggtcaaacatgtgctaaaaagttaacggtgtcaaacattttgaaacggaggaagtttacagattataattagctatttagacttttaaattattagatgttttattgagatttgtgttttaattggcttatgtttatcaactatatatatgttgtcacatgcaggactgcttttggcgaccaatagccagcaagccgga

SEQ ID NO: 9272 - DNA, 660 bp, Oryza sativa
  Intron number 2 from transcript LOC_Os01g42630.1 (locus LO C_Os01g42630) derived from phytozome v7.0 (chr-ID Chr1; po s 24247343 to 24248002 reverse strand)
tctacgagctcaacttcggccaccgcccataccaggtgcgctcggtttcttccccaaatccatctgtggtatcccaaattggaacctaggagaaaaagcttctggttagattccgcagttttgatttggttcggctcagatttaggagtagcacatagaacatggtattattgtgccaactgcaaaggtgatgagaagtgagattcagaacttaagctgctcgaccagatgtttaggctgagattcagaacttaaactgcttgatcagatgtttaggcacttcttagggagtatgcttacaagttttccacagaatttatgttctgcctagaatttctcaattagtagactgtcttgatgtatttgtttaaactgtccacagaattgcttacaatctggttgatttcttttgagtatgttgtgttgttttctataaccatttcacatggcaagggaacagttggtcatttgccttcctcatgttcatgtagtcattctcctggctcatctaccctgtcctgcagattaagcatatcattctacctgcatgatgattcttgtattgaattgtctaagtctttaacaatttcattatctgaactgtatcactgttatctaaatacagggaaacattcaaacactcactgctagtgacctaga

SEQ ID NO: 9273 - DNA, 657 bp, Oryza sativa
  Intron number 1 from transcript LOC_Os02g30910.1 (locus LO C_Os02g30910) derived from phytozome v7.0 (chr-ID Chr2; po s 18450394 to 18451050 reverse strand)
acgcagcacttgggccttcacctttggcatcttaggtacatacaggcatcaacatgctcatgaatgctgcattcatctcatgcatacggtggtctttctagctgttatattagcttactctgttcctttgatttgattaatccgtgcatgcatgttctcccatattgttggagacacattatggcagcatgtatcgatcttaattcccacaaccgcacaagcaatgtccctgaaaaccgcagcaaaacacccattggaatcaagttttcttagttaactagatcaataatctcctttgttgcttctgtcaccttaattagtactccagtgtgtcttcctcaatatctttcaaagctagtgtttgaacaaaaaaaaaagaactagtgtttctgtcctgaataaatggaactgctaaacaaaacttttaggctctaatcaggtagttactctaaacagagaaagggagccatcacgcatgttagttagaaacgtacacaccttatttttttctctttttagtttttaccatgcaccatgcatttcttttctctgtttgcctctctctctctctctctctctctctcttttgtattggctgacatcactgataacccgtgtctgcctttgatcttttttgcaggtaacttaatctcacta

SEQ ID NO: 9274 - DNA, 730 bp, Oryza sativa
  Intron number 1 from transcript LOC_Os02g19750.1 (locus LO C_Os02g19750) derived from phytozome v7.0 (chr-ID Chr2; po s 11551808 to 11552537)
aggtacgaaaaacatatgtacaactattttaaatgcatatactatatatatattcattaacgataatgaccagatggattatggttatttttgttattttattattttgtcaacaataaaagaagaaatttggagggagagacgtcctccaaacatttttaagaaaaatttgttatcatgttgagaatttaacataggaccttgaaataaaaccacactccttaccactggccactgccctgcatctcaacaatatataacaacaacaaccttttgtccatactaccctcattggcatgaccgaatagtctcattacaaaactctaagagcaattttaaagttcttgaggagatattatgaggtaccattttttctattttaaagtttttggtaactagatactatgacgtaccaaattttacactaaattttgagcaattctaccatccttaaggaggtatcatgaggtactaaaaatttagtgcaaaatttggtacctcatagtacttaggtaccaagagatacgaaatttatagtagaaaaagtggtacctcatggtacctcctcaaggactgtaaaattactctatttttacatattctccatctgtttttgattgaccagcatttaattatttgtttttgcattcaaaatttcgttcttaattctagaagatttacaatggaacctgtaggtacctcattgtgatcgacgacgtctggtccacat

SEQ ID NO: 9275 - DNA, 898 bp, Oryza sativa
  Intron number 1 from transcript LOC_Os01g43870.3 (locus LO C_Os01g43870) derived from phytozome v7.0 (chr-ID Chr1; po s 25131952 to 25132849)
gagggaacggcggcgaggagctgggtgcatctcgggtacgtgcctcctctctctctctctcctcgcgtcgctcgagctctgctttggacgggggatttccggagctcgatttcctgctcgggctcgactctctgtgattcttgtgggttttgtgtaatttgatctggggggatgcttcgctctgtgtagggtggtacatgtttggctgcttgagtatgtttcagctagttgttgggtggttgagctttttgtacccgtgagaaatacttgtaagctcaaaatttgggccgaggtatagagaggaattgtgtttgtgtgaaggttttcgggctgctcggtggaaaaggagtagcgagcttttgggatgtggcatgtgtttggggaattctgtaggctgcgttcctgctgtagcttagtttctgatcttaattactgtcctgacaagttcgaacgaaaatttgtttcatgggaaagtataaaaaagggaggggaaagcaaggaagggattttagttggtgttaaagttgttgcttgctaggagggtttaaagattttgaaagggttgttcgattggtgaattcactggagtgagtgttttattttagtggtagattttggagaaaaaaaatggtggctggctctaatttattgagaacatatgggtaaagtatgttcttccagtagatcattagtctgtagatattttaccagcttcacttttctccactaatgtctttagtgatatcaaatgtttcaacagttggacttttcctactggaactgcagtactttcaacatgctttttgcaaatgcctgcattaaggatgaataaaatgttaagcaccgactatttagggacgcaggagcttcattcattttgcaagaccaccgaaatatt

SEQ ID NO: 9276 - DNA, 945 bp, Oryza sativa
  Intron number 3 from transcript LOC_Os01g43870.3 (locus LO C_Os01g43870) derived from phytozome v7.0 (chr-ID Chr1; po s 25133868 to 25134812)
caccatcatttttgtcctgtggctctagatctgtgattaactttttttatttccattataaattgcctgatgaattatttctgttcctgatacttgctaatattttctcaatatcctctgtcatcagatattcagatttcttctgtttttcagaagcaaatgctttgattagttgtgtaggttacaacaaacatagaaataaaacaatgtgaacctgttttgataaatgaggtggctagtcttacatgcattagggaccaaccaaaggggcttaaccatgacagctccgctccagtgttgtatccgacggatataggggcagcgtaggttcacattatcatattgttatctgtgcagagagagatttcgtgttctttgcatattatccacattgtcaaacttaaagggctgatgaaaagttactactaagataacctttgttccatcaaagctatatttggacatcatgaggcaacgtattgaagttgttcaaagccagtatcttcttttgtaatataaattatttttttgcgaacgcttgtaatataaattatgaaactgtatactctaacaacatggactgaagttaggaaatcataccggtcagtcactgggattggcaattactaacctatgctccttaactgtgatttttccacgaatataattcttaattttactaattctagaaatcagcttttgaatgtcaggtccctcctcactgtcataaagctaccagtgcctagagatacgagtgttcgtacaggatatgctatattagtaaaaaaggcttagatgataatcataactggctttctgttatattcgtgccatctgcgtacagattgtttccatttcttaaaagctatggaaccatatggattattcaaactatcgtttatttttgtagctccctatatcagtaccatcatcatcatcatctag

SEQ ID NO: 9277 - DNA, 654 bp, Oryza sativa
  Intron number 6 from transcript LOC_Os02g49190.1 (locus LO C_Os02g49190) derived from phytozome v7.0 (chr-ID Chr2; po s 30067071 to 30067724)
gtgacgatttgaacattacagatcctgaagttggggtatgctttgaaattctgaattcctgatgaattatgttttcctttttgacacagtttattcatttgaagtatcatgtctgagaaggttggttccttgtcacttggataatttttttttaaaaaaactaatttgtaactgagtttgaatgagggaatgaccgtgtcctaccgagcatgtatgtgaaagaaaaacctcatgttggcctgtcctcttcattttgaatcattggggttatgttgcacacttgtcttttagtggtaattttggctcggtgtatatgccatcaacctatagttttatgtgctattaacttgaaactcttgtttaaacctacttgcaactaatgacaaaagagctctttcaattattgctgctattggacccaactctactattcgacttttgtaagtatggtaaaatcttgtagtgccattatattccattggattttgaagtggcaaagctttgagtgcttgtgattctttgcatagtttcttgctggtgatgttttcctgtaaacacataattttattatttctgcaactttgttttggattgacaaagtattgtgattgatgtgcagcctgcaatagctgtctccatccgcgagcagcttta

SEQ ID NO: 9278 - DNA, 603 bp, Oryza sativa
  Intron number 1 from transcript LOC_Os01g70060.2 (locus LO C_Os01g70060) derived from phytozome v7.0 (chr-ID Chr1; po s 40551871 to 40552473 reverse strand)
tttgaagctcaataattcacgacaaagtatagagagtatccttccagagtgtgatcctacaactttctccatcattaacttagtgacgtcctttctaatgtggtttagcgtaattgtcgcatagctattgttcttcatggataagagggtgtcaactattttccctatagtttctctcaggataacacacaaactatccatcttcattttgacttgtcagttacaattcagtggcttacatggcctggatgattaaaattcatagcacacattttatagaaaaggttaatgctttaaaattttaatcttaccacttttataactatggcagtagaccttttgcatccagttgatcactcatcacacagtattatgatcagttgatatcattctggtagtctagcagtcatccgttgacccttgctcaaatatgttcttcctaagaagtgtgtccaaacaaaatttgacagcttatttctgattgtttatttgatcttacctcatggctagtacattatactcattatactgctcattcacataatggtgatgcttaacaaaagaaaagctttgtcacattggtgtgtctttcattatcgacac

SEQ ID NO: 9279 - DNA, 589 bp, Oryza sativa
  Intron number 2 from transcript LOC_Os01g04930.1 (locus LO C_Os01g04930) derived from phytozome v7.0 (chr-ID Chr1; po s 2281952 to 2282540 reverse strand)
gacggaggaggagcacaagtgagtagtagtaacattcacttcttgttcttcatcatcttcttcttcttctctttgagagtgattgattattactatctcatcgctctctgtgtcatgatgcagcagcaacaggatttagttggggagattgaattttagttttcttttgctgaattcactaaccatcactgttttttggtcgtttacatcacctgatggctatgggagttttataacttggaattattcaaaccatgaacaattggggggatggggagagggattttgagtaggagaggaaggggaatttcttttgtttctttggattcattcaccatcacttgattttttttttttttgggggggggggggttggtttacatcattttgattgctatggaagtcttgcaacttgggttaatccattttctttcttcattatgatccaagaaactgtcatgtagcttgatgtgtgaatgtttaggcctttggtataatccgatcaggataagcaagaattggtgaacagttactgatcatgatcatgctttgttctttgccaggttgttcctcttaggactgaagaaat

SEQ ID NO: 9280 - DNA, 721 bp, Oryza sativa
  Intron number 1 from transcript LOC_Os02g36340.2 (locus LO C_Os02g36340) derived from phytozome v7.0 (chr-ID Chr2; po s 21927437 to 21928157 reverse strand)
aggagaagctctgtactgcattcactgttacagtggtatgctgccattcttattctctttcttttgccagcactagaatagtatgttatgaatttctatggatatcaaattttgcttaactgtcaaatgcatgcatacgtatgcttattcactttaccattggtttcctctgcaaaaggccaaaatgtaactcataaaaattgttcttcacatttttagttttaaatattaatgatgtgacggcatgaggtgtgcatttccttttgcacacagctttctaacaaaaaaaagggtaaaaaacaaagttgtattaaaccagtgatttgactttactaaaatattacttgttttccatcttagatctgagttctgaaagtaaattgccataatagagtgtaatcattcctaacactcactatggaggcttccagagaaactcatgatgagtttggtgttaaggcgtctaaaacttggctattgctcctttcatcattgttatgcatatcaaatgctgaccaacagtatttaacctaaggaaaaacttgtgttctttagaaaattttcaaatcaacggaacagatacagcctacttactagtttagttactccatttcataatgaaagagtaaacatcctgccttgtgagtttgtgttgaacaaatttgttttgatgatttgtttgagctactgagatgaaattcatctgcttttggcttatagg

SEQ ID NO: 9281 - DNA, 1046 bp, Oryza sativa
  Intron number 1 from transcript LOC_Os01g61720.3 (locus LO C_Os01g61720) derived from phytozome v7.0 (chr-ID Chr1; po s 35711338 to 35712383 reverse strand)
taaaaaaaaaaaaaggagagaagaaaaaaaaacaggttgggttatccaccatttccgcctctgtgagtgttgagatttcttttttcttttccgtctcttccgcttaagatggctggggtcgttgatttgatctgacccgtagtagaagcagggggagggacggtgggcggtggcttgggagggaggcaggggcggggcggctcgagttaggtttcttggcggcttcagttgggcgaggaaggtgagcggctttcggtggttggttgctttgaggtgaaagctctctcgccttttctcactgtaaaaaacggcatctttcttttggggttttgcgttgcgtcccccggttttggcgttcttcctggctgcgcgctttccgtggctccgctccaggtgaatccagggttaatttcgctgcgcatttgtgatgggatttggccgcaggtggcgagggtttgtttcgggggtgggggattttgtcagtctgggttggtgtttgatccttttggtttgagaggttttgccgctgccagattgatcgagcgaggaaggagaacacgcggaactaggataatttagtggtcaaagttttgcccttttttgtgagaaaggtagtaagttgtggtggagtttggcgactgacgttaatcgtctagctccaaaccatggagttcggttccttgcttctttttttactctgatcggtttaaggcttttgcgtgctccttttttgtcaatttttggtggccatgctgattttctggtaaaattaaatctttgattttacgagtggggatacttgaccggttgggtttgaggcagtatcataatactggcagaacttctgatctttaacacatcttactaaaaaccctcttttctgtgcgcgaccatgtcgaactttttaattctgcagaaaaccatagattttactggtggttatatgatttcagctgatcttttacagccattcgtgtcctgaacctttggtgtctgctctgatgctttcaggctttagctgaagacacaataaaggaacaccaaaa

SEQ ID NO: 9282 - DNA, 956 bp, Oryza sativa
  Intron number 1 from transcript LOC_Os01g13370.1 (locus LO C_Os01g13370) derived from phytozome v7.0 (chr-ID Chr1; po s 7451017 to 7451972 reverse strand)
tacccgccgatccaccaggtgaggttctcgcttgattccgcgctcgcatacgcgtcgtgtgggatgcgatccgtggggggttcggaaaagagggggggggggggggatctgtgtgcgtctgggcttgggagcctcggaatcggggttgaattttagagcgaaacaaagagaggaaaatgtcgttttcgccatgcctgtcatgatttgattcctcttgtgattggagcatcatatccaattcgatcattgatacaatgatactggcacaatggggggtagacttcctgttggtcgttcagaatttcctgggatcttggtgttctctgggctcccgattggtgttgtgtattcctgaataatttcggtgatctgttctgttattctcgtgcacgaattgctgacttagcttatcgatcggccgattattgttcaattcctgcattatttttctagtaattatagagctcctttttgacatatagtcgatgcctaagaagaagcaggaatgttgaatcttgcgaatgatcaactgttagaattagatggctaatatctattataatctggaatgagctgccaaaataatcatgccttcaggtcattcggtttatctttagcagaatttataaaaaatagtagtacctttaacatttagccatggtgagttttcccttttagcacaagttataaaagggaaggaagacgacggtacttgtgaagtatatatgttgggtagaagtatagaacttaattaacctaaaaatggatcattcgaagatccttagagaatacatgggctgaatttcaataagcaattctaaccatacactccctttcccaattcgttgtgtcagattgatctagtggtgtaaacctgaagagtctcattatgtagttctgaacttctgatctttggatatgattctcatctctttgaatttcattgcagtgccaaa

SEQ ID NO: 9283 - DNA, 723 bp, Oryza sativa
  Intron number 1 from transcript LOC_Os02g38010.1 (locus LO C_Os02g38010) derived from phytozome v7.0 (chr-ID Chr2; po s 22959375 to 22960097 reverse strand)
gccgccgcccgccaccgccatcgcctcgtctaaaggtactcactctccttgaactccctctctcttcgggtgcccccctttgctggattgggcttgtctgcggaaaatgttagcgcctggtcggtggcgttccgtttatgaactgcttcaggtgtgagtgaccacgatgagagatcagattggagcgtagggaaaatgtttgcctaaggtgttttggttgtgtgctttttttttttggaaagtttctacgagccagagtgtcattgtgttaggaattttgtgtttgatcttagcgttgtgtttgtcgaacgagtgaatcgatgctcccccaccaaataaaaggtctgaaatattatcttgtgttagctaacagaacgatgccattctgccatttagaatggaaatgcttgatcaatataatcaaaagggccttttaatggttccatatgcaatttatctggtgggcacatgcataattgagaaatatctgcgtaagtgtgtagctatcttttacagatacaaactttgtgtcccttactctgtaattaaattgcaaaagaaaaaaaaagagtcaaatgttttctatgatattccctttgcctgccacaatttgtgtatttggatagtttaatattttctgttcaatttaagcatcagtacatagctatgctatatcacaatgacttgacgttatgcgggagaaacatttcaggaatccggatc

SEQ ID NO: 9284 - DNA, 620 bp, Oryza sativa
  Intron number 1 from transcript LOC_Os02g36770.1 (locus LO C_Os02g36770) derived from phytozome v7.0 (chr-ID Chr2; po s 22168449 to 22169068)
gcgcacgccggtacgtgcgcgcgtcaattaaaccaaagcttgttagttctacttccactagcttattagtcgtgtgctcgcagccgcaggggagaggcaggttccaaggccggctggctccctccctgattcggttcgattcgataaacggggagaagatatcattttggatggagtgtgtacaatgtgtctgtgtccctctctttaaaaaaaaaacgaattgagaaacgatcgaggaccaggccaacaacgtgcgccggttgccgcccttgcaatcgtcttctatatacttttgccctctcgttttttctcgcccgcggtaacggcactactccacgcccggagcccggaggcaaggcatacgctgaacctgaactcgtcgtattctctctcctcccttctcctggatgatcgccgtatctccctaggtaattaagcatatatgcatctctgtgtctgttcgtgaggcgatttgatttaatatccgttttttcctctcttctttttttggactacttcgttaatttccatctccatgaacttgattcaagcatctcttcgtggtttgttgttgatttcagatagctttaatccatatatatatagccgatacagcaatc

SEQ ID NO: 9285 - DNA, 523 bp, Oryza sativa
  Intron number 1 from transcript LOC_Os02g12510.1 (locus LO C_Os02g12510) derived from phytozome v7.0 (chr-ID Chr2; po s 6541744 to 6542266)
ttgcagtcgcgttcagagaaggtgatagattcccggtgagaagaagcacaaaggaaacaggagaaagggtacgggtgtacgacagagtgccgcggacccctgatcgatactgatacctcactggcgtcaccgccgacggtaaagggatgcttcgaggaaactgcgcgccttgatttttgatgccagtcgtaagcgtcgtttaattgcgctttatagactccctactagcggctccattatttcgcttatttttgtgtaataaaccaaacaacatatttacaaacgaaaaataatttatcaataaaacttttatatgcgtgtcttagtaatttaaaaacaaagggctagaaaataaactttgatggaaaaaaatcttaaaatcaattttaaatttaagatgtacaatttaaattttagccgataaacgtaacgataagaaaaaaaggcgagccctaaatcctaatcctaaaacttctcctttcgttcaggtacatcgtcaacccacgcgcagcagcgcaggaag

SEQ ID NO: 9286 - DNA, 993 bp, Oryza sativa
  Intron number 1 from transcript LOC_Os01g18410.1 (locus LO C_Os01g18410) derived from phytozome v7.0 (chr-ID Chr1; po s 10347583 to 10348575 reverse strand)
tcctcgccggtgatatcctcccttctcaccctcaggtaacgccttcgatcccccgctgctgccacaccttgtcacattccagtccatgccctctcccagatcgacttgtttggatccctgaagttggggttagttctatggatatttgctactcctgttgataggtatattgatctgaatcatctggtactatcaattgcaggttttgtaccgggttggaatatattacaccttcttcattttgttcatatatgtgctctggtccatatctgttatgagtctggttacgacttataacattccttgtcctgtcctccttgtatacgaaagtagagcaatcaaacaataaaaagggatgagattgaagcaattcccgtgactagaaaacgtcctgaaaagctgttcaagtttagactgctcgagccaatgacaggcatattggtccctaatccatttcttttctatatgaattatatagtaacgtacagatgcatgtgcaaacctgggtttgtacacgtactgaccacaggtgcagatgaattgactaagatattaagcagtatataaacaactaaatatgtatgtatatataaggtttgagtatctaaaatgtttactgcattgaacttaacagatggaatttgcttcttccacccttcatgtgattggtggtctgccgactgcttctgacaactgagttgctctattggctttcgtgattacgacttaccgtcgtgctgcgcccttcaatttgttggtctcgctcgccatggtggtaagcacaggcacattgttttttcttttatctttcttcatgcgttaattattaactgaaactttgttgtgctatgagccaaggagtcaacgatatttcctttctacattacgatgcaagtaaagctagcataattttcctcccaatatatggttcaaccttgattctaacccaatgtgtaatgttgcaaaatgcctaactctgcaacagtgcaagat

SEQ ID NO: 9287 - DNA, 644 bp, Oryza sativa
  Intron number 1 from transcript LOC_Os02g47280.1 (locus LO C_Os02g47280) derived from phytozome v7.0 (chr-ID Chr2; po s 28859996 to 28860639 reverse strand)
ctccctcgccgcccgcttctacaaccatcccgcccgtacgtcgtgttcctatttcttgcctctcctctaccatcgctgcattgcttttggatgcttgtttagtgtcggcttctttgtttattccgatcaggcgtactttgcttccatttgttaattggctccgggtcatttgttaatccgggttacgcgattcaagaaacatgcgtgtgtgtttttatgctatcctccggatttggtaataaaaaggcttgtttttaaatccaaaactcgtgctcgcttcacgattagcgcatcattttttttttttggggggggggggggggaagtttgcccatcattctgtctctgtttgatctgatagaggacgtgcacacgctcttgtctgaaataaaatcttttgtttatcagtatgcccatgggataagccattttctctgtgaaccaacaccctggcaaactgtttttttgctcgccatttttgagcgattgctaagaacagataactatgccctgcatatggatcggatatggacttctcaaatattcaaatgccattctattaggaactcaaaatgcattaccaacaaatgcattcttgtgtgtaacacggttgctacgatgtgcctgtttttgtacagttggat

SEQ ID NO: 9288 - DNA, 908 bp, Oryza sativa
  Intron number 1 from transcript LOC_Os02g36924.1 (locus LO C_Os02g36924) derived from phytozome v7.0 (chr-ID Chr2; po s 22289217 to 22290124)
agcaccggccgcctctacgagtactccagcaccaggtctgttctgttcttcatatcatcgatcatccgtcctctctccttgcttgcttgttgcttgttgatgattaacttttgcttgaagataatatttgttattgattcttgttcttttcctgcgcttagctttttctgctttaatttcctagtattttgatatttagccagggagccagcatgggccatggccagctcttctctgtgcagtcagaaagatgcataaactatgcaaaaactgccctcttattgagaaaagaaataaactatgcaaaaaccgtatatagacattcatgcacctaactaaaaaatggttatcacatatatataagagctgcacggagtaatgattatatatgtttttgtctttatttttcttttgaaggagatctgtatgtgtagttcttctatctaatttatcttttgttttgcatatgtatattttttttcttccttgttcttgactactaattaattaattaattgcaaaactaaacattgtctttggtttgtattaatttgtatattacttggccgtacgttatcatgtgatcaacatatatgcattgcagaaaccatcaaatgaaagaatatgtggtgaatggcagctaaaaaaatgatctagggtttcgtgataatatgaagtgtatagtgtgtgtctctaaatgaaaatttgtattacttcgatctctcagctgtgaataattgcgtgggtctatacatctcaactaccaattaggaggtgtgttagatggatgcttatttcttggtcaaaaaataacacataaaaatcacatgattcacatatatgatgtgtaatcttaattaacagattaaattttgttacttaccgttatatatatgcaaatatgcagc

SEQ ID NO: 9289 - DNA, 1029 bp, Oryza sativa
  Intron number 1 from transcript LOC_Os02g45670.1 (locus LO C_Os02g45670) derived from phytozome v7.0 (chr-ID Chr2; po s 27774246 to 27775274 reverse strand)
caggagcacgacaagttccttgaggccctccagctgtaagcaaaatcgcggaattgccgtgcctttttccttaatttcaccccgtcttttgccacccaactcgatgcgtggttttgctcggaattttgcaatcgtgcggtctttgaggtgaagattgaatgtttttctagctcttgtgatgcgttagttaggttccgatgtttttttgctgtcttgtgtattattgatataaaacagtagcaaaatagcttacttaacttgttttacgtaaaaaaaacaaaacttgtttgtttgttcatttgtttttaaatttggtcttggagtagcatatggagagttttttagtcaggggatcttttaaagatttcttgtctgtactgagatgaagccgtgtttcagaatttcataagctgctgttgtgcacaaggacaataatcagtagtactggtacaacctttgggcaaagaggaaatctaaggatccaatttgcagattatatttttttgactaaaatttgcagattatatgaattgaaataatagcacaaatttacaaactgaggtgctttgtgttcatctagtgatgccatttgtccgggtatagcacccccactggatattttaaggcctcaaagcatttgctctcgtaattagccaaaagtcacaaattcacaactcacaaattagtacagcagtatcctgcagttctctgcttcgtagttttggacttttggtgctataatacttgatatttctttgacctggttgagcacacctgaattattggacattttagtaatcataattactatgaaatgcttccaacgtattggtccccctatttgcatatgattgccaataatgtgttttggcgcaccaaaaacactgcatttgttgctgttgaattcaagtatctgtacaaaaggtttgatattcaattgtaggactgtccttttacatctgatattcatgtgtaataccttgcttcttttcagctttgatcgtgattggaaaaagatagaagcttttg

SEQ ID NO: 9290 - DNA, 897 bp, Oryza sativa
  Intron number 1 from transcript LOC_Os02g15310.3 (locus LO C_Os02g15310) derived from phytozome v7.0 (chr-ID Chr2; po s 8557183 to 8558079 reverse strand)
gacggagcctcgccggcggcaagcgtactcacccggtaaccctggctcctccccccctccttctccgtacctcgtatgcgtgttcttctgcgctcgtgcgtgcggtgtctgccgccacagaaaaccctaggtccgcctgcggcgtgtcagcgagctcgcccgtcaccgcttagatccgcgcgggattcggcggtttcgcttgctggagatgccttgacgagcggtttaacgagatagggaatgttctatttgtttttaccccgtagctgcaaggtttctgaatctcagatcccctcctgccatgtcggggttgaaggctagggttgttgcttcagagttgtcgtgaattagtcatatatgcagtaaattcttggttggagctggatacgtgggtggttgggagtaattgctattttctagatcaacttaatatgctggatcttggtgttatatcgatgtattcatttgtttgttactgtgttctataccattatcgtatccttagatccaaaggataaaggaaagtcatagttcgaaatttgagctgcaattcaaaatttttggaacagtgtttacaactcagatttgttgactgatgtgaatagcgcatgaacttgcaaggtgcatgattcattgggctatgccaattttgatttggtagtttttaatcttaaatcctttttaacatgatgccatgcttgtgtttgaagacttctttccatgtacttgaagttacctatgggtttttttgttccctatacttttaaattacgctgtagtatattattcttaacaaaaaactatatctgtgctgacaagtttggcagttattctttggttgcatttgtcttcttatcgctaatgttcctgtatttacgtgtaattgcagacaaaaca

SEQ ID NO: 9291 - DNA, 984 bp, Oryza sativa
  Intron number 2 from transcript LOC_Os01g35580.1 (locus LO C_Os01g35580) derived from phytozome v7.0 (chr-ID Chr1; po s 19681371 to 19682354)
gtttgtgcaactaattcctttcttctgtaaccaaggtttgttttctttgctacaggcattgctattcctgttcttggtttcggtgcagcggattagattggtctgctaacatctgagtgaaacaaatcttgatcacatgttgaaattgttaatccagctagggattgtttattagtttgccgattcacagtacaaacttggaaagagctattgggattagattagacattgaatataatgtataagcttgtatctcttgatcataggattctcttaaataagaagtatgtgcagaggaacgaatatagtttcaaggctttgttattcttgctagtctatctttgtatcaatttttccactttctgttttattagtccctatttgtatcaaaaagtcttcttttccactttcagttttactactgacactgaaatgattttttttaacgaatatcatgttttagattattagttctttgtgatgattattataagaagttaactgtaactcatattgaattttagaaatttgtaatagagaaaattctgggcatatcatgatttgtactcctacaacttgtaatatgataagttgtatatatcttggattttaaataaacacacatataatctgaaactgtgttggtctaactagctgctcttctgtttgagattaaccgaaagctggtggccatcatttgcaaagctgttggctatgtgttgatctgaatttaaggatacaaggatctgatttgagtgctaaatatacatttttttcatgccacttaggtagatggctcattgtgttttgatttgtggttgttcgtgtggatgtattacctgtgaaattcttgattagaaatctgtacttttttttaactaacagttcagttatctgattgtaccagcttaccagttttttctttattaaattattgcaaactttacagacagttcgcatttggcaagagagcgagggtggaaa

SEQ ID NO: 9292 - DNA, 1051 bp, Oryza sativa
  Intron number 2 from transcript LOC_Os01g68810.1 (locus LO C_Os01g68810) derived from phytozome v7.0 (chr-ID Chr1; po s 39973459 to 39974509 reverse strand)
tactcgccgacatcatcgcccacctagggcaggatgtaagtgatactcaactcctttggttgccgcacggggcttggtgagcttccagttgttcagttgagtgaatttgatctagtcaatatgtgagaattcgagattgatgggagttactctccatgcaagactgtgttgaattggtcacttcatagtgcatgcgctacttgttgtgccggctgaattgacaatctgtttgaattatgatgttactgattttgatgatagtagtttcttgctaggatgttgtagccatggttaggttttgagtcgatgctgtggataaaaggtattccactgaagttagtgcaggaacttaccatatccatggtcttactggtgaacatgaaagtaccagtgcttggaagaacagaaacgggcactataatggtttgagagtcaaggaatacgaagggcactataatggtttgagagtcaaggaatacgcttcggatgttcacagatagcccaaatatatcttagctttaagcacttttacatatgaacatgcattatagctagcagcgtatcccctctctttgcagtgatagtgtagatcttcgatgagattatgtggaaagcaaacaacaatattccaaaaggactgctcatgttcatcatgtattgcactatatatcttgaatcttgatcagttactagagcaaaattgaactgatcttgttatataccaaaagagatggagtcattaagatgcagctaagtacttttgttattccacaagtgcaaatgctttcttcctttcagtcttttgctcctatccttccactccttatgtttcccttgctatatctatacggccttcatcccttggccattctttattatttgcgaggactaaagtttgagatgtatccttttcagaactatgcagctctgctttacccctgaaatttttgtactcatatattttttggaatgattgaatgtcgccttagtagttgagctgacttatctatgtgcaggttacaatctctggtgaatatcgcagccgtcttgt

SEQ ID NO: 9293 - DNA, 862 bp, Oryza sativa
  Intron number 3 from transcript LOC_Os02g38680.1 (locus LO C_Os02g38680) derived from phytozome v7.0 (chr-ID Chr2; po s 23373268 to 23374129)
agcatttcctactatatctaagattttgcttggccgtaagtttactcttgaatctatcactgcatatatactttgtaccattgatattctttacatgtacaactctcctgtttgcttataatgttatctgccagtcatacaagtcatacttcatttgtattgtttatcgatctctacaatttgattactatacactcaaaacttcttgattgttcatcacagttaggtcagttgcaaagttccttcagttataatcccattctcacactttggttgtccagatgttgccttgaagtggttacgtcagatccgtgcctctgcaaggaaggaaatatatgattcgttttttgtcaaaggacctccaactgaagtcattcaagctcttgttcctgctttgtctcacaaaggaggctctaaggaagatcataacattatgtgttcaaatattgaaaggttattcatgaacaatctatcaattctattaagtttacacctgaatcttttattggtccaactttgtttgcttttactataagtctatagcacatccttctttttgacaattccctgtgagttcaaaacttcaaatattacacccaaaccttgtaggacaaaatttcaagtttcaacacttcgactacatgggtctgtactaatatcatgtatttgtccaatcgtctgctttgtattcttaagtctattttatgctcgagtcattaggaaatcaaacaatctagcatgcacacttcatctgaaaattcatgggtctgttcctatctggtatcttccttttttctcacccgataactatgttttgagcttggtgtgtcattatttccccccatttcaggctgttaattct

SEQ ID NO: 9294 - DNA, 802 bp, Oryza sativa
  Intron number 1 from transcript LOC_Os01g40690.1 (locus LO C_Os01g40690) derived from phytozome v7.0 (chr-ID Chr1; po s 22996218 to 22997019 reverse strand)
agctctccttccaggccggcgagcgccactccctcgtccgtacacctccctccctccctccctttccccccatctccccctccacctctcgcggttcggtcgtcgggaattcgattggttccttggcttccgcctccgcgtcatgttattattattattattattattattattattattattattattattattattattattattattattattattattattattattattgttgttgttgttgtttctgctgtatggatgaatggtggagcgtggagctttgacgatggtggtgggagagatttgattaattcattcgttcactcatacatcgtcattcggaatcttatggtggataagttcgtctgatgtgctatatcactagtaaaggatgcaatgtaggaatcgtttggagatgtctagggtgtatcttttttttgtcctgatggaaattgggtggctttgcttcgacgatataatcctaatcaagagtagtatagtataaactttttgtttggttcatcctttataggtagatggtgaggatatctacaagatagataaacaaaaacttcacattgaacttggtaacaaccttttgggactcgtatttgttggtcatagaacatgataagatttctcttctatctacgacgccataaccagttaaagcattgtcaagtgcttgtctagtcgaacttaaagttgctgtcatgggataaattgcatgaaaatgtacttttgttgatttcatttttaattgtgcaggaaaaactccaccagtggatattgagaaagc

SEQ ID NO: 9295 - DNA, 607 bp, Oryza sativa
  Intron number 1 from transcript LOC_Os01g47262.2 (locus LO C_Os01g47262) derived from phytozome v7.0 (chr-ID Chr1; po s 27007860 to 27008466)
tgaggttgtccagctgctgttccggatttctcaaggtgagcctctctccctctcaaaaggtatcgatcgttggggaatcggtttttccggtggtattccgctggcaggttcatgtcgggttgagagaggaatcgtcggtatagctcgctctgtgttgctgctgccgctgggtggtttcgtgctgtcttggtagttagtaggtggcaaggagcagtcacgtggattaatctagtccgggatagttttagctttctgaagcaataaggtatccttgcaaggctggtgatgcagtggtatcagtttgtagtggtattatgtgtcatttgtttataggattaatgataagatgccacgtttttgttggtttgcttaagctgtggttgaaaccgaaccattctggagttgttgagcagctcatgaaactcccgccactgatgttcttcatcagctttcagtttatgtcccaatggatagcatgccttttggaaataaatcggctgattcgacttccttttcaaagaaatccctcttgtatttgattttgtgcgtttatattcgtttgagatgatctgatctgcaggtcgaagtctggtgccaagacctagcc

SEQ ID NO: 9296 - DNA, 726 bp, Oryza sativa
  Intron number 1 from transcript LOC_Os01g47770.1 (locus LO C_Os01g47770) derived from phytozome v7.0 (chr-ID Chr1; po s 27335505 to 27336230)
agcagagcaggggagggggaggggaggggatcctggtgagcatccacatcctctttctgattcatctctctcccaccgggactacctttgtctggaatttggttgcgttcgttaaccctagcttctcttctcgatgtggaagaagctcttctcttaatttcagagccttaacctcaatacaagtaacagtttgtttgttccccaaaagttttggggttcaactgaacccacatgtcccaagttggacccgcccctgatatttgtccatgacagtaactactatatatatacaggctcctgctttaatatgaggatttgcttgtttctccttcttaacccttgtagctcatgtgttttaatacaaaacgattttaaattcttatagtttgatttttaagaataattttagttagatcttttactagtattgttagcaatcatgagatagctaggcaataaaattgacaaggaaaacacctaaaattaatcctacaatcaaattgtaaaattcaaattcagcttctgattgtaatccttttctctaagtccttgatatgaactgcagcttgttagtatcaattttagagcttattacttgataatattaccagaacaataaattatttcgtgtggtctgttttcaaagttgatttgatgcttgagttgtttttcttccttatttaatacataatatttgatcccacatgtgtatgccagagccttgac

SEQ ID NO: 9297 - DNA, 545 bp, Oryza sativa
  Intron number 2 from transcript LOC_Os02g10470.1 (locus LO C_Os02g10470) derived from phytozome v7.0 (chr-ID Chr2; po s 5502335 to 5502879)
tttgagaaactgcagaattatctttcagcaatttggtgagtgctaaccctgtatgtgtactagtgctatgatattactgatacttatttcttgcgtgctgtcaaaaggtcaaaactcgaaaggaaaactggattgaacatcgaaagcagaaactgtcctgaatattagctcatatagtgatgttctaattttgattgaattgtgtagccgtcaatagctaaatataaagatgttgaaagtttggagttgattaacttgttcgagttacttcaagaaattttcctcaacctaattaccatacagtttacatgtgatcctgtagcctggatcaactaatttatgtaactggagatgatagacctcctcaagtttttgtttccttaatttctcgatttctttgctttttctatttgtgaggattttggtttcgacctaacatcttgtgaattgtattcacttggaaatcccatcctcgatctgtgtggcatttcctttgtccccttttgttttcttgttctgacaaatatcattatgtttctctccag

SEQ ID NO: 9298 - DNA, 602 bp, Oryza sativa
  Intron number 3 from transcript LOC_Os02g10470.1 (locus LO C_Os02g10470) derived from phytozome v7.0 (chr-ID Chr2; po s 5503060 to 5503661)
atccgcttgtgtcagaagcagtatccttcatgcttcattatagcaagtcttcgaatttttgttatcaattcattctgctgctgcattgcatgtatataattaggaaatgtttgccgcttttttatcttctcaaaaatataattcatacatattagtaacactaacttttcccatttgatcacaaaaatcttaaaaatgcaagtagctcgttgcaaagtaagattaaggaataatacttgggtatatggtacccttgcagaagggtgatatttgtattcttgcatgcgtacattgataatctgcatgggcatttagaaagtaagtcaaaggaggctattatttaagacatttttcatgttgcaacaaattcaagacaagattttgaaacaatttcaacagaggtgctttcaaacaaagttgaagagagactcaaagtgctttcctaaaaactttcatcatagcataaacttgttagaccatacaggggcttttaaatggatattctctatataatctgcatcgaatttattccttatcatttctccgttgtgtttatttctggatacatttatacccttgacactatgctttagagaaaaaga

SEQ ID NO: 9299 - DNA, 329 bp, Oryza sativa
  Intron number 1 from transcript LOC_Os02g09450.1 (locus LO C_Os02g09450) derived from phytozome v7.0 (chr-ID Chr2; po s 4852125 to 4852453 reverse strand)
tgaggtatgtatctttttttttctcgagcatgttgctctgcaaaattaaatttgaagttatctgttctgaaaaaaaagataagtttgatgagaagttatctttcgcctttgatttgcatgaatttaaatttgaagttctctgctctgaaaaagaaataagtttgatgagaggttatctttcacctttgatttgcatgtatgatccttcagcggtttctttgtacatttgttttggtatagttttttttactccaatattgtttaatcttctccgctgtttgattagttcacaaaaatattatgtgatgcagggtgctcctcctgtccaa

SEQ ID NO: 9300 - DNA, 663 bp, Oryza sativa
  Intron number 2 from transcript LOC_Os01g13060.1 (locus LO C_Os01g13060) derived from phytozome v7.0 (chr-ID Chr1; po s 7264711 to 7265373)
acgtggacacctacgagatcgcggcggtgaagattgtgagtccactgaacttctgttcgatttttttttcgattcggttgctgtttattctgccgtgcgatacgaattagtgttccgattgattttgatgaaaatttccagttactagttggttgttttagcctttgtaggttgctgatgataagattgaaaatgctgtgatgataattatgcggttaacaactttgaacgatcgaggatgtgtaaccgctgcatttactttttcttagtttagttgtacggctagctacttggcctattctcttacgtcatgatgattgatgagcgtggatggaggttgactacttgactgggtaggccatgattacgcttggcgtagtggagttgcattggtagtgctttaagcaagagctgcgacgaggaacacaggggtgtgtgtgtgtgagagagagagagagagccaaaagttagtgttgcttgaatcagattccttctttgatgagtacaagttgtttgtgcttttgtcctgttcaatcctcatatgcttctttgatggcttataccacacagttgcatgctatgtttgtatgtagtagaagattaatttgattgctcgttttattatcaggagagtagcaagacgaagcatccccagctgtttta

SEQ ID NO: 9301 - DNA, 811 bp, Oryza sativa
  Intron number 1 from transcript LOC_Os01g32730.1 (locus LO C_Os01g32730) derived from phytozome v7.0 (chr-ID Chr1; po s 17949650 to 17950460 reverse strand)
ccgctcccgctcccgctcccgcacgggaacctctagtgcgtgcccatttccttctccctttccgtttcttggaagcatttcttggatgatctttcgagctgtttattgcgatgcgagctcgtaggaatttgctggattactttgaacatgtatgtatttgtgtgagcatctttgttgaaaattgagggtactttgtttttttttctgagcttttgcttgccactttttcctacgacaaacatgctggttccgtttctattttggtaacatttatttttcaactgaaataagataataaatccttcacaatttggagttctaccattcaaggtttgttttgtggaattataggtgcaggaagcttacctgagttagcccatatataattttttatgcttaacacaacaagctaacttgtcaaataggaaatgccaatttatgtgtttcaccctactttggttgattctctgataatgctaagctaactttgttgcagtggtttgaatacataagctgcggagctttcttgctttcttgtttttcttgcttgcaatattagtacacatggtaaacaggaacccaagttcacagttcatgtagttgggattgatcatagaattcactgtagcgaattttatatgattgataatggagtggccgcctggccggtggacactcatgttgcgccgtataaatatcaaatagaaacttacacattctgaagagcgaacaattgttttgaatctttctgacatgtgctaccacttgttttgcagagcaaacatttcctgtccctttactggttggcaag

SEQ ID NO: 9302 - DNA, 473 bp, Oryza sativa
  Intron number 1 from transcript LOC_Os02g06430.1 (locus LO C_Os02g06430) derived from phytozome v7.0 (chr-ID Chr2; po s 3212655 to 3213127)
gacagcctgctcaactccaagttctacaacaagtaaagaaatgtttcaagctgattagtggttcttgggatttcaggtttagcagttcttgaagttccccttgctgttcttgtggagtccaaaatcgatttcttggagttctttgctgtcgatttgttgtttaactttttcaagctgcgtagtttagtttaaatggtccggattttttgggattaagaaactgcatttgctcgcttgatgggttgttgcatcagggggttggctcttcagttgcttgaattttgaatttgattggttctactccaacccacatctgcatgcctgaggattctttcttggactcttgaactcccctttttcctttggattggattagtttaatttcttgggatttttttcttgttctaatttcttgatttgtaattatttgtgatgcagcaagcacgcaatcaagtgcacccggaccaggctgg

SEQ ID NO: 9303 - DNA, 684 bp, Oryza sativa
  Intron number 6 from transcript LOC_Os02g07480.2 (locus LO C_Os02g07480) derived from phytozome v7.0 (chr-ID Chr2; po s 3860364 to 3861047 reverse strand)
aggtttcacccttaataatttatttccatattcagcttctaactttcttattctgtgaaaagtgtgccttaagcactaaacaaattcgtttctcttagcacctgtgaacctccaaggtccaattttagaggtattgaggttatttggaagcctagcaaacctttaagttggagaaaattggtttgaacttctcaaaacaactggccattgaagatttgaggtaaaaaacctaaaattttacttatgacatgtcacataatttaaagaacagtagttttcatctcaagtttgaacccctgaacctgacccctgagctgtgctatgtggaccttctatgctggcaggttaaacacatgatggacagcaatatgtttagtgactttctttactgtaattcatgctcacctgacctgtcgaaataccaagttaattaaaacactgatatttcttaattcaaacatgagtgtttcttgatggttgcatcatttgctcggcctctcaaatatattcagaatttcaagctcttctgagttttccgttagggttagaaacatattcaatggatcgaaatccaaaagttatgtttgtagaggagctattattttattttactttagttccagttctgaacttgctgacaaactgcttcttgctattttgtctgcagacagccagaaagtttta

SEQ ID NO: 9304 - DNA, 821 bp, Oryza sativa
  Intron number 2 from transcript LOC_Os01g21160.3 (locus LO C_Os01g21160) derived from phytozome v7.0 (chr-ID Chr1; po s 11806537 to 11807357 reverse strand)
ccgagtgcgagctgctgcgctggttcgtcactgaggtgagcgcagcgcgtcttcatttgttacggctcgctttctattaccttacactacggagttagctactcgcgctaatggagagaccgaccggttcttagtttgatcatgcgattacttgtcgtatattggatttgatgctgcacgatttatttcagtaagcgcgtttggtctgttagtagttaccatgaaaacaattggtacattcagtgaggtgaatttcagttgtcatatgtgttgcgagaatgctgtttcagtgcaatctatgtggtgcattgtatcatacagataacaaggcatgctataaattggctatgaacagacggtcagacgctgttaccatgagcaaatttggtctcctttcctagctggttgttgatttgataaataggatgatgctttggcacaccattcagtacttcagttgcagtattgcacaaagccatgcttgtttttcagtggatgagttcttgctgagtgaataccacaaagtaaacggattagacagttgagcagtgtgagtggaatcttcacaactttcatatccatgtttctggccttgataattaaaataacaaacttgaaaacaactgcaaaaatgcattgatgcctataactcgatttgtaagctgctaagtgaggttcaatgtccaaactagatttgcttctttcaggtcctttaacctcatctcaaattttaggccccctatctgagttctgagatatcaatgctattctggaaatgacttttttttttaactcgttcattttgcagggtgatcaagtag

SEQ ID NO: 9305 - DNA, 1036 bp, Oryza sativa
  Intron number 3 from transcript LOC_Os01g57210.1 (locus LO C_Os01g57210) derived from phytozome v7.0 (chr-ID Chr1; po s 33050906 to 33051941)
ttccatcaagctctgggacttggaagaggctaaaggtgtggtcagtgttctaaaatcagcgctaggcaccgtgtagcaactgcaattaggcactaggtggtgcattaggtggctattttagtgttatattatccaacttttatgtaactagaaaaaatgcctgtgtgttgcaacgagtgaatgctattttaattttattattgttatacggcttatttttagtaaatcgtgagctgcaattaggagtctgacttccatcgaaagttagcatgcaagtttttttaaaagaaatttcttatacgacttcttttgtatttccaaaagcaaacaaacttaaaatccgactcatacacggatatgtatttccaaaagcgaacgaacttaaaaaccgactcaaatacatatgacgtaccaaaataccggtaaaaaacatcttcaatttttataatagtagagatatgtttgctaatttcttgggttttactagttagtttgtcctaggcacctgctagctaggcgtcagccctgctaaccctctagtgcctagcgccttgaaccatgggtgtggttggtggcttattgctttataagtcctagaaattgtgctaccttaatgacttgccttttgctttgttgtaactgtctgttcatttctaaacaattatagaaaacatagccattacattccgtgatagtggtactatcaatgtacttgttagttgttagtacaaacttattttatattttgatacaaatgcttggtatccgctgtattaggttctttttctgattttcagtggctgcgattttaggaaactcacaaatcttcgtcaaaatgtctatgctctacgcttctgtatttggataaaagaagtgtgcttggctaatgtggataaccattgaaagcataacttaatagtgttcccatagatcataacaactgtgcttcttagtaatttagtaagctagatatgttattaatgttttgtcttgatatgcagttgtgcggtctcttactgggcacagatcaagttgc

SEQ ID NO: 9306 - DNA, 713 bp, Oryza sativa
  Intron number 1 from transcript LOC_Os02g49340.1 (locus LO C_Os02g49340) derived from phytozome v7.0 (chr-ID Chr2; po s 30149746 to 30150458 reverse strand)
tcggtgagtgctcgtcctctgcagggtttgttagaggcgttgcatctacgtacgtgcaatttgatttggattctcggttctttctttcttgaccatatgcattgattgatcgatcgatgctgccatttggtatatctttgcattataccgtttattcctttgaatcaattgagtacctgatggcaattggatgtgtggagaaacgttcaggggttttccgattagctatacaaggtggtgatagacgatctgggttcgaagcctcagccctcctaattatttgatattaagtcctctcctaatatccatgtctttttattggatgtgtgacgaggaacttctcgcaaattggatcgacaggagcaacctagagagattgattacaagaatgaaactaaatctatagaaacgtagattgggactttttccctctgttctctaatcgggacgaaacagggcaaacggtacaatatgccctcacgctattgtgacccttaatttgtattgtcttcaactcttcatttttcaaacttgaccattccgatttgtcttctaaatagcccaattgatatgcgtgatacagaagcaatctgcaatagcacgctagcttactcgtatcatgcataatcacactgatcttgtcatatacatgggttggtttttttttttctcatcaaggacgagactggccgcaccattccaaagttcggcgc

SEQ ID NO: 9307 - DNA, 668 bp, Oryza sativa
  Intron number 1 from transcript LOC_Os01g40670.2 (locus LO C_Os01g40670) derived from phytozome v7.0 (chr-ID Chr1; po s 22987656 to 22988323)
ttgacctcaaggtgcgttgcccgccgatcggatcggccctaaaatttcgcgtgaactggtttggttgatgcttaggatgattagtaccacgacttttgtttttgtcttttggcgatcggatggtgggcgttgcttcccctggtagttttaggtcagaatttagaggggtttccgatgatattgggtgaattgatggactagttgatatatcttctactgttttggacagattaacatgactagaggagtaatctctctactattcaatggaggagagggtgatttttaacttgatgtttataaatagtatcgttgcacataaaggcattttctctatatgaagataaaggcattttctgttaggtttgaggtgattacttgggaagtctcttccattagaattttatgatcttcgttgggaaacagatagctatgagtgttgatatgaacttgaaatgtgtctggagggatattgctcaagttttctagagctaccttgttagcaacaattctgtagttgatttgatgctaattgttttagaccattgtattgagttccagaaactttgtttcgacgtgtcactttgagtacaaataattcttattgtgattgttatggtttggtttttgtaggataagtggcgcaacttgagtgtcactgctggagg

SEQ ID NO: 9308 - DNA, 836 bp, Oryza sativa
  Intron number 1 from transcript LOC_Os02g10240.1 (locus LO C_Os02g10240) derived from phytozome v7.0 (chr-ID Chr2; po s 5365056 to 5365891 reverse strand)
gccgcaagaccttcaacagatacaacaacctccaggtatttatacgtgcaaaaaacacatatatacttaaataatggagtatatgacaagtgtgttttaaattcctactccgatccccatttgatctatatggtcataaaaagatataccaataaatttctagcaattgagcatatttatgagttatgatcagctatcttatgaaactcccaacaatcgatgaagtttatcattagtcattataatgtgtcttagtgaatgtgcatgctcttgcttacgtcgtggtgtgtttgtgtaattaatgcttgtcatagtggagagtgaattttaaactcgagagacgtcccctcgttgcacttaaatagttataaaaaaataagatgatatattaacatgtgatatatcacttcataaatatgtaacttaaaatttaacttgtacgtgtaaaaaaaaattaactgagaatatatgttaactagctataatttaatttgattttttgtatgacatgtagaaattgaattttaagctacatttttgtagagtgatatgtcacacattaatatatattctcaattcttgttaatttttatataactatttaagtgatatacaaacaacgagagaatatctcacatagtgtgtgtggtggtgtgcgtatcttgcatgtaattaatcgaaaaataaaggttgatttcgtgtatctattgatcattcaattgatggacgcaacctatagagaaaaaaaaaacaaatgcatgcaattaagagaagatgaacaatgggcagctggctgaaaattaagaatgaaaaattgcgttgcgtggtgagtgcag

SEQ ID NO: 9309 - DNA, 766 bp, Oryza sativa
  Intron number 1 from transcript LOC_Os01g58690.3 (locus LO C_Os01g58690) derived from phytozome v7.0 (chr-ID Chr1; po s 33925551 to 33926316)
gatcaccccgacgcattctgctttcgtctccagaggttcgtcttcttctccttcccccagctttgcgccttcgcgcagccgcgtaatctcgtctgccctcgctgctggatgtcggcgatccgcgcctcttctcaccggctgtatccccctttctcctcctcctcctccctctctctctctctctgagttcgtggtttagattgtttctggaatctggttatatctctattttttggtatctctcgttatgttctccgtgactgttgggagtagagtcctgaacggagagaagccaatctttgattcttgaagagcgtggggtcttaggggttttggattggggtttaggaaaggattctgctacgagagttgaaaccccccaatattagggcaaaatcttcagagcgattattatagcttccgttactagcatataattttgatgcggccttcgttcttgtttgagaaccgagcagtagaagcacgcttttggcgacaaaaggctattctagttggaaggacaggttcttgattagtttactttcgttgctctttttgcccaaattattgacaggcatatgttttttattatcattatggaagtagtataacactataaccataagtttttcagtgtgcagctaccctttgtatgactaatgaaagatggaattcctattgtttccttaagtactgttgttgcaatcgttgctgaagtattcctgaatcaggcagacaagaactgtggcattaacaaggacaaaga

SEQ ID NO: 9310 - DNA, 590 bp, Oryza sativa
  Intron number 2 from transcript LOC_Os01g22390.2 (locus LO C_Os01g22390) derived from phytozome v7.0 (chr-ID Chr1; po s 12592518 to 12593107 reverse strand)
ggaggtagggctactgattctttggttacagttactttgcatattatctaaaacaattacctttcgtgttgatgatattttctggcaagatggaaaatttagctgtatatgctcttacctctttacaatatcacaacattatactttagttagattattgatcatggaaacaattgagtaaatcactaactgaactgttagctatttttagcagtgttatttcaatgctgctgcaaaattccttatttttcacttgggagtatcattaaagcacatgctggggcttttctttggacattttaacaaggttgggcacaagaaagtttgacattgttagtacaccagttcttgaaacaagatgcacggaaaatagtaaccatctgcaaaacaactcaaaagccgtttgtacatctatgcagtttttggctattagagctagttgtatcttgtatgctgactcactgatctacgccctttgttttcttaactaactggattgtcctcttccttttgtttcgttccatccttattcaagtgatgctgtatatgttgcagccagcagagcactggttattttgtattggtgggac

SEQ ID NO: 9311 - DNA, 539 bp, Oryza sativa
  Intron number 2 from transcript LOC_Os01g53240.1 (locus LO C_Os01g53240) derived from phytozome v7.0 (chr-ID Chr1; po s 30589571 to 30590109)
cccgagctcgctctctcagcttctcagcactgcaggtgattaagctaacagctttgatacactccgggggaaactgttttaaacactcgggtggacgtccacccgtttcttgcatgccatctaaatggttgtaaaaaattttcacaaaaattgacatgataggttaatatgtaatataacacttcacaaacatgcaagttcaaattcgacttttacaagttgtgacaaaaataacaaatttgactgtgaatatatgtatactagttagagtttgatttgttatttttgctacagcttgtagaagtcgaattttgtgaagtgctatattacatattaacctattttgtgaaattttttagaattttatcataatcatttaggtggcatgcaagaaacgggtggatgtccacagagggatttgaatccatcctccacactctggatacagattactttgatcaacttattaacgaactctcttctccttgattgcctactatacaggcggaggcacgtcggtgaacgtcggcgggggcggc

SEQ ID NO: 9312 - DNA, 946 bp, Oryza sativa
  Intron number 2 from transcript LOC_Os01g26290.1 (locus LO C_Os01g26290) derived from phytozome v7.0 (chr-ID Chr1; po s 14900468 to 14901413)
gaaggtacaatttgtttgattctttggttgctgtcaagcctgctttgagacttagcaatctgtttaatataatttacttgaagccactgatttatttgcaaccaacttgtactggcagtagccccattatatgttgtatatattattgtgatggcatatgaatttgatatgatttgtcttaaacaatcatttcaacctcatttcaattgtatgcatgggcttttgtttatgctatagaagctcagcttcttcctgaaaggttgactagcagagtgttgatgagctacagcagggtaggatttgtcaatgatgtatccacttattcatatattttttttccagggacaattcttgtcacattggtcatgctctgtttaatgatctgatctgttctgcattaagcaagtgtttctagttatttcaattgcacgtaaaattctgagtttgtacatgtttgtataagatagccgatgaaaatttgaggaccaagaacaacatttatacattgttaatacacataatagagaaaagaaacaattttgctaaacaagaaggttgttttgtataaactatgaatcaggacagtggcaaactaattttgtatgaacttatttttcaggcgcaaactaattgacctgtgacaatcgatcagatgcttttttccttcgttgatactactatctgctaagcttacgtttcagtttccagttttcatttgttcatgcacaagtcctcaaaaggtcacaaccaaccaaatcaaggatctttttgccacacacataaacactgctgcaaaatttgtttacctgtgtttctatgcacatttaatgcgaaagtgagttcatcgaaagatcagaggcaggcatctttttctttgtggtgttttgctgcctttgtttggttttgtgcttagttgagctgaggttgccgtgtgatccaggtaggg

SEQ ID NO: 9313 - DNA, 497 bp, Oryza sativa
  Intron number 1 from transcript LOC_Os02g11890.1 (locus LO C_Os02g11890) derived from phytozome v7.0 (chr-ID Chr2; po s 6158826 to 6159322 reverse strand)
gacgacttccaggtgaggaaaaaaaacagcagctaaaaattatggctaaaacttttatatctttgagtgtattgttagtggtttaaaagttaatgctggaaaatagactacaatgtaaaaaactaaaatcaacttcaaatttcagttttaatattggtttcgatcagttttaatagtggctgttgcgatcaggtttccaccatattggtttgcacatttcttttcacaagggggacgatcgaaaagattttagaaattgaggaaatttcggaatcaaacaagttaaagctttaacaaatttatgttgaacttcaaaaatgcttgattaaaaaaataaatatttcagagatcataatgtcctatcgcggactataggacaataatctctaaaattattgaaattaatatccgaaacattaaacctgaccgtgataactgataaaccaataagaaaacgatgaaaaacaatgcaatacgtgcaggggctgaggagtcgg

SEQ ID NO: 9314 - DNA, 947 bp, Oryza sativa
  Intron number 1 from transcript LOC_Os01g72920.1 (locus LO C_Os01g72920) derived from phytozome v7.0 (chr-ID Chr1; po s 42287442 to 42288388 reverse strand)
gcgcggctcggggcggctaggggcagaggtgggagaggagggggaaggctagggaccacatcgaacacctacgccataatgaacagtgtattttcctatttatcccgattttagtttatttcccatataaatttgattctataatttctaaatcttgcataaatgaagtttactcaatatttgtgttattctaaccaatggattcaccctagattaatattacccatacttatttatttatcgcacaaatgaattcttttttttagattaatttgagttattggccctaaggtgaacttatatatttttgaagactttggggtactattaaatttaatataacgacttgtcatgattaatacattagcggattggtcaagtttagttgtatagcaatatattttacacggataggttcaatctatttattctataaatagtaaattgagactcggcacaatattaatctaattgtttaattaaaacctcacaaaattttataaagcttaatttaattatatgaccattatttcatgtgaattggtttacctttatatagaccattagagtttagtaatatcccattaattactcctagtgaaactatgttgtagataaagttccattataaatggtcatcatttcatgtgtatttagacgtcatggcacgcaacacatggttcacgtatttagtatttaatccataatttaaattagtaattaaccttccgtttgtctggctttgttttcttgtgcgtaattatttgtagagttatcaatattatattctcgtaaatttatctattacttaaattttagattcttactttactttctttgtgatcatttacggtttggcaagcaatagcaatcataacaaccagcatgatgcaaaagttttaaaaagttcaaaattttagtgatttttattgtcttgaattttcagg

SEQ ID NO: 9315 - DNA, 833 bp, Oryza sativa
  Intron number 2 from transcript LOC_Os01g10050.1 (locus LO C_Os01g10050) derived from phytozome v7.0 (chr-ID Chr1; po s 5248766 to 5249598 reverse strand)
tcggattcccaggtttcgtttgctgcgtgctactgctacccttgtcctgcacttactatagtactatgtatgcaatttagatgaacgtgctccaggaggaattggaatttagatggacgtgcttcaggaggggaatgtataggtctatttgtttcgttagctggttgtgttgtaaactacattgaatcatcaaagaattgaagtatcataacagttatttcacaccacaatttctgctttggcggaatttgttttggctgtaaatactcaaaactatttcaaccttgagccacattgtcacattagtgacatgtaactgcagaaccactctagaatgaggccaaaggttaaacagtaggtggttctaatagtcaatggtcaaaaggtgaactattcgaagttgagggttggaaactggagttaggccatgattaacagttgtaaaatgatttttccaaagaaaaacagccaacagcgataacatgtgcaaccagctcaagtgctgaacactaaatggtgaaagtatcatttggttttctttgaactccgattaggatttgttggtcctctcattaaatcccattatcatcacttcatcagccaattcattcatcaggaggaaaggatatgaatatgtcacttgttattcatttaagatctgttgtgctcttcaaagattattctgcttgcattcttggacttgagccattgataatttatgagcccctttaccttctgaactacattctttattattttgctcttttttaatcttggacatcttacattctatatttcctgatccaagatacttaacttccattgtgcagaat

SEQ ID NO: 9316 - DNA, 910 bp, Oryza sativa
  Intron number 2 from transcript LOC_Os01g14980.1 (locus LO C_Os01g14980) derived from phytozome v7.0 (chr-ID Chr1; po s 8395898 to 8396807 reverse strand)
ggctgaagtttgcacagattttggtgaaaacttcggtgagaattgttgcgcctcgcattcttttcctccagtaaatagtactatgaattgttagtctgtacagtttgttatcttttacataaatccagacagtgcctgtatcttgcctattctgatgctcccccaccaatggttttttaacatgttacatagtgattggggttcgttattcttgtgttctatattttcttgagcaaaaaaatgtacagttcgcataaaaatcatactttcataagtacgttttgttacatttttcatcgtattcatgcttacaagagcaaatttctgcctttgtaaatgtgtagctgtttgtgttctatacgaattcccaaatccagaagcattcaaaaactaatattgattgtttaattgttggactttttttacctacagccaaatttgactttagttgtatgggaacttcaatctcacccctatttgtgtcaaatttgtgtctgattgatcatagagtagattttaggatgacatgcactcttgtctggttggtaaaatgtagcttttgaagctcatgggcttaacttctgggaatgagcgatttgcgattgatcatctagagtagatttcaggtggaaaaacattcttcaactaagttgaaaatgtagctcttgaagttcatgagtatacttctgggaatgaaaagctattttagcttatatgcccaatgttacagcgtttctttgtatcaattaataaaataatctcaatcaacgtttcttttgttctcgtctgacacaggacaactagtatgtggtgctaaatctttacatttgctgcaagaattttatcttagacaccctcattacaccattgatctctctatcatgtttgtctgcagatcctgcaccattca

SEQ ID NO: 9317 - DNA, 485 bp, Oryza sativa
  Intron number 1 from transcript LOC_Os01g14980.1 (locus LO C_Os01g14980) derived from phytozome v7.0 (chr-ID Chr1; po s 8397029 to 8397513 reverse strand)
catctccgacgccgcctccccccgaagcgaagcaggtacacgccacctccaactcttccctcttcctcctgtttattcgatggcctcacgcttaggtccatctctgcagtagatctgatcgctaggtcctcctgtttaggactagggtatcagtatcaggtatggctggagagaacggcaaatttccttggctggattttcttaggaggggaactagtggtgatcaaggagggaaccacatcgattttcctgtcgcaaactgaaaacccgagtccgagtggttgtgcccttcttggattaaatgaatcaaggagttaaatgaacttgtgggctggatttaccatgtgcttgctaggcatgatcccgtgatagaactaccaggagtaggagatttgtgggatcccaatttgattgcttgcctgtgtcatcagattggtaattctgaattgtgttgatgaatatgaaaagccatgcgttttgcagag

SEQ ID NO: 9318 - DNA, 930 bp, Oryza sativa
  Intron number 3 from transcript LOC_Os02g15580.3 (locus LO C_Os02g15580) derived from phytozome v7.0 (chr-ID Chr2; po s 8753110 to 8754039 reverse strand)
tgattgatttcttagctgttctgccccttcctcaggtacatctgcaatttacttcattaatcttttagatctgagcacttaaaacaatgagctacttataagtctggtgtttgttagggtcataaaggttctttgcatagtatattaatatgcattcacttttgtactactttactcatgtacgattttaaggaacgcaatagtaatcagttaaatgtagctgttagatatactggacacttcaaaaaaactttgaagaactattgtcttggctctggtgtaccctaccccctcctgtcacaaacctttggacttacatattcagactggacatttgaagataatgtgtatagatttttcttgagaaatacttccatatatttcaaatttaccaggtcttaaatataatacaatagaaattagttatggtcaaagttcaattttaaggtatcatgtcaatgtgcaaaacgacatgtatttatgattgatctgcagctactgatcgtgccactacaccatggtttgatgaacttccatgctttctagtggccaaattggatagagctgttgtatcataggtgggggattcaattgaatggataatacaaaccagaagataataaaatataggcactgaagatatgtttggtttttattatgcatgaaacatatacatgtttgactcaatcatgcatgcaataagtttttagacaagtaaggatgggaacaaattgggaatatgcattctatgaattattttgttcctttttcatgtgcgggttgttttgagttgcaaaggtagaacaaacattcaagtgttatgtggttgacttgatgtatcattcctaaggatctcttttgtttaagttgtaacagtatttatttttgttatcaggtgctcgtattggtagttctaccccgtctgcaagg

SEQ ID NO: 9319 - DNA, 608 bp, Oryza sativa
  Intron number 1 from transcript LOC_Os01g56630.2 (locus LO C_Os01g56630) derived from phytozome v7.0 (chr-ID Chr1; po s 32668843 to 32669450)
gcgggaccgcgtcctgcaggcgtgtcacgcgttcggtgagttgttgcccccctccgccccggctcgagatccgcgctgccctaagcggttgctctgatcgcgcgtcggtttcttcttctctttcttttttttcttttctttttttttggctcttggttagtggcggtttttttttttgccccctctctgcgggctttgatccgaggggcaatgtgaatcacgtggtttctgtgcgcgcgcgggtgtgggtttaagactttaatgcggtgcttcgaggcgatatggctagattcacatggttttcacggcatttttcctgtgttggtgtagtcgggaggatttggataattgatttatgtggattgcgagctgcatttgtggttgctcacctgtgatatatgactttgctgacatggctgtagtcaacaatatgaactgtcgtgttagtaaaattcttttttaagttcagcttactgtaatatcaagacataggtggtaaattgttacttgtagtatcatgttttgatttgtaatcgtctcgtgcttactagcctgtgctatgtgtttatgcagcccagaacaactaccacacaaagcatctcgcaaag

SEQ ID NO: 9320 - DNA, 894 bp, Oryza sativa
  Intron number 1 from transcript LOC_Os01g27520.2 (locus LO C_Os01g27520) derived from phytozome v7.0 (chr-ID Chr1; po s 15358186 to 15359079 reverse strand)
gggacgtcgtccatctccgctcccgcaccaacacggtccgtctgtttcgcctcacaccacgaaaactgaagccctttctgaagtagactacagaaatttctagattttgcaacttccgcactagttttgataaatcctgccgtgatgatttaggatgtctagttcctggtgtgaaaattttggttttctagtctatttcctggtgtgaaaatttaggttgtctagtggattggttaacaatcccacacagttttatctacttttattgcgattttacctattgcattagatcaaattgatgtggatacattttgaaggatgggtttattttgaactggattatgagttgtgtggactgcgaattttacacaaatcaaacacttggttaatttaaagttttatggatctggcagtttccggtgtttagtgcctagtcccctcttctgctaactttgctattcttgaaagtacacatgctgagagggtcatgtaaggctatggatgattaactcccaattgagttcaggcatccacaattagaatatggcatgttaagtctaaacctttatatgtgctatttgattcccataatattttatcttaagctgagcttgattacaatgcaatcatttctgatttgttttttttaaattttgatttccttaaaaggtttggttgatgaatttggtatctttgccatttggattgccgcaactctgtattgaactgcaattctaggttttgcaatatatagaaattaatggaatatgtactttgtttcagttttttctctgttcataactcatgagatggaatattttacataacaaactctgcaatcccttattttattttgcagattggtgctgttgcgcgtattagacaccagctagc

SEQ ID NO: 9321 - DNA, 905 bp, Oryza sativa
  Intron number 1 from transcript LOC_Os02g40820.2 (locus LO C_Os02g40820) derived from phytozome v7.0 (chr-ID Chr2; po s 24731648 to 24732552 reverse strand)
cttcggacgcaagtggttttactttcacctcgtctcttttccttttaaatgctttttttcatgttaagaaaaaaaaatcatgtaggtttgaacttgaaactgaaggcgctagcttagcttccggtgtgtttatcccccaactctgtgtctcaaaagtgtagcaaatggttgacgaatgacctatcaacgcacgatttgttgtgcttagtggatacatatatgtacagaattaaacgagatgttatttagccccgttaatgccaacctgccatgtgtgctactggtatgtggaacgatggttacatctcgagtgaagcttttctctgtttcgtgagtttgatttcattcttaatatacttgctgtactgtttccagatttgcaatgttatagtttcggtccagatgattaaatttatacgtttagtccatccaacttgttttaaataaatcgaagaatctaaaatctgtggttgccgtccaccgatccggttattaatctagtatttgcaaaaggcaacaatgctttgtgttggaaaattttgccattttattgcacacggttgatgaagtggtgatttattctttgtgtatattcatggttaggagttaggacgacgccattgtgcattcttttttgtttcagggaaacaaaagtgcaacaccctatggtttctagtctctcctccttttttaaattagaagaggggaagtctttgttcttgttcagcgggctattgttggttttcgtcaaattgttcaatgtcgtagcagccagataagtttaaattatgcagagtcaatcgaaggacttgggtactttgacagtttgacccgcttttttatgagctattttggtctctgctgctgcagtgtatacgttttcaaggtttgatctcaaaattccg

SEQ ID NO: 9322 - DNA, 682 bp, Oryza sativa
  Intron number 3 from transcript LOC_Os01g01510.1 (locus LO C_Os01g01510) derived from phytozome v7.0 (chr-ID Chr1; po s 260913 to 261594)
acctggaacaccccgtcttcgatctcgaggtaatttctattctatgctcccttcctttctctttcgggtaatcgcctcgtatatatacacatgacgatcagttatttctctactactgcctttttactctagtccattatgcctgtaccggggtccggggtgcgggtacatttcccaatcttgatattactgaataccactatagcaatagcaggcattatgatcttggtccaaaatcaaccctcaagcacaaccaacataaccggttaaaatacccccaagggaaatccagccccattttaaccttttctttaatataagttctctataatattgcacccaattaatagaaaatgtaaaaaatagttgccatattagtcaaaaagtatatttacgggatgtcaaaaccatgaaaccaccacttaatccagttttttttatcttacatgggatatgttaactggtttagatagttgagggttgttcactacacttgagctgttactgtagtataaaatatacttcactctaaggaccatgatcaccagagatttatttgtggtcttctctttagttagcagcctcttttgattatgtagttaactaactataatcagtttgttttctatctgttggcactgtttaacatttttttttatttaaaaaaagggtatttctgaga

SEQ ID NO: 9323 - DNA, 834 bp, Oryza sativa
  Intron number 2 from transcript LOC_Os01g51430.1 (locus LO C_Os01g51430) derived from phytozome v7.0 (chr-ID Chr1; po s 29573308 to 29574141)
ctattgcgagatatctccagcttgacagaaagaaggtatgcatgattcgaatatttttcatttcttcatttggaatggtgtacataattcaacctacttgatagtagtttattcatccaaaatggcaaccctcatagctataggatccatgaaaacccttgttgacttaaaaaaaacacactactagtatgttattttgacatttacttcctgtgtcaatagcttcaaaatgatttgtgctgctgttgcaagaaaacaatctgaacttcctctctacttaagttgcttgaaacaaaattttcatgatcttactgttctttaaagagaacattttccaagctaattcctaaatatagaaatctttaaacagtgggctatttaagtaatgataaaacatattttaaaatttccatgcttgagaaaaaagtgaaagaaatataaaaattatgagttggggacactgaacctggggcttcagccagtgccaggtatcacggactgatcatgacagtacatggctagaacaagggcaattgggcaaaggctgaatattactagcgtttgctcatgaaaatctgttgatcaattccaatatttatttaatgatagcagtgttagtgtgttatttacaaataacttgtcaaaaacgtcaaatatgtgctgaagttgcataagatgtttttgtatcatcttaatccatagataaacttcttgtcaattgtcatttcattaaaaaaaatagtagtgtcatttcaaataggttagttttcttgacactctgtatgttctttttttctcttgactagtgttgctttcctgttaatctcgcgacac

SEQ ID NO: 9324 - DNA, 654 bp, Oryza sativa
  Intron number 1 from transcript LOC_Os02g11070.1 (locus LO C_Os02g11070) derived from phytozome v7.0 (chr-ID Chr2; po s 5932352 to 5933005 reverse strand)
cgtcgtggtctccgttctgcttcgtttttttaccggtacggtttccaagatctcacctctctctatctgctgcctcgtgatctctgcgttgaaagctcgttggtttcttcttctccctatgctgttcgtagccagctagccatgttcttgggttgtgaatttttattagcagggtaaattttaggatttgatttttaagtttgttccatcttgtttggagtagtgatctctttttgagatttatgacagctttgacaagggaaatgaaatcagagattttattagtatgtggtgctccaccacgaagtaaccagttggcccttattttgtctcggtctattggtccaagcggactaaaagacaaccaataactcaaagaaaattcccatttttttgggttagagaatattcatttctgtgaagtttcctggtgcttcttcagttgtgattcattgctgttctgaatgaaattgaattcttaaaaaagtttaaaccagtattattattaccaataacttactgacatgagggaaaagattggatttcttagcttcttgatttcaagaacgaattccacccccccccctccccaaaaaaaaaaaattccactttttttttctgacaaatctgcgtttcccctaccaaaaggtctcc

SEQ ID NO: 9325 - DNA, 1001 bp, Oryza sativa
  Intron number 2 from transcript LOC_Os01g16330.1 (locus LO C_Os01g16330) derived from phytozome v7.0 (chr-ID Chr1; po s 9258647 to 9259647)
agcgccgcgcccgcgccctcgtcctctcccaccaggtcatcctccctccctccctccctggatagccgggcgccgaatctcgattggtttttcaggcagctgttccgtggttaggtcacgagcgttgtgttgtgttgctttgattaagtgcctgattcatgggttactaattgattaagattcatgaatgcacgatcgctgaatcataggttttgatgtgcctgattactttgtttttaatagtctatggtgttggcgaatcagtgggtgaaatttgctagtggaatgttgttccaaggtgatgttagattgcagattttggtccgttctggaaatttgaggagtgctcagtagctggtgcttattgatggactgtatctgtgggaagacatggattgaactgttaggggtgtgcggtcacgcagtgcatctctgggcaaatagaacagaagcaaaatgtgtacatcaacttaggattcagttagtctgggaaatatctgtacacaacccgaaaagaagaaaaagaaccatcttcagaccaactagcacatatagatgtttcatcaccgttgtaattgaatatatcatatgttctttttggacagtagactacgagttaaagttttacttatcatataaacttacatggaaactaatcatgttaataatgagtaggacatgattttatgttgataagttggcaaacatgacatttcagttgcaccatgccacttatatatgtttaaccatgtgtgtaccttatagttataatgatagttaactcccaatagtagctctgaaacagtatttctcatgtgcctgttagcttgcactgctgcagcaccgttaaattattcttgttattatctgtacttcaccttctgcttctttaatgcaaaacttaaggtgggctgcatccgtggtatgacggatcttttgtaatttgtatgtgtaaagcaatcatttttgttatttcaggggattgtcaaaaacttccgtct

SEQ ID NO: 9326 - DNA, 282 bp, Oryza sativa
  Intron number 2 from transcript LOC_Os01g70550.2 (locus LO C_Os01g70550) derived from phytozome v7.0 (chr-ID Chr1; po s 40859944 to 40860225 reverse strand)
gctattcccctctccctcaaggtcctccgctctcttgtcttccatttgagtagtctgcaactctgcatctcatttcagtttgggacttattttattatttatacaaactgaaactatgttgcattaccgattgtcaaatttgaactaacattgaagaacataaatagaagaaaataatcatatccgatgcttctcttctgaacttttatgattttcttttttaaaattactagtagctgagttttgatgtttcttggcctcaaccttttacctgaagcaaac

SEQ ID NO: 9327 - DNA, 972 bp, Oryza sativa
  Intron number 1 from transcript LOC_Os02g05330.1 (locus LO C_Os02g05330) derived from phytozome v7.0 (chr-ID Chr2; po s 2557820 to 2558791)
caagccctcctccggatcgatccgctcctcttcaggtaacaatgaacgatgggatgggatgggatcccgctgaggatgcttttttttttctgttttgtttgtgctcgatctggattcgggttggtccggcttggcgctggctcgatctgggtgtcgccgggtggtgggggcgtggatctgggttggttcgatgtgattttggcgagtctgtgagagagaggggtttgggtgggagatgcgtgactttgattgctttaatgatgtttagattgttatatctccgttggcatgtttgttatccttttgagcagctatagaagtggtatgtggtgcttgacaatagtaattgatgttttgggtgtcctagtgtttgcaaatctaaaatttgtaacatgctagtatatgtacttttttttaatgactgcgttagattatttgtcctgctaagcacttcgatgtcctgctttgtactttgatgactgttagattattatcctttgtatgccaaggacagtggaggaaccataggaagtcgaaggtctttatggaccaaacgaaggtcttttttgggccaactagtttggtctgttcgcttattgagtatgctgtgttaggaggattccttagattaagctccacatgcagtatccattgtatactgagcttgatctctaacctgttaggtcgattaagtaaattctggactgttgcgagtttgtgtttcccggttcgaagatttcatgttgtgtgttgtgcataaaccctgttcgaagagatcatgttgtgtcgtgcatagacttcaactatgggtgctatgttccttgtgtgcagcagaaagctataaatgtactaacatttattgtgcgggtcaagactgcttttacaactgagtttactactactttgtgtccttcaaacattattgccattcatcctttgtaacctgctcttttttttcccttgaatacagcc

SEQ ID NO: 9328 - DNA, 919 bp, Oryza sativa
  Intron number 2 from transcript LOC_Os01g26160.2 (locus LO C_Os01g26160) derived from phytozome v7.0 (chr-ID Chr1; po s 14809850 to 14810768)
ttgcaggtgcgcttgttgtagcttgctatgccaaacagtatcggcataccagttaattgccaaaagctacaccacacaattgaatatgatctgaaatccagaagttctttttttctagtgatcagcatgctgttttgacttccttactagaatcaatcacatggccaatcgaacatatgattgaccatatggtctaaactccttgtttctagtaaatcatgtacatttggtatgcacttttccttgtaggaacatgattcttcttatcactaataaattgctccatcttgcttttgttactaatatctacagcagctcatttttaccattggtgtgttagtgctttttctcacttctactactcaacttttaaccaatttcagcctccttcgacctacaccatctgacccccttcctcgaaccagttgatctattttcatggtgaacgtgactaggatatccttccaggctgagacctttttaggatgaatgaccattctcaaaagaaaagggccagtcattatttaccctcgtaaacatgacgcctcatttccatagcagtacacatctacaattgttagtgcatcgcagaaagtattttctataaaaagaaaaaccactagtatggtcaacttgattttccactgttaaaaaaaaaatcttacatacgacgtgagttttccatttagaaccgttttatcaatctcacagtcattgcctcagcaatgcttgtattgtaattctcttagagctctaaacttgatatcctgtgatgactgtggccataatgcattatttactgctatttcggtgtatgaaaaatatttttctctattaggagctattatcttcttgtattttagtatggtcataactaatggttctgttggtaacttttacagcacttggtgagattgag

SEQ ID NO: 9329 - DNA, 388 bp, Oryza sativa
  Intron number 4 from transcript LOC_Os02g16000.2 (locus LO C_Os02g16000) derived from phytozome v7.0 (chr-ID Chr2; po s 9086120 to 9086507)
tgagaggcaggcaacccttagaattactgattcaggtaatgcgatacctctagttaactcaaactttcttcctaacttattataatttgtgttgcagttgtgctataattctgcgtaatattcctaatttatactatattgtaatgtaatattgattttaggttttatggtgaaggtggtttctgcttctcctctttttgtctttgatattatgattagtctctttttcttcattggcttcacatattaaatagatgttttgtcaatctatctgccttcatgcatgcacaacttccttgatcatttacggaagtcaaatgatcaataattttctcttgaactctttccatatgcctcattatcttcattttacttggaacagaggaaa

SEQ ID NO: 9330 - DNA, 494 bp, Oryza sativa
  Intron number 1 from transcript LOC_Os02g38150.1 (locus LO C_Os02g38150) derived from phytozome v7.0 (chr-ID Chr2; po s 23068047 to 23068540)
gtggcggggcgaggaggagcggtggcggcgacgaagtgagtaggaggaggtgcgacgcccgtggaaagcgatgggagaaaaaaaaacaagcgaaccgtttttttaatggcagaggtgggtaatttttttctcccaaaaataggtgaaagcaggggggtagatgtgcttttgatttgtactacaccaaaagctggctttgggtaaaagcagccgtagcttttgaaccctttggttggcttttggcttttccaagcaggttgaaaagtccaaccaaatacacccatagtataccattttttaaggaaaaaaatataaaatgagatgccggggttaatatcgatttgcgttaagaccataatacacactcaaatgtaaaagagccaaatggatgatccgcctctagatggggagattggcaaaattcatgagcaacactatttgttttcttctagttttgatgactcttttaacttttatttgtgattatagggaag

SEQ ID NO: 9331 - DNA, 985 bp, Oryza sativa
  Intron number 2 from transcript LOC_Os02g08120.1 (locus LO C_Os02g08120) derived from phytozome v7.0 (chr-ID Chr2; po s 4297807 to 4298791 reverse strand)
gaggccaagcgcgcgcggcctcccgcactggccaggtgaggggaaaattttccgcggttttgatctttctttccgtttctagcctcgagatatgtttgggatgctagccatagtagggttagggttactcctgcagtagtgctcgatcgagaattgggagtggtttgatttagtttactgcttagttgcggtgtgtaatttgagcatatgtagacatgatgctgcaaaatttcttttagaaaggtggtgtgtgatctgtcagggaaatgccagaaatcttagtaagtttgtactctgacccatcagtagaatttttatccttctgtgacaaattttggtcttaggtcggcactcggcactgttagtgttactaatagtgatactgttgaccaacccctatctgtatgttataggatggatccaaatgactgtttcaggatttggggttgtactaccttttagagatagcttttcccaactgttcttttctgtgctaatgtgcttgtgcagaagtcagcaggtgtgaaacacatttccactatctaacaaaataatcctcatctatggtctctgcaataatagtgttagtatttttgtaacaaccagcatctgtgacttatttgcatttgtttttaatcatggatctgttcgcaaatgctagtacagtagatggctatgaagtgtactgatcttttgatgctgatttatggtctgtcagttgtcaaatttgactaccatggttttaatgaatgtctttataggttttttcttttatttctgcacatcatttaataatggtcaattacttatttctggtagttttgattacagtttttttcaaacatgtttcccttgcgtgttcattactgtaaagctcaacatgtgagaaggtgaattgcgtcttttgttcttctgtcatgattttttccgcttcgcctctttctctgcagtgttattgttgaagcattaaaggtggatagtctgc

SEQ ID NO: 9332 - DNA, 936 bp, Oryza sativa
  Intron number 2 from transcript LOC_Os01g31360.2 (locus LO C_Os01g31360) derived from phytozome v7.0 (chr-ID Chr1; po s 17151276 to 17152211)
accgcgtgcggttgggttgtgctaggtctcataaggtaaggttacactaaattggaagttatgtaacttgtagaattgtctattgcgtcgacgggtggtggatgtcccaataatcttttgcgactccacgggagtgctgccaatctgacttctatcgttagtcttctctacatagcagtattgtgaaccaaggttatatatttttgaattcacgtgacggctgctggacgctgataacttcaagttacagtgtttctgttgtgaattattagaagtaggatcatactctgatacttatgtcatttggtgtattaaagttctcttatagtaggtcactctttgggtaatgtaaaatggattggattgattatgaaaaatggtcttctttttatcaaaaattcatgattcagacagcaggcctacccatatgaattaaaacgttgtggcttaatagtttcggtttagtgacctaaattgtataatctcatatcactctcgattatgaatagagaaccatgataggaatcttgcactctaattttacacattatttattctactatacaattgaatttatattgtagggtatattcatgtgtgttctcctttaggacctcatcttttcgcttatgcttatgcttatcagctaaaatttgaattttcaaccttaaatttggagctgattttgaggttttttcatcaaaatttatttttcagccttttcttttagatcgctaagaacacgtatataacagttttattcacaaattacttttcatttgcaaatacgccgtttcacttattcgcgcgtttcgcttattccgcgaataagcgaaacgatggctccgtaaattgtttcaaaataatttgacaatgagactctgcttaaatttcctcagagtattttcagattatcgtttgaattgcaggtgggag

SEQ ID NO: 9333 - DNA, 938 bp, Oryza sativa
  Intron number 2 from transcript LOC_Os01g03760.1 (locus LO C_Os01g03760) derived from phytozome v7.0 (chr-ID Chr1; po s 1573644 to 1574581 reverse strand)
gttgatgtgagttactagagttgccctaactcttttacgcatagagatattgcatttggaccagatataaaaaggcaattgcagtttatagggtgattcacttgcatcacatatgaaatgttactgcggtttatctgattgttaagttcttatgatctttttcttgtatctacttacaaattttacgaaaattaatggttgtgcatgaacattgatactgattcatgcatcgtcatcattgagttgtgaaatgctaatgctgcttttggtaactgccagtaatattattcgaattatttgcagacttgacgtcgctgtaaacgtgcttgtcaagtatgctagttttaaggatggttatgctatttctgctcaccctgtggatgcattatcaattaaaacaaattatttccgaacacgattattcatgtataacaggatacagctggataagttcaatgcaattactgcaacaacttgagtttacatttaacggtttacctgaaatccgcattgtccaaaaatctttctgtatttgtgacatggtattgtgttcagttccttccattttccgctctgaaagggggaggcgtggaggcaagttaatttggaaggtggggggttggtgcggattgtagtatgaggagtaaatgggtgtatcagggtacacattaattggattagcatggaatttcttagcctctaataaatcggaagcgattgcttgataaatatgcaatatgtttcattccagaaaagaaacgacacatactcgtgcaattaataattcagtgtattaatggattctagtacttctgttttgattttataagcatgaaaatgtccctttatttccgtgtctctctatttttagatttgcatctaactagttaatatattgtgcagattcccttgtgccatattcctgaaccagttcgcaa

SEQ ID NO: 9334 - DNA, 1031 bp, Oryza sativa
  Intron number 3 from transcript LOC_Os02g03280.3 (locus LO C_Os02g03280) derived from phytozome v7.0 (chr-ID Chr2; po s 1328397 to 1329427)
cctctgatcaagcttgctgtagactttgactcaaggtaaatgagcttatcctagttgttttaaacaatggtctattgctatacagcgacgcaatgattcattgatcatgattggtcgatttagaagtaacttggaaaagtaaatgacatgttggacagacaagttggtgataatggttgataatatgtcaaggattgagtgtgacatgatgctcgtgggatttactgtggctcggttgcctttgaattaagtgtcgttgtctactagtgtctggttattcttggaaacattaaatgggttcagatgtgttatagtggtcaaattatgcttgtgaaattggacttttatatcatgctttatctttttctttaaatagattctacaagaacagaagtttgccaaccatgatagtagtggtattatagtctgggtaaatatatcctgcatagtggtattatggtttggtaaatgcatcatgcatagtggtgttgtcatgaagctgatgttcatgatgctctcatgatatgagaggttttagcgttcggtggtacgatattcattcagaattccagggtgtgctgtcgattctggttagtactagtattcagatatgccctttcacattttttcttctgtcacatgcctgcctaatactgttagctagtcttgtagatactttcctctggagttactaggaacgcacaacctactttccccctagaaatcagtagtgctagccttgtgggatattgtcttatggtttgggtatggactttgtttcatggttatcatgggcttcttttattttcgaatgatggccaagttgagtaccaccttaacagataaagtattccgttgtttctgtttgtcttgtggctgcaaaatttgtaatgtaactaactgtcctaggagcttttctcttgttgatctccttaactggcatgattttttttacctgttgactgatgttatatgtctattgttgtgtgttaccagcattctcgtaacagcatttgttggaactgccattg

SEQ ID NO: 9335 - DNA, 944 bp, Oryza sativa
  Intron number 1 from transcript LOC_Os01g12830.2 (locus LO C_Os01g12830) derived from phytozome v7.0 (chr-ID Chr1; po s 7100670 to 7101613 reverse strand)
ggaagtccaagggcgacttcacgctcaccactcgggtcggtttcttttttccgaattccttagcttccgttctactagtattatccatttacgattttgcttaatctttctccaaaaataaaaagttcttaggtttgatccgtagtttatttacagtttggtttagtcgaagcaaatatagcacaaaaactgattgtacagcacgaactgtttggttgggtactattgggtacagtggaaaatacgattgaatggaaggaaaataagtcagaaagggagagctggaagtgagaaattgttggtcctgatcagatgtggctctagtttttgtttcacatcattagatatcttccttagatagtctaatcttaatttgatcattcaaacatcgttcttttataccatgtgaactatttaactaaggaaggaagcacgggaaatggtttcagagctctggtggatgcgtttttgtgagttggaaatgcatcttatttggctgaaatttaaacttgtttcgagcaggttgttgctgattgtagttgcagtgattttctatgggtctaaagagaatcatcgtgttcagaagttactcatctgataatgctgggtgctaattttgggttgcagatggttcttactgagtggcgcactgatagcagtcatatattaggatgttagtctatttaccggagtttatccatccattttattatgcatatgctgctgttattgtgcctggagaatttttcctttcaattaaaattgcattacagtaaactttatgttcagatgcagtatctgaaggacaatatagctagaagaaagattaatctgctaacgttcaattgattatgcataaattggtgtgttcgtggaaatgtaatgcttggtattcttatttttctgcagttcagtggtaaaagagttggtattctggggcttgg

SEQ ID NO: 9336 - DNA, 718 bp, Oryza sativa
  Intron number 3 from transcript LOC_Os02g08010.1 (locus LO C_Os02g08010) derived from phytozome v7.0 (chr-ID Chr2; po s 4200718 to 4201435 reverse strand)
cagaaaagaaacgtgccggtgttgcagtgattgtggtaaatccatcttttgtcactaatgttatttgagatctagtttttggctgttagtttgttcgtggcatcctatttcttgaaatgatttcatagacacatactcattagatacacgagcttcttcctgtgtcgtcaatatgtacatgtacttcgatagcgatgaaatggcaatgggccttatctcaaatatggctccctagaatttgatgattacatgctttatttttgttggttgattggcaaaaggttcatttctttttcaatttaatgttatgtatattcattgcatctccactattgcagtttagtttttttccaaacatcttcttttacttgtctaatgtctatgataatatgatataatatcggttcagaacattttttttcgtgattttagaatgtaacaaaaaggatcttatgtatcagaagttctcctatttgttaacagacattcttgttgatttgtttgaacaaaaggtcttgcactgaaatgagaaaaccattctttacatagaaatactgcatggcaggttgagcatgctctgattactcagtaatctgaaaaacactatgcttggtttatggatctagtttagctagagtacaaatattttcatgatttgcaagtgccttctatttggcatgtaacacgctgcaaccttataatattgtttgcattcagg

SEQ ID NO: 9337 - DNA, 939 bp, Oryza sativa
  Intron number 1 from transcript LOC_Os01g67740.1 (locus LO C_Os01g67740) derived from phytozome v7.0 (chr-ID Chr1; po s 39371836 to 39372774 reverse strand)
aggattcacccgagattaccgtcacgcgccaggtcaatataccttcccgttgctctcgttctctatgctgccttttgagaatttcttctgtggtcgtgcgtgtttgggctccttgggtggatttggggaggaattccatggattccgttagagtttggtcctcacgagttctccaaattgacgctgtttatcggtttatatgttggtcttagaggacactgtgctttgtggtgttactggggcacggagaagatggatttcaacatctgaagatgaattccgagttttatttttagtaatttggtactaccacgaggtggtgctgatttaggtcgttgttaagtgtgaggcctggtcccctgagactattttagaggcttacttacaattttgtgcgactaagacttaccgtgggaatgggtgaaatggttgattccagggtttaagtgaatatatgttgtgttggcttccttgaactcaaggcgagccttggtggttttggactacgaaagtttgaacacggagttaggctttcaaaatgattttaagtttttttcccctttactaaagctatggccatctaagctttgagttgatcaatatgttgattgaggagttaaactgggtctttgtgttagtttttttttttgtggacaaagatatgattctggtagattgcaaggagttgtgatttgtactgtatggagctggatcaaatctaggagtaatttacctgtgatgttaaatactttgcttctcaataggctgacaactaattcataaacctctatatcattctgcttcaaccgatgctactttccgcattttgatgtctcctaattgatgtaacaagtgcatctcattcttgtataacttactaatgtactgttccttacatttgcagattgtagttggtgggcgaaacaagtatcttatcaa

SEQ ID NO: 9338 - DNA, 605 bp, Oryza sativa
  Intron number 1 from transcript LOC_Os01g08420.1 (locus LO C_Os01g08420) derived from phytozome v7.0 (chr-ID Chr1; po s 4132746 to 4133350)
ctggttttctttccatatcaccagattctatagtaatttgttattacatgctctttttcttgttcccacgcttttatatttaaatttctttacttaaagtgatttggtaccatattatgttccctttgtttgtaaatttctttgttgcaatgcacttagcacaactggcaacaatgattgtttctgcaggcagacctcagtctatatagaggattttataaattaaaacatctcctacatttaacatttttaaacactaaaggtatttctccattacctcaaaacaaagtcaaaaccaagtaatgaatataatagtaaaaaatagaaattttacataatctatatcaaccattcgccttttaactaaggtttgaggatcatgcatgcacaaaaggtatatttttcttatcaatttgattcacttttgtttccagtttatactgcttcacagacttcatttcaatgagaacatactctcaacagattatagcaaaattgagagcacatatgcatttattattaaagttgcatttcagtgtacttgtgtgggctccaatttatgctctcttttcattttgtcttctactccatgtccaagcagttaa

SEQ ID NO: 9339 - DNA, 832 bp, Oryza sativa
  Intron number 2 from transcript LOC_Os02g17390.1 (locus LO C_Os02g17390) derived from phytozome v7.0 (chr-ID Chr2; po s 10001889 to 10002720)
ggatcgcgacgacgtcaaggccatcgtgctcaccggtgaggcctcctgctaatcgtttcacccccacccaccttcctgcgaaaaatttatcagagaattaaccacctgtatacaacaactgaaatatctgatttttctggtgtggcggtcgtcgaatctctgctgatttttttactttactgatcgattgctgtgtgtacgggttgacgtaatacgagcggcgatttgttttgttgtcttgctcgtgattttgttagatgtgtatggtttaactggatcaagctatctttggtctgttgttctgagtggttgtggagtagtccctatcctatcatttgagctgatcttggtcaactgggttaatgagtgtgctgctccagctgtacaagatttgctttcctggtggtctggaactctagtggagctgctgaactgtaaatgatgaatgttggatgctaatccggtaacctcaccaaagtagaaactgcagcaatggcaagttatatataacccttggcaagttatagatcagaaggaacccacttagttctgtacaggtcccctaggagatatttttttcttcaaacggtctttgctattaaagggtagggaatggcttgtcctgaattcaagttgtacatgcccaccaaacttttggttgaaatgtgccgttgtgcattttaggaacgcaagagtaagaaaggggattgtaataaattttagtttgtgaaagttgctactttatttgtttgtcatacctgttgctttcctcctaaattatgttcaatccttactaggtgctggaggcaaattttgtggaggctttgatatc

SEQ ID NO: 9340 - DNA, 536 bp, Oryza sativa
  Intron number 2 from transcript LOC_Os02g52370.1 (locus LO C_Os02g52370) derived from phytozome v7.0 (chr-ID Chr2; po s 32048920 to 32049455 reverse strand)
ctcgggcttgaaggcgctaagctccttgctccgcggtaagttgatgttattacctctgagatatgaggatgtgttctgttttggttatgctattattagtttcttacttcttactgttgtaagcttaagttttttgttgtgattagaaattctgttgaactaatactattagcatagaggcagtagaaattcagacttgtttctgctggtcataaatttcttataacatgcaagtgtgagaatgtgttggaatggtgtgttgtagtaagaaatcaggtacagactggttcattcaaaattcatacaattgtgaaggtagactcaccatccaattgctaggttcaaatggcattaagtcaaaataatggactggtcccattccttgatctgtcagcgcacatgcaacataaacttgtcaagagtactgtacttccatgtccgttgcagtgtcttgcattcattttcataatattatcgataagaagaagcaatctctgctctctccctgacatttgaggtaacaattcaatctgtag

SEQ ID NO: 9341 - DNA, 497 bp, Oryza sativa
  Intron number 1 from transcript LOC_Os02g12540.1 (locus LO C_Os02g12540) derived from phytozome v7.0 (chr-ID Chr2; po s 6556471 to 6556967)
gcgtcctctccttccggcacatcagggaacaggaggtgaacattgattatcagtatgaatataaatattaattgacacatattctggtcacatatgtgcttaaatgcatgcttgatcactagtttatgttggtatacgatcacagaacctataacccaaacatgcgattgcaactgatctagatataatcaaaggatttttcacagttagtcatatttagttttaagtcaacttttactgtggtctttattgtcagtagaattaatctagatatttcatttcttatttaatgggccacatctatttgtattatcttttcaactactcgtatagtaatagaaaaaataaacataatcaatggcttagatcattttttttgttagtaataatactggtagtatggttactagcagtagacacctccgtaaatttaagtaactcttaaaaatttcaaggtgatctcaaatttctaatacatctatgcttcttctatctag

SEQ ID NO: 9342 - DNA, 989 bp, Oryza sativa
  Intron number 1 from transcript LOC_Os02g33830.1 (locus LO C_Os02g33830) derived from phytozome v7.0 (chr-ID Chr2; po s 20165251 to 20166239 reverse strand)
ttcgtctccaccgtcctcggcctccattggcaccggtcagtcccttcttcttctagccggccgcagcgaaatcagcgagggtttctttttttggggggtttcgggtaaaaatgtcgggggcttggtgacatcgtttgttcgcgttcttgcgctaatcatcgtggagcctgtggatcgcggttgttgtgattaggatttttcgaagaaggatgctcttgcagcggttactcgtagcaatgtgtaaaactgagcattgattaactgtggttcaaatgcttgatttggttacccgccaatcaaaaccatttcggtgaattgcttgctggtaggattgggttttgctttcgtttatattttatttatcagatgatttgcaagacaggtactttttacctctggtaacggattggtgtgagaactgagaactgtagataagacatcaattgtttctgaaatctaacaattgtgggttagtgcatttctattagttcgtgaagattaagaatctgttcttagttcttgctcacactttatttggatgattaactcaagtccacaatgcttggaaactttttaaggatcctagtggtgctttggataggaaatagaatggttcctttagggggaaaacacagaaatctattaactgtttatgtgcatttatgcaacattttgttccatatataacctttttcgccttgttagttaaatatgtagtgaggttagcaccttcacttttttttttccattaatggtatgttttttactccacccatgaaattgaactaccactagaagatattactagtagtgaggcagtgacaactttttgtcctgaccaacttcctccctttgtgcttatgcttatttgactgcactgtttattctgcacttttgtgccataaaaatcttaacaagagataaactaagactggtccatttttttctccacagatctacagctcctcttcccgacactgggcagtggc

SEQ ID NO: 9343 - DNA, 689 bp, Oryza sativa
  Intron number 2 from transcript LOC_Os01g62150.2 (locus LO C_Os01g62150) derived from phytozome v7.0 (chr-ID Chr1; po s 35981113 to 35981801)
tgctaaaacccagaaaacgagcgctagaacagaaggtgattaaaatatacttttattctagttctgttctggaagaatcaaaacaatgtttgtttcttttttttcaaaaaaaaaaggtgctctgtgctacttgtgtagagaacaactgccttatccctgagaacatcaattagcaatttagcatctcacaatatggcattgttgattattgtaagactcctgtggaatattctagaggcatacacatatcttccagttcgagcatcattccattgtttggctcatcttctgtaaacctgtggtttgcttgttatgagatgttaattggtcgatttctgaattttggcagagttatcaccagattttgctgtggaatactaaccttatattatagaataacaggttatctgttttttactgctcatgaattccgttgcatttcttaaaattgactgaaagattcaagtttcggaaaaatgaatttttgttccaacaaatgaaatgatctcgatgcctgtgtcatctgaaatgccttatttttggttgatcattcattttgggggattttagaataattgcattgcacatgagtgtaaaatttgcatggtaggttgtttagttcaagtcatccaactatattcatccagtgatttctttcttttctttcccaatttgcagctgagatagta

SEQ ID NO: 9344 - DNA, 896 bp, Oryza sativa
  Intron number 1 from transcript LOC_Os01g62810.2 (locus LO C_Os01g62810) derived from phytozome v7.0 (chr-ID Chr1; po s 36379027 to 36379922)
gccatctcaggtgacgtcccgtgactctccttctcattgctgttccgctcgtgctccgttgctctcgattcgttgggtttttcggggtgggctgtggtagatctactggagttgtcgactcttacaattaccgtggtggattgatgatagtaataggtagtgaatttggcgaaaatttgcgaacagatagtataggacgggtttacggggcattaatactcgtgacgatttttttttacagcttgcatttattgggcacatttgaattagttgattgtgatgtacttacatttcaagtggaggtccagttttgcacgacttggtgcggcaagtttgagctcggacttgtcctcttgttccgattgtgctttagttacaaccatttcatagctgtgggtgaatgtgtgaaatggggatttgtttgtcgagagctatatagtgaaagaagatgaatacacagctgaaatttgttaaattaagtgtatttctgaattttctgagaccttattcgtgtgatacccagaaacaacgataaaaaatcgtgtgatcgaggagaggtgaaagaagaacgtcatatcatgttcttagttgcctctaacatgatcacacgagtgaccttttaattcattttgttcggttgaccgtgatggggaatttgcattcttgttggccggccccacgaattaatttgatgtaccaaatcagagtgttcgaattaaaactattagttcaggagattgtatgtgttcagactcaacaatatgccaatagaaacgagctttctctgaaaatttctgtaatcggttgctcaccatgttcaagataaatttgatactaaactggggtttttatttggatcagagtctggtaaactcctcacttggggttctgctgat

SEQ ID NO: 9345 - DNA, 752 bp, Oryza sativa
  Intron number 1 from transcript LOC_Os01g51330.1 (locus LO C_Os01g51330) derived from phytozome v7.0 (chr-ID Chr1; po s 29521062 to 29521813 reverse strand)
atcctctactggctgccttcatccgagctgtttacgtaagtgttttgtttcctccttgcaatatatatatatttatatatatgctgttgcaagattacaattttggttctgcctttgtttcatcggacaatctatggatcgactcaaggaggaaaagggagtttccaaatttttatctggtgcctactgcctagtactgtgggaattgattgtggtttgctactttttaaccatcacctagcatgaacctagaattgcgccaagtagtttattatatattatagatgatgcatattcaggtcggaacctaaagcactctatctctcattctaaaacagaagaaatcgtactatcaattcggtaactaaccaaatgatgaaatagttgcgggtcgttgggtctgacttaattaggagcatttccattgtcatttgctgattcatattgctatcttatttagttggtagtttaactcactccagtgattaggccagcagatggagtgacagaatgctaaatttcatcatctttcggtgctattattattgtgcaccaggaagtttgggtgtcatcatttttctaaaatctttgatgtggtataaccaatttttccttgttattatctagtgctagttgttttgttggtacttcaatcatgtataattttctttgcatccagaatttcttatcttgtagtcccagtgaatggtcgctcactttacctgttatttctttctttgcagaccttatac

SEQ ID NO: 9346 - DNA, 789 bp, Oryza sativa
  Intron number 1 from transcript LOC_Os01g10100.1 (locus LO C_Os01g10100) derived from phytozome v7.0 (chr-ID Chr1; po s 5264023 to 5264811 reverse strand)
ctctgcctctgtggcagtgggtgcttcggcatcaggtgcgcgctccgccctttgcccttgctcggctgctgttcggtgaaatgtctcgcctaaaggattataaagaagtgcgtgaagttacattgtttcgtgatttgcagcgagggaagagctgtaattaaagtattcgagaatcgagtaccacgagcttgaacaaaattatataggaggtcaatttaccctgattatgctcgaaaacctagagagaggaggccagcttgtgcctaattgtttcataactgctcattttactactcccctggttatgaacttatttacagttaccaccaaagtgaaagggtggttatgaactcccctggctctaataaactgcttctgtctgagagaaagatggactgtaatgttggtgaccagtgaaataatatttttgctgctatgctagtataactttgcctgggcctgtagctattacatgcttattcatctaattgctttaataatctgtaatcttgctatattatagagtgggtatataatggaatttgagctagggtgttccaccaaaccgtgtactcaaatctttaaatttgatgttgaaattttatttaacaagtgtgtgatcttcatgtttcttgaaatactgcttattgtacaactaggctggtattgagggcatgatgcttaaagagatattcctattttgctatccttatttaacagaaaaacagatcagcaggtaagatctggtgtttaatattttgtttttactgtggaattgtgcagcttgag

SEQ ID NO: 9347 - DNA, 931 bp, Oryza sativa
  Intron number 1 from transcript LOC_Os02g10540.1 (locus LO C_Os02g10540) derived from phytozome v7.0 (chr-ID Chr2; po s 5551054 to 5551984 reverse strand)
tctgctgcttccgccgcatcctccctcgctcgctggtgagcatccgcccgataacgcgcatcctctttctcatctctctccacccacacttcttctcgaatctgcgttagccctagcttctctcctagatctggaagctgctttttctctttgcctcttgccttaaccctagtagtagtaacgagtttagttggttcccgtgaatatttggggatcttggaggtttgctgctcgctcggagggagagagatttttcgttgttcgtcggggattagtagatgttggggggaggggggatagtccaaggatttgatctttggtggatatgtatatttgtattgtgggatttgtatattttagactgattaatcggtaggaggtttgagtataaatgaagtcgatgtgaagatggattaagcggctataattgtggaaattcatgagagagtctttttgggtgctcttgtggcaatggatcaagcttccgacgaatataggaacttgtgtttgctctcctcacctggttcaaatggtcgtcgcggcggctcatgcggcatgtgaggatcggtaggggtcaaatcttctgtggataattggaaatgatgtttagttcatgggcgaaatgatccacattacctagcaatgagttataggccaagtctatgtgcaaatcagtttccatttcattgacttaacttcttgaagtcataaacgctcacggtagctatgttgcggtggtggacttctctactgccttttagtttgttagtcttgtaacccttcttttgtgcaagagccaagaggctgtttataggtgcggtgttcagtttaatcatttcatttttcttattcttgtgcagggcaaggatcttttattgcttttcttcccctggaatttttttagctagcaaggaacacggttgaaagtagg

SEQ ID NO: 9348 - DNA, 378 bp, Oryza sativa
  Intron number 4 from transcript LOC_Os02g20940.1 (locus LO C_Os02g20940) derived from phytozome v7.0 (chr-ID Chr2; po s 12383617 to 12383994)
gagaggtgatactttgacatattaatttcagatccatgacttactcttaccatacaatggttagctcaatctgttttccatgtcttgaaggtttctctttatttcgaggcaaaaggtcttgtgggggatattttgatgcttgtagtagccaactttaagagaaatcaaacagttctattaatacctgaaattcttgctgtgttaagagtgcttaagaacttcgatattccaacctacctattcaggctcacaagtcgaaacattgaagagtttgtttttcagttgtaggtttaatgctgctgtttccattataaattcaagacatgctattcttgtgtattatatctttgtgaaaaatatctttgttccagaaacctg

SEQ ID NO: 9349 - DNA, 959 bp, Oryza sativa
  Intron number 1 from transcript LOC_Os02g51790.1 (locus LO C_Os02g51790) derived from phytozome v7.0 (chr-ID Chr2; po s 31714235 to 31715193)
cgcaagagggtatgtctcttactccatggggtacagatataccacaactgctaattccattgcgaaagtttagcatttactcctggccaaaatgcgttcaacctacgagtggaaattccaccttctacttccaaatgggtgtggagtggtcgcatgttctgctcagtgtgttctgtttacaaggcccttttgttcaacctctagtactgagttgattatgttcagatatattgagttgatttcaggttcagaatagtggaataacttaccaatttgttggtggaattttgcctgatttttatcagttgcatattggcccatactgaatttacagatgatttgggttaatgcttggacaatttcagtctcagaagcaatttttttttacttaatttgattagaaagtcatgctgacatccatttacgtattcttacatagtatctactttgggtttgtagtattgtttattggattttagtgcatagagtactacatgaagaatgatattgcaatgcaatgtgtatctgaagagcttttatactgttcttgggaaagtagtgttaaattaaccttcagtggaccaaaatttaaaatggaacaaaactttgttctgaggacgtcaaaatgcagatagtacacaagaactaattctacggtcagttatgtgataccttgttcttcttgagggcttctgataagtcaattgttatgaattatcacttgctttggagttcaggtctccacctctgctcagggacagcacaggacaaatagttagcagcagagtaatgcatacttatatctgcctcgatcaatgcttcttgccttttaggaggaggatatcagatttttttttcctgttgtttttctcaccctgctcatcttgcttcaatagcagctttctactatctaaatttagcattgacttgggttgtcatcttcgcatcagattgctcgt

SEQ ID NO: 9350 - DNA, 530 bp, Oryza sativa
  Intron number 3 from transcript LOC_Os02g05520.1 (locus LO C_Os02g05520) derived from phytozome v7.0 (chr-ID Chr2; po s 2669300 to 2669829)
tgtatactgaaactttgttcaagttcaccaatcaggtctggtgctatttactctgtgcaatcgtaaggaggatggaactgtactgctacaataatgtgcagcaaacttagttgatctatttcagtattaactgagatgcacttgataatgcagtggcaaggggtgtgtggtttcaaccctaagatcccgtgtttaattcccaaaatgctcacaatttcttcttagaaaatgtttggagggacgtctctccctccaaatttcgttttttatttgagtgttaactggttggtatagatgaactcacctatcgacaccatttcacctgtgctgttgattgtctggtgctttcaatactacattaaatctcaaattgtgcaacttagtctagttttttatttttctacttggagtctggaaactggctgttagattgttaacaggacagctattgaaatggttatatgtagcacattcatgtctgtgaagcactggattagttctgaatttctgatgtgcttgatattcttcag

SEQ ID NO: 9351 - DNA, 593 bp, Oryza sativa
  Intron number 2 from transcript LOC_Os02g34940.2 (locus LO C_Os02g34940) derived from phytozome v7.0 (chr-ID Chr2; po s 20954719 to 20955311 reverse strand)
cggccgactccatcgccaacgacggcgtggtcgtcgtgagtttgacctcctcttctctctgcatcagctgtttatgcttatacttacaagctaaaggctctcattggatggcctaaatagtcaaagaataagtcaaattttaaattttcaaacttaaatttaagattgattttaagatatttttaacgtaatttcttttttaatattggcttttaagtcatcaagaacatatatatatatatgaaagttttatctataaatttatttttatcccctaataagctgttttggcttattagggaaagagccaaacgatgggagactaaaatttaattttacatttgaatttttggttttttattataaatagcatttacttttttaagtacatttgattttttgttttttaattataaatagcatttacttttttatatgtatatataaaagttttactcacaaataatatttttatttacaaataaagtgattcggataaacatacaaataagcgaaacaatgacccgatgcatcagtcaaatactcttgctgatgcaggtcggagttttccccgaacttagcggcagcgagtt

SEQ ID NO: 9352 - DNA, 335 bp, Oryza sativa
  Intron number 2 from transcript LOC_Os01g63270.1 (locus LO C_Os01g63270) derived from phytozome v7.0 (chr-ID Chr1; po s 36674539 to 36674873 reverse strand)
agttcgggtacgagctcgaggccctcgtcgggcaggtgagctccctttgagtgttttctaaattaaaacgtgctctttttttttctgaagactattttagtacagtatcgcttgttagcgtcattattaaactagctagcgctttgtttgattgtgccataatctaacgggaataacgcttgtatgtattcttattttagaaacagttgaagtatccggttagatggattagatttgatccgatgtttaaccaaaataaagtatggttcaaaagcatagaagttgtaccgtatccattttctaaacatgtgttctgctctgtactcaggaaaaag

SEQ ID NO: 9353 - DNA, 559 bp, Oryza sativa
  Intron number 4 from transcript LOC_Os01g62420.4 (locus LO C_Os01g62420) derived from phytozome v7.0 (chr-ID Chr1; po s 36129872 to 36130430)
ggaagttgttgcagcgcaaactaaagctattgcaggtaatttcacttgctattcttcaagttaatttcttataaagttggaacttcacccctaatgttggaacaactgaataagtgcttccttccttccttatgaagtaccttgtgctgttgataaatccagttcttccaccttgaaagctgttaaacaggaatgctagtttatatttgcagaatagaatactgtgattgcttttaccctgctaaatatccaaaaggtatctgtagcttgtgtacaggtttatgatgataacggtgtggtcaaattattaaatgatctatcatttgaactaggaattatgtcatacaagaaacacatactttactactatgagccttttagttattgaagaaaacacatcctgttttgattagtcacatccattttcgtttcatttgttctttatggcttttgtggtccattgtactgtgctgacatagaagtcttctcatttctccacccctaactttttgtcttttttactcgtcatatttttcagagaagatatccgattggacca

SEQ ID NO: 9354 - DNA, 728 bp, Oryza sativa
  Intron number 2 from transcript LOC_Os02g49610.3 (locus LO C_Os02g49610) derived from phytozome v7.0 (chr-ID Chr2; po s 30318733 to 30319460 reverse strand)
gaggtggtcaagagcatccgtcgtgggaacaaagggttaggacttaatatctcttcttctctagcatgtacttcctccactttctagcatattggccacattcatatatatatatatatatatatatatatatatatacacacacgtgcgcgcgcgcgcgcctagattcattaacatttatatgaatgtgggcaatgctagaaagtcttataacctgaaacaatttttttttcttgttgtttataacttctctagcatgtaattttttttcttgctgtttagtaaccagtaattggttggttttgctatgtacaattgtgttaaccaagagtatcttagttcacttgaaggacattgggctgtgatctttgagctatgtccaattgtgcacttgcttttcgtgatgtaaccgatggtcatagcaatcagcgaataggatatcatttccattagatggtccgcgccatgtctcattgacattgaggaatacattatgttgtaacatgtttactaaaaaaacgtattatgttagtctttttgatcatgggtttatccattttgttgtggtatggagttatgaccattgatagattgtttgcatactttgatgttttatcagctgtgctgtttatatatcattctcagtggtttgtcttgcataatgtcactgacaactgggtttggtctttgtaggttgtgtgtaattgctgggaatatttctcctatcg

SEQ ID NO: 9355 - DNA, 678 bp, Oryza sativa
  Intron number 3 from transcript LOC_Os01g49670.5 (locus LO C_Os01g49670) derived from phytozome v7.0 (chr-ID Chr1; po s 28542977 to 28543654 reverse strand)
cactgggtcactggctagctcacgtccaaaacgtgagcataggtataactagctcattcgccatgtgatcctacttcttagtactaacatataacattgtctaccctgaaattgtcagattaagttagtgaaacatggcatgcacatcaaatagcaacatagcatgatattaatcatacagaagcagacatgccatttatatgaactacttgctgacataaaattagtagttttacatttgttgttaaagtcggacatatgggctttaagacatgttataccacaccatattctctgcttttgcagagatgtatttaattcccatttcttcaatgcacggtataatatttgttagcgattttgaataggttctatgtgtcaacacgaacacaaaattgcctcaggacatcacatgttacattgtcaaaggtacttgtattgctatcctttgttttcaatcttaacatagaatttcttttaagaaagtgcaaaaatggtatgagttggtcacattatatggtgtgccttattactaacacattttaccatatgcacatttttggaaagtgcaacaatagaaataaacataacaacctcattacttagctatgatgtatcacattaacatggtctttctacccagggtttacggagcagagaggaagaagataaagtttc

SEQ ID NO: 9356 - DNA, 698 bp, Oryza sativa
  Intron number 3 from transcript LOC_Os01g12900.2 (locus LO C_Os01g12900) derived from phytozome v7.0 (chr-ID Chr1; po s 7164998 to 7165695 reverse strand)
ttcagaagaaggtgaactgcttagaaaccccttgtcattctgatgcaattttttacttggttggatatgttactttccttcgcattgcgctagtagaatcgctatggtttcctgatgcattgcattggcaagattgtagatatgtagttcagaaatacgcactgtttcaggtattcaggtgggcattatgctgaggaggtatcatgtcaaacaaacatggaagaatattaaaagcattgaacaatttgtcgtgtgtaataataacgctttctaaaagcgtgattcgtacaattgctttcctcgaaaagaacaaggccagttgagccgtggagacttagactttgctcgtcacgcttttcttttgcagctgtttgtgcattatatgcaaggttataatataaagccgaagatgaaattgcgagcaaaggagataatttctgttaatgccgaattaattaccagttgacaaaattgttaggagttgtggctcacttttgatttacttcgataatggtaaaacgcctccggttgtttgctctataatagcttcctaatgtaaataagatatcaacacgaagcttactacctagagacaagaaagcccatttacatgtacaccacattgcatcatgctttgtctcattacctttagaatctctaaagtgtgtactaatgacctgacttcatctggacagtgg

SEQ ID NO: 9357 - DNA, 740 bp, Oryza sativa
  Intron number 1 from transcript LOC_Os01g43360.1 (locus LO C_Os01g43360) derived from phytozome v7.0 (chr-ID Chr1; po s 24791332 to 24792071)
cgacccgtgcctcaccaagatcctctccaagcaaggtgccccccgcccctcccgtttctttggtcggaaattcgtgtgctgtggcctgcggggtgcgatcttgggttggtaggttcggatcgtgcatgttgcggtggttcagttgcttggatctgatccgtggcggaggtgtgattttcttttacccctccgatgtggcagtgctagtttggataataaatttgtcgtgaattgtcaatcagctattaggtgttgattcgatcgatagctccatatacaagttaagcccccgtagcaaagtgattttgattgtgcgatttgatgtgctgaaccatgcagagattagagctgctgtgcagtttctctctgatttttactctcttgagtgacatatagaattggctaatactgctcaatagttggttgacaacctgatttgatgcaacctagctgctaaaggcgttttaaatcattcgtttgcgtgaatgctgtactagtttctaatcattgatgtttaagagcctattgtagcgtgaagaatcatctccaagcagaggaaattgtttgcggcacggcaattgttggttcctgctgctaaatatgttgtactatgcacagcatatgatattctcactgtaccatgttctttttgtatttagcatcaccagatttctaaagcaggtcatgacctttgatacattgcaggggacaacaaagttctgtttgcagataaggtattg

SEQ ID NO: 9358 - DNA, 501 bp, Oryza sativa
  Intron number 4 from transcript LOC_Os01g25189.4 (locus LO C_Os01g25189) derived from phytozome v7.0 (chr-ID Chr1; po s 14226630 to 14227130 reverse strand)
agctgttgtctgcaaccttcatttttagtgttatcgtaggtggcatcacccatctgacctccctacttctttcatatgtactatatttgttaatgaagttacagacttaaaattaggtgcaaatcagaataatctaaatttaaccaccaaataaacataactaatttagaagaaaaataaattgaccttaaacggccaacgacatgtttgatgtttcagccctaattactacctctatgatttggtacagctaaaatttagcaaaggaattagtcacactggacatgtctagaatttgtaagaaataacaaaaaaggatgatatacacaatgaaatcttcctactagttttgctgtcaacgaaaatttgtcagcgccattacactgttggcgtttagtgttcactaacatatggtcaaaaatcattttagttcttttcattaactcatttcatgcttgtctttcaggttactttcttactgtattattcaggattaaggtc

SEQ ID NO: 9359 - DNA, 758 bp, Oryza sativa
  Intron number 1 from transcript LOC_Os02g43090.1 (locus LO C_Os02g43090) derived from phytozome v7.0 (chr-ID Chr2; po s 25948128 to 25948885 reverse strand)
aggtacattttctctccccttattctcctacgttgagttcattggctcgatcccaaatttatcagcttttggttaagctgatgtctatactgtactctctttttttttctccccttacatcaaatagcgaagctttaggtattcttcagtctgccccattggctggaaactatattgggcatattacagggttcatggttaatttgtccttcggctacatgatttgatggtagcttcaacattagccgattgcatggtgtcttctttgtgtttaccgttcttaatcccatcagttttcaagtttttgatcaggtgcatgttttcttccgttctccaatgctgagtttattttctcgatccccaaattggaacatagctattaggtgagttgatgattgtactcatttttttctgcctttttgtaaaatagcatgcatgtgttcttctgattgccccatttttggacatataacttgataatatcgctatgttttatcttttgtaatgtcacttacatgatcgatctgaccctaattgacgaggtaaattttgattagacatttctacctttgtattcaattctgttctgattcctgaagagaattttacgtttccaagaaacgattgctgacgataacttagttttcctctccatgagagtgatacggaaaatttcaaggctgcactccttttctgcttatcaaataattttctatcatgcagaaaaaaattccacaggtgagaattcgatccagttt

SEQ ID NO: 9360 - DNA, 743 bp, Oryza sativa
  Intron number 4 from transcript LOC_Os02g10020.1 (locus LO C_Os02g10020) derived from phytozome v7.0 (chr-ID Chr2; po s 5210282 to 5211024)
agatttttaaccttggtattgccaggtgagaattttatgggggattggtagtttagtttcttcagatatgagaaaggttgcggattttcttcagtgctagtctgctagtagattattttttagtgataatagataagttccttctaaatttccatatagcctttgacaaagaattcctgttctagatttgaagtctgttttcttcggatttttagtcaacaaacatatagtcttacatatccccatttactgttttagttctatgaattatagtaactaaaatgcattaaactaatttggagtaagcttatgaaccgttgtagctgaaaacttttaccttctctatttgtttttggagggatatgacttttcttgccactctacctataccttaatacctaaagcatacgatttatgcatttgtttgactgcaaggtgtatagtcttccatattcccactcaccattttagctctatgtattataactaaaatgcattaaactgattgtggagtaagcttatgaactgttctagattaaaacatgtattcctgacttctctattttttgttggagggatatgatataatttctcaattttctgctctacctacaccttaatacctaaagcatactatttatgaattttgtttgatggaatggtgcatattaaaccgtaaaattctttggcttttttttttttggtcaggaaagcaaagcctgtggagaagttggaaactacat

SEQ ID NO: 9361 - DNA, 673 bp, Oryza sativa
  Intron number 1 from transcript LOC_Os02g53270.2 (locus LO C_Os02g53270) derived from phytozome v7.0 (chr-ID Chr2; po s 32596813 to 32597485)
gaccaggataacttggcgtttggatcgatatacaggtcaggtttttgcatatgaaatgtgtagcaaagctgaacttgcattgtcatctgaagttaataatcaggcatacgcactgggtttgttccatttttgcggtatcaggttccatttgaaaaccatgggcgtttatgttaattgcgcaattccatgaaggtgtgctagactagctgctaaagtggcatgttagatgttgtgcaggcttgcttctgtttagggcatcatcagaattctcagtatcaagtttgttttcctagattcatagctacttgtttaaacatatttgttgtgatctctgagggaaataaataaaagcctctgggctaattgagttgcaagaaactgttaggcaaatttactgaactcgaagctcattaatgtttagtcccctttgaagttaagtgggctgatttgatttcgtcttgagaaaagcgagatctgatttaaatagaatgaatcagcttacatcatgctttggccagaatattaatgcttagtgtgattttgtgactttccatttttttccttggttcatgagttgattctttatttttctgctttcttcatttttgtttagtttgactgtagatgcatttttcattttactgaaatttgacacacaagaaaattatgcaga

SEQ ID NO: 9362 - DNA, 552 bp, Oryza sativa
  Intron number 1 from transcript LOC_Os02g47580.1 (locus LO C_Os02g47580) derived from phytozome v7.0 (chr-ID Chr2; po s 29069887 to 29070438 reverse strand)
acgcgcgcgcgcgcgccgccgggggcaggtggctggtatgttcccggacgaaattatcttttatttttgttctgagggccgtgctggttctggagagaggaggggtttgattcgagccgccgccggctgcggcatctcgcctcctgatctggaggagctgctggttcgttcgggaggttggtttgggcggattaattctgcgaggcggatttggttgtgttttttttggtcaatttttttttgaggggagtgttcgattcatgagtcttcgtttgcggattcatggttgattttttggagatttaggtggagaaatgtcgtgcgtttctccttttattttttctataaaaaaatttgtaggtgcttttgggcatcttacgctgcatctttttcgaaggatagggtgcatacgtgttccgctggagatgttcccgaataatttggatcggattcctaatctcggtggcatgttttccttcccaactgggatgagaatttgattcatcctgacatcctttgttttgtcaattgcgattcagggcgccgccgttg

SEQ ID NO: 9363 - DNA, 772 bp, Oryza sativa
  Intron number 4 from transcript LOC_Os02g17190.1 (locus LO C_Os02g17190) derived from phytozome v7.0 (chr-ID Chr2; po s 9849911 to 9850682)
cagagtaaggtaattaagtgaaactaaattgtttgattgagaccttttatattttctagccatgaccttttatacttgagttaacagcttggaataatctccacattaaatactgtcttggttatttatgcttaagctttcattgccaccatccacaatggcattttcttattctcacccatttcattgtcaacctagtctgttctgctcataaatatctcgtagcctacatgtcttgattcataagcatgcttgtctacttctaatttgtcttagaaacataaaatccatttcaacaaatgaaactgcatacttgtgttagaaaatatgcttgacatcaaatctctttatggtgcaaattttgtgatagataattagaaacaacaaaatggacatgcatcttgtgtcgatatcctttaagctaaaaaaaattgattccctagttgtggcaataaatggaataggttttttgatgccttctgtgttatttccaacacccatgttacagctgatcttttgtgaacaagaatagaaatatttgttgctactaaaagcatgtcctgaaactttcttactgtacatttctttgctctctgttatcatatatcgactaaaagcctttatggctttgagtagtgactaatgagaattcctatagtacatggtcaatatgcattcagatttcgtgaataatatctgtttattaactaagtatggatggacgtaatggaaatcaggtggaaattcaatctagaccctgcaatcagcaaac

SEQ ID NO: 9364 - DNA, 688 bp, Oryza sativa
  Intron number 3 from transcript LOC_Os01g48280.1 (locus LO C_Os01g48280) derived from phytozome v7.0 (chr-ID Chr1; po s 27669313 to 27670000 reverse strand)
aaggtacggcacccgatggatacgttatttgttgtagagggtgttacggctcccgatggatatgttatttgttgtagagggtggtcgattagggcgtttctaggtataccgcagaattgggtgattctgtataaacccaattactagaagtgttaattatgtgtcagtcatggacgggcacgcatttcgtaagcctgcttttgcttgattaggctggttcttttgcacttaccagttttagtttctcgggcggcgggcacttgcatgttctatgtgtctcatattccctttctagtatgaagttagtaatgctaaaacactagtgacttttagcaataatgttctaaactcggattatatacgtgacttataagtgcttttcttttatgtgttaacttgtttgatgctttgtgcggcaaaggttgcccttgattttccataaccaaattgatctcttcgatttatttgattagactaattatgagtattgatattgttggcttttcatgttgtggtgtataatttaaatatttcctttcttaaaccctttttgcgttaattcgggttggatatataatgggtgttaacagttagtagctttagatggtttattctattatcatttggcttcctgatattgttctttctatcaggtggagtttttaagcttgaactctttttacctgag

SEQ ID NO: 9365 - DNA, 754 bp, Oryza sativa
  Intron number 3 from transcript LOC_Os02g27769.1 (locus LO C_Os02g27769) derived from phytozome v7.0 (chr-ID Chr2; po s 16440348 to 16441101)
cttcaacatgtaataacttttaacctcagtagtttattttgttctgaataattgcatcactatgctttgattgtccctagtctaccttagagcctttatgatttttgcaatttaggttagcactctttagttaagattgactggcagctagacaacatgaaattttagctgttgctggataccttgttcttggtgcaagccaattatgctattgtctgatttaccacccatgtgcggctctgtgcggtttcctgtagtttctttttttatgaatatatatgctaatgctatgatatgttggtagtgaatattaactagtactcctgctgtctgagtagttgtctaagtgttgctacatcctgctgcaatgtaaatccctctactttcaagtattcatagttggcaaatattgatgaataaaaggcctgcttgatgcatgtcaatcattttagaattagcatttgagaaaagttgaaacagcgttcttcgtcagatttgccgtgatatgttaacaatcatgtatacccctttgtgactttgtcgtccaaggaatcacaatattggcctgaaagttgaaactgggacaacaaatttgtactctagtaattggcactgtgattgctagttacatgtacggtcttgatttagaaagttagatatctgtatactgttttatagcttgccgttctcacattcgaaatgcaatgttcatattgcagaacaaccgtgttcagccactcccagactgttgttg

SEQ ID NO: 9366 - DNA, 976 bp, Oryza sativa
  Intron number 1 from transcript LOC_Os02g44540.3 (locus LO C_Os02g44540) derived from phytozome v7.0 (chr-ID Chr2; po s 26979771 to 26980746 reverse strand)
tgaccatccctccctccctatccacacctcatcaggtattctgcgttatccctcaaaaaagtttgggggttcaaccgaaaaccgacccctcaaccgaaacagggttagatctgcctctgcccagttccacctactttcaacttgttaattttgatttttgtttttagcagatgtaatttggttactgaatctcatccaaacacccttagaatagttgcattagaacggaaaatgtaagctcacataatttgtactcatcctaactcacataaatttcttaagaagaatctataccacaaactactcatagtcactcaaaaaatctttttattaaggtatatattcttataagaagttttcattccataaaattttctaaaggacatactgtgacacttggcattaatctaagggtgtgtttagatccaaactttgaatccaaagtttgcaaaattccatcacatcaacatgtcatacacacacaacttttcagtcacatcatctctaatttcaactaaaatccaaactttggatggaactaaacgcagcctaatttaacatttttttctttattaggttataaattttctaaaaaacatattgtgccacttggcattaatctaatttaacattctttatcaggttataaattgaaaccatcgaacgtactttgtcttcccgtttctaaaacattgcgatatatctataatattttaatttcaaaaataatttagactaacagtatagatatttaaattaggtaattaataaattcaaataaactatagtttagaataaaaaacaaaataatatatgccaagtacaatctaataacaatagaatgttagagacaatgtgaattcaatatttttataaagtttattttgggacggaggtagtagtaaattagccgggaaggcacactctggttgatctaaccccgagtcaaaaccatttctctacctggcaaactcag

SEQ ID NO: 9367 - DNA, 493 bp, Oryza sativa
  Intron number 1 from transcript LOC_Os01g04920.1 (locus LO C_Os01g04920) derived from phytozome v7.0 (chr-ID Chr1; po s 2274431 to 2274923)
cgcgtcgcgctcttcgtcgagccgtctccgttcgcgtaaggattattgacttttctctctctctctttcttggggttttgaggggtttcatagctggcctttgcacgcattcttgtccagatcgatgagtctgttcactactttcttgtggttgcttggtttgtcgaaagagtttttggatccttctcgggtcttgggattcgtgaagataggacaaaaatggagtaaacttcaggtgaattaagtgtggagattaaggaagccaacccccaattagctgatgaattagtattatattttttgattaagatgaattagtagtagtaaggacgggaagcgaattattgcatttttcttgcctaatatgagcagaggaatgacctatattgttcattctggtttgaatgtttgattcgtattttgagcaagttttcatctttcatgtttcatgtttgcagttacatctctgggtacaagaaccggtttcagaact

SEQ ID NO: 9368 - DNA, 946 bp, Oryza sativa
  Intron number 2 from transcript LOC_Os01g12700.1 (locus LO C_Os01g12700) derived from phytozome v7.0 (chr-ID Chr1; po s 7014523 to 7015468)
gtggcctgcggtgaccgcggagcttgtagccatgtgtacatttgcacgcaggtgcggattcataaataaatagcatgaaaggtattccctccgttccaggttaatatgttttaactttgatcaaagtcaaactactttaattttaactaagtttatagataaatatagtaatatttataataccaaattagtttcattaaatcaataattgtatatattttcataataaatttgtcttggattaaaaatgttattttttttctacaaacttagttaaatttgaatcagtttgactttgaccaaagtcaaaatgtcttataacctaaaacagaggtagaggtagtaattaaatttagagcggttcagtgggagctttcatagtcctagtgtcgatagtgagggctcaagctcccacggcaccaatagcagatccgccgttgcaagcgcttccctcaatatgttacacactagtacaaatgttctttattttccaacacctataagcttttagtggtgtgctggatactttctttgtggaagattaaattgccaacaacattctttacatccacatcacctaatgagaggattgtgtgcaggaagggattactagcttgcaccgtaaaacacacaaagaacggtctatacatcacccgacccgagtaaacccctgctcagaattaatattgttggatgtccagaccattgtcgtcaatttggaactgtgagtgtatctcctgattattttttttttataaggaggcgtcactccatttcttgattctagaaagtaagtgcattatatgtatattatcaagattcttatatggtgcgattttttgtaaaagttctatatgtgtataaagccgtggccactgacctaaaattttcatgtgcacatatttcttgttttattcttgatagttcaacttgtgttcgtgatagg

SEQ ID NO: 9369 - DNA, 428 bp, Oryza sativa
  Intron number 1 from transcript LOC_Os01g11960.2 (locus LO C_Os01g11960) derived from phytozome v7.0 (chr-ID Chr1; po s 6518650 to 6519077 reverse strand)
ttcttcggatactctaatagcggcctcagggtaattcaccacaacttccttttttagataatggaatagaatctcggcatctactcaaagagctacaactaattattacaccaattcaaccaaatacaacgcaactcaacaggtcataaaacacaggcttaataaaacagaagcacacacaaactactgaacgccaacacaaggaaagatcacaagattattcaccacaactttctggttaagcattcggggtgttcttttgttttttgtttttttgctttgtccttgatagaactcaacttagacaagaatacggcgaagagcaactgaaacagggttaaccatgtgagggataccagacatcccctttctgttattttttttcttggcttccatcaactcacactactgcatttctttgtaggact

SEQ ID NO: 9370 - DNA, 609 bp, Oryza sativa
  Intron number 2 from transcript LOC_Os01g73234.2 (locus LO C_Os01g73234) derived from phytozome v7.0 (chr-ID Chr1; po s 42451067 to 42451675)
caacttggtaagctactggtaagagtaaactgtgttccaaatgtcttgatgggttatatcactatcagtgctctgtactagatttatgtactccaattctcacagtgttagaccttaaggagttagttttgatggaggtaatgtcctgttcctacctgaatgcatcactgaccttgtgaaagtgaatgtggaattccctgcacattgagtaatgcaaacacattattaatgggatcaatttttttttgtccaatctttagtgtttccatggataaagggagaagacaagtgtatgtttattgtccatcgtgtaggcttgcaaggtgctgttgtgttgtttttgtttttaatcaaaatcttagatcaaatctatttcttccttatgggagaaaaaaaagagagaataatagtctggccgtattctctctaccactttggcaactcccaacaccaaactgacaaagtgattgctcattgataacggttactcaccattcagataatatgatggcttagcagttcttggcttgttagtaggaagattgataaacgcattttgagtgtatctctccatttatttatttatcttccttttgtcaggtgtggtcc

SEQ ID NO: 9371 - DNA, 558 bp, Oryza sativa
  Intron number 2 from transcript LOC_Os02g26814.4 (locus LO C_Os02g26814) derived from phytozome v7.0 (chr-ID Chr2; po s 15735020 to 15735577)
ttccccgcaagtcaaagaagctctactggaaaaaggttatactgatctaataattcaaatgggccgaggtacatatgttccatctaaggtcaatgaatttctctttcattccttttaaattgccactttaccagcacggaattccagcttgttctgcatgttaattcttcttttggtgctttttttttgtctgtgtgcgtgttctgttcttggggttaattcttgatgagttgtcagatgaacagaagttgcgcggtttgatttcttgtgaagagttctgtttggattgcacatttcttattttcagttttatataaccagtttcgagtgaatgtttctaagttgaatgggtagggactatatccaatcattgaatgattaggggatgttcctaacatgtggcatgaatttatgttatattagcagataataattgctttactctgctagtgattcctctgttctacctgaaacatttgtaagcaccatgttgatggttgtgaaagtgaagtgaaaccagccagaaactttgatatatttgaatacaggtctcaggag

SEQ ID NO: 9372 - DNA, 903 bp, Oryza sativa
  Intron number 2 from transcript LOC_Os02g19010.1 (locus LO C_Os02g19010) derived from phytozome v7.0 (chr-ID Chr2; po s 11105086 to 11105988 reverse strand)
gttctttcatatttgttttcgagtgtaggtaagttccgaaattttgtcggaccaactcattttactctctagattttgagaattttgattttcattactgccaggtgatatattattttgcagagtgtgagattggaaaaaaaaaggtttgtcgtgcattgccttttcgacagaattgtcatcttgcacatatataatcaatttacttatgtttcgcagcatggactgttccaaaccaatctactcgctgaatctgagtctactaatctagtagtttcactcatgtcaattgttcatccatatatttcctcagtactttatttagacagatcacaatgtatcctcttgttgtttagttcattgaacttctgaagttctcactcccagcatgggtcttatatttactcttgagtattcggaagctacatctacaagatcttgttcagagatcttccaggatgatgctaggctgatattagatacaaattcaagaaactagctgctttcaaatatttgcatgtcaaaatggatccgatatttactcttgagtattccgaaccaaacaccaccctagcttgagatcgttggatcgagattgaactgttggagttccactgctctcatcgtgatccttccacaaggattcaagtgccaattattgcttatctcatgactgctgcgaaaattagtctcgcggtgcagctatttacttgttggttaactgcctatatatctggtatgtgcataactgtcccatgggcaatttatttctttacttgttatattccaaaaactttgttagcaaatattttttttgcagctgctgttgacattgttcaacaaatatttgctctactttctgattagcatttaattttctcttgtccaggaagttgacttcag

SEQ ID NO: 9373 - DNA, 1007 bp, Oryza sativa
  Intron number 4 from transcript LOC_Os01g31870.5 (locus LO C_Os01g31870) derived from phytozome v7.0 (chr-ID Chr1; po s 17460226 to 17461232 reverse strand)
agagcttggtgttattgctgccactataccaggaggtatgtatcagtatttgttgtttgtctttgctttctataaaagttgaaatactatttttacttgttacttggaaaaatagtatcctcttttacagcatatttgttgtccatgtataaaccatgggggtaatccataaattaggttaatattttgaatgaacttccttgtgcagagtttgttttattgaattataaatttaatagagctattcaataactacggctggtggttgagcaataggttgtaagcgaactgaaattttgtgtttcatcaacatctgtagcatgttgctttatgtttggtttattcttcttggcatggaaaacttgtaaataagtgatcatggctttgtccatctctgggtgcagtggccgggataataaaatattccattatctaaaatattgatgattattgcatataactctaattatattttgaagatagaaacaccaatagtgtggtttatgagaatgttactctcacggtatagggtttccatgtgtttatcttgctttatttcttaatcaaatactcccactggtcacataaatcaatttggacatgtgctaagtcaaactttcaaaactttaaattgtcatatttctttctaaatagatttgttgtggaaagttccttatagtattatattgctggtttataataaatatattgtattagaaattaccatctaatgttgcactatggagaccatgtcaatgtccaagataacatgtttatgtaactggtgggagttattttcttgtgtgccagttaacttatctatcttgatcacattttttataatctatttcttgacataggcttacaagatctgcactatacactacagttctcctttataaatcttacagaactttacagttttatcttctgtatttaaattcttcaaggttcatggtgctttctgtggtctttgtgcagttttaggaactgctttagcctacaac

SEQ ID NO: 9374 - DNA, 616 bp, Oryza sativa
  Intron number 2 from transcript LOC_Os01g05130.1 (locus LO C_Os01g05130) derived from phytozome v7.0 (chr-ID Chr1; po s 2402650 to 2403265)
ggtgttggctcgtcggttaaagtcgctcggaagtggtatggggattgaaaggctcgtttttttaatcgtttatgctgagttggtgtttttagcatggtattagagattttgactctagggtagcatgggatgttttgtatgctatataacaaggtgcgatgaagaattggagattatgtttgagttaagctgaatctgttagatgaagattgtgcctttttgggtttgttagatgagatatctggcaaaacctcccatctaatttacttcttacctaattacagagaatttgggatttctggctatgcacctggacaagtactcgtctaagttcatagctagaaatgaagtctttgtgggacggaggtagtagaaatgatactttgtgcttcagaaactataacattcatgtgtatgtccataattggatacttttttttaacgttttcttcccagatatgcttcacactaatcagctaaacatgcatttgatgttgtcatgcaaattcattttttgggtttagttttggacacgcagtacttcattaccaatacctttctttgatctgtcaatgcagactaaaccaatactaactctttcttcagcgtagttatc

SEQ ID NO: 9375 - DNA, 750 bp, Oryza sativa
  Intron number 3 from transcript LOC_Os01g57220.2 (locus LO C_Os01g57220) derived from phytozome v7.0 (chr-ID Chr1; po s 33059672 to 33060421)
aggcaaaggaggctgagctaaacaaacgggaaagcgtatgtgccttctgtagttatgcttgaaacttggaattttcaattgatcttttcatgagcaatgtgatttttaaccaatgtttgatgaagtaaaaaactattctaatgaatcaagttgtcaacttcccctggccaaagtcctaattcctaacctttttcctatgatgtattgggaagcacctatatattgtgttagtattgagtattgaactagtaaccattatgcaatgtgaaagatatttagctggcatggatttgacacaaagatccggcacccaatagacctcgctgatctaaccattaattgaatcattgacattgcacaattggtttgaaatgatgaacaaaacatggatatctatacactcaattatagcactttgaaaagaaggatggctgtttttttagataaacagaaggataccagcgtgctaatgcaaactaacattatcaaatgatttcatctagatatctcctcttttcataaaatattgcgcacgagaattacgtgtatagaatgctgaatctgtgagtgtgctgagttttactcatagagtaaaaatttgatccaacaagtttcacatgattggaggttaaaacaccctagatttgcgtacaagcatgctcttgtattttctttaaatacaccacctgattttttgtgattccctgatacgcaggaattgagaagaagagaagaagctgcatccagagg

SEQ ID NO: 9376 - DNA, 694 bp, Oryza sativa
  Intron number 1 from transcript LOC_Os02g32140.1 (locus LO C_Os02g32140) derived from phytozome v7.0 (chr-ID Chr2; po s 18981744 to 18982437 reverse strand)
cgccgccgctgccctgcaggccgtggaggcgcaaggtacgtacgtgttacagttgcacacacgtaatccaactatccaagtacgtaattaagctgccatgatcgctatgattaaccgtaagctatctacaagagtatagatccatcggtttatctatttattagaaacttcgggcaatcaaatttacctatttcgtgtagattaagatggttaaattagtgttccagacctccaatacgtcgtatgatttttttcttaatcaaactactaaaaaatttaattaagtttgtagtaaaataatgtaacatttttaatacaaaataaacattatatcaaaatatatttaatgttaaatttaatgaagctagtttggtgttatagatgttaatatttttttctataaacttattaaatctaaaagtatagaaaaaaattaaacgacttataatataaaacggatagagcaactataatcacgtatcggctgtttaataatcccacataatttgataataacttagagtgattaacttgctgtatgattcttgaaaaatagagtagcttgcgagtgatttctactcgtgttaaagcaaattttcttcttgaaagcaaaagggggaagaacgcaattctgaacgtgcgcgtgtgcctgactgcaggtgcggcggcggcggagcggcactaccgtggcgtg

SEQ ID NO: 9377 - DNA, 458 bp, Oryza sativa
  Intron number 2 from transcript LOC_Os02g44380.2 (locus LO C_Os02g44380) derived from phytozome v7.0 (chr-ID Chr2; po s 26873935 to 26874392 reverse strand)
gttggaggatctagcactggggaccaaagaattaggtaaacaagaagcattggccccataacatgttttccattcatcctgtcattgtttgatctactaggcactaacagaaattttgaggtgataaaccaccacaatcaataaggttgctaaagcatgaatacttacagggttttgcctcatataatctaaaccattccttacaaaatattcgtttctacctttctaaaaaagtttctcctttagcatgcagccttttgcactttgttacatctctctcttatttttctgagaatctgaaggagctttgtcatgtcattacgaaatactcccctgtgtttttgaactatagtgaatgttggtgcttaaaacatatgtcaatcttgatatgctaatattagtttgcattttcttcttattaaggcgtgaggaatcgttaccgattttcaaaaggagat

SEQ ID NO: 9378 - DNA, 903 bp, Oryza sativa
  Intron number 2 from transcript LOC_Os02g03820.1 (locus LO C_Os02g03820) derived from phytozome v7.0 (chr-ID Chr2; po s 1604103 to 1605005)
ctcagcaagattgacaaaacagccactaaggtagagcataacagactttgagttgtgacttatagttgttttgcactttaccatgtctaatggtctgtttatgcaccgcgcatatatttctttaccaatgaaaagatacatgcaaatttcaacttgcttacttcttaaatcatatgtttgatgctctggggttcacatttagtagcaatgaaaccaccgcatgacatcttctttatcaagttaaacaatttgtcattgttcatgtcctcctatgcaacctattctgttcacatgttttgtgcaaataacttcaaacatgtcttggactttcatatcatcgcccttggttttaagttgggggaatcttccttggggggatggcctgtctgcttgatcatagaggtttacgaaagtatgataaaatgttctgacctctacagaagcagtaattttagggtattcaacttgtgtcctgactgagggatagtattgaaaagtgggaataggaaagaatttgtcccttggttgtttattggttctcttctggttctcagttcgaagagatataattcagtcgttagatgctggttttctgaattcctatagtggcatttattctataatcagtttgctgttatctgattatctccaagaaacccactaaagcagtatgtccctcagtggtatggaattcttattgcaagcaagcatgttatgctaaggttttggtcacttgcaagctagagtttaagcttttgatcgtgtttcgcaattagatcatagactatacttaaagaactagggaaaacctatgtgccaaagttcatatggtggagttctttttttatattatctttggtgattagtaaaatatacatgcatatgttcaggaacatcgaggaa

SEQ ID NO: 9379 - DNA, 954 bp, Oryza sativa
  Intron number 1 from transcript LOC_Os02g52730.1 (locus LO C_Os02g52730) derived from phytozome v7.0 (chr-ID Chr2; po s 32249951 to 32250904 reverse strand)
tcgaggccgacaagctctccaaggaggacatcgacgtgcgtctcaagtggctcggcctcttccactgccacaagcatcagtgtatgcctctcttttgctcctctgttcaacacattttcttgctttcgatcggttagttgatctgtcgcgccgaggaagaattacctcaattaattcgccaagatattctgctgatttgttttttcaagatgcacattcagcaacataattaagactgattaagttgctgtgatttttatagcttaattacgatctcgtgagtaatgactatttatattgagcaaacatggaaacctttgatccaatcacttcatctccatgtgccacatatagccacagtcccaggctctaacaagtaacataatgttcgcacaaccgtttgataagtaatagtatgagtactttatttggcgccagcatctgatgtgtggcctttgtactgattgaaccaaaaagaaaaacgaaagtcattttggtcccttacaattctacttcatctgcaggatgtacataagcttacatatccattttgttctatgttctgtttacattttattactaggttgaaaaggctcacttggtggctgtcattggttggttggtgcggtatatactatatagttttttaatggcatatagctatatatatatatatatatatatatatatatatatatatatatatatatatatatatatatgttcttaaaacaaactagaaaagcaaaagatcaactatcttagccacaccaatgaaatggaatatactgactctcacggctaaaattctcttccgtcacctggcccaactggagccgtgggctcgtggtcctttaattagactctttgctaaacatatactagtgttttgggggcccagagtgaatttggcccaaaatgctaacggccgctctacggctctacgctgtgcag

SEQ ID NO: 9380 - DNA, 837 bp, Oryza sativa
  Intron number 1 from transcript LOC_Os02g35870.1 (locus LO C_Os02g35870) derived from phytozome v7.0 (chr-ID Chr2; po s 21547513 to 21548349 reverse strand)
tcttctgctgtatctgctcgtgcgtgtgtggttaggtgatgcttagctcactgtttccgcattagtttctacccaaaaaaaaactttgctattttcatgttaaaggaaaagggaaaaaaatgctgcatttagtagagtgtaatctggtttaataatggaagaaggatgggatttttgctgttttgggtgagctaattttggttagaaatcgaagaaggattggaatttttgcttgtgttaggtgagcttcttttcacctaatacctgtatgagatctatcaaaagcttgcattttgaggatgttttgcttctcccaatgaagtggtggccttcctgtgtggattcgtacttgatgtagacactagacagtagtaatgctgtgtgtgggcttattttcatttatgatagctttggattcggaacaactgcattattgtcattgagtgttatggtcggatttagcttttcaacctttttaaggaggaaatatatttttgcaacaagttcaagttatacttttcttgatggaattgtcttcagtagttcagtatattccatttagactggaacttggcatacgaactagctgggatttggtatcatagttcataggttcagttgctcatttcaaatatcgaggctgtgaaatagtgaaattaatcaaataacggaaaggcaatgacacgggttattatggttcctgatcctttttatttttgaattcatgcattttgatgatcagattatcttttcttggttgctctttcatctccctgacgatttcttttgggtggttttacagtttttggacggcacctgataccagtaaccacatca

SEQ ID NO: 9381 - DNA, 957 bp, Oryza sativa
  Intron number 1 from transcript LOC_Os02g09470.1 (locus LO C_Os02g09470) derived from phytozome v7.0 (chr-ID Chr2; po s 4859982 to 4860938)
ccgagcaggacatcgagcgggccaagttcgagcaggtgcttcgctaatgccgcacccccctttgatctgtctgtgcctggtagaggtgcctctgcttgaagtagggttaatcgtgtgttcgctgatattctcgagaaaactcatgttgctgtaccacttggggattggggatgtatctagtgttggattatgtagtggtcgcgtgttttccgatgtgcatttgggtatcatgaggtttagggttcaggcatcgagcgattagtaatctgatgtctctaagacagggaattgttacaattaagcgaaggtaatgatttttttagagatatcgtctgtaagcgactcgttctcttttctgtatattgtgatgacgttaatcgcgcataattgttggattcacttctgttagtttatcaaccttgctgcattaagttttccttatcgtgtgtcctgtcacatctattgctttctgattgaagtctttgtgaagcatctggttaaacaatataaatatataatgtgtcattcttcgctaggatatgatttataccttttggttactctattatcctaaagacacggcatcattggcatacttcgaattttgataccagcataccaccacttcttcctacttgtataacagaataccttcctgattatgaagctacgccaaggccatctttttgccttttagtttgatatgccatactcaatttggtttgtaaagatatttaatattcttgatggaccttgttggttaaccttcatgatatttttttttaagattgggaatttgctatttcttcatgcttgagaattttacataataatgtatacgccacaccttttaacttctgtatatgcttgttttagcctaattgacatttttttttgcccatttccgtggagtaaatggcaggttgtcaagagactggggaaaacagcgaggtattt

SEQ ID NO: 9382 - DNA, 726 bp, Oryza sativa
  Intron number 1 from transcript LOC_Os01g52780.1 (locus LO C_Os01g52780) derived from phytozome v7.0 (chr-ID Chr1; po s 30368025 to 30368750 reverse strand)
gatctctccaatttggcctcctttcgaagcggaaggtatgccagtgcctctgcttttcagggtctgtgtgctgcttgctgctcaagtggtgggcttctagggtttatgagggacctaagaacattcgaaatgtatgatccttgcatgttcaaatgtagaagtatttttgtgctggaagacatgaacactcactacaatgcgtcgaacatgacagtaaatatgtgccaatttttagccagttcggcactagccatttaatctattcaagtttgttcatgtcctgttggtgctacaagaggtctgtttctcgcatttaggtcattattttcgctttgattgcaaacaggaatagcattcagcttggatgcatcacgaagacaatttgttgactattgatattaaccctttttaagttatatgataaaaaattagatgttctcagacaatatgctatctgtcaaatgataattcacatttatatctgctcaacaaacgtttcttaatcttttcctgcatgggaatgctttgatgacgacgttgaatcattgaatatgcccgccgtatgctttttttttatcaaattggtttacagacactcattagtaaccagcaacctatttgcatgaagttcatatttctatgcctagttgtcttacattccttttcatcatctcatagtaagacattttcattaacaggagaaaacatcatctcgtttacttcact

SEQ ID NO: 9383 - DNA, 1000 bp, Oryza sativa
  Intron number 2 from transcript LOC_Os01g56590.1 (locus LO C_Os01g56590) derived from phytozome v7.0 (chr-ID Chr1; po s 32623914 to 32624913)
cttctgtaagaagcctaaggtatcaccagttgtagtatgaactttaaagagctggaggaacttaatgggttttgttcatccattataggagatctggagaaactttataactttttattctccatgtaagagtttgtacaaacttttgtttttttaattcaataagggctgggctttgaatacaacattgccattatagaactcttgacaggttctttcagtggagacctctcttgtattcaagtttcaacgcaagggacatactagaagtagcttatttgtgaaaggagccataaatccacagtagaccagaaccagaatctgagcaagagaatggggtctatcgaaattagtagtggaacacaaatatacgatgatacaatctaacctgattctgctcagaagataagctttgaagtttgaaataccaagttggaaaattgaaaacctattcttaatatttgatggaataacatctgataaaccaatcaaaatgacctttgacctaactacacaagcaagattgttttcatgtattttctagaaattgaggtgtgaacttgagtggtatgcgctgatgtgtttattgcctctcttccactttgtttttcttttctcaaacgtttgagatactttaaatgctaatatgattgacctgaccagatgactgattgtattctgagatcatttatcttctttaccaactgtatacctgttatttgcaagataatgattaagcatgtccttccgcctatctgaagctaatctgttgacgttcttaaatctttggtatcaacaaatctcctccataactcaagtgaagccaataattttgtgttgcaatttagatgatgcatagtgaacaaaagttctgtaatttcttatgttagaccacaaagtaccttttaacttgtttccttcttttaaccgtcatgctacttgtttcctaacttgtatttgaattctttttggcatgcagctccgttctctatctagtccg

SEQ ID NO: 9384 - DNA, 424 bp, Oryza sativa
  Intron number 3 from transcript LOC_Os01g62410.2 (locus LO C_Os01g62410) derived from phytozome v7.0 (chr-ID Chr1; po s 36123497 to 36123920)
taaggagagcaaagggtggctggacaccagaggaggtcaacacctcactctctattgtacttcataaatactccataagtcctattaaatgcaatacatacctacatttgttacacatatatgctagtttggtttgtatatgtattttggcatattcagtggtaatatcatgcactggaaaagttcttagttaatctttttccattcctgtttttctaaggttcttattttatccgattttatttcatatatgtttttattgttattcatggtctgaccattgattttttgtttgaatcaaatcttctattttcctgcttgaacgacatttccatgttgattcagttacacaatcactgttactaattggtcttaacttatcgcaacaggacgagacattgaggaaggcagttgaggcttataa

SEQ ID NO: 9385 - DNA, 915 bp, Oryza sativa
  Intron number 2 from transcript LOC_Os02g39840.1 (locus LO C_Os02g39840) derived from phytozome v7.0 (chr-ID Chr2; po s 24066949 to 24067863 reverse strand)
aggtatttatctgttgctacttatttacttactgtatttcacatgatgaaattaatcattatggaacatttagtatagctgtcttctataatgatggagctgctcatattttgaaatattgataaaccaatagtgcggtttcactgaatctatttgcttggtttatgaaacacactgctcagttgctcacctttgttttgcacatattctgcgttttacatattatatttaatatatgtgcattgagaactgaagatttggaagtgagataacaatctagctatccaaaattcacttcaagctttaggggtgattcagttgcttgcacttgtctatgttgaatatgacaaaatgattagagaaattgactttggtactcagaaaatctgtctccttttattttttctgttgatcttttctgctatctgatgtatgaaacttgtataacaaaattagttttcctctggtgttctatggctcttcatttccctgtaaagggaagttgagcatgccatcatgttgtgccttcagttccacatatatatcatttttgtgttatggacaatgactaagttgtacatgaaatggcctttgtgccttgaataattcccaatcatgctaaatcttttcccctacatacataatggactctcctgcagtaattctgttctaaaaccactcgaattttaattgtaacattgataggagtgaagcaaagttgtggaacaacctatgtttcagagaagtttaaatggataaaacaacatatatttgcaacagttaccactggttcttgtattcataaccaaatattcttgtcttctgctttatttccctcgacatctttccaattacatgctttgattctatggttttgcagattatcgacatacctgagaacatcttgaagcttaa

SEQ ID NO: 9386 - DNA, 800 bp, Oryza sativa
  Intron number 1 from transcript LOC_Os02g20700.1 (locus LO C_Os02g20700) derived from phytozome v7.0 (chr-ID Chr2; po s 12208208 to 12209007 reverse strand)
ctcggccaccccttcaccgtcgacgagaagggcaggtccgtcccagatcccgactggtgtccctacgcccacggagatcccagacacgtgctctatgttgataggagaaacacccccgacgtcgatatgttcgctttcattctcggacagatgtacgtatcctgatcctttctttctaagttcttgcttttattgatttgggttcataaacctctcgtttcatttacatatgctattaatcatgtttactctagctagctatagtattactttctgtcatagaatacaaggaagtatgaatttggtagtatgtcaataataagtgttctaacaaagccgggctggttggtatgatattatttggtttgctttttgtaaagtataaaagtcttactatataatcaaaaattggttgctttgtttatttttcttggcttacttataagccatagttgcaacaatgagacattgacgataataactatatcttggccgacgtatttaggataaggtcagtgatactattgtgttaatttggaaactattgctggtcatgggcaatgggcactgctctagtagagctaactataaaaaccatcatacatatgaaatatgcaatgctcatacaatttatagcatttgcattactttttttttcttaaacaagctgacaataattcataagattatgtattctatagtttaaagttccatgcatgtttaattaattagtgtaactgccaattcgatatagtttacactttgctaattatgattactcttcgatgctagacctgtgg

SEQ ID NO: 9387 - DNA, 875 bp, Oryza sativa
  Intron number 2 from transcript LOC_Os02g03050.1 (locus LO C_Os02g03050) derived from phytozome v7.0 (chr-ID Chr2; po s 1200794 to 1201668 reverse strand)
ataggtttggatccacagaacaattgaaggtagtttcatgttcttagaccaacacgttggattgtttcatccatttctttgactattggtgtttctagaattggttacatggtaatccatgatgttgcttatttgttcctcagaataaccacccttagtttataactctgatttttttccccaagtccaagtgcaggaccactcttatgctgtgctgagataaaaataatgctacttatctacacatgctgcattatggaaaagctctgaagtgtgaattcttctagtttcaatatttccctgtccagcatttgttgtacacagtttccttctgctatagcataatgctcttatgaccaaattgcacgctagcttaacctgctttacattctaataaccaaatcaggcatgtcccatacatggtaataagattcacatattatggcttctcgtgacttatggacaaaataaacttaaaacgggttttactacatagtctagttgggtctcaggacttgagcatatgaacaagtatacgttgtaacagatggttgtagtaagatctaagctcttaagattctaatagcactttgctcttgtcatggtcagtaagcatttttttttatgtttccgtgtttctatagttgctcttcttgacatccaatatgaccaatactgccatttaaactatccactcttcttccagtcattgaagattgatatgtggataatcctattgcatattttatgaaactagaaatgcgaatgtgatatggacaatatgctgttgcctttaccaaaatctagtcttcatctgatgtgtaatgattttaagaatataatgcagatcattgaagaagatatcacaaaattta

SEQ ID NO: 9388 - DNA, 997 bp, Oryza sativa
  Intron number 1 from transcript LOC_Os02g39050.1 (locus LO C_Os02g39050) derived from phytozome v7.0 (chr-ID Chr2; po s 23572903 to 23573899 reverse strand)
tgcgccgctaggagaggtgtgttcttacttttcatggttccgatgagttattcaactgatgtagtgttctttactgggagtaatttagtcatgtacccaagaggctttagcatagtggtttttgtttgtagtccgttattttgtcattttcattattgccttaattctgctaagagctgcactttgtcaatagttggcctcttataatttttcatctcatagttgcactatatatgtgctcatgtgtgcaaacattgaaagtaggttgaaatcgctgcttcaagtcttcaacaattgaaacactcaaacttgttctactgcaactggttagttgattgttgtgcatatcattcatttgtttatgctgcatatgataaaataaatctttttgaacatggcgggacgtggtatcaaactccatgcaagcagatctttcatatgctgaaatgttagccgtgaaccataataacttattcatatatatcaaccaattgagtgataaaaggtctgctgtcatatttttatttgatatgaaaagcatgtttggatttaaattggctaacatgctactgcggatttttcacatattcaattgagaagctttcacgcattgaggaaaaacttgcccttcatggcataaatagtcaaaaacttaaaacacttaaagcttaaaaatagctgatatttagtgtcaacgttctttctttttgactccttgagttgggctgtggaggttggagttagtgttgatggcattggaatatttcttccaagttgcattttcaactgtgtatttttgctaattttgaagcaaaaattctgatgttttaccttactgattctgtcaaattgacttctctgctttgtgtatttcctcatcagtgtaatgtcttagttgcatttggtaaattacgttatacagtccttgcatcacatcattttgcagcatttcttgatgtgcttcctttttattaggttggctattgttggaatcttc

SEQ ID NO: 9389 - DNA, 308 bp, Oryza sativa
  Intron number 1 from transcript LOC_Os01g26370.4 (locus LO C_Os01g26370) derived from phytozome v7.0 (chr-ID Chr1; po s 14956470 to 14956777)
gaattttttttttggggggcttaccaggttctcaggtaattatgcttcttctcctttgtgtgtgtgtgtgtgtatacacaaaattgttttgtccagctttctgatagcttatgtttttacgtactgaaaacctgctccctaacatggatttgtagttttgatttttttcccttttttatatgacacgggcaagagatgcgtatgggtgtcgtgttgttcaagagatgcatattctttcctgctggcctcaaaattttatttatctgagtgttccttatatatcttaaacgagtagggtgaagtgcttt

SEQ ID NO: 9390 - DNA, 783 bp, Oryza sativa
  Intron number 2 from transcript LOC_Os01g71010.1 (locus LO C_Os01g71010) derived from phytozome v7.0 (chr-ID Chr1; po s 41102850 to 41103632 reverse strand)
tttggtgtgcttgattgtgctttgctccgggagaggtgggtaatttagctcccttttttacttcaaaatgttgtagtggattccttcctgcttgcatttagagctggtcttttttgcttgattacgttttagcttgctgctagatggaaatatattgggaaatcttcaaacaaataatttgcatagaactaacttaaccgttttttgttgaaaaaaatgattaacgggagaattgttcacattgggcaaggaaactagcagtgaaccacaatatttgcatgcctcgatgttttccccctttgtagtgcctactagtatattgaaacagtatgatagtttctttttccatttttttactagtataaaattaccttctttcaatttaatctttctggttaaaatggctggttgtagctgtatctagttgccattggtactatgatatatagtgcaaaatttcaaattccttttgacatatcaaaaggctattacagaagaactataagggttctttcatgcagctttttattcaaagctgttgcatatcctcttcgactttgaatccaaaagtttagctgttacaataatgtgttttttttcttttttgtttcatgttacataatcattttctgtcactagttatatcttttctacatgtatccagcatgttgaatgttgcttcgctagatgttcattgttttcctttttaaaaggctgatgctggttcttttacatttggtgaaaaaagaaattcaggtcattcaacgccatccctctaccacc

SEQ ID NO: 9391 - DNA, 510 bp, Oryza sativa
  Intron number 1 from transcript LOC_Os01g65600.1 (locus LO C_Os01g65600) derived from phytozome v7.0 (chr-ID Chr1; po s 38081023 to 38081532)
gcgatctgtgtattgtgaccagtgcagagtcgtgggtgagtagctttcctctccttttatttttctttgtcttttctttttgggttttcttggaaaaacatttcccccgatggaaaatattattttattattttgcctttatttttttgtgtgatgattgctggataatgtctttcttatagagtattactttagttttttttagcgagttcggaatgcaacttttcttcgaaaaatgttacagaataaatgttgtgaatttttttttgggaaataacggggtgaaaggggcaaatgacgccgtgtctgtttccaacagcaatttctcttgaatcttctcgcccccttctgtgactgttagcctatgcaagtattgttggcctgttgcttttgatgtacaatttccacatttgattgctgtcacaatccttttgcaaaagagaagaaaaaaattcaatcctacagaagcagtgatgtaatcttgcgcgatgccatttgtttggttgcagg

SEQ ID NO: 9392 - DNA, 611 bp, Oryza sativa
  Intron number 1 from transcript LOC_Os01g20204.1 (locus LO C_Os01g20204) derived from phytozome v7.0 (chr-ID Chr1; po s 11501140 to 11501750 reverse strand)
acacagtacaagtttagggaccgataatgtactttactcctaaaaacttctatttacacaataaagaagagtaaggattaattatttgtttgaaaatttggaattgcgtgtagctcaagctgaagcaaaagatactggtgcctccttattctcttctacttacttaattctatgctggataaatgattgcaaagaggccttgtctgcccattgcaacttagtatttgtatatgcagccgaactgtaagtgtcaactgagagcacaatcaaatgatataataagatctttagttaaatgatataataagatctttagtttctcccctacactatctgaatgtaatgttcactgttttttcatttagatggcaacgtcatacaaaatattagagccgtccatctgtgcattggatctagccgttcgtacgctgtcttcagttgcagctaaataaagtcattttttttccttcccaattcccgctcctagtcgtcgactccgctgctctctagtctccattcctcaatctgctccttgctcctcggcgtctccatcttcgccgcggtgccgctgctacaacggacagtgtatggcctcctttgcaggaagttcg

SEQ ID NO: 9393 - DNA, 856 bp, Oryza sativa
  Intron number 2 from transcript LOC_Os01g62870.1 (locus LO C_Os01g62870) derived from phytozome v7.0 (chr-ID Chr1; po s 36410181 to 36411036)
tcgattgcgccagtgcgtacaacaacgaaaaggaggtaacttggtttctccaaagctctgaatcgttcacgaattactggggcatcactctgcgtgttcttgtttgaaacgattggcgtatgaattttgcattagtaacatgggtgataataacagaagaaaggcacaaaaaaaagtatttggaaacttctactccttcatttttatatttggcaaagaagattcatccattttatatatatggacagtgaactattagtactttagaagggagtacctatacatctttcgaaagatttttataatcgtatcacacagatttttaatctttggattaaaatccgatagatataataaaaagcaaaaagcaattaagaaacactataatggacactaaattaccatatcctcaagaaaaagaccaaatccaatacaaaatttaaaatttacatgcgaagattcaaaaattacagtgtaacttacaaaagttacagtgtaagtttcataaattacactataacttacaagaaaatgcactgtaaatttgagtgagaaaatcgagtgagagataagaaaaaatctttcgagtgagatatagcaaaatcgctttagaaaggttgatgacaccttcacaaaaaagaaggaagaaagtaggggcagatccgctctacttttagggcatgtataatccgcactactcaaaactaagtagcacttacccttcttgcttactaccacgtgctttacacctggtccaatattatctcgtttcaagacaagtaatataacaaacaattaacaaacacattttgggttttcaggtagggttggctctgaagaagctatttgaagaggg

SEQ ID NO: 9394 - DNA, 775 bp, Oryza sativa
  Intron number 1 from transcript LOC_Os02g10350.1 (locus LO C_Os02g10350) derived from phytozome v7.0 (chr-ID Chr2; po s 5442216 to 5442990)
tcgccgccgagcgcctcctccaccgcctcggcaaggcaagccaatcttaatttgcttcaattaattacctccccttttatctttgcggctcaaatcagtagtgtttccagttgttcttagttaaaatcctctggtactaagcattcagattcgatgaagaacatcacctgctcattcaaattgatagtatagtatataccatggaatttgctggtaactactccctccacattttaatgtatgacgccattgactttttatccaacgtttgaccattcgtcttattaaaaaaatttatacaattatcatttattttattgtaactcgattcatcatcaaatgtttttttaagcatgatataaatactttcatatttgtacgaaaattttgaataaaacgaatagtcaaacgttagtcaaaaagtcaacggtgtcatacattagaatacagagggagtatctgtcagtgacctggaattgttgttcaagcttgctgcttcacttcccactgcactgcactgtttctcgtatggctttactcatgatgaactcgggcgatacaactgtaggattgaaaaagagagagagagagaggttagattcagatgttagacagctcgaaattgaagtttactctgtaggaagcagagatttagccttgcaaattcctgcagtatattgagccatcactttcttttacagcaataacttcgctcaaaacaagtttgccttttttactaattgttgtatccttgttcatcaggtgctaaaattca

SEQ ID NO: 9395 - DNA, 505 bp, Oryza sativa
  Intron number 2 from transcript LOC_Os01g65940.2 (locus LO C_Os01g65940) derived from phytozome v7.0 (chr-ID Chr1; po s 38284543 to 38285047 reverse strand)
tcatgtaagggaaacagagtgacgaagaggaaaaaagaaaataaaagaagaaaaaaagaagatccatgcattctttattcagcgaatcactgaagacaaagttggatttctgaacatctaattccatcacaaggaaactgttagaattcctcttttcttgtttcaaaaacagaatcctattcatttattcaagagatagtccagcattaatacgatgatatgtttagatcctgcttttgtgaaatttcacattgaatgtcaatgataacagttccattttaaaaatatctagtctgaagctgtaataattcgattttaaataatggttagctagtgcacccttatccatcttagtacaggtatgtttggaaatatggattcagttcctgtttgagtgtttgtgctacttcgaatgttatatgttagcaaagtaatgattgcatttactgaaaacttactagttctttttatttttcctttgtttagtgggataccaaaccaaggc

SEQ ID NO: 9396 - DNA, 716 bp, Oryza sativa
  Intron number 3 from transcript LOC_Os01g12480.1 (locus LO C_Os01g12480) derived from phytozome v7.0 (chr-ID Chr1; po s 6841272 to 6841987 reverse strand)
tagagcttttcggtaattatctcatctcatactacttttgtgaaagctggtagtatattctttatattgtctacaagtatttatccttctttaatttgatttcaacgaatcagattagtggcaagccttattgcctgtgagaagtgtgcagaattcactgcacctactatgtcaaaaatagcaatagcatgtgtgttttagttgaggtatttgatgataccatgtgcctgctagttcaagatttatttatttttttggcagcaaaacataatctgaaacaattgaaaattgttatcctatgtgcctatgcaagaagttattccatgtgaccatttgccatctaactaattatgatgctatggagtttggttgaggaaacataaattctgcattttgttaacatcattcttccttttgtggccactgttcataacatgtggtattgttatgtcccctattttgcttgttgtccctggaatgcttttggagaccatttgtttgtggagaggcttcagatagccccttgataatttattgaggaatcatttgattttgtctttgcatcagttaaatttcatttggattgtgttgtcttgttgtcaagcattttacctgtacttgtttcaagatttttgttccatccttccttgaaaccttagattttgatctcaacaaattattgaagtatacgttcacttgatgctaggtgcatctac

SEQ ID NO: 9397 - DNA, 356 bp, Oryza sativa
  Intron number 4 from transcript LOC_Os01g19820.3 (locus LO C_Os01g19820) derived from phytozome v7.0 (chr-ID Chr1; po s 11245062 to 11245417)
gatacggcctcatccagaggtactactgcaaattgattgattgattgccacgcactcaccattccatgtatctaatcttcttcgagtaagatttcattatcattctggataaggattagggacagcaaatgacaaggatgtttgttgaccctccatgataagcctgcccctctgaaattcatcttaatcaaaatctggtgcatgtgtaattgcatcatttaccttgggcatctgttaatccagcttgtatttatacattcagtttgagtgcctcattttcgttttttggcatgtatacttacgtgggtgcgaacaatgcagggcgttcctgggaagcgtgagcaatcactgtgcgc

SEQ ID NO: 9398 - DNA, 888 bp, Oryza sativa
  Intron number 1 from transcript LOC_Os01g72940.1 (locus LO C_Os01g72940) derived from phytozome v7.0 (chr-ID Chr1; po s 42309050 to 42309937 reverse strand)
agttcgccggcatcgcgcgcatccggatagtgaaggtacggggccgggttgggtgtgtgtgcttgcggctgcgaagcggaggggggtggaattggggatcggtggttttgattcattccgtctgtgtacgctgctgctgtggttttgtacgcgttgttttgatttggttggtggccacaggcggatatgcagttcaaggacaagttcatcgcgtgcctctcgctgggcgagcgcacgtaccgcaccgagaagtctgacaagttgagcatatttttcatctaatatatttcttttgttgtgttagatttttcgcttcattttccccatttttgaacatactcgtggtttgttcattgtcgatgcagtagattttgaatattatactctgatcagcttttttgcgttagcaaaatttaaaagcttataaagtccgtacgatttgtgttaacgaggaattagtacaggaaattggattgatgcttttgctattggaatctgtttaaatcccaaacctatttaccaggcctttattgaaatttaattccatgtttaattgccaattttccacctgtaaagccacctatcaaaaagtcaggtagtcaaattactacaataacttcatcttgtgaattgacttccttttacttctgttatcaagtttatcctacataggtccatatttggaatctaacgctattttcttttccctgtctttgcttacatttcaacagtacttccacgcccgtatggaactctgtgagtaagctgttacctttttggtccccatgaagctgtattgtgttgtatcatactgctgctccaccaatgtaaacattagtttgacaatgcttacaaatgtgcaggaaaagaaggttgtggtagaaacaa

SEQ ID NO: 9399 - DNA, 778 bp, Oryza sativa
  Intron number 1 from transcript LOC_Os01g08190.5 (locus LO C_Os01g08190) derived from phytozome v7.0 (chr-ID Chr1; po s 3975512 to 3976289)
cagcagcagcagagtgcgtgggaagcggagaagatgtgagctttctcctatctctcttctgttcttcgttgcttcatcattccttagtttgttattgcgatcagattggtttgatgttcttcgcacattcttttttcccttttttttatgttggtgaaatgttctccgttttgtcttgagatttttttgtcattccatttggttctcttggtgtccgcatggttatctttccccaagattagtttcttgttttcctctgggaggggtttcggattcgtttcttggcggtttagatcgtctttttttctggtgatttttgcaagaatcttgtccttcatcttcccttgttgttgtatttcagagggctgcagacgcttgagattctgtttgagttccctgaaatttctgcattttccgttctgcattttggtttctccttttgcaaaagccatgcctcttttttttttcttgttcctcttgttccttttatttttctcggatacagtactagtttggtttattgcttgctagcttttcaactgccttttccttttaccttgcattgcaactgccttttcatttctcgaaatttatttgctctttcacactttaatctgcattttacctttttattttctcatgaaaactttcgatcccctccttcctgttgctgctgtgcttgcatgcaaacccccatgtttccttttttacttattatatatccccgcactgaacttatccatgtctgttcttggaagcaggttggacgtgtacatcc

SEQ ID NO: 9400 - DNA, 688 bp, Oryza sativa
  Intron number 1 from transcript LOC_Os01g08180.1 (locus LO C_Os01g08180) derived from phytozome v7.0 (chr-ID Chr1; po s 3961586 to 3962273 reverse strand)
acgacgacggcaacgtctcgcgccgccacgacgaggtcagagcgtgtgtgttaatttgagttcatcgatctcttgtcttctcttttgcattcattttggacacaagaacatatattttgtgtttagttcttgaatttggcacaccaatttggtttatttcctcatcattttcttttatctcttgacctaaggcccccatcgtttgacgttatatttgcaaataaaaaataatttgtgaataaaacttttatatacgtgttcttagtgaaaagtaaataataaaaaataaatttcgatgaaaaaaaaactccaaaatcataaagttgaaaatttaaattttggttgataagtgtaagtataagcaaaaagatgggcttttagtaactctgttgttaattgccaagaaaagaaaaactctgttttctgctatggtccttttcagtgctatgcatgacagtgtgctggtctgtactgcatgctatctgtatcgaactgaacaacagcaacagcaaaaggaataataataaaatgtcaagatcacattgttctagtactagttatgatagtaaaaagtgtttttgtcttttaaaaaagcaacataactggtcactgtaattttcttcatttgtttctcttcttgaaattgttttcagcgtttagccggcgccggcgccggcggaggcggcag

SEQ ID NO: 9401 - DNA, 688 bp, Oryza sativa
  Intron number 2 from transcript LOC_Os02g53340.2 (locus LO C_Os02g53340) derived from phytozome v7.0 (chr-ID Chr2; po s 32644744 to 32645431)
attttcacagaggatcaagtacattggacagtaaggtggtcttacttccctctttttgtaggaatgcacaaaacattaaaactatatgattttatctgaacctgatagttgtggctggattgcgcaacatttttctagtaaaatagcatagtattgatacatacttcacaatcatcataagtgatctggattcgagaagcctagtacttctgaattataaagtagagaacacaagtctaaaagaaacataaaagataaaaggcaaaaaaaaaaaaacagagtatagaatgcacctctacatagatgagaggtaatattagttgatatttatcttcttcttatataaaaatctcctagtaagcaatcaacatttggctacagataactcaattttaagcatcaaaatttctatttcaatcttcaatggaaaataacagccaatattgctggaggtagcgctgtagcggaagtaccccgctattgttattgcggctgcaattgtggccattgtgaatgctatttagtaccttggttcttagttttttttttgtctagttagatttcttcaacataatgatcaaagcacttcttaagagcgcttaaagttactgactgtggtattgttgtattgaataatctaatctgttttcttttgctctcttgaagttccataattttctttgtgagc

SEQ ID NO: 9402 - DNA, 930 bp, Oryza sativa
  Intron number 2 from transcript LOC_Os02g35770.2 (locus LO C_Os02g35770) derived from phytozome v7.0 (chr-ID Chr2; po s 21482430 to 21483359 reverse strand)
aggatagtttcaaagaacacagcaccctgactccggtatgtgtcgtatcttgctcaatctttccaacttttacaaacctatcaagcatcagaccgcatgtcctatcaagtatatcaggtctcttaatttgcagatgctgtctagttcatataaattagaaggatattgttcaatcaacttaatttacctcctcttcttgactttgttcgaagagatcagttacatatagtttcgatgctacaaagcgttgagagttataacagtttgatggattccatatgttcttcaggaaaccctatataatcatcacacatctctgttttctactaacacggtgccttagattatgaaatagtccaaattagttccagaggacattggtcttctgatggcaacggatccttgtaacaaaataaaaattttgaaatcttggcaataaatgttacatctcacttcagtggttaacttacatatcacatgtttgatttcacactcgagtgtgattgggatgttaatttacagtttaagcttcctttagaaaaaagttccagcatatcgcgattaaagtcaataaagctaaagttctttgtttgcataagatcgatacagccgaaatgaaatcaaaagttacctttcatttcgtatacagaaacaaaagagtgatttagctaatcggctcaaccttcgaccgcgccaagtggaggtctggttccaaaacagaagagctaggtaacaaacaaaccataccatatactactaatctccctttaatttgctgtgttctccaatatctcaaccaaattaagaatgatgctagctatagctagctattctccaaactatatcatgattcatgaatcaatcatctcaacatatatgtatatatcattctcaggacgaagctgaagcagacggaggtggactgcgagc

SEQ ID NO: 9403 - DNA, 653 bp, Oryza sativa
  Intron number 2 from transcript LOC_Os02g09380.1 (locus LO C_Os02g09380) derived from phytozome v7.0 (chr-ID Chr2; po s 4821052 to 4821704)
gagatcagtaaagttgagaaggacagtgccatcaggtgtgtgcccctttatccctttgttccttgcgtgtatgctaggcttgatgattggatggataagcactctgctgattgtgcttcccttattttgatttgtgttgttttagttagctacatgattatttaggtgattgatacttctattctatggagatgatctgtgtttgtgtttgtgatatatatcaatttgtatcttgtcttaatttctgcttgtttgcttgtcagtctcagaagatggtactacaactgaggttttgttttgttttagaactaaaactaaaagtatgttattctcgatgattatacaccacttatgcctagatgtaaactgtccatacatgcttctaggtggtctttcaatgtttgtggttccacatgtacatagcacatactgttctctgcagcaacctgaaaatatgagcattataattgatgttttgctttcccgttgtaacatccatgatccatgggaactgcctatctggatcccaaatgattttgtgagcatcacggtggtgtcactgtttctgctaattgtaagctgtagcttctctgacctaacatagtcatgtaatctcagagtatcgcagcaggagaaagagcggaggagaaggt

SEQ ID NO: 9404 - DNA, 424 bp, Oryza sativa
  Intron number 4 from transcript LOC_Os02g19510.1 (locus LO C_Os02g19510) derived from phytozome v7.0 (chr-ID Chr2; po s 11400954 to 11401377)
acaattccgattcaacctctgaagaagttcctaaggtacgttcacatcaatacttctaatactttttaaggttgtttgtattagttgagttgggcaatattctagttgggttggggactacattttgatatgtggggtctgttaataccactcctgtgtttctcatgcataatgtgtgaagttctaggctgaaagattacatgaaggacgatatcagggttttctgtctatattaaaagttttctgttgcatcttataaaattatgataatcgatgattgaatcttgaattgtcgatattagtgtactacaagggactcttctcaactagtaattaactgaaaagtagttggttactggtcatagaccacatttcctattgtttattttgttttaaagtcacatgcaattctttctgcagattt

SEQ ID NO: 9405 - DNA, 703 bp, Oryza sativa
  Intron number 2 from transcript LOC_Os02g09180.1 (locus LO C_Os02g09180) derived from phytozome v7.0 (chr-ID Chr2; po s 4718823 to 4719525)
cgtcctgccagccgctcttaagttatcggctgaaggtacgtctgttgaatttagacagttgcatgctaaacatccagacattcattgttcatactttcctgtgttgcgctggtccaatttgattgttcatagacatgttggatacctgaagctgttcatagacatgttggatacctgaagctgtgaatttgaactctctgtttggcatattccccacctctctgctatgcctttattgtaatgtactgtagcatttttatgggcaacctgccattagcgtgtaacaccagagtgggtgataaactgaagtgccatgttcttatatcccgtttaaatatgatatgttttagttgattgtggtgtgttcattaatggacaatccacaattgtgagtactgagtagtgtcaaggatgaacttccattgtgatatgcggttctctagcctcagtatttatttgaagttactgtgcatgcttctacttcatgctcctatagcaagttatcaagctgggtggttccattttcaattggcctatgacatgacacatgtactatatttggttccttctaggatatgtccaagcttgattgccaacttatgtttgccatgtcttcatgaactatgcctctttcatgaattaaatttctccaaaaaatgcctgctaaatgtcagcttgcaatcttggacaggtgttgttaata

SEQ ID NO: 9406 - DNA, 626 bp, Oryza sativa
  Intron number 2 from transcript LOC_Os02g08090.2 (locus LO C_Os02g08090) derived from phytozome v7.0 (chr-ID Chr2; po s 4272113 to 4272738 reverse strand)
gaagtgttcccattccttgctcactattctgactggtacatcagtatgggctgaagaggaaagggcatcttcagcttaatcttgtaaaaaatatttgaaacttgacaactcagctgttcacatcaaggttctctatgtggactatgctttacttgaattggagcttcagaagagcattgaggaactattgtatccctctttgagtggggaaaacaaagacaatgacccagtggtctaaatgtcatgcgttgcccctagccggtctgtcctggattggcttctgcctgtctcttgttaggcctgcgtaatcagttacggtatgtagctgctggtctgtcggctgagtagggagtagcacccagcgtcttgcgctaattagggcttcaacacatcagtttggtgttctattgctgcagataattgcaaaacaaacttgatttgttacagacattgtactgacctgactagtatttgttttcttctgattttcttcatgatgattattcatggtattcagttccaagtggtgcctccatatacatcttgtctatactcttttatatactattaatggattgtttctaaatgcagactgtgccagttaacccgaagcctttcttgaacaa

SEQ ID NO: 9407 - DNA, 1061 bp, Oryza sativa
  Intron number 2 from transcript LOC_Os02g44630.2 (locus LO C_Os02g44630) derived from phytozome v7.0 (chr-ID Chr2; po s 27038885 to 27039945)
cttcgcgctcgtctactgcaccgccggcatctccggtcagttcactctcctttggcttcctcccccaccttcaagatctcaagtcttcaactttgtcatgattttgccttggtttgtcttgctagttgatacttacttgttacctgcactttgcttggctcagtagtttcttcatactagcatgctcactttagtaaagcatgaggtatagaatcatgtgtactactactgctccttccataagtagcaagactttgaggcatatggcattaacactgaataattgatgaaagacttttagttacctgcttttggggtgttagatcagtattagtaactggaaattcactaaatttgttgtccatgctcttgtagttttaaagaattattatagctttctacaggtgttgaatgcaccaaaaatttatgacactaccttttgctcttgtaccatcatgtaccttgtctgcgcaaagatttgtcgctggcatattgtactgctgtggtatgtgaattttgttcttatgcaaaggtttgatttacgactagaagattaaggatttaaggtcatccgattgatttaactcttaacccagcattttcttcggtagtgttctaactgttgatgctgaaaccacacaaattatcacacaaaaatatattatttttagttcatcaaaattgaatgtgcacttggagccttggaggcaaagaaatatgtgatgccaaaattttctccttggttaatcttcctaccagaatattaacaaaactatatgaacaagtaaatatcttgtgttgtcaacttatacagtctatcacaactcgcaatcttagaagttaatttctgtaccagttttatataatgcttcaaaatctcaaatactaccttgttaatctcaaaatatgaatacatgagggtacactatacagtcttacttcaactgtcatgacaactgaccacaaaacaactacggcaattaagggcactactaatatccattatattgtctgttactgcaacaggaggacacatcaacccagcagttacttttgggctg

SEQ ID NO: 9408 - DNA, 1007 bp, Oryza sativa
  Intron number 1 from transcript LOC_Os01g69130.2 (locus LO C_Os01g69130) derived from phytozome v7.0 (chr-ID Chr1; po s 40188294 to 40189300 reverse strand)
acttccgcgaaatccgccgcgagatccaggttcccctcccccctcgcattctctatcttctatcgatgttgatttaggcgttctgatggttgattaactgatagaggtactagtttggaaccttcgcttgtgctcttagcgtattctactgctcgagagttcactggtaatgttgtgttatgactgcttgctagggtttcgaatagtttgtggtgatttggatgaataattagtattgtactgctcgtgagtctactggtaatgtactaatgttgttgtgtaatggcagcttgctagggattcgagtagttctaccaggtttggatggatcattagtaatttgttcggttttatgatgtatgtgatgccggttaggctctataggtttagtgcaattgggtacattctaacactaccaggttggattgggggataacccttttgggttatattccatcttcagatttaggggtggcgatattttctcatagttgcttttatggtgacttgtgctgatgtccatttgtgtttcttcaaaggtgtgggtgtattgccttatctaaaatctctttgatttgttcattgcctttgagatgtttgtactttcagcctttggtatattgtcagtagtttaaacttagtgatttgcttgaatgtggagattgtatatgcctgtgtatttggtgacgcttatcctattctgattaattaccattgcttttatttgtccggaatgaactggtcgctgagtttagtggttatgtaaaatctgttattggagaagtgtgcacaatagtacctttgatttaatttttttttcagtatatgctagaaaaattgtaccatttgttgtgttatgcttttattgattcagttatgctggtttgtttagttatgccaatgcctgcaagtgttgaacaaactgtaccatagggcatagagcactattaatcattcccccaatcaatgcaggccgaaacagacagagaggcgggtggtaacaaagg

SEQ ID NO: 9409 - DNA, 1032 bp, Oryza sativa
  Intron number 4 from transcript LOC_Os02g54590.1 (locus LO C_Os02g54590) derived from phytozome v7.0 (chr-ID Chr2; po s 33429298 to 33430329)
gccgggacaccgaagatacaggacaacttcattatgtaagtcgaggggaaagtattttctatgcctagacgtcacgacacctaggtgtatacatgcggtttaaataataatataaaaaattataaaatttgacgagatagattgtgaatataaaacattatacaaactggcaaatataaatttgatttacatataaagaaataaaaataacaaattttatatgcattgtacatgtaatattaactacttcctctgttttataatgttttatattataagatttcctaccattgtttacattcatatatatgttaatgaatatatatgtgtgtggggggggggggcaatgttagaaagtcttataacctgaaatggatgtagtatatatctttttttaaggaacataatattactatctgatttaggccctttttgtttaggcttagatttattggcctagacttttaagtcagcttattggcttatatgatttataagccggtggatttaatgtcctaagtttagtagttgagtcatacatctacctcacataaaccaaaaaagcttctccaacctagcttttggcttaatagtgttaaagtggtttatggcttcaaaaaagccaaatgaaaaagctgcttgtttgtttaggcttagacttttcgacttataagttggcttataaacctaaacaaagagggccttagtctagatgtcttgtatgtttgtctataaaattatatcatcttaattgatattattttttaaatcttttttctataactatttgagtagtatgcaaataacgggtgccgacacctagatgtagaaaaactcattccgtaagcttaagctagtttctataactatttgagcagtatacaaataacgggtgctgacacctagatgtagaaaaactctttccgtaagcttaagctaggggggaagaatggatgagaaacaagaagctaagcttgtggcatttgtgtggagacaggtcgccgttcgcgaggggggcgaacacgtcggtga

SEQ ID NO: 9410 - DNA, 821 bp, Oryza sativa
  Intron number 1 from transcript LOC_Os02g02750.3 (locus LO C_Os02g02750) derived from phytozome v7.0 (chr-ID Chr2; po s 1040900 to 1041720)
tcacgattcgtcaacctcttcccgctctggttcccgtaagcgccgcgccccctcgaatttctttcctttccttttcttttcttccattccaccagtgttttgatccgtgccttgtcaagctcctggctttcgccaagatgattgcttcaaagagaaacactggcactagttaagatgattgttcacaatgttttcttctccaccgcacaagtcgcttttgtgttttttttttcttcttcttttttcctacagggacagtagcatttcgagttttttctttgattcgttcaactgggttagcagttatcgcatatgcttatggcgctcacagttacatagcatgggcatgaggaatcccaagcttttctttagcttgtggagtcattttttagtttagagagcatcttccagtgggctgcagacagtggacatcaaaatgtcagcttttgttctccttgctggacactgaaaagcatcctattccatactcctattcaatacagtagtattagttaatccttttctctaacatgctaaagttaggttcattacaaaaattagtgctatggcttcatttttacatctctggtcatttttgcttcctacaggagggtgtaatctgaaacaatggttactgtaatatcagtacataatcatttgctgtttatcatccaaactaactagttaagcacttatggagcatttacattatgaattcatgctagtgcaatacattatgttgatttctttgtccaaatgtatttgttaaaatactaactttattcttcttttcccatgttggaatcgaccgcaggccaaat

SEQ ID NO: 9411 - DNA, 518 bp, Oryza sativa
  Intron number 1 from transcript LOC_Os01g55250.1 (locus LO C_Os01g55250) derived from phytozome v7.0 (chr-ID Chr1; po s 31798901 to 31799418)
aggtggcgaagcgggaggggaggtacttggcacgggtgatatgtttgtctgtaaatttattgatttgtgatgtctttagatctgtaaatttgtgatgtctatttgagtatattcattcaatctgtgaatttgtggatgactttgtgatgtttctatgaacgtggataatttaattgttgagtttggttcaaaaccaatatgcaaacatcaaaaacaaatgacaagaaaaagaaaaaaaatagacacggttggtaacatcatccgggactaaatatcgatatctttagtcccagattcgtggtcccaatttacaaccgagattaaaggggttacaaaccgaaactattatgggtttctccagcagtgaccattataaaacctctctagtgataatgccttttggattggccctactccctccacccaaggcatgatagttgcatctttcactaatgctcgtcctttcaaaccaccctccgttgctatactcttcatttgtgcagcagcagaaacgatat

SEQ ID NO: 9412 - DNA, 861 bp, Oryza sativa
  Intron number 1 from transcript LOC_Os01g07360.1 (locus LO C_Os01g07360) derived from phytozome v7.0 (chr-ID Chr1; po s 3474939 to 3475799 reverse strand)
tcacctccggttctgaaagaacccctgtttcccaggtgagattatgctattgattgatgttgcttgcttatgtagaagaatatgttttttgctttatgttgtatccttcagtttcttgatgtattcagttcttgtttggcaataaatggctgtttccaagatctcgcagcgtttctgcagggattttactatcttttggtattggtttgattgccaccagcgtttcattctgaatgcagcactacatgtagtcatatgcttattccttcattaaacaacaggatgcttttctgctgattgagtatttgcgtattgctaaaaaagaaaccaactctttcattataccatatcgtccaaatgagcaactgtgcaagtttcttgttgtacataagaactcaatgcattacctgatgatctgacttgatgtaattccctcctagttgtgtcatgtctgagatttagtcatctgtttctcaccatggtaacatgaggagatagtatcatcttaacacagaatttcctcaataattctctgatcttgtaccacctgagtacttgatattagagctaaccggtcggtgcttttgttataatgaaaagcatttgattgtccaaccaacaaggaccaggtaccttctaaagagttaagaggctgctggctttgtttcacttacttgcctttttttttttcctttttggtttagaatgtttcaggtcgattttatcctgtagtacagtgtattcatatctttgtcatgatgtttatgattgatttagttatcatcactgaccttgtacatttcctttgttcaattggttgcttgaatctgttacatttatagttttgaagatacctgaaca

SEQ ID NO: 9413 - DNA, 1011 bp, Oryza sativa
  Intron number 1 from transcript LOC_Os02g24430.2 (locus LO C_Os02g24430) derived from phytozome v7.0 (chr-ID Chr2; po s 14155474 to 14156484)
ctccccttcccacatccaggctcctcctcttggtggtacgtgcatgctcttctcttccaccactacatgattttctttccaattccttgtttgatcctggttcttcctatggacattagtaataattgtgttgctccggcattgtatgttctttatttaatgataaaatgtaagcatcagttatacatcttttcccatgtggactgaggataaagaggctctactttgttttctacctggttcaatacttgttgtgctccaatttcataagattgggaaaatctacatcggaggcagttgcttatttgtattttggattctttgggtggtcggccagggattgtcaaggggatctaggatttggtacattcttggttcattgtggttttttgggcctttataatttcttcatttgatttttgatggttctgattgtgttgcatgtcatgacttataatgggtgcaagaattattcaaattattccagatcataacacctatcttccacttagattacttttctgctatttttttagcgaaatttattctgttttgtgttattcaagcgttcttgtgaattttgggcttggctgtaaattaatgtgttgaatttgtgtcttcaagcacaatctcaggcacctgtaggtttttatcatctggtgtttcaacgttatcattaatttatatgtgtattttataaattttttgttaatccagaaaaggaacacatgttactaaacttataattatactgatggactatgatatataccatgagatgaggctaattagtgtctcacaggcccactgctcaagcattaaaaaattcccagcaaactgagaccttttgtcttattttacactgcatcgtactgccaagcaatactttaggtcatcaagatatttagaaaattattcgttttctcctttattatacattgagacatagcatgtgatataatcaaataataatgtgtataactgttcaggtccagatagagccgaacagtc

SEQ ID NO: 9414 - DNA, 788 bp, Oryza sativa
  Intron number 1 from transcript LOC_Os01g48920.1 (locus LO C_Os01g48920) derived from phytozome v7.0 (chr-ID Chr1; po s 28074267 to 28075054 reverse strand)
cttcgccgataagctcccggctcaggccacctctggtacccttacgccctgtccgattcgcttcctgtcccttccctacctccggggaaaattgggcatatgattgaattgttaggaattagtgtagttctctttaagtaaaaacctaggtttgtattgggttatattagttgccgaatttctgatgaaatgagtagttgtttgttggttctagacaaatggaatccaatactgatatcgaaatatatgcattgttgagttgaatgcataagtgcaattttgttcgatttgatagtgcgacggtgagaactttacagtgcttactgaaattactgttgggattgcggattcctgtaaagctgaagttcctgtttctggtgtagtggtgtgtgtttatggtttttcctggcattactgatttgaattgaaagttggaacttaaaactactgtagtcttcgtaatggtggcagcatggtttacttagtttacgtggtatatgcttctgttgccactcttatcttcctgtggactagaggtattactctagtgtttatcagtctaatgtttatacctgcaagtttccacccaagataaatcatagaccatttcgtcatatactcagatcgaatatttttatcatttattatggctccaccacttcttgcttcgttttctctacatgttttcttttatgtaaactaatgcatcatttgtgccagagatttgtcttgaaagtaattgttagctttcagtttcttcaaagtcattgttcctatctatgcagcgc

SEQ ID NO: 9415 - DNA, 537 bp, Oryza sativa
  Intron number 2 from transcript LOC_Os02g40410.1 (locus LO C_Os02g40410) derived from phytozome v7.0 (chr-ID Chr2; po s 24469025 to 24469561 reverse strand)
ggtcaaactcaaggaggtatgtatatttatgtgggtattttattagagggatttgagggttttccataaatttcaatatttcttgccattatatcaaattattatgcccttcagtacttattcttcttcattttctcttttttgaaacagaaatttggcacttcttgaatgtgttctacatctagttagttctatgttatgtgtgggaaattggatatgctatgcatctggaaatattagctagggccattgggccaatactttgcagtattgctctatcaaaggccatttttctctatttggggggggggggggggggggattacacaacattgtattattcttacgctcttccaagataatgagatgttttggcagttttgctattcctttttatttctcgcttcattttgcttttgtggatctttagttttttcgggtatatctctaaggtttgtgctatttgcagaacatacataattttaaattttaatcctttcaggttgtcctgtccaacagatctattcatatttggag

SEQ ID NO: 9416 - DNA, 426 bp, Oryza sativa
  Intron number 4 from transcript LOC_Os01g64770.1 (locus LO C_Os01g64770) derived from phytozome v7.0 (chr-ID Chr1; po s 37580177 to 37580602)
atccaatactacaatacaattcaacccagtgtaaggtaagcttgttcttagaccaggtgttgttgcatcccaagggcatctcttctggtataatagtattattttgactttttgttagaataattgttcggacaagctatgtttgttgggggaaaaacagccatttcttaagactgcttatagatcagcttcactgaatataggtgctaatgacttctgtttatatattttcttttgaagctgttgcacttatctgctataggaaagagttgtgccatttgtatgttgcatatgataatatgatggtgaagtttcattgtttcccataattttgttatgttttctttgataatatagatacagatatgatactcatattattatgtaattttaaatgtgcttttatgccatatattaggggaagaa

SEQ ID NO: 9417 - DNA, 694 bp, Oryza sativa
  Intron number 5 from transcript LOC_Os01g64770.1 (locus LO C_Os01g64770) derived from phytozome v7.0 (chr-ID Chr1; po s 37580660 to 37581353)
gacgaaatcctgatcaggtatgctttcatgattgtggactttgagttttccctctattctagagtttagttttgtttggagtgatggtttgttcttctatgatatacgatattgtaataataagttttattataccaacctaacagagaatgagtttctgttacaagaaaaatacatggagaactttatcagttattactggtgcaagaaaaatgtgccttctcttataacagtaatcaatccttagcatgctccaaggtttttggctataagctggaagactaagttctcataactgtatgattgtcagtttttgttggcaaggtgtatatttcaggcattgacacatgggatgcaggataaggcttttatttagtgtagctgctagatacagttttctcttgttttaccacctagcatgtgatagtcttcacatattacaaaaagaaaaaaaacatttttgtcaaaacatcttgatttcaatagcattattattttccatgtacctattcatttgtccccactgattgattagtttgcattccttctatctctctgctttctcttctgttccaactagatgtgcctattcttctttattcattcttctatctctctcctcttttctttctcggtactcgtctgctgctgggcctcaggaagaacctaaccgaattctgttagtaaccattca

SEQ ID NO: 9418 - DNA, 931 bp, Oryza sativa
  Intron number 1 from transcript LOC_Os01g51290.2 (locus LO C_Os01g51290) derived from phytozome v7.0 (chr-ID Chr1; po s 29489864 to 29490794 reverse strand)
ggtcgtctgcgtgctcgtgatccgtggagctggaggtatgtgcagtggtgtgctctgtgctgtgctggtctgctctgtgggagttttgggggcctccttgttggtctagtttggccaggatcatgcagttccgatcctgaatgctagagtggtttgcttgttagatttttgggttttgagctgccagaacccgagcctgcagcggaagtttcgtactattattaagttttttcacttgggtctctgattcttcgaattggatgggtgattgatgttgaggttgaggacgttgttgtgatttgatgggtgccctgattgtaacatctgctaggatcacagaatattgcagggtctgaagaacatcgccctcttaagcatacgagaaggaataagatggcacgtgtaaattagaaatacagatgcctcaattctatgcacctaaaatttgggggcaggggcgagtgttatgtccatttcgttagctaccttttttatttcctatgacaaatagagtgtttagctgcaaaataaactactgaagcttatttttcagaaggggcataagacagacaaattcaaatggacaaacttttagaacataaatctcggacaaatgctgtaactttgcatgcactatatatgtcaactgataatattttcagttttagttgccatcttattagtttttaacccaaaaatacaatgatcatggacatcactgatcatttttgaccagtcgtattttttgttagcaattcattgttaagttattgcccttgaacaaagctcttgccacttttatattacatttaagctccaaagacaacccattcgttctattatattttggtttctggattatggcttgctatgctgacaaattgttagctattctgttcatgttttgttttcaaaggtttgaagcaatatc

SEQ ID NO: 9419 - DNA, 876 bp, Oryza sativa
  Intron number 1 from transcript LOC_Os01g26320.1 (locus LO C_Os01g26320) derived from phytozome v7.0 (chr-ID Chr1; po s 14923991 to 14924866)
caagagctgtccgattgtatccttctcttcaagaggtactgtatttatgtgaatgttatatcgtttcttacacgtatattctatatgtctccagaacatattatcttgcatgcagtggcaattgctttcatttgatatgatataatattaatgcatccattctggtgatttgattatgtttcactattttcaagagttgacacattcttccgttgggtgttagaacattaattttatatgagaggtgaaattaacgcacaattagtttagaaattaattgtgtgtctgattaacttgtacagtagttgtgttggaattttagagatatattatttctccagctttcagtagaagagttggttttgtacttcttgacataatgacatttacggtgtaataagcatgtacggtgtaagatgactgattcatgatgtgatggtcttatatatacacggttagtgggatgaatccactaagcatgtgtttttcatgaatgacgaattgatggacaaacccaatcggtttgtcaaacaaacatgtcaagccataggtatacgtattcacagcaaatttttagacattaaaacactcgtacatctaacaataaatgttactccctcagtctcaaaattcccaaaatatagctacttgaggaagtacattaattggttgtatggaaagaacatgcatatatatgaattggttgactggttgttttattatttccattaaaaaataaacagtacattttagtcgatacctaatttttagccagaaagataaaactagcattaactttcccctgttaacacccagctaatttcttttctttgcgcttcattcaggaaaataattcattagggcaatatctgctac

SEQ ID NO: 9420 - DNA, 871 bp, Oryza sativa
  Intron number 1 from transcript LOC_Os01g36640.1 (locus LO C_Os01g36640) derived from phytozome v7.0 (chr-ID Chr1; po s 20327190 to 20328060)
gccggctgctagctacaacgtccacgaatctggccgtacgccctcaaatccaaacgtttgaatccttgattccatcttatcttacgttaatatatgttgaccccggaaattatctcagttctttttatgcatttgttgcaaattacactaaccaactaatctgggcattcttatctagtactccaatagtgccgttcgtctccatctcataccatccaaagttatggtatttttgaaagggtggaaaaatctgtgctatttttggttcaggtgaaaaagggtctccatctttttaaccaccttaagcacttagcgttgaaggtgccctaacaacgtgtcggtgggatgttagtgcgccagtgggatgctagttggcgacagacgctccgttagctggcgacctgccgttctgttctgtagtgccaacttgttctttttttttggttcaatttttagatataataagacttctacatagagtaagtgcacatgcaaaacgagacaaattattagcatatgattgaattttaattatttaaaacttaaaaatagatttatttgattttttataacaacttctatgaagaaatttttcgtacgaaacacaccgtttagccgttttgaaaaacatgctaacagaaaccgagaaacatttatgccattggagtttagaacggagcctaatactgatactaaattgccatgctgtcggaaagtaggtgtagctggttagctttttaaataatgtgcgtctccaatctcaatctcaattccttccgcacatggcctccaccaaaacaatctacaataaataaagaaggcaaactcacctgcagatatccacttctactctgtggagatctgaatcaag

SEQ ID NO: 9421 - DNA, 442 bp, Oryza sativa
  Intron number 1 from transcript LOC_Os01g01040.2 (locus LO C_Os01g01040) derived from phytozome v7.0 (chr-ID Chr1; po s 15942 to 16383)
gcctcgactgcatctacgacaccacccactgggcggttagttttctttttttccccttttttttactaataacatcttgtttcttacaaatttcttttgccctcgccgaacttagattttcatcaaggccaaattaattgcttttgagtccttctactcatgtcgaaattgaggattgctttgcttcgcttgttaggaatctcctctcctaaggaacaagtttttgctttgctactactttaatttcttatccatcacactccttttgccgctccttcctacttcggcacattgcactttcttaccagtattagatattggatatggatattatacattatacactacgaacactccttatatccaaggaaatttattttctgcactaatttctacttttccaagttgcattgaatattgatgtaccttgccgtactgtagg

SEQ ID NO: 9422 - DNA, 999 bp, Oryza sativa
  Intron number 2 from transcript LOC_Os02g52140.1 (locus LO C_Os02g52140) derived from phytozome v7.0 (chr-ID Chr2; po s 31913363 to 31914361 reverse strand)
caaggtggtccgccgggtgtgctcactgcctgcctaatttttactgatgcttttatgtttttcttgttgcgatctgctatgttcatatcggcctcattcgatctgtattgtgaggatctacgtgtaccctaggttagatgactatctgatcaagtttaaaacttattaaggtccctcaatttcgactaggttaacttggtgaggttagatcgatcggccgttaattcgtgccctactctgatagtctgatttaggaattggtacttccgagttccaaatatgtatatttgggttaacttttgctacttaacatttcaaccacgatccaatctgcttgaatataaggtttcggatttcttcatttttgttgttgactgtgcccttatattttgggatatacacatatttttacttgttagtccatgtggctagaaatctcagtctacccctatattatcatttgagtgtatatatctggacaagtcatggaggttttggattaggggcctgttcactttgatgccaaaaaaaaccttaccaaattttggcattaccaaaattttggcaaactatgccaaaattttggtaggatttcttatatagttgccaaattttggcagcaaactaaatgtagcctttttttttttgacaattttaccaaaatttggtaaggttgaaaatgacatcaaaatgaacaggccctaggatttactttggttttgtcttcaaatgattagtattatgggcctgcttgccccgctgcctgcaccaggttcgctggctgcagcagctaagcagcagcaagctgtgaggcagcaattcacccataaaacacttcaaacatctatatctgaatgtgccttgacccgatgttctatttcccacattttcagttttctgataggtactagttggtaagtttccattgcaacttctctaatgctattactcttttgttttgtaggaggagatcctagcgcgtctacagctgaggcaaag

SEQ ID NO: 9423 - DNA, 964 bp, Oryza sativa
  Intron number 2 from transcript LOC_Os01g43500.1 (locus LO C_Os01g43500) derived from phytozome v7.0 (chr-ID Chr1; po s 24904121 to 24905084)
acgatttctggtattaaggattagggatgtcaaacaaactcggtgtaaagttgagggacggcaggtgaacttattcctggcgtgcaacgagtgtgtccattatgggctttttatacagggccgcagaaaagtgtacataagcccaacactcgcggttggacctcaagatatctaacaaacaggggacctttccccttggcgcccaacctgatcaaactccgagggccgtcatggaatcagaactgaagtactgaagttaatgaggtcatgtttagttgacaccaaacttcccccaaactcccaactttccattacatcacatcacatctaaaacttgcatactcacataaactactaactttttttccaaactaccaactttccccaaactttttcccaatttcaagaactaaacacagcgaaagttggaatatggaatccaatggtggataaatccacaagcgaaaatgataaattctgtagcgaagaagatacatgaacccgaagacgtcgtgatgctgaaacctcaaagcctgtactggccagtctactgaactgaaaccctgttcagttgtccactgacttgtagacttcagtgcacaaatacaacaccagtacagcacgcgtctgactggattgcaagactcataaaccgaaattttgcccttcgtgtggactggccaacgtcagcaagagcactaagtccagctccaaaatacataagataacaattgttggagttgcttaatcccaactattctgcgggtccaacggatacagtagtcagcagtagtagttcatggcttcatgggattgtgaagacgtttctttcttctctggttcgggaggtggtaggaacttaggatccttgtacgatggtcaccgtttggagcaggacccgcaatattgtcacttgccattatcgttgcctttgactgaacaggttcagtcaggcgatcgcagg

SEQ ID NO: 9424 - DNA, 808 bp, Oryza sativa
  Intron number 1 from transcript LOC_Os01g61720.10 (locus L OC_Os01g61720) derived from phytozome v7.0 (chr-ID Chr1; p os 35711338 to 35712145 reverse strand)
aaggtgagcggctttcggtggttggttgctttgaggtgaaagctctctcgccttttctcactgtaaaaaacggcatctttcttttggggttttgcgttgcgtcccccggttttggcgttcttcctggctgcgcgctttccgtggctccgctccaggtgaatccagggttaatttcgctgcgcatttgtgatgggatttggccgcaggtggcgagggtttgtttcgggggtgggggattttgtcagtctgggttggtgtttgatccttttggtttgagaggttttgccgctgccagattgatcgagcgaggaaggagaacacgcggaactaggataatttagtggtcaaagttttgcccttttttgtgagaaaggtagtaagttgtggtggagtttggcgactgacgttaatcgtctagctccaaaccatggagttcggttccttgcttctttttttactctgatcggtttaaggcttttgcgtgctccttttttgtcaatttttggtggccatgctgattttctggtaaaattaaatctttgattttacgagtggggatacttgaccggttgggtttgaggcagtatcataatactggcagaacttctgatctttaacacatcttactaaaaaccctcttttctgtgcgcgaccatgtcgaactttttaattctgcagaaaaccatagattttactggtggttatatgatttcagctgatcttttacagccattcgtgtcctgaacctttggtgtctgctctgatgctttcaggctttagctgaagacacaataaaggaacaccaaaa

SEQ ID NO: 9425 - DNA, 1000 bp, Oryza sativa
  Intron number 3 from transcript LOC_Os01g08750.3 (locus LO C_Os01g08750) derived from phytozome v7.0 (chr-ID Chr1; po s 4389150 to 4390149)
cttgcgaggttgtatgatcttctaagttaccaagacaatactgatttgtatacatgcaaatgccatcttctaagaaatataacttatccaaacagtgttatgcaaagttcatgtttgacccttgatatattatcaaggtataatatttaattagtgtcagtatgattatgccataaatttgttaatttcaaaaaaaaaacatgcacatcagttttattccactcataaagtgactaacttatggaactcaagtaacatgcactcaacttgatgaggtgtcggtgtttaaagtggtggcttatggaattatggaacaaatcagcttaataaaaaccagttgatttggagtattgggatttcagtccttttttggttcgtgcttcttgtggcctatgggtaacaagtatctattactcttgcgcataaccttatttatttcactgcagtattggaagaaacaagttataattgtataagatctgaaactcactgactcacctgtatttgctttaaactggccagtgctggctagtgccctgttgattgtgaaagaatttgctagtttccacattctttgcatcatatattagtaggtttatactgagccactttttaagccattgcttatatagagtgaagtgaagaaccaatttcctcatttgaaaactagaagttatccatctttgtcagtcttgcgttgtatttagttcagtattcctagtgttgttaactataagttactgacatttgactgtggcctgtgggttgcttgaaagtaatcaaatttgcagaatactgatatgcatgagccttcgttggtattgatatgtttgtgttatcttatgtaaacttaatgtatccaggctacttagctaccatcagattgactatggtttggtttgaattttactgttgtatgctgttcccttgccgtctctgaactttccatttcaaatgttttgcaggttgaactcctaatactgtcctaccacttctacat

SEQ ID NO: 9426 - DNA, 329 bp, Oryza sativa
  Intron number 2 from transcript LOC_Os01g55570.3 (locus LO C_Os01g55570) derived from phytozome v7.0 (chr-ID Chr1; po s 32013847 to 32014175)
tccagagttcggtgagttttttttatctctactaatcaatttgagctttgaggtagatagtaagttcaggaaccctgatgacattggcaatttttttttctgacgcaagttcagaaagcttcgttgtacgcacttacgcttctgatcagctttcacagtctgctactttacctggagtaattatgcactgaagacaacttgataccataaattgttctgaattgtgtttgaggcacctgattatgtatggaggttctcatcatacttttgtttcctgaaaaaaaactgaaacagttcagcagtcctgaagacctctttgctctagctgg

SEQ ID NO: 9427 - DNA, 506 bp, Oryza sativa
  Intron number 5 from transcript LOC_Os01g55570.3 (locus LO C_Os01g55570) derived from phytozome v7.0 (chr-ID Chr1; po s 32014465 to 32014970)
ttcatatatcaaaacctactattcaagccagacaggtaactttgtaatcgccatatatcacacttgcaaaagtttacatggatctgtttgagaaatggctccatttctgtatatttacatagcagatgcttccaagcttgaaagatctaacttgctttgtatcattaacaagcccttagagatcttactttttttgaatcattgatgagaagatactgatagtttgatatactttacgatgaagttttatggaactttcacatttacacacaacataacgtcaatttctttttggtttgctgcactatgcctgcatacctgcatcattgagaatactggatatatattgaactggcaccgtactgacactttataatgcagctcgggacatctgtattatcgttctgagcaccatagttgaagagtttcttttgttgcactttctttactagcccagttgtttttctgcagggaaaagtttctgaacaacatcaagagttccgtat

SEQ ID NO: 9428 - DNA, 956 bp, Oryza sativa
  Intron number 1 from transcript LOC_Os02g07210.4 (locus LO C_Os02g07210) derived from phytozome v7.0 (chr-ID Chr2; po s 3708799 to 3709754 reverse strand)
agcaaggtgcgggatagccacctgaagttggattggttggttcctttcagttaacccttctagttttctggatttctttgatgcgtgcttgttcttgtatttgtagcagaactagcagtttctgttaaaaagaaaaaaattggggattcagttgaactcccatgctccaatgttaggtctacccatcatctgtacaactttttttgccttgtagttcccggaaaaatggtaattttgtgggtgtcctttttgtccggtcagggagtccgttccaagttgcaagctcagatccatggcttcattggtacagtttttgtgtggtataattcttggacggttagctaaagcttgggtattgttcagagagttcgtagtttcctccagtaaatcggtagtgcaaggaggcgtgtgaaatttttgcttctctgaaaatatcagatttatctcgtttgattagtagtgttgccgtgtgaggaacgggccttccagttacccagttgacaattgtctcgttttcttggaaattagttgccttatcatctggcattctggtgcatcgtttctactacttcagttctttgcgtgtccttactggtttataccaatgagacaatcaatggcatttgtagctcagcgagtttattttgcaacaaatatgctggatacaagaaatcatctggtggagccagatgtgtaatatgtttttttttttgagctagcagctgtgtaatatgtatgctccaatgttgatattagaatatttaggtaggtaattccagcatagaagccattcagtgttgtgtctgaacactttgctgtttgctaggagtacttgccatcagtttctttaatattgtacttactgtccatgttattatgcaaatgtatgctcttaactgttgatttttttttatattgcagcactgattctttcctttggaacctgcagccaatcc

SEQ ID NO: 9429 - DNA, 308 bp, Oryza sativa
  Intron number 3 from transcript LOC_Os02g49332.2 (locus LO C_Os02g49332) derived from phytozome v7.0 (chr-ID Chr2; po s 30145717 to 30146024)
atttcacttctagtgatcacccttctatagttcaggtaaaagttatgtggtgatgaccaggttaacagatgaagaacatttaattgaattcaaaattcagaataatgagatgattagaaaattttaaaacaaagctggtgtgttggctctaatcataattgctaacatataagaatgtacatgcacaagaaactttaatgggatatgaaatttgtttttcttgtctgcaacatatttgtggattctgctgatcaaagtgttctccatggctagattttaatcgatagtaacaaacaaaaggcagttga

SEQ ID NO: 9430 - DNA, 597 bp, Oryza sativa
  Intron number 1 from transcript LOC_Os01g68790.3 (locus LO C_Os01g68790) derived from phytozome v7.0 (chr-ID Chr1; po s 39953582 to 39954178)
ctcctcgtccctcctccccgccgccgccgcagcaggtacgtcggcatctcgcctcgttcctcttggattccggatgctcgttccccgacggatctggatgatccattgacccccttcgctggattcggggtcaaatcggtcgttaaggggaggggggggggatggttggttcatatgtacatgcgtgttgttgatggattctactcgttccaccactaggtagaggtgggatttgtttgttgttgatagattctactcgttccaccgctaggtggaggtggggatttgttctctgtatttggttagctattttgtaactagttatgcgattttcggcctctgatttggcttagatccatgcatgaaattggtcaaatcgtttgatttgttatgatttgtggttcgtttgtagttggtcctggttggtttagattagattggtcgaagaccgctgtgagatgaataatcggcggaaaccattttttatggtagggtttccccgtaggccctggattgtttggctgcttatgattaaaaatcactgtgtactgatggttaacaatgcgcggctacgggttttcgcagatttaatcctca

SEQ ID NO: 9431 - DNA, 899 bp, Oryza sativa
  Intron number 2 from transcript LOC_Os01g66420.2 (locus LO C_Os01g66420) derived from phytozome v7.0 (chr-ID Chr1; po s 38568456 to 38569354 reverse strand)
tggagaagttttacaagctctgcgaccctggtgagtgcgcgccggtttcgatctcttcgtgttcctcgccccgggtgggggattgggagcggaggagctttccgtgtttttgctgcttcgttttgtttgctcaagtgctagattggatgctaaatttggaaaaaaaaaattcgctctttctccactttggtgcttgggttggaacttggaattattggtgattctgtagttttgatcaatgctgcgctgtgttgtagttgttggattctggtaagagattggagctcgggactccagtttcccaaggaaaacggggagaagattttgggggttgattggaaactgtggtggataagttggtaggtttcgtttttttgctgggttgctatcactggctgctgccattagagattgctgagaattttagtcctattggtgccatgggattatcgagtagttgacttcggcgtgtttggatgccctatccatgcttgtgtgcgcgtgcccttgcttgtttgattcggttttattgcaacagacaattcagtaaaaccgtagcatatgatgcttggataatatgctactaccgagttggaagtgtatctttcattgcatggatggtactgtgcgtctggttgtaatacgtggttggttgcttgtgttacttaccctatactagtaattaatgtctgatctgcttatgtgctattattaaatgttactattatgacttggtccgcagtgctgtctacttgagccttgcactctcgttagcagctgggcatacatagtagtagagcaacttctaagctctgaacactattactcagcagattgttcgtagggtttatgggtactaattcttctgttttgaacagaaaaggagaacttgtgccttt

SEQ ID NO: 9432 - DNA, 427 bp, Oryza sativa
  Intron number 1 from transcript LOC_Os01g66030.2 (locus LO C_Os01g66030) derived from phytozome v7.0 (chr-ID Chr1; po s 38322195 to 38322621 reverse strand)
ggcaagctctacgactactgctcccccaagacctcgtgcgtccccccctcttctcctccccctggttcttttgcacataatatttttcagtgtactctttgtctagatgataaggtatatatgcaagaatcgttttgatgcaacaactaggttgaagatttttactctactccccaaaaaaagggaaaagggagatttttactctaccaacttgccaggaccggaactgtgtttttgtattggttaaagtcagtttcttttgcaggaaatgccatgtccttactctttttcctaaaatcggttttgagttatgctgatatagtatcttgaaccactcgcatctgttgcactgacatgcttgattaaccttccaatggtgggacatgtataaggctatcaagaatcttggagaagtaccagaccaatt

SEQ ID NO: 9433 - DNA, 631 bp, Oryza sativa
  Intron number 1 from transcript LOC_Os01g72090.2 (locus LO C_Os01g72090) derived from phytozome v7.0 (chr-ID Chr1; po s 41823274 to 41823904 reverse strand)
gactccggaccaccctcacccctcacccctcccaggttcttcttcttgttgttcttcctaccttagcatgctccttgcagcaaaacaaaatctagctcatgttcttgcaacctagtagagtctactgttagctacttggttcaaatactggtgaactactaggtgcccttggtttgatgatttttttttctgtctgaaaaacaaaattgtaatagttgtgagctagagctaccactacgaccatactgttgcgattggtcgttacctgatgattttttttttttgctattgtagaccagcactgggaaacctagctttcatatgtgaacaaattaatcccttgtaaacaatgacataacctaatcgttgtttctttagtcgcaaccaagtgattgtgattacttgtttaatcttgtgaagaagcaggctaccaagcatagacatttgattgtgcaatttatttatttatagtagtatctatcagagctatgtcgcccaatagtggcagctagcttcaaccatgtttctaagccctgtctcaggctgtcaatatttctgtctcatgtaaatgtaagtagttgaccttgtattgttttatgcttccaggaaaagttcaagtctataaaaccca

SEQ ID NO: 9434 - DNA, 571 bp, Oryza sativa
  Intron number 2 from transcript LOC_Os01g70160.1 (locus LO C_Os01g70160) derived from phytozome v7.0 (chr-ID Chr1; po s 40607746 to 40608316)
gcctaaggaattttttccacaacttttttggcggggtaaagttatcctatgttgtttccagcattttgcattatcttcccaaccagttgattgaagtgccacacctagtagattcatcacttttggttacatgacgtgttagggaaagtgccaccttgctagcttatggttaggagtttttagtataagatgtcaccgccaatatcttctggttgaaaataattgcatcggcagtgatctaaagaagcaaaaaaattcttttgagagaccataagcttttgagctttttctctaccttgcataagttttgattgcatttgatcgcatatatatgttagattgacttgtgatttatggtctatggacattctttgggcatattcaaaattgtagtagagagaaatcatagatgcaatatgaaacatagtgtggctaattgctattttccatcgaacaatcagattgtgatatattcattttgatcactggatattttgttctaacaatattacttccattttcttttatctatgcagtatactgccacattccagaggctcgaatctagacc

SEQ ID NO: 9435 - DNA, 706 bp, Oryza sativa
  Intron number 2 from transcript LOC_Os02g45200.2 (locus LO C_Os02g45200) derived from phytozome v7.0 (chr-ID Chr2; po s 27431453 to 27432158 reverse strand)
tgggttagtttctgtcttctccattggcttcgagctgagggctcttgttgttgttgtttggggccttttaattctcttgctccctcctctccttccccttttaatccttgaaaggagcacacgacgcaccgcttttcttttcctttgttcctcgctttctttcttatcctccctttcctttttatcttttcatctctcttttcctcatggcttttctctccacccctcaccctttcgtctctctcctcaagcccacaccttgcatcaaaagagtagccatgtcttggaggatgatgtagtagcagcagcagcagtactgctacgccacaaacacaaccctacaagagcacaaacaaagttgtgtgttttgtgtggtggtgtgttttctctctcatctttactttgctttttttttcccgctttatttctatctttcacctttccctcttctagctttaatctcgctttgtatccatttgcttggttctttgttgcaccataaggatcctagctcacatcacacctcatgctcattcatcttcccccattcgtctctcatatactacatgttcttgcttcttggttcttgctaattgtctagtattgcataacttagttctaggtttgtgttgatacttgcaattgcaacatctaatggagtgcaacgacatgtgtcaatcaccaggggctagggctagtgaagccc

SEQ ID NO: 9436 - DNA, 1004 bp, Oryza sativa
  Intron number 1 from transcript LOC_Os02g01730.1 (locus LO C_Os02g01730) derived from phytozome v7.0 (chr-ID Chr2; po s 405118 to 406121 reverse strand)
catcgtctccctcctcgcctactccgacgaccacggtacacgtcactctcctctctcctactactccaactgcttgaattatgtgtgttttttttccttgcacaaattattgaagctttgactctaagcttacgttacctcgtctcggtgtggttaaaagtcttaaaagggaacatcttttttctgttcttcacttgctttacactgcatctgcatgcaactctgatgctagctactccagcttgctgcttgctatgttcttcactttcttatttatttactttgcttaatttctttctcctcttaagatttgttattaagttagttcaatatgaatactactagtatgatgttacatttcacctcacaaattaaatttcaaatcgaccgaataaaacatgtgtagagaatggcatgcgtacgtcgtacggggggaaaacaataagaagaagaaatggagattacctcctacctaccgatcgattaagaacaaacgtcacttcactgttgcctatttatgtctagtacgttaacgagtaacgacctgtgttattttcgtcccatttcgtcgtccaaaacttaactcaacacgatcgctttcgatcgtatatatcattttaatcctaattctaattcaattttgatccccagatgaatgaaattgcaaatccccccaaaaaagaaaaagaaattgcaaatgattttatacttcatctaattaacctgctacccctccgttttatattataaatcattttgatttttctttgttaaacttatttaagtttatatacaaaacataaaacaaacttgttatcaaaatatatttaattttattttaataaaactattttggtattatatgtatgtcaaaatgatttataatattatacgtttgttactaagagagagattttttgttaattaaagagattaattaattaaaagaaattttattactgcgtgcagaggagggaggtgcactggtcctggagtacctctcc

SEQ ID NO: 9437 - DNA, 888 bp, Oryza sativa
  Intron number 4 from transcript LOC_Os02g44910.1 (locus LO C_Os02g44910) derived from phytozome v7.0 (chr-ID Chr2; po s 27204456 to 27205343 reverse strand)
gtattgctttggaagatatattactgcttgtttaggtgagctgttttcttagacattctaactttcattgccactctcagggtgctacttgcacttatacatttagttaaagattgatctacggtctactctttttgcaatagatctgtcacatttatgatgttgctatgatgcaccaatctttttttcccattttgagggaacgtggggatggatatgttaaaacaatgcaggtagttgggttatgtttggtttgtggcctgtctaaccccatggactttgtcaatgactagctacatattattgtgctttcaatttgggcaaaactttggcaggatgaccaatttatgggcattcataaatttttcaacacaccaagtaacagaaacagacctttggcattggaatgaggcatgatttcatttatggtcctttatatataatatgtacctccataactggatacaggttttccatgtatacagctagtctatattcaccccagaacaactggaactattgttcgataaggttatgcaaaggcatccaccattctatctgcctaaattcctgagataacagtatcgttgttatcaaggattctattcgagggaatttacccgagagaagaggcttaataaaatgaacctgtgtataactactaaaaatgtcaccttggacaaacaaacaatgcatccctatgtatattttcccattaattgcttttttatacaaggaaagtaggattaacatgataaaaatactatatggaaccggttcattaataatttggaagctctccatctatcgctcttatttaatttgaaaaaaaatgtatatattttgtatataggtggtgaagaaaggacaattgcatttttgaagagg

SEQ ID NO: 9438 - DNA, 732 bp, Oryza sativa
  Intron number 4 from transcript LOC_Os02g30840.2 (locus LO C_Os02g30840) derived from phytozome v7.0 (chr-ID Chr2; po s 18381404 to 18382135)
ttgttacagtttgcaaacctgcatctgttccagtgagttcatatcattttgttcagaaaccttcaaatactatgtgatgtataaaaaagatatacatgcatgggccatcctttttataatataactgttttcactttaatttatccttaatattaagtcttccggaatttttttggtcacttagatccattagtcaaaatatgttacctgaactttgtaagtgtaaggttgtatcgactattcaactatcaagtctaaagttataggttcatagccaacatgtgccctgaaagttatatgttaatatgtgatacggattgtttgagctgtgcgaaacatctgtagaatggaaactgtcaaggtacacgcatagctactataggattatgtgattttgaagttattaaaacattctctaccagatgaaattagtacctaaggttttccttcttgaattcataaatttgttgttaagtgtgagatcttattctggtagcagttaatctgaacagtttggttgaatgatgtttctggcctattaagatcaacaacacctttgagatttcagtagctttggaaatgcaagtgttaattccattgtttgtaaggtttagttataacttgatctggttcagctatatttgactgtagtcgtttattgttaactacaaaaaatggaggtgttttctttctgtaggttcatccgtgtggtcaataccgcaagaatactgt

SEQ ID NO: 9439 - DNA, 871 bp, Oryza sativa
  Intron number 1 from transcript LOC_Os01g07420.1 (locus LO C_Os01g07420) derived from phytozome v7.0 (chr-ID Chr1; po s 3516472 to 3517342 reverse strand)
acatccccgacttcctcgtccgcgacctcctccgggtacctacgtacatacatacgtatacgtacctcaccgtatacgtatacgaaaactcttttaataacccgggtgaatgttcacccgttcattgcatgtcgactaaatatatttataaaaattttaaaagataatgagataaattaatatgagatatatcatctcacaggcatgaaggtttatatttgttttctgtatataactacaacttaataacaaatttattattttctattataatttatagaagttgaatttaaatttgagagtggtgtatctatcttatcattctttttaatttttttcataattatttagttgaatgggtagacgtccaccgaatgattaaaccgttctcattacgtattctgcagtggatgccatgatagtgtagtggactcttagctaagctaggaatttttggatttgttggcgagttgtcccaaaagctagtagactagtagtagatgactaatcatacaaacatcgtccaattaaaatcttttctaccgacaaatttggtggcaaatcatatcacccaccggcatatcgcacttttcccgccaaatataaatagttgcatttacacacgaaaaaggttaggactcgtctccatggcgtgagcgtgacgtcagcatcttgcattcatgccctgactctttcaattcgatcggatttgcagaaattgtgtttcaactgtatgatatcaccgagaagattggatgcagatagaaattaagaaacgagagataactttttcgttaaattttgatttgcaaatttgcaaactgcgtgtggtgcagaaatatttcgcggacaaaagagaggagaagatccg

SEQ ID NO: 9440 - DNA, 706 bp, Oryza sativa
  Intron number 1 from transcript LOC_Os01g27760.1 (locus LO C_Os01g27760) derived from phytozome v7.0 (chr-ID Chr1; po s 15493885 to 15494590)
agttaaagtaagctttttcaatttctagctaatttcatttgttttttcatttacaattttagttttagcactatttgatccactaaaaattatttttaacttataatttttctctgtattgaattatttatagctaaatgaaaaaaggggatttagttatataattgttttaatattaaattatcattccgaccaaacttatttgtggtttcatgtcgttatttttttattatatttctttcatcatttatgccgaattatgatatatgattttaatttatgtcaatgaaagttatctagaatctattacaatacacaaacgttatgctagtacatataaatattatatgtacgtatatgcaattttgctgtatatttatcaacaaattttctcctaaaaatttgacggatgtaattacagtacaatcgtaatgtaactagtatgtaactacaatgcaacttgtatgtaacttttacataattttgaaccgttagatttgtttcaagatttgtgcaactaaagaaggaaaaatgtcattgcgcgcatatatgcaagaggattcgttcccacgacctcttcaccgaaatagcatgttacgaagaaatttttgaaagtgatatacaagttacatataagatacggtgtaattagatcatgattatactataattatatttgtcaaatttttagaaaatttgacgaaca

SEQ ID NO: 9441 - DNA, 677 bp, Oryza sativa
  Intron number 2 from transcript LOC_Os01g60060.1 (locus LO C_Os01g60060) derived from phytozome v7.0 (chr-ID Chr1; po s 34737855 to 34738531)
ttgtcactcagactggccattgacctgaaaacaaggtgagtaggattaggtctgccagaagtacagcaagagaagaatctatttgtggagcatgaatgactagatgctacagaaaaacaaaatccttaaagatagccttctgccatcaatactatgttctccttgggtagttatgcaacaaattgtgatcatttggttatttccatctaataacctaggaagattttttttatgaccaaattcatagtgtcatgtacaaagaatagtttcccatgatgaaaaggggagctgcaacagctatatctcatgcacgcacgatcaataattttagagagatgactccttcctttcctgcaggagcgaatccatgaaaaagccatgtgatgcacaggacaggcggaacttttgaatcccattaattttagctaatgttagaatgtaaacatagtattatatccatgattcatacaggacacctggtaatttttgtttttagattcgcccctgctttcctggaccatactttcctgtgaaattttccatgatgatgataaactaatggatgatattgacctaataggccaagatgacttggatcaaccactggagttgttgacacattttgcttgactaacatttgttccatttattctacagtttctgcactccaggcattg

SEQ ID NO: 9442 - DNA, 670 bp, Oryza sativa
  Intron number 2 from transcript LOC_Os01g15110.1 (locus LO C_Os01g15110) derived from phytozome v7.0 (chr-ID Chr1; po s 8476649 to 8477318 reverse strand)
aagctagcgaggctgatcatcgtgtcgaagtcagcgtaagtattctcttgcatctttgtccaagttgcttttttctcaaaacagaattggaactgtttctatcttgtatgtttgaaaccagaattatttcagtactcttcaccttttgcatcaaaatgaaatggaattgcaacatgtgatgctactttttgaaccagaaaaccttcaattttgacattttccttcaaagtacagaagagtgtaataatgcatattggtttggaaactgaacctacccagtccttatattctgactggaaacatcacttctaatttgggcattttttatctgtatcagtcttagttttgcctgactactgtgaacagtgatttgcctcagcacataaaacaaattgttttcttaaatactcaatatgctccagtcatgatattttcaagtgtgttgccatgccactggagaaataatctacaagcagattttagaatcatgtagagatcaaatgtagcatttgcatttcttatatgagctgctttatgtagtattgattgcctatgaatctatgatcattactattttaaggaacatttctatgttccatttttgctgatgtattacacaatgtgtgttgatgacctcgtttggaactacaggccagcaaaaagattgctg

SEQ ID NO: 9443 - DNA, 755 bp, Oryza sativa
  Intron number 1 from transcript LOC_Os01g15110.1 (locus LO C_Os01g15110) derived from phytozome v7.0 (chr-ID Chr1; po s 8477343 to 8478097 reverse strand)
acgcccaaggacacccccgacctccgcgagaggatgtgaggctccccccgcgccatactctctacctaccccacgtctgtttggttttggtttgatttggagcgggggtcgggggatcgattttggttcgatttggagcgggggattgggggattttgcgatccggggctccgattttggatgcgcgtgatgaattttgggggggaattgtgcggctccgctgcatgatttgcgatctcgattaggttatatgtttatgcggtcgattcgcgtgatgaacctatgtctctcatattatgtgttgcttagggatcgcttctccccttctcttcgtgatatctctcttattacgtgttgcttaggattgcttctcccttctcttcgtgataattatgtattagtgataattagggattcaatttggggagccctgcctgtagtttatctactagcaactcatgtttgggtgatagccgctgaacttaggtagaattgatgaatcatgccattcctggtatatgaatagatccgatggcctcgaataagatgttttctccattcctttctactgaaattgattcaatttatgccatgtatggcctggcatgctgtcttatagtgtagtaacttgtattatgccttaaccctttttctgtactttagactagttatttttttggtttgatgggtcgatttactttctgttggtgttgcttgcagacacaagacacgtcaacacataacacaactggtga

SEQ ID NO: 9444 - DNA, 826 bp, Oryza sativa
  Intron number 4 from transcript LOC_Os01g08990.1 (locus LO C_Os01g08990) derived from phytozome v7.0 (chr-ID Chr1; po s 4508959 to 4509784)
tcaaccagttactgtcattactgtagatcctgcaggtaataatggaggtctgtagttcccctactttgattgtttttttttctttttgaacttaaataatcatccgacctattcttaaaaaataatatataatatataaacccatgctaaatcattatttcttaaacatatataccgaacaaggtattccccatgtctcaaaatataaatatttttagaatagtgctaagtcaaatcatgtttgactattaatagataaaatataaaaaagaacaataagtaagaatagtgttattagatttatcattaaataaactatcataatctatcataatgtacaacttttttatttaaaatatcttattttttaaatatttttagtcaaaagtagtatctcaaatgcttatattttgggacggatggggtaattaactactaagtacttatttgcccccaactgctattatcataaattatctcaaagccaaattaagttatctttttaatttatgtcctccaaaacatataacagagataaaatgtttgtactatcatcttctagcctctgggcttggagccttggatagttggatgtcttgtcagttcgtacaaaatatttgctaacactgagtgaattagtttctttaaaaaaagatagaacagtgaattagtttctttaaaaacatggacatgaatttgttcaatgaaatcttttggggggatgcctgttcaacttctgtttaatctgcacctacatgattgcaaacctcttttttttttcctatttgcagttgtgacaacgttgatagcacctgctgcagctgct

SEQ ID NO: 9445 - DNA, 1031 bp, Oryza sativa
  Intron number 1 from transcript LOC_Os01g70060.1 (locus LO C_Os01g70060) derived from phytozome v7.0 (chr-ID Chr1; po s 40552535 to 40553565 reverse strand)
ctggagacggagccgtagcaaggtctgagatttcttctctcccccctcgcgtgctctcgccctccccgcgttgccccgtcgctcgctgctgttgaattctctctatgtttttttttttgctgatttctctctttgggcggttaaccgtggggggcagcatggtttcttgctcgctccgtgatgctgtgcgggattttagttttttgtttttctgattcgattgatgctgctggtgatgggtggtaacggaatccgtcctgggtagcaggatattttcttctttttttagagcgcccatgctctgattgaagtgatagagaagaaatttttgtaccgtgccatgtgtagtgcggcttgttttctgttctcttggtgcaaagttgcaaacttggttagttgattttggtcgtcaggcctgtccgagccttggattaggttgttgggggcagtatttaattaaatagtagtcaccatggttgcaggcttgcagccttttgctgctgctcatcttcatttacggctagcgcctacctagttctgtgccatatttgggcgctgccactatgaccatggcaaaaaaaagattagttttttattgcaccccttttcgaaggcctgggtaggactttcggtatgtgggaaatcaatgcttggtttgatgaatctgcaaatgactttgaagtggctctttctgtttctttttttttttaaaaaaatcgttcttctgtagtttgtaagatctcgaatgctctgtaaccacataattaagaactcaaatatgatactagtatgcattagattactcatcttagatggcttattttctcgtcaacaaaactggatttttcttagatatttctcactgatcaattccattctcattttatttgcaacacagagattcagagctaagtgccctgtggttcccaattactgtttcaatcaccccctcttgaagggtcacagttttgtctaatgtatttatgtgtttttcaggtttcttacctctggaatttgggggattctcaacg

SEQ ID NO: 9446 - DNA, 903 bp, Oryza sativa
  Intron number 3 from transcript LOC_Os01g62210.2 (locus LO C_Os01g62210) derived from phytozome v7.0 (chr-ID Chr1; po s 36006767 to 36007669)
gtgcagctcgggaaagaggtaaaaactgctacctgtgaaacattctcctgttgccatagaactataacctgaaaaaaattactgtttagtgccatccatgaacctatgtagagctttggattgccgcatttttttttgcacaaccgcgcacacagttctgtagtacgagtaactagtaagcatggatgagtacttgattagttccatgagcgtgacattttgtttactgttaaatttcgtacaagagatgaattgactattgagggatgtagggatgtgtcttcacaagaatggcagtatggaaacaatttactctctccatcttgaaatataagcatttctgattttgtcctaactcaaactatcctaagtttgaccttatagaaagaaagcaacaatatccacgatatcaaatgagtatcattagatccattatgaaatatattttcatactttacctattagacatggtagtagatgttaatattcttctctatacacttgatcaagaacaaaattagaaatgcttatattttgggacggtgtgagtaatgttttacatcgtggttttaatcagattcaaatgagttttctacttttgtattttattttctctcttcgttatgagatggttgaaatgttcaggtcatatagctaatcaatgattggttgtctgataaattgtctcaagtttctgttacatactaggcgatccatctgaatgatgtcttcttgttttggagtcgatgctacataagccttcctgtgattgtgccattctgcatgttaccttaaacgtcttttgatctggctggaatgttgcattgatttatttaagtctattcttaaaggtattcgtccagaaacttatcttttatttgcataaattatagggcacattgg

SEQ ID NO: 9447 - DNA, 1027 bp, Oryza sativa
  Intron number 1 from transcript LOC_Os02g38350.2 (locus LO C_Os02g38350) derived from phytozome v7.0 (chr-ID Chr2; po s 23179486 to 23180512 reverse strand)
aacccatcgtcaccagacgaattctccagtacgaacgatcggacactgaatctttgctcaattccgtgctgttttgattcctttactggcagctgagccggccctcaatctggattttcccggaggatttttgggggatttttttttcttttttgtggggataaggagttcaggggtgagggggaatctggtggaattggatcggtttttctgatcttgttgagccgatctgtgtgggataggaaaggttgctttttgttgttgttcttgggttcttggtttgataggagttggggggattcggatgctgtaatgggggaatttgaggcggcggatttgggagattttgtgatgcgcgcggggatcggggatggtggaactgtagactgtgtggccacgatcatcggatcatggatcgatcctcttgtttccgcttcgctcttcttctcatctgttgatcgtgtcggagatgagcggagagaaagatcattgtggtggagactgatctgtgcgttgatcttgctttggtggcatgatccggggtcaatccatggatttgtcttgtgcgtgctagtctcatctgcagttcattctgatggcattctttttgtgggggcaaaggctttgctaatttactactgaatgaaaatttttattttttatgtgttgtttgtgttgtttctgctattaactgtttttagtagtattgagttccactgtaagatggttcctgatctaacaagggttcatgtgtgttgttgtttttggattgaggttcaggctttctcctgtccatgcgctatctgacgaatatgtcactctgtctactgcagaacacagcttagaaatactgaactgccaacatgatcgaataattcaatgcttcctttaatttaacctccattgcaaatgatttgcttattagtgatgccggggtttgcactataatgtgaagtagtagtaatttgcctctcttcttttattcttgtcagactgagtactctgctcccataatcctatttatcca

SEQ ID NO: 9448 - DNA, 382 bp, Oryza sativa
  Intron number 1 from transcript LOC_Os02g39810.1 (locus LO C_Os02g39810) derived from phytozome v7.0 (chr-ID Chr2; po s 24051352 to 24051733 reverse strand)
gcgagctgcctttcctaaccggcacgcctaaggcggtgcgcgtttttcttttgctcgtaatgatatgctttgatgtagtaacagatgcttgagcttacttagaacttttgtttgaacaaactgaactgtctcttcgtgggcatgacgagtgaaattatgactttagaagtgatctagtggtttacaggggcaaaattgagtagataataatatataccatgtgggtgagaaaaaattgtaaccctgatgcttagactggtaatacatttttagataagtaatgcagcagtttgaaaacgtattagaacatttgaagttttgaatgtgttggttgtgtccttgtgttttgcagattttatttcctctagttctaaattcttag

SEQ ID NO: 9449 - DNA, 846 bp, Oryza sativa
  Intron number 3 from transcript LOC_Os01g03020.2 (locus LO C_Os01g03020) derived from phytozome v7.0 (chr-ID Chr1; po s 1152417 to 1153262 reverse strand)
ccactgaacggaacatcaatcgattccgctcacaggtgtcatatttatattttgaaacctttttaattgatgtcacggtagcaagtaaactgaagccatcatgctttcatttttggttagcaattacatatgttactactgtattttggtggtagtttttcactaggttgcgttaaaaaaatagagcatgtttgctgcatttagcttctgctactgagttcctaatgctttatcagttcatccatattgcaaaggtggagtaatactaatcaaccataaaatgcaggttatatgatgtaaaataattaggtaaatcatacattctgatgcttgctttgattgaccatactgattaattctcatcaggaatacccatagttcatagcctgagagcctaatgcagtgctgaagaaatacttgatttgcatcagtagcttagtttgccactaatttgctccttcattgattaccaatcgtttatttggagcatatgctttctggtgttgcagctcaaatcgttaggtttttcatatgactgggatcgtgaaatttccacaacggaaccgacttactacaaatggacacaatggattttccttcaactactgaaaagaggactggcctatcaggttaatgctactagtatccttgcttgtccaattttttgaattgcaaacatgtcatgtttattgtttgatacatttcctgtttcgcatctcctttatttgaactgatcatctgctctgtaccattcattttaggattctgttatgttcttagtgttgtatttgtggttttcaatgatttttaggctggcattgctatcttacaatcaggctgaggtac

SEQ ID NO: 9450 - DNA, 848 bp, Oryza sativa
  Intron number 1 from transcript LOC_Os01g59440.1 (locus LO C_Os01g59440) derived from phytozome v7.0 (chr-ID Chr1; po s 34378361 to 34379208)
gtcacctgcgaccgcgacaaccgcgtcacgcgcctgtgagcgaccctctccctccctccctctcctcgcgctgcgctgtactgtacgcgtaggctcgagttgggtacttttgggtgtttgggggaactggatcgcgaggcaagccgtgtttggatgagcagtcgattccgttgcggccgcgttgatctagaagactagtagagctgtagttcgttgatgagaggagaaaccgatccacgaggcagcctttttagagttttactaggatgtactagattttgtaagaattttgctatggaacttgttgagattgtgtggctatgccgtgatatggctttacagttttactcaaaaggcaagtgcgctttttttattattggaccgaggaaaaattggaatggtcctgagcaaattgaaacatgacaagaatcagatagatgtatctcttttaatgagagtgttattaggtttcttggttggttgggcggttggggtgttatggttgaagaatttagatgtgagaggaatgataaggaccaaaggctagagaaaattttagcttcaattgcttacccatttgaactttcacagctttcatttcttctgtctgtcatttgtgttccaaagtccaaacctccaaaacacttactgtgcgtcagttcatgaagtaaaaaaacaatccactttactattaatctttttcagtgtggtcaaaatctatggccagttccttgtattgtatatgaagttgaattatttctcaagaacatcttcttctaattgttttcttggaatacatccctcttctaacagggatcttgggaatttgaacttatctggtcatctgg

SEQ ID NO: 9451 - DNA, 918 bp, Oryza sativa
  Intron number 1 from transcript LOC_Os01g32364.1 (locus LO C_Os01g32364) derived from phytozome v7.0 (chr-ID Chr1; po s 17755463 to 17756380)
ccctagcatttgggacgccttcgtcaagactcccggtgagcaaattaaggaaccgttcattttgatgctatttttatcaaaaaaaaatctatatttactttgttggtaaatttggttaatatatgagaaattctgctaaaattttgacaacgttaatatcttgccaaaattttggcattcaaaataaacaagctctaaacaagctctaaacaagctctaagctgcatatatgcaggagccccctacgttaaatttaggatcatcttcacttcactcacaaggatatatgtacagtggcaacagttctgttatcaaaactgattacagagcttagaacaaacaagttaaaaactccctctgttttatattatttttgtattataagttattttaaatttgttgaagtcaaatctattctagtttaaccaaatttatataaaaaaatatatcgatattttcaacacatggtaaatatactataaacatattccacaatgaatataataaaactaatttggtgttatagacgttgctatctttttataaaattaatcatatttgaaaagagatttgacttacaagggacttataaagctgtaatatgaaacaaagggaacggaacgtgtggttcttttaaaataaaaggtgtagaaggcatataacactggtattatgacatttctgccctataaataggacagactgaaccgtattgaattacccttaagtacatgaatcatgcttagtgttagaacacgtataacatttctttttgttcagaaaaagggagaacgatcgaagaacaacagagcaaagagcgcctctaatcctatatacgtgtacatgcgaccttgtgagtcgtggtgtaaagactgactagagtttgcttatttttctgaccaggtgaaatagcaaata

SEQ ID NO: 9452 - DNA, 1016 bp, Oryza sativa
  Intron number 1 from transcript LOC_Os01g58730.1 (locus LO C_Os01g58730) derived from phytozome v7.0 (chr-ID Chr1; po s 33949465 to 33950480 reverse strand)
cttcgggttgctgctctgcggctgctcggtttcaggtgagtgaacgcatcggttgatctacttctctggtgatcagttagtagtagctagattggttgttagtagtagctactagattggtgttctctcttgtgtttatcagtactccccttgctgcgccgttaatcagtttcgagtatatttgcgatgcgtgaaaacttctctgaaacgcggttgatttcgatcgatcttagtgggaatgcttcttggaaattgttcttgtcattatccggttcctctctgttttgttcattgtgttattggttaggatctgccataatcttctctaaaagcggtatccttggaatatctttgcatgcattcacgggtgcaccgttggatcaagcagagatatttagatgtggtgtttctttaccggatgttttgttatacctattatgagtaaattggttcccggctcggaataaatcccagtctctcattactctatcataaatttgttactatactcctcattcccggtccggattgaatccgcgcgtaaccgaacaaggccttactggggatacaatggaaatatcttggcatctttgtttctctgtcaattcaaaccaccgtcttcaattcgtttcaaatcttttgaagtgtggtcgatctctcatggtcaagtagaaccgacgggacctaatgtttggttgtagtacaatgcactccttaattatggatggtaacttttgatccacaagaactgtttctagcttgccctttccaatttcaaaatgagtgttcctttcatgaaaagggtaatgtaatcatatgcgcatatatgcacctttgcagcgatagttagtaagaaatctttcatcaaaatgccgttaattaactagtgaatctgtggaaagatgaaatggtaatgtagtagtacaagctaggttgagtagtttctttgcttgtttaccagtacgtgtatggcgtgtgtattgatcgtgcaggagtggaaggtatcggtgtgaact

SEQ ID NO: 9453 - DNA, 832 bp, Oryza sativa
  Intron number 2 from transcript LOC_Os02g43810.1 (locus LO C_Os02g43810) derived from phytozome v7.0 (chr-ID Chr2; po s 26437062 to 26437893)
gcgttaccatcattttaggacattgcattcgtgaggtttggtaaaattctgtaatttctctattcttttatgcaattagaatcattacaatcaagcgtttattcgaatactttgtacttgtatcttaatatttccgtagtagtatgtttagatacttacatatacaggagtaccattgaattactgatgcaatcgtgaattcatgaggcacattattcatcactggtttcagttatagttagtatacgatgctacaataactgaattcttgatattttgttaatttttggttaccaacacaggaatttcgcgctaacatttttttttgtcaacgtaaggtttcagcctgctatatgaatcagcttctcagattattagttcacatttggtaaagtaaatatgactttctaaggatgacttgattgggtttctgggatggtgatttttgtctttcttgcttgatttaccttttgactacatgagcagctactactgtattttttttttttgctaacgtaatgcttagcatattggatatatagatatactgccatggtgcgctaaacttcaagaactttgcttataaaataaatacttcctaaaataggagaaaacgaatgcattatatgttagttttctttttactccaatgcaatttctgtcttgatagttgtttacctactgagatgtcaattgtttattgcaatatctcactattttgagtcttcatttcatgatttcatccatttatcgtgtcaaattattgtgctgaattgctttgtactgaattgcatttcttccatgcacaatttgtggttaccagatacaatct

SEQ ID NO: 9454 - DNA, 485 bp, Oryza sativa
  Intron number 2 from transcript LOC_Os01g62970.1 (locus LO C_Os01g62970) derived from phytozome v7.0 (chr-ID Chr1; po s 36480522 to 36481006)
agggcagaacgggactgcacaagctgggactgcaggtagttgtggtcttgtggattgacccaatctcttccttgctcttatgtaggaaggacattcttattccttggtgccattaaagacactgttgcgaaaatggaacataataataagcacaactatatataaacgaattcaaataaacccaaagaataccagttccatataaagcttgaaaattagtagcctccttttcatctgtatttactatttgcctcctttcttctgtaattaccatttgcatctgttggatatctctagagttaaccaacgagaaattactttccatctgttactcttgtctgcaccatcatgttttttttttcttttgtggagtgtcgttgactgttattcatctttgtgatcatcttactcggttcagactttagagcactgagatgtttcacgatagcaaactaactgcatataaacattgatttgtatgccag

SEQ ID NO: 9455 - DNA, 988 bp, Oryza sativa
  Intron number 1 from transcript LOC_Os01g32790.1 (locus LO C_Os01g32790) derived from phytozome v7.0 (chr-ID Chr1; po s 17995429 to 17996416 reverse strand)
gcacttttcctgtcccgagagccgagaggccgaaggtaactctgcctaaatcctaatgcctactgttagatggtagtgctaagtgctgtgaatttaggatttaggaacttttttaccatttgaatccaggggatggttcatggttgatttattgcatatatttgaacaattgaactttagtaatttaattagtagtttcatggttcatggttcatggtttcttatcattttgccattttccatcctctataaatttgatatgttttgtcaattagtagtttagtactttcatatgctaagcacattcaatttatggtcaattttatttatctatgactttatgaaattatgcttataccgctatatattatacaactattagactttgggttgtaaaaaaaaaatgatctcttcccattgcgaataaccaagttcaatcctgggccggtgggcccacccccatggccccctgagtcctgatgattacaagcgtttatattgctttgtcagattaaccgccgcaactccgcatgttctccttgtgttgctgtttcaatgcttagtcatcttcattgtttcttgctctgtggcacattaagggagtaggaatgtaaaattgtctcttgtgcagttgattcagtgcagtttgtttgggcaacttttatgttctcgttagctatcttacttgctgcagcctgcaagtatataacatatctatgttttttgaggaacatgttagtttattactacttttctgtgttattaaaaggaacctgtgttattgcagaaaactcgagggttaaagtgttctcttacctgttcctttttgtgatatttttagagtttaatttaaaaatatatgtatatatttagcattcttataattgacaataccacctgtcttgaaaaaaaaatcaccctttcactatgaaagacacaaaagataaaatgatttacacatggtgattcatgcagcttaggtggtgca

SEQ ID NO: 9456 - DNA, 660 bp, Oryza sativa
  Intron number 3 from transcript LOC_Os01g50040.1 (locus LO C_Os01g50040) derived from phytozome v7.0 (chr-ID Chr1; po s 28746324 to 28746983)
ccagcgaaccagcgctttgttttgctctctgataggtacggtacattcccccacatgcgagtgccctgttcttgctcgtacatagttcaaattttatggggagtggaccatgattaaatgttcaactgtggtctgtggctgtcagactcgtgattggtttaatagctgaaggtttagtaatggcaaatcggcaagtgaactcgtacggaaccagtttgtactttgcaggactctatagagggcattcttcttagtgatgcatttagattgtggtttcctgttgtggtgctgctaaggtttcttgagaagctctctcgcttttgcttggtctcataagtaatgttagaaaaaaaaatgcaactgtgaaggcatcccataattccgtgaatgccttttcttggtttcccttgtgggtgctcaccttgaagagtttcccatgatgagtgttacccatctctataggttagagagagttagagtgacattctgatcatattccccactagtcagtatgctttaagtctttatgttgtagtttgaatttcaattttttttatgtaccaatgtttatcatcttatagacgttttcaacattaacatttcaaaatatccttttctactgcagctgtgttcctctgtacaatttcagctacatatata

SEQ ID NO: 9457 - DNA, 840 bp, Oryza sativa
  Intron number 1 from transcript LOC_Os01g66290.1 (locus LO C_Os01g66290) derived from phytozome v7.0 (chr-ID Chr1; po s 38499979 to 38500818)
cagctcgatccagccccctccagatcttcagatcggtaagaaaaccgtagtgaaagctagctctttctctctctctgcagattgattggatggagtagtatttgcttttctttgcgccattttgtgctgttcttttggggcagatttgttgagaaacagcaagccctagggcctgcaacgagctgatggaaaggggaaattgaaacataagcagctgcagcaagctgcttgctagatcttgttgtgttgccatttctgcggttctctcctttgccctcttctagctatgcttcttgttcttggaacttgtggttcttttgggggggggggggggggggttcttcaagtgctatatatggatgaggtgttcaaatggataatttgctcctgaaatttcttcttttgctctaaagtcttgtccatctttgatgaagttatgttaattatttccccttcttgaatctttgagttaaggttcttttcgtgttagatcgttcagaacttcagatcgatgctgatgaagattcaaatggtgaacttgagactgaagtttagcgattgaactaagtaataacgataagacatgaatttgtaaaaatccgtgattattcaagattttggttggaccaatatttcctctgaacaaaccaaaaacaatatatgttgtgctttcctagctagatagctaggaatttcttgctttattatatgctgataagtttatgcgcttttactccctttatcttgcttaattgcttctgccatgaattgctaagagggaggtgttgcatggttgtacatgtacatgtttaatttgtgaaggtggatcgattgatcaac

SEQ ID NO: 9458 - DNA, 666 bp, Oryza sativa
  Intron number 1 from transcript LOC_Os02g18954.1 (locus LO C_Os02g18954) derived from phytozome v7.0 (chr-ID Chr2; po s 11071971 to 11072636)
gccgacttcatcggtaggagcagtatatgcatgtggacaaaacgtctataactttttcgaaaaaaaaaacacaatcatgtacttttttctgtctacaaatatatgctttaaatttgatccataaataaaaccattgctaaggtggtgtttggatccagggaaactttagtctttgtatttaaacactaatttatagtattaaatatagactacttacaaaactaattacataaatgaaagctaatttgtgagacaattttattaagcaatagattcgtctcgcaaattagtctaaaattatggatggattttattaatagtctacgtttaatatttataattagtgtccaaacatcccatgtgatagggacttacaagttttagtctcatctaaacagggtctaattatatattactagtcctatgaatcatatctcgtctaaatttcttcacatctcttcatcccaagcatccttccaacccgatgcattttatatttcccaacaaatggaatatacattagttattaactgttagccaagaaagtgaaatgtttgagtatgttttgagttttgactagtaatgcacgtccatgatgcatatgcccataagctcatttaattatacatgatatgtatggcaatgcggttgaacgcagcaaagtac

SEQ ID NO: 9459 - DNA, 752 bp, Oryza sativa
  Intron number 3 from transcript LOC_Os02g47500.1 (locus LO C_Os02g47500) derived from phytozome v7.0 (chr-ID Chr2; po s 29016761 to 29017512)
gctacttatcttgctttccaggtattactgatttttcagcttgttaaagctcaattttgcttgcactctttgatgttttttttttggggatattgggacgcctggaaactttaatttatgataaaagatatgagtagagctagttctgtaagctaagattactatttaaaaagggtgactttagaaccatgaagtttgtcaagatcattttagctggataaatttcagtgttgacaatttcctcaatcatcatagttttgtccctcttgaaatttaggctatttttattcacttcctaaaagggcacatcctaattagccactagttttaaaaaattcttgtatccctctctttccacacttgccaccaggctctgatgattatgccatacaataatctcttcattttattgtcctgttgctacccaaacatgttctatcaatcacacagggttactgattgtgcgtggtcgaattgtctattttaatagattgacgaaattctgcaaggtgatttgtcatgggctgatcagatcatcagattatacttcaccataaaaacaaagactagtcatttacaggagaccatctatctcactgtactttgaaacttatgtttgtgtggtattcaacttgactttagtatcttactcctgtttgagtactgaaacttttatgcgatcagcgtgctctaacctttcttgtttttatacttatcatattcatctatttctttttcaggcgccaattttg

SEQ ID NO: 9460 - DNA, 759 bp, Oryza sativa
  Intron number 2 from transcript LOC_Os02g07220.1 (locus LO C_Os02g07220) derived from phytozome v7.0 (chr-ID Chr2; po s 3711985 to 3712743 reverse strand)
ccgtttgtattcaccgtcggagctggaaatgtgagataatgtcacaactcacgagattttcatcagaacttcctttccaaagaattgaatcgcatagattgctgatactacactacagtctgcaattttatatgccatatcttgaatacttccaatgtgaagttgcttgctgaaatttgcagttacaatattttgatattaccttgttcataaaaaagtaacatgacgtgggagcagtgtcaaaggaattcctgaaacgtcaattattcagacaactgatatattttctcattatttaacttcggtactttaaaatagtgtaattgactcacaactcacaagtgcacgcatgttatcagtgaagtagaagaggttcatgctttcatatgcagaaaaaaaatccagtggcgaagtaacaaagaagagaaactacatcatcctatgaggctatgatgtgcgtaggtttgattttaggatggtaatttatatcctgatttggggtctattatcagttcatattatttgtaaaactcacttaacagcccattaaaaccatctgttcttaagattctagatgctccttgcgattttttttatggtattgtcaacttggtcaatgtctcccttttatctgtcatccctccggtatgtttcttgggatgtttgttttgtaatgtttcagggtggtgatgatttgcctagatcttatgcatgagatttgcaggttatacctggtattgaagcagcagtgaagtccat

SEQ ID NO: 9461 - DNA, 658 bp, Oryza sativa
  Intron number 4 from transcript LOC_Os01g05070.2 (locus LO C_Os01g05070) derived from phytozome v7.0 (chr-ID Chr1; po s 2379750 to 2380407 reverse strand)
agttactagcagagaagctgtgagcaggtctgaaggtatattattctttgtgtgccaaatcatatgctgctgtcatcttttaacctctcttaatgcattgttgatttatctcttcaatttcttctgatactcgctgcagtaagaaataggtgttgtgcaatccttcatataagcattctggagatactgcatttggttttttattctccatgaatgtttctgtctttttttttctttgttgatgccttcggtgttattcttcattaggccatgaacagtatataaagaattcaactggtatgacatgatcaacatggaccatgtgataattattttttcccctgctgaattttgacactgtcataccaatgtaatttggctgtctgagtgtctgatgtgtggtacaaacagcaacgcagtttactgtattatcctaagcttcatgatactaatagataaccctctaaattttgataaaatatattggaacatgatagttataacttataagaccctctctgggagggtttagtaattgatttttttaggaatctccattgtattccttttcacacgtgttattgggaaaagttttgtgcttctcattatctcaacctttcctttgcatttgcattcaggttcttgtacaccagaagtc

SEQ ID NO: 9462 - DNA, 1027 bp, Oryza sativa
  Intron number 2 from transcript LOC_Os01g21970.1 (locus LO C_Os01g21970) derived from phytozome v7.0 (chr-ID Chr1; po s 12334158 to 12335184 reverse strand)
gcgcgacgatccttacgtcccgatccctgatccaggttgctaatcctctctctctttgcttttcacctccgtgttgtttgatcatggttgcaaatcgatggaagcagtgaattcattcttgatcgaacaaactattgcttccagatttgatgcaaaattttgatgttagcaggcactgtttgttggttgaactttgcaaaagggatactgtcctcttttatccaataaaaaaagtatgcgtgataatgtgtttagataattctgttacattgcacttgggtattgcattgcattcccttgtgtttcttcaatagataggggtaatagtaaataatgccagatggaggaggagtgcccaaatagctagttgaatgaattggtaaacaaatatgtcagacattatttaattagttgccttgaaaaagttgcacttgcatgcaaataaaattcatcaatacaaacaaacagcttgttgccaaccctgttttagattatatgatctgtgttttctttatcagaaatcccttatcatcatttcattttttttttgtctctctttcaaagggaatggtcaattccttttttatctttttatattgtatcctttcaaatcgatatagtcaatacaaaactgccattacctctaaaaaatttgtattccaagtttgtcgactggaaatatgtgtgattttttcatcagactatttctcagcacatgagaatcaagttttgaggtatagttcaactcaatacaatctaaaactacacaggaatggataaataaataaatttaaccttgaaaaaaaagttaaaacatgtctcattgcataaatcagcatcgctgaaagccaggagtttttcagcttagcattttttttttggtagcaaagggcaaggagcccccatttctattaccagaaatgtaacttgctacaaagttcttacatctactgaaactgaaaagacagaaatgccagcatagaatgatgtgatttcattaaaaatgttccacacgcaggtggtaact

SEQ ID NO: 9463 - DNA, 654 bp, Oryza sativa
  Intron number 1 from transcript LOC_Os01g21970.1 (locus LO C_Os01g21970) derived from phytozome v7.0 (chr-ID Chr1; po s 12335235 to 12335888 reverse strand)
cgtctcgattcggtcgaggatctccaggaaaagaggtattactactgcttctcccttcttcttctttgattctttgattctactgttgttgttgttctttggttctttgattttgccgttgtttttgttgtgttattttggttcttgatcagttgatcgtctttttttccttttcttttaatctttgtggggttgtaagatttgttgtatattgttttgattttgttctctttttgttttcatcgatgtgcaagaaattaatcttcgtgtttcccgtcgatcagcactcgatcgatcttccccatgagaggaggaagaaaaaatgtaggacgaaatgcatagccgtttcttgttcgtgcaacggccgcaagaacggttaccgatcaagaaaaatgagtgatctgtttcttgattccttttcccccaccagtagatgaaaaaaacgggtgcaataaatgcctccagcttttttgatacgacctcctcttccgatttacgtttcgatgtcagatactgttgtgttttcagtcggctggggtttgatcatcggataagtaaaatgttttttttttcttctgcgcatctcgattgaatatagtttgatgcaaatgcgtatttgttttcctgtcgtcttggatgttaggaggaagcgat

SEQ ID NO: 9464 - DNA, 833 bp, Oryza sativa
  Intron number 2 from transcript LOC_Os01g04030.1 (locus LO C_Os01g04030) derived from phytozome v7.0 (chr-ID Chr1; po s 1754142 to 1754974)
gcaacgacaaggtctgtgccttaaggcccttaacctttcgtgcttgcgtgtgtgtgctgccagaggcctaaacgtatttagtttcattatgcgataatttcaaattatccaaatcacagtttcagagtagtgtcttctaaatagagcaagatttcaatatgtgctattctgttataatcttctacgctgtataattatgtcatagtacgtttttttaccttttctcatcaagtagcctgggttctgccattgtgtattttcgccttttcagtttagattcaatacatttcattatgtgctatggagagtttgcttggtctgaagttccgatgttatgaattaacagtcaaaggcttgccttcgctttcttttaatgcaaatctgctttgatatctgtaatcaagaaatacattttagtaaaaaacctttcttgtgcaaaggcttcaaatgttactatcttatactgaatgcaaaatagagtagacatgttccaacttccaaccacctgcagaacaaaatctgtcaacttccaatagcatgatattcataaatatacaacaatgatttttccaaagtaatattatctcactttcatatctagaacagagtcttgtaaatccgcttatgatataatatgtttctctcctcaactactaatatgcacatctgtttgaattacttgatgatttgctgttgcaatatttcctttgtgaaattctgcgaatatatcgatctcataaatatactgtgttacttcctttgcaactacaatgaaaactttgtaaatttgtgtgacaggtgacactgaccttcaacttgtccgcaaatttgga

SEQ ID NO: 9465 - DNA, 703 bp, Oryza sativa
  Intron number 1 from transcript LOC_Os01g15830.1 (locus LO C_Os01g15830) derived from phytozome v7.0 (chr-ID Chr1; po s 8917077 to 8917779)
actgctttgtcaaggtactgtgatttctcttctgctgtagcattctttacttgtcttcacaaagctaatggtgctcggttgacatagcacctgcagtgtagcctgcaaaaacataattcaaatgagttgtatgcttagtgcaactagaaaggcaattatatgcgtttcacttgcttttgcgatggttaaatccatatgaaggtattgcaaatagtcatcaaaaatagagaaaaaaaagacatgtatttgcagatgcaactttagctgttacataacgaaaacgcaaagtgtaggagatcaaacctttgttatatttgtacctaggtattaaaaaaggtacccttaggagcatggaagaatctatagttattaggcaaactttttaccactgataagatagcctaccaacattgcccatgcgagcactactttctgccttggtgatatgatgagtccgtaccatgatttcttgattattcactttcttttcaaagagaggatgactatttaattcaaatgcacaataattggcgctctcgatgtttcatttatcagagaccttcacccagtacaggaccctaaatcaatatatattttgctgttccgttgcatgtgcctaatctatgtactacttccatgtacctaatctatgtaccaacattgtgtaggggtgtgacgcgtctgtgctcctggacaacagcac

SEQ ID NO: 9466 - DNA, 270 bp, Oryza sativa
  Intron number 2 from transcript LOC_Os01g27210.1 (locus LO C_Os01g27210) derived from phytozome v7.0 (chr-ID Chr1; po s 15169986 to 15170255 reverse strand)
gcgacctgacgctctatcgtaagcaagcttgacttgtattcttgttttcgtcgattgaattctatttgcttctctgaattattccaatcaaaactaatacttgttgttctctgaataactgttcaattaatagtagagattcagtaattctttattcaagatcacggatacacatactatataacacactatgcccaaaagaagaaactaaaatcgtttgtatttttcttgtcagaatcgcgagcaatcgctaggtacatctttcgcaag

SEQ ID NO: 9467 - DNA, 664 bp, Oryza sativa
  Intron number 1 from transcript LOC_Os01g45970.1 (locus LO C_Os01g45970) derived from phytozome v7.0 (chr-ID Chr1; po s 26111819 to 26112482 reverse strand)
tgtacggctgaaagcttgaatcagtgaatcttgaggtatttttgagtacctacctttatatttacacttatttgcaaatggatgatgaattgtgaacttgtgattaagtgcttgttactatgacttgctgatataatgttacattgtacaatattgtgcattgaattttttttttcttaattcttgttctgtgttaactctcgcgtgtggtagtttattggccacacctaaattttttttccgtcctccaccgctgttcatagagatgcataatggctttaggaatcccctttgttgactaaacccccattgttcattatcaaacattgttcactgtgcatggatatctgtgatgcaaaactctaattcaaagcctgttttgcatttcaactaaatttcatgtgttaatctcattcgtgtggtaggattttttttttttggggggtttcattgttgtcattggatgagatacttcacatcttgttaacatttatcgtcaatctttcattgtaaaattgtggggaagaaatggcctacctcagataattctattgtgtcaatttttctatgtgattgcttatatctagcaacctgacttaacctttcatttcaaatgatttaatctataggacgaaaattcagattgccgaagaaaaattcaggc

SEQ ID NO: 9468 - DNA, 855 bp, Oryza sativa
  Intron number 1 from transcript LOC_Os01g01160.1 (locus LO C_Os01g01160) derived from phytozome v7.0 (chr-ID Chr1; po s 81898 to 82752)
cctcctcccgccgcgtcgccccctactactaccaggtacgtttcgtctcctctcctctcctctctagtgattttgatttgaatttgtccccaaccttcaacacaagcccattcagtttctaacacacaagccccagccttacatgatgtttgatccagcagcctgacttaatatgtctgctccatcttctcccccattcaattcaatacttgattgcaattccttctatctttcttgtatcaccgtcgtctgcagcacataactcaatattgcgcctgcatgtgcttgtgtatttgtacagattttggcttcatatatatatatatatatatattattgctcaagttcgctggatcaattcatcataactctatgtaggatgcgagtagagatttaccttttgttcaggcactagcagtgccatacatacaaataaggaaatactacatacataggcattatctcttgcgtgatgcatatagggatgcaaaattcaccctgatgcaaattatatgcatgtaggtgatgaatagtgaatgaacaattatacttacaaacaaaattgaaaaaaagaagtctttttcgtgtgcctcatagttaaacttatccaggacataagttagagaggtcgtgtcttccgtgtaaggttgaaactgggagaagctttgcttgtttggctattctgttagctgatttctactttcactcggttcatgatgttgatccgcaagttggtaatttccatttggattgtcaaaccattgtttcatatgctgttttttccatgctaacttgccacccgtgtgactcaaaaccataggatcaggaagacaagtctggctggaggagaacttg

SEQ ID NO: 9469 - DNA, 1052 bp, Oryza sativa
  Intron number 1 from transcript LOC_Os01g13740.1 (locus LO C_Os01g13740) derived from phytozome v7.0 (chr-ID Chr1; po s 7690754 to 7691805 reverse strand)
ccggcaagaactctcacggcaagcgcaaggtgaaggtatatccctactaccaaccacacaactaacacttcagccctaattataactattttatcgaacaccatgcgcgcgcgcacacacacagctagctctaccacacagaggggaaaagaaaagacaaaaaaaaatcaaaacggcatcagaattaactcctcgatcagctcagatgagagatacaattaacagtcaatcaccccaagctcaaactaatcatactgcacatataattttttttctctctctgacgagcagatctgactgatatacagacgaacgggcatgcagaaggcaacaaactagcagcgtcctgcagcagattcaaattactagtatagttctagacagagcgaggcagatccaaaccacacgctgcgcgctgctgctgcggctgctgctagcgccatgcacgacggacgacgcgtcacgggcaatccgcacagacgcgcacacacatgttagcctgcctgcgcggctgcgggcgcgcgtgtgggcgcggaggcggagcgtacgtacgtgggggcaatgaatagggcgcggaaatgcccgtgtaggagtaagccttttacggatggatcgaacgctcgctactatacaccgtaccgacgaagagaggcgatggattcgcaggatagatctcggggaggagagggccgtgcgcgctcacgggaaggctcatacagtattcatatagctagtcatggatagagtgggtgtatactgtatagtagctagctagaccacaccagcacagacacatgcacagagagtacgtctctcgattgctcgtgcagtcctgtcgatctctcgatcgatcgtctgcagtggccaaatggccactgttgctagctagctgcgcatgcagtagcagagatgacatgtaggtgtaggcaggcacagtgatattacaagagattaattagtggatgtggttttgagaaggatatggatcgatgatggattggtggatatgtgttgcaggtggactggacgccggagttgcaccggcggttcgt

SEQ ID NO: 9470 - DNA, 871 bp, Oryza sativa
  Intron number 1 from transcript LOC_Os01g11120.1 (locus LO C_Os01g11120) derived from phytozome v7.0 (chr-ID Chr1; po s 5937127 to 5937997 reverse strand)
aggaatccggcgccgacgcctaccagcagcgtcgggtaaaagaaaaaaaaatctgagttaaaaactctgctgttcttgagaaactgaattggttggttgtgattgtgcctgtgtgggggatttggttgtttatttgattatttctttccattagtttggtaggtaaagattggattcttttttccccttgtgttggattgcattatcggttggtggttcgtggtgcggtagttggtattctttcgtgaaaggtttacctattttatttttgatgattaattttttttatgacactgcaaaaccagtcaatgcactatgcacaattctattatatttcatttcgaatagttgtacagtaccgtaatgtttcttcaaaactgccatggacatggaatagttctttgatccactctcaaatcaaatcgtcttgcattaaggtaatccatgctgagaattcctgctttttttatttatttatagtaggtagacaatccaaattaccaaacgctattttttctttgaaactgctagttctttgatccgcgctcaaatcgtcttgtaatgaggcaacccatgctgagaattctttttattttttagcataacttttcttagtggttcagatattagacgacaaagattgagactattttccccaaatatggggaaagtttgagattagactcccctttcagggtttctattattctcccacttggtttctttgtttattttgctgactaggatttaacagatgatgatcagctgcttgtaagaattaagtttggagttggcaagtccatggaaaaagaaaattaatataagatcagaataggatgtaatggttgtttttttttttgtcagaggagga

SEQ ID NO: 9471 - DNA, 774 bp, Oryza sativa
  Intron number 1 from transcript LOC_Os01g60760.1 (locus LO C_Os01g60760) derived from phytozome v7.0 (chr-ID Chr1; po s 35137499 to 35138272 reverse strand)
gcggcggcagtggcgctccggcgagctcctcgccggtgcccttctgcgagctgcggtagttgtactagattaacttcttgcattttttttgcctaattgtgatttgccagtagaatgacactgattttctatggcctcttagttggatgagataagaagagatgagtatgatgagatggcatttgtagcacgagattaatttcttgcatgtttctgctggatgccaaaattgcaagctttgattcccgatttaatggctgcgatggccgtagataaatcccagctggtggatcccttgatgtgtctcgatcgagttccgggaggcagcagcagcagcagcaatgtccggcgccgccaacacgacctcgccggccgccggcgctggcacgccgcggtggacgcggcacaagacgctggtgttgctctccgtgctcccgccgccgccgccggccttcccttctgggtcgccgccgcctcatcgccggccggccgtcggacctccatgccccgacgacctcctccccaccgccggccgtccagagccccacagaggagtgagagagagagaggaggaatggagagaagaggggaaatagagaagaggctgacgtggcatgctaacatgtggggctcacataggttctacgctgattcagccgccacgtaggacaagaccgggatcaaaaccgccaagggatttattgtgaccggttttgattagttaagagacgtgtgatatatggttttgcagattggggacgtttttataactcg

SEQ ID NO: 9472 - DNA, 505 bp, Oryza sativa
  Intron number 4 from transcript LOC_Os02g42880.1 (locus LO C_Os02g42880) derived from phytozome v7.0 (chr-ID Chr2; po s 25783797 to 25784301 reverse strand)
aggcagtaataaaaactcaactgaaaaagaaggaagtaagttcattgttttttcacttgtcaagataattttttttaatcgttcgcgaaaaaaaagataaattttttaataaaaaaagatagataattttattatgttttctggtgcttgaaatttgaatactctgcacatctcatctataagaatttcaaaatggtttgtgatgatgttggattttgttttattttgggaaaggatatgatgtttaattgcaatgcaatgaattcctgattaacttgtcagcgtgtgaagtacgagcaatatatagtacatagaaaaatgatacacggaagaaatttgctctgttttctggtgacactcaaaatccatgagtgattggttctttaagtagtccatgttgcttgtttgagaattggcaacataaatgtgtatcacccacactgttctacaattaacctgtgagtacacaggaagagttggaaaggaagaaggcagagtacgctga

SEQ ID NO: 9473 - DNA, 245 bp, Oryza sativa
  Intron number 3 from transcript LOC_Os02g42880.1 (locus LO C_Os02g42880) derived from phytozome v7.0 (chr-ID Chr2; po s 25784319 to 25784563 reverse strand)
tgggaggagaacgaaaaggcaaaagcggagaacaggtacataatcaaaatttaatcgcccgtattggccagaatctctctccgtgcgaacatgatgtgtaaaccaaaatgaaaccatgtcttactgtcagggcatatgtggctccattacaacatgttgtgtttattgaggaaacatagcacataaccttccgaatcacttcttttctgtgtcagggcctctaagaagttattggatattatttc

SEQ ID NO: 9474 - DNA, 975 bp, Oryza sativa
  Intron number 1 from transcript LOC_Os01g07382.1 (locus LO C_Os01g07382) derived from phytozome v7.0 (chr-ID Chr1; po s 3494013 to 3494987 reverse strand)
gtggcgttcgccgtgagtgcgctcctccctttctcgctttagctgctatgaactataacaagctatgatagaatgcgcatgcggtgattggtgaatatattctacatcattgtggtatgaatgtttttgtaccttatgactgtctaatgcttaattgtatgcaccgcttctcgaattctggaacttcatcttgatgtttatatcaagcaatacattttttgctgatcatatgaaccgccagcatacctcaatgtagcacttaccatgctaaatatgtcgacactttattatcctgaaatatgccactttgtctgaactaccacccgccttgagcttaaacctcgggttaccaacttaccattagtctattagttttattataaacttaactttggttcacctgagaaccagattcactatttatgatcatagttttgattgaagaattgttacgcggaaatgctttaatcatacaggaaacacaagtacaacctaaaaccttgaaagatgatactctaataaaaaaaatcaaatgatttctagttgatcatgcaccaaagtactaggtaggtgtgctttcaatattacccttgtcttaatgttcttttccgatccgtgtaacatgaacaatattgacttgtggtagactggtatattattttatctaccgaggtgtagcaacaatatggattgcagagaagtatgaagtgaactgtagagatcttgctaacttggaaattatcagaagtctagtttatggtgaacattagagctttatgccactttccatgatcaactttctgtagaggaaacaatgactaactttttttgtttgcctttaagttgtcttatcattttaaatgctcataacacggtgctaccgtcaatctaatatttttagtgcaactttgcttgacagatgcctaagttttgggaggagcaactgatttgtattgtctatttttgttatagggc

SEQ ID NO: 9475 - DNA, 995 bp, Oryza sativa
  Intron number 1 from transcript LOC_Os01g56470.1 (locus LO C_Os01g56470) derived from phytozome v7.0 (chr-ID Chr1; po s 32542570 to 32543564)
aagaccgagcagctcctccgcgactgcgtcggcaggtatatacatatactccatggcctcgcgcttttccctgatctgttccttcttttcctgcgaggatcccctctttgcatattactgttcgttgttttagtgatgaattggtgataacatgtcatgcgcagttgtgttactattagtcccgtgtatgattgtgagctgtgtatagccgcctctctgtggacgattttcgtgagtctgtcctcgctgatttgatacaaacacgaattcattaagaatggggaatgtgccgtgatgatcgagacgtttgagttctgtggtgaatagtatgatcaaatgtgtgtaataacttgggcttttgaattttggtagctaattagatatggaatttctatccagttttaggtgcccgtgccatcgacatgggttaaaagttattgtgggctattttgcgctcaacttgttaatcaacaaattttggacggaggcagtactttgtaggcatggggtaaatttgtatgatacacttgttgcttgaagatgttcgtgaactcatgggatttctagacacctacaaccaattacattacagtgttattatattctaacgatatgtaaagagcagctgtgttcgtgttgtctacactaaagattcaacaactagtggtcatcatcaaaccgatagcatatcctcattttgcaggattttgaaaactcacatctcgttagcatccttccttttatttcttcacatgcctcatgttaaacttttaagtgcatgaaacccaaatttctgtatttcgtagctccttgtaaccaatgtacaacactatgattagtattctggatagattttgtacttcccaaagtattttggttgttgacaagctattacaataatctgatggataacctaccatacattatttctcctaaccgatcacaataatcttcttctaggccctctgaactggtggaatcaaaaactgaaaata

SEQ ID NO: 9476 - DNA, 955 bp, Oryza sativa
  Intron number 1 from transcript LOC_Os02g51550.1 (locus LO C_Os02g51550) derived from phytozome v7.0 (chr-ID Chr2; po s 31570295 to 31571249)
gacctcggccctggcaaggacacctacatctacaggtacgcggatcatcgctttttttgttgtttttttttgtttgttttattcgttttagcgttgggttgcccggtaaaactctcgttcgttccatggatcgactctcttttagtctatcttctaccgagtgtttttcttgattgaaatccaagcgatctccagttccgcttttgcgaagtgaattttgctccgctagttcgttttccacgtcaaggttgcacctagatcgaatctttttatcatgtcttgggttctcctggtttgtgaagggaagtattttcgatctgtcgtcttccattgattttggtggtatatatgtcatgttacctcgtgtgttgatttgcagtaactattatgtaatctttcatttattagagaagtaatgctgatctggtgcaattataagcactcaatacggtccgagttcatagtatggatctaattctctcccatagtttaggggaatatttgatgcgaatctcttctttcggcgtatgatttactgtacgtctatattatatctgtttggtttactactacgggtacttgttagttgttgcgaatacttggatgcattttagattatgaggcaagcctacaatactgtagtcacctatgcaacgtattaaacaaagataagtgaccaatcaaatgacctgttcgttgattatcatataatcctggtcacttggtaccacttggtatcatcagcttgcatttctttagttgtcagttgtcagtcttctccatcaactgaagattaaagaaaagaaagctccttgagagtggaatagaagaagaacgacatccattttttttctttatttttttcatggttagcaatggttgtgacacatgatgctaatttgattccgtttctcttgcagaggggaggtggcattctgcagcaaggagtgcaggg

SEQ ID NO: 9477 - DNA, 776 bp, Oryza sativa
  Intron number 1 from transcript LOC_Os01g74000.1 (locus LO C_Os01g74000) derived from phytozome v7.0 (chr-ID Chr1; po s 42864375 to 42865150 reverse strand)
cgcttctaacaccgctaagttgccctcctttcgtaggtaccttccctctcacaattctccattaattccccatgtgttgcatttctgaattatgcatctccctatgtgggctctatgcatatcagcatatgcattgtgtttgctacaactgttgggtcatttccatgtctattgttgtttgtaattgtcttctctaagactctaaccattcaatcagagaccatatataccctgtgttttgttgggatctttctacttgtaacaaaaacaatcttactgcattccacttagcccctgtaagatgttcttttgagagcctatcaatgttatccaaccgcatgaaaccatcaaattgactttattatttaagattgaattgccatgttgtagtctgcaaattatctaccacaaacgtactactccctccttccttaaatgtttgacgctgttgacttttttaaacatgtttgaccgttcgtcttattcaaaaacttttgtgaaatgtgtaaaactatatgtatacataaaagtatatttaacaataaatcaaatgacaggaaaagaattaataattacttaaattttttgaataagacgaacggtcaaacatttttaaaaaagtcaacggcgtcaaacattttgggatggagggagtagtatttattgggtacttgggggaactctaatgctagctatggttcttttttgcatgagttcttttgacaaccctacatcctgcacctatttgtgctgattttgttgtaatttattcgtag

SEQ ID NO: 9478 - DNA, 751 bp, Oryza sativa
  Intron number 2 from transcript LOC_Os02g33490.1 (locus LO C_Os02g33490) derived from phytozome v7.0 (chr-ID Chr2; po s 19913782 to 19914532 reverse strand)
tctctaccgtacgaactaaatcatctctgccaccggtatgaatttctccgccttttagatagatttaacttcttgtaggtgactaggaagagtatgggtttagctttcgttcattgttttatccttatatgttgtactagtgcgatggtatggtacatatgtattttttgattttgatgaaatgtgtcatttcttttgtgtacattgttttttcttgcaaatatatggcaaagagccaaagatcaacatagcactaccgaatgctgcattgcgaattttgcacctcctatctgttttacacacatttgtagtatttcgctcttttggagcttttcactattgaaaaacatgtaattagtaatcaaagatagctctctctgctcatactagaagaatatgtttattagctcaaattattcaacatttctatcactgttttgcataattttgcttaaagttgttatgaggttaaaagaaaattctaaactacaagaactttagttcccacaggttcatatgtttgactctagacgtttcaatctagatctgcataatatatgctacgaagtttcaagctacatatgtttgttatatgaaaatattttcgcaagttgcaaatatcaacagataaatgtttttgtttacttacctataagtagagtttatttaacatggcatcagcaacagttaatctcttattttgcatctcttcattctcttgttttgtttgatgcagatcttccgtgtgttg

SEQ ID NO: 9479 - DNA, 542 bp, Oryza sativa
  Intron number 2 from transcript LOC_Os02g03100.2 (locus LO C_Os02g03100) derived from phytozome v7.0 (chr-ID Chr2; po s 1228850 to 1229391 reverse strand)
ttgtcaagagggaggatcttttcatcacaaccaaggttattaagattggacaatacaattgtcttcctttcaaaccatgaatatactacttttttcttactgctgaaaaatatatatatatattcacctactggttagtttctactgcctcattagaaaaggggtatagtacaatgttatgaacccaattcccccgactcgtacaggtggttggcatgattagcctaaatatgagtgttacattatggaattcctttttttttctcatgatgtattgcattttctttacctttctttggaattgttattgcacacatctgttgtacttgggactatgggagctaccccctgatgtcgttctgaatgaaactacaaaactactatcatgttgttttacacctgattttcacttagcaagtgtactatcaggcaattaattagcccttgtttcatctagtgcgctattcttttctccacatttatatgttatttgattgaaggttctgtatcttttttttggttgtagttgtggaactcagatc

SEQ ID NO: 9480 - DNA, 754 bp, Oryza sativa
  Intron number 4 from transcript LOC_Os01g06270.2 (locus LO C_Os01g06270) derived from phytozome v7.0 (chr-ID Chr1; po s 2974022 to 2974775 reverse strand)
tcttccaaggctgagaagcgtattttggatcacaggtatagctatctgaacttatttctttatgaatcttttgatatcatttgttaaatcttcataacatgttctagaaatttatgttactttagtggtggtttgtttacatcgtaatacctttttgcctttgttttcttggggcttgtgagatagaacagataggccttcacaagttagtttgcctctggggaattcacataaaagggagaaggttcatttttttttgtagagtttttcaattggaaaactaatacagagtagctgtatgaacacttagagaaggttctaaaatatgattatgatgcccactatgttccataatcctatgcacacctgatcttgtcaatttttaccgcagcagttgatgttctttagttccacacttcagatttgcatggcacaatcaagcagtgctcgattcacataatcatgttttgaatttatgtgattttctttagagatttacatctggctggttgtcgttattctggcatttatcaacatcttcttgtctctgagctgtattcattgctggccacaactcaaaagcatataatgttggtcgctagtgtggttgtatgctagaattgtttgttatatatttgaataatgaattcttggtatgagaaactttgtggtgaactggtggtgacctttcaagttgtattgtgccatacggataataggcgccagaaagaagaggctcttaacttccgtgcta

SEQ ID NO: 9481 - DNA, 839 bp, Oryza sativa
  Intron number 3 from transcript LOC_Os01g02490.2 (locus LO C_Os01g02490) derived from phytozome v7.0 (chr-ID Chr1; po s 803795 to 804633 reverse strand)
gagaagaactcacagagcacatcacttggtgcaaggtaattatggctgcagctttctctggttagtcataattattctatgggtattttccaacttattggagaaatgctatataggaaaagaaggtcataattactttttattttccttcacagatgattgatagaagttgtactgtcattggtaggagtagtaagaactttcagaagtgcatgctcacatgcatattgggaagttcctgctgcaaaaatatatgatgttgcaaaaatatttgatgtttaactgttgacatatccagcgcatatatagagtattatatctttttgttctatggtgtgtggctccaaagtttgatatgctacccaatgtattattgccattgtaggagtagtaatcatttattcttctatatggtggtagcagtggatactgatatccgatttgtatatctcagtcaactgtagctttcaatgttaagaaatgtgccgttcgaactattttcctgcattttcaacagaaaattattttcctgagcactgtgtttttccaaaatcttgtattacacttgctgatacatttaaagaaaatactacaggcgttctactgtagtatggaggaaactattgtggtgtgtaggaaactattgtggtgtgtaggcacgtttggaggaagcatggaagcatgatgtgtacagtcaatactccacaaacatggcgttagatagtttgctttagatggacttaaatactaatgattcttgcttcaatacattatttgatactttgatgctacgtcgtcttttttcccctctgaagcaggtttgcaagaatatatttaag

SEQ ID NO: 9482 - DNA, 820 bp, Oryza sativa
  Intron number 2 from transcript LOC_Os01g02490.2 (locus LO C_Os01g02490) derived from phytozome v7.0 (chr-ID Chr1; po s 804700 to 805519 reverse strand)
acatctgatcactgcatccttcttgtgtacgcgtgagcacatcacaagaacccaaaggaatcctttttgtggtttgtgtactgtctcactaaattcttctttaataggagtggatggcttgttctctatcacacatatgcacatcatgtgtttgatgaaaagcttcactgtgtactgttgcatgccaactccgtaaaagcataattttgtccttagacagattattgatgttatcttcacatctctccatactttttctgatcacgcgaaattgcaaaattcttatgccaacatgatcattcataaaaaaaaaaacctaaatctgtgaattagtagtgcttgattgctttcagtttcatgaacacattgggtgatcaccatcaacagaacaactttttatgcagctagccagtattttcaaggggattaagttgttgactctttcaagcaggcagtatatatggaccgatttgttcgataaaatccagttatgcctgatcattacttaaaggtcacaactcacaacagagggccaaaagagcaaaaccaatataatacaagttgacttcttattgcaaacaaatgtcaacttgtttgattaaaacactagctttgaacaatattttggatcagcatgttgtggtttgtgcatggaagttcaaaataagatgtgctatgtctaaactttgggaacgaaatcttaaggtactattctgcatgtcatctattttcttccatgccttgttaagtaaatcaaacatattattgtctaatgaagttctgatacaagaaactaacactgcagctttaagtgtagaaa

SEQ ID NO: 9483 - DNA, 799 bp, Oryza sativa
  Intron number 3 from transcript LOC_Os02g04160.1 (locus LO C_Os02g04160) derived from phytozome v7.0 (chr-ID Chr2; po s 1817004 to 1817802 reverse strand)
aatttgtttggaaacttttagcacatctgttagtaatatgctctggaaccatgtggccattcgttttggatcagtggtttagtatttgaagtgaccccttttcctgttgtgaactttgcaatcgagcataattgtgctttgtgttctctctttaggttatttggttagttactgttggcgtcatgcttacatttctttataataaattggaataagatttaatcatctgtagataacttatgcctctgcaaaaccaaaatgaaaaggttggggaatcaggtcttaactttcagcatctgtgcttccaagttccaacaccttttgattatcttagccatttatagttgataactgtttttcatgctttgtactagtattgcactgctgcattggggcaggagtataaatttgcctacgtgtcgttagtgctttctttgttcagttagctgggcctgcaggctagattttgtgggccctccaaacctgtcatttgagttcatgtctcccttcctagttaatgataggcaacatcctcgctagtccttttggaaaagaaataaccataatataagaactccacaagactatgtaggcagtatgtataacgcaattccctcttagttgcttactaaaattgcagaaatttccttctgtttgtccaagattaggtttgtttaggaagacaatacgcctgatgcaattgcctctgtaaatgcttaccatttgatatctgaacaaaataatgctgacttgaccattttttttcctcctttctgcagctctgactgaacccatcgac

SEQ ID NO: 9484 - DNA, 985 bp, Oryza sativa
  Intron number 1 from transcript LOC_Os02g04160.1 (locus LO C_Os02g04160) derived from phytozome v7.0 (chr-ID Chr2; po s 1818064 to 1819048 reverse strand)
ctccgtctccgtctccgtctccgccgctcgccgaggtaacccaagccacccgcctcctctccctcccgcgtagctaggatttgctctcctgctcgctatctatctcgtttactcttcggtgatgtggggtggagtgcttggatgctgctgcgctagtgagctgagtgtttcgctttgatcgatcgattgtcctggggaattttgttttttaaggggtttaggtttttaggttaggtatgcttgtagatgcggatgagtcgcgaggtagtatttgtgattttgctgttcgtttgtgcttaggctgctagaattttgtagtgattttactcacggtgcatgaaatcgctggggttgattagggaatttcagagcagagggtttttgggggttttgggtacggtcagagctattttaagtgcaaccgcttgatggaattttagtgaattctttaagaaaaaaaaaagagaagaagttgataatcgaagctaagcagataggctgttgttagatgcttagattgtgaggtttcttaaaaggtgacttcggttgtgattttgagggggtttgtatagatgcttaattgccgcttctattatcatttggctgggcatatgctgtgcatttgaaattttgagccaacaacttagattgtgactttaggaggcctgtatagatgctaaattgttgcattgaaccaacaacaccttgtgatttgattgaaaaatattgcaaatctataggatgatgtttgttctgcatattagtgctcaatgttgagatatctcaaattgcatgtgctgatttgcatctctattgtgtgctcaatgttgagtatcatttacttctatgtgtttccttcatgctgtaacttttgagagtggagactttgtctctttgtggcgcaaaaatatgacagcatcaatataattcaattgttactatttttgaactacgtgcaaaaggcgggaaaaataagcgttgaatc

SEQ ID NO: 9485 - DNA, 586 bp, Oryza sativa
  Intron number 3 from transcript LOC_Os01g25330.1 (locus LO C_Os01g25330) derived from phytozome v7.0 (chr-ID Chr1; po s 14308086 to 14308671)
gctccagcgtagatacccttaagcttgttcttgaggtctttttcatcatcctatctcactgtttattattaatctccttttttgttaatagtttttaactcgtttgtttcatcaagttcctttgacatatcaagttggctcactcgctgtcaaaagtcaaaactggaaaaacacaataaatagccctttctagttttgtgcctcttcaaatgtgtcctgtaattttgatatctggccaaaatgctatgttgctgctatgagcacattactatcatggttgaaaaccaatgtcgaagtgcatgctccttaacttcgttgtgctaggcttgaaacaaagctcagcccttggttcagccttgattttggctaagttattatatcctatcatatattattcaactactatatttttggcaatgtgtagtaactgcttgtttgtagtattttggctcttttctatttttgtatcttgacttagatgatttcacttgtgctctgcatgcctttgttcttttacactccttatttggctagtagttatatagttaactgcaagattatttgttcagggtgcttgcattccaca

SEQ ID NO: 9486 - DNA, 933 bp, Oryza sativa
  Intron number 1 from transcript LOC_Os02g27260.1 (locus LO C_Os02g27260) derived from phytozome v7.0 (chr-ID Chr2; po s 16041799 to 16042731 reverse strand)
gcgccaagaatcaaacgttgttcaacgtgataagtgtaagtcactctccagattccccttactaaatttcttactgcaataacgcctctctgactgatgtgcctcgcctaccacgaatttggagagtgactgttctgttaaaactgttctcgattcgatgcaaacctgttgtttttttttatgacaggtattataatacccagccttcagaacgaaagcctaacaggatacacataagacgttttacagctgaaaaaggaaacaacagaaaagactggacaaaagacatgaccagcatcaccgttactggaaaagttccagcaaccaggcatagagcacccacaccctgattcagaaaacactaacacccccaagatcagcatataaaaactactcctaaccaaagtctaaatcatctggcagcctccctgaaggacggagttgttgcagtttggttatcaggtctttaatctgctgctgcaaacgcgcctcttcttttcttctttgaatgagcctccagcgttgtagcagcgaaattatcctgtaaacaacctgcaaaggagacttaagcaatttattctaaaaacccattcattcctagttagccaaataccccaaatccaactatcaaacaccactacaccaagcttcccccctaacttttgttttaacaaatctaaaccttcccagaaagagacagggatcacagggaagtgcaaaacttcctcgaccacacaccaagcaaatttcacaatagggtaattgaacaaaacatgattaagagtttcagagcccccacacaacttgcatttatcatctcctcccttccagttccttttaaccaactgaaaggcacatggaatcctcccccttcctgcatgataaacaaaatactttatcttcaaagaaactttactcctccaggtcccctgc

SEQ ID NO: 9487 - DNA, 966 bp, Oryza sativa
  Intron number 1 from transcript LOC_Os01g69050.1 (locus LO C_Os01g69050) derived from phytozome v7.0 (chr-ID Chr1; po s 40126530 to 40127495)
ctcgtggaggaattcgtgattgctctcccaccgtacggccgccgccttcttgatcttctctgtttttttttcctttcatgccttatttttcatctgaatttttgagagtcttggggtatttgttccggttactggagttgattccgatagaggttgaattaaaattcgttaagtttgtggtttgtaacgttcttcccctgaatttacgctgctctgctatctttgctgctggttcttcgctatcttcggtttattccgttgctaaaagatcgaatttctccgggattgatgcgcacgtgatggtttatgatttcaattgtcttctaaaagttaatttttgagttgattcttttgcgattcgaagttctttccatatgtcttttgtttgttcttctgaagtattagctgttctgctttcgttatactctttaggtagttgtcatgcttacatcgcattggtgttgatttagtaacggaattccatgaacttaattgttgatttagtaacggaattccatgaattatgttcaaaggtttgatttttataatcgccacttctcgcacggaatctagctttcctgacctgcggtcctgccattttccatttgttttctccgtttagatttgatactacttgattcagtaactatagttattaatgagccataaattactcccctgttttaattcaatgactagtccaaagttttttattaatatccctgatatgttacatggatcatgtacatatatctgtaaattctccctttttctgttttggtttgtcctgctttttgttcctttttttttctctctgataattcccacacctaatatgtaatctgtaaacctcatttctattaatgaaatgactataagttagagcctactctaccttcttccgtcaaaaatatgttacatggatacctgccactattttctattgcagaatttgtgtcaatctga

SEQ ID NO: 9488 - DNA, 853 bp, Oryza sativa
  Intron number 4 from transcript LOC_Os01g69050.1 (locus LO C_Os01g69050) derived from phytozome v7.0 (chr-ID Chr1; po s 40128559 to 40129411)
agcgagcggaactcgccggcagcagcatctgcgaggtcagaacagatgctcactccattccaatatataacaagagccttcaaaatttgttataaaatatgagaaactcttttaagcatttagatagacgtttcttacatatcaactaaatagttatcaactaaatagttatgaaaaactttcaaaaaaagataagaattattactctataaacatgtaagtttgaattcaacttctatatattataacaaaaataataaatttaactgaatatacgtatactagttagagtttaatttattattttttttaaatttatagaagtcgaattcgaacttacatgtttatgaaataatatattacctataattttttcaggtttttgtaactatttagtttacatcaagaaacgaatggacatctacctaggaaattagaatccatctcctctaaaatataacaattttttcacacgcattttattttcaaccaatcataaacttatgctctctctttttcataatgtaagttattctagcattttccacattcatattgatgttaatgaatctaaataaatatatatgtctagattcattaacatcaatatgaatgtgagaaatactaaaatgacttatattgtgaaacggagaaaatagcattcaaattccctgcttactttctcttcttagtcaatcataatattttatcaaaattcttaataaccgtacttaacctaaaagaacagagatattacctgcaatgcaaacaatgcaggcaatgaaccgaacaaactaaactgctcgttaagtttgcagaatcagtgcaggccttcaggcagcgagccattgcc

SEQ ID NO: 9489 - DNA, 673 bp, Oryza sativa
  Intron number 2 from transcript LOC_Os02g48010.1 (locus LO C_Os02g48010) derived from phytozome v7.0 (chr-ID Chr2; po s 29381357 to 29382029 reverse strand)
ggactactctgcgggtcgccgaactggaacaagaggtgtttttttttaacccaaatcctggcttttctttctgttcgtggatgtagcttttgaattccaatctagggccatgtttctttgctcaccaaatgcaatgtgcggtttttcatggcatgctatcagtcgatgagaagtggaagcagtgaaattgagtgaaaaaaaatattagtgtgcctcgtgatttcattttgaaccgtaaatcatttgaacattccaattttcatttatttgtgcgaggccatttctgcacttgctaatgatttaaataacgtggtttcttatgaactgcttaagaaacagagcgctgcctagggtgctacattacattggtgtcattcttatgtccttttaataactcttcagtcatgttaatctattatttgaatataaaataggcttgtagaaactactgtaacaagtagttaggcatgcaaatacctacggaaggtggaatgttttatgtgattgacttctatgttccattataagcattcgatctaatatatatttttcttcagttcttatctctctcacgctggcttcctaaatcatatttactacagttgcacatccattttcttgtttgatcataccattagtagttattttcttttgtgttcatgtccgcagttac

SEQ ID NO: 9490 - DNA, 964 bp, Oryza sativa
  Intron number 1 from transcript LOC_Os01g41040.1 (locus LO C_Os01g41040) derived from phytozome v7.0 (chr-ID Chr1; po s 23239175 to 23240138)
gtcatcgccgccttcctcctcgccgccgccgccgggtaacgccgcccactcaccgctcctcccccccccctggtctcgtgctactagtacggaccgagatggattctttctcgaaaaggaatcggattcatgcgctcgctgctagttgactacaggttgtaagagtaatgccagcaattagcaagttgaaccgagtgtatgctcccagatctgtgcgcttaggagaggtagtatgtcaaatttggtgccgttaaatcgagaaaacttgctaggaattcccccatttttcctaggtatatctgcttggtacctgctgaaattttacacccaaatcttccatttaatatgagggccaacaaggtagtataatttttactagtcaacgtgtacaatatgagcacgagggtaaaatgtttctcggcatagtactatttgttatgaatgtgattgtatgtatgggagctagcatatgaataggtgctcagttgatattaaagtagcatattcttcacattttcataaattggctaaatctttctagtttatttcagtttgatttggtactctcttcagtttcattctccaaatcaccctaggacagcttataacagagaacgggaactatacctccactttctaattctaccagcattcattacagatcgcagaatttactacccacatattacgcactattacacatttggtgattactgcaatctaagaggccctgtggaaaacaactcccttttgcctaatttcttcatgcattttaacaggttatcaacaaccaacttaaattaatcttgcaaactatatctatcatggataattgcagaaatcaaaaatatacttttaattatcaaggataagcctgttcttgacctttggtgtaactttgttttcatcaaaatatggttgaatgctaaccttttcatgctttcgcttttgcagtgctgctttc

SEQ ID NO: 9491 - DNA, 899 bp, Oryza sativa
  Intron number 1 from transcript LOC_Os02g19380.1 (locus LO C_Os02g19380) derived from phytozome v7.0 (chr-ID Chr2; po s 11316732 to 11317630 reverse strand)
gacgtaagcgtcttgcccaaggtgttgcaggtgaagcactttgggcggcgtgggggaaggaagtggacgcatctagttaacgaggacaccacgtacaggacaccacgtacggtgagtgattttgtatctatccccacaattttgtaaaatttcaaaaaatgtgagcagcggcaagttatttttcacccccttgtgacgtactcatctgtattttaatgtatgacgccgtttactttttgaccaacgtttgatcatttgtcttattcaaaattattatgcaaatatataatcatgtgacaaaaaatttaattgtaataaataaagcggtataatcttatcttagatgaatagttttggagaaaaagtattcttacatggttgcataatgcatgctagtagatatcttcaaaactatagcccaatgcacaatatttggcaccatagatctttacttgaaatgatatctggaatggagacattagacattttcatagattgttcgggtgggactcagtcaaatccatatgtgacaaaacatttggaagatagtgttaacttacctctacctgctcaagccttagatgaatttcagcagctacaagttgaattgaatgagttacaacttcaaatacaaagggagatccttagtctgtcatatggaacagccgtgtttgttcctcagaattttcacgggctgaattttgtgaatcattctccccctagtcaccatttggctctggaaaactaaatgtgtcgtcaagaacaaagtatttatgtggctgatgttgtatgatcgattgaataccggagacacgttggacaaaatcacaaaaaactattgtgctctagaatgcagatctaccttgtgttctttgcttactggttctagggagacaaca

SEQ ID NO: 9492 - DNA, 999 bp, Oryza sativa
  Intron number 1 from transcript LOC_Os02g01770.1 (locus LO C_Os02g01770) derived from phytozome v7.0 (chr-ID Chr2; po s 427328 to 428326 reverse strand)
gagacctacgccgtgcacctcggctccggtaggttctgcatcgccaggttcatggaggaggaggagcaacacaacatctcacttcatccattcttccgcgtcgccggcgaaaaaagcaagaacgacaggttcttgctgctcaccggcgttgatgtggtgggcagtgacgacgccgtcgtcgtgcacaagtctatacgctacgcattccaaaacggcgatttcgttcgtggttactctcgagtcttttaatttacttacacctctctccggtaaaactagctatatttccctttttccttttcatttcgagcgagattacaataataatcttcttcgtttgtaatagagtaataatcgaaatgctgtatatgctccattcggccattcgtttatattaccaacagacaaggaattcacagccttattaagaggctgtcctcttattatatatgctccttcattctggaaaatgaaaacttttttttttgctagttcgaccgaaggattgaccgaccaaattttactaagagagaaaaggggttataattgtttaacattaagctgtcaaggcaaagtgacaaccaaaccagtcatcacccgaaaagaaaaaggggaaacagaacaggggccaactaatcacattgtcaaaaaaagttcttgcttccttctaataatatgatgatttcctcttacagtactacaatttggctgcagctattttaataacaattaagaaggcaaagtgttgtaaaatttgggcataataagatgatattatcttccttagcagttagcacagcaacaacatcccaaagatgaagggcccctttgaatcaaatgaattacgaaggaattttataggattgaaatcctatatgaaattttcttatgtagccctttgattcaaaggattgaagttttccaaattctacaaaattcctatggaatggcttgttgcatataggttttggaggaaacttagcaagaggtccaacctct

SEQ ID NO: 9493 - DNA, 541 bp, Oryza sativa
  Intron number 1 from transcript LOC_Os01g43350.1 (locus LO C_Os01g43350) derived from phytozome v7.0 (chr-ID Chr1; po s 24786379 to 24786919 reverse strand)
actgctgccctggtgccgcgatcctacaagcttgtgtgagttatctttcagtggcatctttcatgtgcatgttttttttttaatcttctttgtttcgatttcatcttttggtttcttgtttcctacagtatgtttttttgtgtttgatggattgaatagttttttagtttatttcgttgaattatttggtgtttgaatatgttccgttcagatgaaaagtactgaattgtgcagtgttgatgaagttttgttttgctgattcgatgcttctcggttcacaccaaaatgttcctaaaatggttggaggctggaagaaacagatggaaacaacaactgtaaaatgttcagaaatgtataaaatttactttctgcatttattaccttatatttttggtgtcatcatcaaaccacaatcaagttcgtgttcatacgccgatcaaagcactttggatgaaaatttcgcacgtttgacatcagtttcttccctttttttttatccttgtcaggaaaggaattcaatccgtgccatccaaagaagcag

SEQ ID NO: 9494 - DNA, 1002 bp, Oryza sativa
  Intron number 2 from transcript LOC_Os01g56230.5 (locus LO C_Os01g56230) derived from phytozome v7.0 (chr-ID Chr1; po s 32382006 to 32383007 reverse strand)
tgcaaagtattatttgtccctcttatctgttgatgtttactataagtctacatgtgaattgtcactttgatagttatatttagctgaatggaaaaatcggtgtaggtttgatatattttttctatgttataagcgaggactgtggagcaggtagggcccctttatatgagatgactattattataagcaggtttttctgggatcgaattaatatagccatattctcagtgtaacttggctacttgccacatcaatcttgagatatggacctatagataaaagtaattgagataagctgtgtaagtgcagatatatgtgcaattgttttcagattatttatgacttttgacttgcctgtatgcttgcagatttaaataaattttcaaattaaaattatgaaacaagtctaactgtttctttgaattataactttgtagcgtttaatcttattaggatcttttagagattattcaactcaatctacagtaaattgatctcaataatgcctcatagaaccaatcatcttatggttagtctaacacaaactaacctcagtgtgagctcctcacagaaaatacagtttccatcataagatttatatctgtgctgtaatatgatggatcaggtttagcatcctatatggaaacaaaacagcagagggagggtggggggtgggttagcatatctttacgcttaatgccctattagctgcttgaattattcagtacctagagttgtgttaattcgacctgacatatttccgcttttcctttaaaaaaaacaacattggtcaatagtgaccacagcatgttagtagtaagtatgctgcaatgctatgtaatattcataaatgatcataaactgtgccgttttgtttatttacgtattatgtaaacattaagtagttgcatgggacttgctatgactaatatctatgtaccacctcttttgaaaaatttcttcttggtcttgactacaatttatcacttgtatctcaggtct

SEQ ID NO: 9495 - DNA, 1005 bp, Oryza sativa
  Intron number 1 from transcript LOC_Os02g55134.1 (locus LO C_Os02g55134) derived from phytozome v7.0 (chr-ID Chr2; po s 33770631 to 33771635 reverse strand)
gacttcctccccccccccgctccgattccgtccaggcaagtgcttccctctccctccctcctctctctctctctctcttcggtggaagcggcgcggctcggtgtacgctcgcgtcgcgcctcctcctttcccctcctcctagtcgcgccgtggatcgcgccgccgggatgggggttttgatctctatgcggtaagaccattcggtggccgattaggatccaaccatgcctaactgtgatgattccggtggttgtttcggttacctgtgcagatgcgaagattttgttacctttaggattcagtgaaggtgcttgtaatgttaaatccgtaaatgtagtagcattatggactatctatgatgaagggattaagaattttcttgctattagttttcatgaaaataatggatttttcccccacacattatgtggtttgattgtgctatttatcttaagcaaacagcaaaattagaccttttgttgattattactacgcatgtcatagtgcaatcttattagtacttgagttcagcaatactgttccggaacatcctttttttttaaaaaaaatgcagagcatctaaaagtggagtgtaaaataaggacaaactgatcttttttttaataaaaacacatgtgccgagagaagcacatctcttactagctctacaactagtgctcagattgttctgcacatcagtagcatagcaggcattaattagtgctgaaattttactcttgggatgtttaggctttccttgatcttctgtttcatagctttgaaatgtttcttaccgcagtgtttagttcagatagatagctatattttcttattccgaaaagaaaaataaagataggtagctagctatacttttggaccgggggagtaatagatttacaagactatcagttgattcatagagagattgattatttgatatgttccctttgcccttttgcctcctcatttcattgtgcagatactgagtgaaaacctgctgctaag

SEQ ID NO: 9496 - DNA, 646 bp, Oryza sativa
  Intron number 3 from transcript LOC_Os01g49200.1 (locus LO C_Os01g49200) derived from phytozome v7.0 (chr-ID Chr1; po s 28282560 to 28283205)
ggcgagccgcccgtgcacgttagacaggttagtttctggctccaccaatggctgtaaaagaggtatcgcatggttggatcaaaagatggaagtcgaattcctgtggaactgtgctaattggcgatggaagaaaaggaagatttagtagagaactaaaagctacgatttctgttgtaagatgatagtactactgcttgcattgttgatctgatggaggtaaaccgtgtagaactccatcagcagttaacatttttctaactgattagtagtagcgtatcaatatattaagggaaagtgttggcagagcttacatttctttctcacttctattctcgactttatgcccagttactgctcaatcggttctatactttttactgctgttcccatgcattagcaatttaggatatatgttttgtaaaatttatctgtttccttcagtttgaatatgttcagcatgaataatatatttactgttttaccggcagcatgactaagttactgcctcaagtacgttttatttgttgaatacattctaccttcttgactaatcaattctgcttgactgtagattttagcacttcctcagccattcatgcagtaacatgcatttcatctgaaattttgcagtcaaatcagaagcttc

SEQ ID NO: 9497 - DNA, 883 bp, Oryza sativa
  Intron number 2 from transcript LOC_Os01g54424.1 (locus LO C_Os01g54424) derived from phytozome v7.0 (chr-ID Chr1; po s 31313530 to 31314412 reverse strand)
taaggctttgtgattcagtaagtgagcaacaaactgaagtgctttgctccaatagcaatggtagcatagccagaaataaacactttggtcctgcaattaatcaagtataaaaaattaagtgtctacttatgttagtcaatctgaacttccccacaaccaccacattttaacaattaaaccaactatcctctccagctaacaaataagctcttctttgggaaatgcacgatccaactttatgattctaacttttgatatctctttggatattaggttggacatgcataatctaaagtgtagatttgtctcgaaagtacttttggatatttttatcatgctttataaacacattgtacaaagaaactagctgaattccttgtgcgttacgtgggactaaattaaagttccatctttacttcgaattattggtatgcagataattgacttcataatttgcatgggaatcaaatcgcttatttattttattttttgttctgaattttcagttatcttgtattatatttagtgtgaactcttctaatatattttagtccgaatttaagatatttatgagttgtattttacatgaattagttgttttaatctagagtattataatctggacccataccattctcaacattaaagattttgtttttctttttctccaatgaccttgtaatatctaggccttgattctcaaattgttttaataaaatatataatagattgaaagtcaaagttgagttttggacagtgttaatgcccaaaccatcccttattcgtcactggagagtatattgcttacattactaaattatttcatggacaaccaatttttcttgtaggactgaaggtatatttcaaggaagatccgtaccct

SEQ ID NO: 9498 - DNA, 989 bp, Oryza sativa
  Intron number 1 from transcript LOC_Os01g24680.1 (locus LO C_Os01g24680) derived from phytozome v7.0 (chr-ID Chr1; po s 13886536 to 13887524)
ctgcaacccgcccgtcaactcgctctccatcggtacacgctatcttctttctctcgtcgtttgtctcctttcgtttgtttctgggattggggaagggttgcggggtagggttctctgactggagagtgggggaattttgagagctgggaggtggagaggtgtctctcgagaattatgtgattgtggcgctggggattgtgggttggggctcaattctgcttccatgagctgtctgattggtgattggggatagtgtggggatgcagcttgatgcccagatgtctaattcttcctttttaactgtattttttttggtagatctttaccaaataaactgtatttttggtagaattggatgggagatctcgaagttctgtacagtttgggtgtcctaagcaatacttcgattttggggttgtatacattgatgctattactttgaaatttctccttcggcagtttgaaacccaaaaagatttggctgctttacagggtggtttgcccattggtgtgatcttactgtatcttgccataactgtgttgctgtcaactatttcttgttgtaacttgctattattaaatgatggaacttactgcctaaacttactatcggcaaaatattactgattatgcttttgctgaaccagttgtattacatacatggagtcgaaagtacaatacaacatttgtggcatatacaccattctgaagtagtacagcagtcgcttgcaacttgaagtgcaaaataatgccattgttgaataatacagttgcatcttcctcatctttagacataataatgtgtaggataccattggtttcatttagataatgactattctgaataatacgcatgcccttagtttaaattgaggagttaacagtacacttctaaatattgagtaccgcattagtatcaaatcctttatccatctttgttttcaccatgacttttgctcttgcagtattgctaagcttaaaggaaaact

SEQ ID NO: 9499 - DNA, 305 bp, Oryza sativa
  Intron number 3 from transcript LOC_Os01g03820.1 (locus LO C_Os01g03820) derived from phytozome v7.0 (chr-ID Chr1; po s 1598222 to 1598526)
ggcaacaattcaggtagtttttccttcccatggtattcatatggataaagttgttctttgatgaatttggcttggcttctttgatgtcctgctgaattgtcagacaaatagtccttttctaggtgttgagatagtactaatttactgcaagtattgcttgttgcttggtttggaagtgctgatctattcttttgagttgcagagtgttcataattctgaaaagaataacacagagaaacacctcgccccactttctagagtttattttgtcttcttactatttttattttaatgatgaatgcagt

SEQ ID NO: 9500 - DNA, 526 bp, Oryza sativa
  Intron number 5 from transcript LOC_Os01g03820.1 (locus LO C_Os01g03820) derived from phytozome v7.0 (chr-ID Chr1; po s 1598754 to 1599279)
caaaactgtcaaagaagtttcaatctactgttgaggtcagcttctgcacatttgctagataattttatgaatcttttgagcactaggatgctagaaaatgaaggtgctatcatttgtgaaagtttctattacgtctaatagtttttgcttggatgtaataattattggttttaaaagcttttggaaatataccttttgagtttctttggtgatgattatctcaaaataaaattcattagaaaatttctcagcttgttgtaaaacaacaaccatgtttgttgcccaattgttttaaccttctccaatcttaataaaattggctggggcacttcttcgctgccggcctggccatttttttttctcagctccattgctcctatttatttgttgtagtcaaatagtcaatatgcattgcaagatatggtgcacactggcttctattctgctttttttataaccagctgaccagtgagtgttctctgaatttgcagaaacgtttaaagcatcgaaaaccaaaactaatagt

SEQ ID NO: 9501 - DNA, 1032 bp, Oryza sativa
  Intron number 3 from transcript LOC_Os01g52720.1 (locus LO C_Os01g52720) derived from phytozome v7.0 (chr-ID Chr1; po s 30320572 to 30321603)
gaggtaatgcctcactttcaagtttttctttgcacgaatattagttttcgtgattgtcctgaataactgaacggtagaatagactaacttatattgtatatgttgtgattgtgaggtactcatggaatattcatgttctaagactttgcctggcactggaaatgttcctttgtttttattctcagaatacatgggaaaaatatgcaaattcccaagggctcaatttttatatgtatatgttacgattcaaagtttcattgtgattctaattctatgcatagaacaaaaatgaataaagctaggaaagttctctttcagagaacatcagaaaaaaaagttttctcttgaattcttgtagctcttgcagctttctaacatagttcctggatattctgacatagttactggattagtcgatcacttttagctccattcttgtcaagaggcttcactgtatacttctctcagacgatacatttcactatttcagtgtaaatattgcatgccaataactcattgatttaatgagttttcccttcgtttttcacctacatttggtcttttactttgtattaccaagaatgttccacaaagggctatatctaatacaaatatatgtggcttactatctgctatagtgatccaaatgggaatctgcctgctccttgtgctttcattccctggatgttctacaacggatacatcagtgtagtatcaattggtagttgctaaaccagtggattagatagtctgggatgtaaacctccttcaatatgatgggtagatcgttaatgcttcagtgtgttgtgatatgctggtgccttagcctcacaatagtacctggaataaacaaatgtttatttctttgtgtcttttgggtgggtgacctttctggcatgttcattaaacttcactaatatttgttggcacattttgtaactgataggcaagctctttattcacatctatggaatgatttgattgaaaggaattgttatccaggtttatcatctgcatcattggagataactg

SEQ ID NO: 9502 - DNA, 543 bp, Oryza sativa
  Intron number 2 from transcript LOC_Os02g50680.1 (locus LO C_Os02g50680) derived from phytozome v7.0 (chr-ID Chr2; po s 30958197 to 30958739 reverse strand)
tggcagtgaagggccaaaaggttgtcctcctctcccaaacatttaggccatatcactgttgcttgttagtgctggaaaatatcttttttttttcagcggttttataaatctgagttaattttacactttatatcaaattgggccactaggctttagagttggtttggaactttgtgtgattggagcaattgattcagtgattaatgatatatggatttgggatgtattgtcgtgactactgaagtagacacactaaaatttgagttagttaagtctgagtatcagtgcaaggataatgtgatgtatgattttttttttaaaaaaaattgtaattgtgcgtggttgcttctagatcacaacaatgaaggttgtggatttgacatgcctattctgattacagttctggcagttgcatagcttatctctctgccattggcaaagcatctacaacaatgtgtaatcttcagtcgctcatttgataattattgttaattttctctgactcaacttgtttctttttctgataggtggtcgttaaattta

SEQ ID NO: 9503 - DNA, 758 bp, Oryza sativa
  Intron number 1 from transcript LOC_Os01g44220.5 (locus LO C_Os01g44220) derived from phytozome v7.0 (chr-ID Chr1; po s 25355795 to 25356552)
ccaaccctgaaagttttattctaattgcgggagtttgtaatttttgcttgttcaggttctttttcgtggcctttcttttttttccccttattttgcttagtctttcacagtccaatttttgggaagtagtatatcttagtttggtcctaaggcaccatgttgtactgcaggaaaaaaaagagtaattgtattctgttttttccttgattactatatccctgttttaattaattttgtgcctttgttgtttgatgttggaacttcaatgcccataattagtcatttgacttgttttgggttttgacgctatcttgagtgccataggaaactggtagaatttagtaataattttatatagactgaatgttgagcccaccacaaatggtttccttctgtacaagtatttaataactcaagcacaggaaacatcagatctctaatctaaaggttaacaatgggctcaagcaggagcagtagttcagctctatctgtatatttagaagggctggatctacctgtccaccagcttttaattttaccctggcagctggataacttcttgtctgttaatttcatttagtgctgtgttattttcttcttgttgttcaggatggatgcttttgaatttctggaatttcgtattttgttctatctctttatgaaatgacgttatggcacactttttctgcatattcttgatgaaaataattacctagtcatttttttagttgcaggtttgtctgggactttgagtaccc

SEQ ID NO: 9504 - DNA, 571 bp, Oryza sativa
  Intron number 1 from transcript LOC_Os02g06940.1 (locus LO C_Os02g06940) derived from phytozome v7.0 (chr-ID Chr2; po s 3519209 to 3519779 reverse strand)
gttggattgtacccagctgcttttacagaaagaatgtgagggtttgtctgtgttagtaaaagatctgagggcaactacttcctgtagctgataacagaaacaacatgctcctccactcctcaagcaaatacaacctccatattctccatattgtatgacgccgttgactttttgtccaacgtttgaccattcgtcttattcaaaaaatttatgtaattattatttattttattatggcttgattcgtcatcagatgttctttaagcatgacatgaatattttcatatttgcacaaaatttttttgaatgaaacgaatggtcaaacattagtcaaaaagtcaacggcgtcatatattaaaatatggtgggagtactgtaccgagtatagatgacgaagatacagcggccaagttgatacccctagcaagctgaagcagctagtacaatgtttaaaaaacaatcgagcacccagaatagactgactatctaccaaaaagtatcaaactacatagagcttctttctgtttaacttgtaggagatccatccaacatctagagctcctgtcaaatt

SEQ ID NO: 9505 - DNA, 526 bp, Oryza sativa
  Intron number 2 from transcript LOC_Os01g62860.1 (locus LO C_Os01g62860) derived from phytozome v7.0 (chr-ID Chr1; po s 36402888 to 36403413)
aggtaacttggttggtccaaaactttgaatcattcccgcattactggggtatcactgcagaattctgtaggcatggtcctcctagttctcgtctatgtttttgtttgaaacgattcgtgtatcaattttgcattaacagcattagtgaaaacagatcagcggcacaaaacagatgatttccgttcttgattcaattgggcaacctactgttatggaaacttgtatgatattcctccattttatatggactgatagtgaactactcgtttagataataagttgatgatcttccaccttctcaaaaaaagaaaaaagaaaaaaagtttacatagtaaaagacaaatctgcactactcagggccatgcgctggcaatcagaactcaaaactagcacttacctgtctttcttactactatatgctttacactagaccccaattttatcttgtttcaagacgagtaataattaataaacgcattttgggttttcaggtggggatagctctgaagaagctatttgaagaagg

SEQ ID NO: 9506 - DNA, 581 bp, Oryza sativa
  Intron number 1 from transcript LOC_Os02g51920.1 (locus LO C_Os02g51920) derived from phytozome v7.0 (chr-ID Chr2; po s 31794058 to 31794638 reverse strand)
cggtggagggtggaacgcctttgtgaacgtgacaggtaggacctaattttgtttgtattcttgtccgcagctaaaaatggctatgccaagccttaattagttgtgccacagctcgttaaagtaccatatatttgattgtttactggacatcctctactaacacgagtggctcataaatcgtacatttattttttagtcaaacattcttacggttatactttgtggaacttagcacactttcagtaaaacaagcgtagtataaaataaatcatcgaccaaacaaacccttattaactgaaaactttaataaattatattttttatttctctgtatgttaaacatcatattgttatattcatttggcatagttcttccatacaaccgatgttcctttttactcaacacttccagcattacatccctaatgcatatgttctatcattaatatttctaactatatattattgaatatgattaaaattattgctacatgaaaatgtttttttatgaaaaatcaattaataccatttttcacatgtaaatacaattattttaatctattactaattggttttagata

SEQ ID NO: 9507 - DNA, 746 bp, Oryza sativa
  Intron number 2 from transcript LOC_Os02g42960.1 (locus LO C_Os02g42960) derived from phytozome v7.0 (chr-ID Chr2; po s 25850244 to 25850989)
agaacttcaggttggatgcctaatttcacaaatcccaaattagtattctttcgtgctgcggtgctaaatgtttgctgcttaccataggttttatgtaataattgaaccaaatgaatcctgtgtttccaatttcagctataaacagaaattccatttggtctatgcctgtttgggttataaagtaattttggttctctgcaagtgttgatacaaacttttctctagctcatgcttatgctgttatatcatcatcttagtattctggatagatagacacaatctctggagtccagtgggttatgcattttttttcaagcattgattccattgcaggctatagataagacataaaagctcttgcagtttaaagtttgcttagttaagcagttttactatagtactatcatattggcatttattgcttaacatattggcatttatgtggagggtggaagattaaaatagtaatatcgcaaaatagtaatcagccacataaaaaacaatctgtagatgagcagccaattttgaatctttaccatcactgcttcagcttggcatggttgtccacctttagcatatattacaattctctgcatatgaaagatatattgatatgcttaattaataggttgggtaccctcaatttctgttatgaattttccctatggctcaagaaagagatcattttttttcctttttaatacaacatttatcaatataggcgggcaaacttcactgctgctgat

SEQ ID NO: 9508 - DNA, 509 bp, Oryza sativa
  Intron number 1 from transcript LOC_Os02g12210.1 (locus LO C_Os02g12210) derived from phytozome v7.0 (chr-ID Chr2; po s 6346656 to 6347164 reverse strand)
gcaatcacttattcttcaactgctcctttgctgaagttttcagcgaaagatgtttgcctagaaggcacagaaaagaaaagagaaactttatgataaatatagtagaaatgtgaaataaaaaataactctttgtgggtaatccaaaaaaaaaacactttggtgaaatcaaaaaacgataatatataacacattctgatctttttacacgtcaagtgttattcggaccatttcatgagataaaccagtagctcctaaaaacatatgaacaattatatttagatgaataaaagcattcgtggatactttctgaacgctagcaatatacatctagcaggctagaataaatatatgcatacaccgagtaaaagagattagtgtaaattgagataagcatctttcataaacgaaacagagcagagcataatccatgtgaaaaactgaaaaccattcaaaaaatggaacaaaatgataactattaagcctttttctttgcacggattcagcacgaa

SEQ ID NO: 9509 - DNA, 1043 bp, Oryza sativa
  Intron number 2 from transcript LOC_Os02g17640.1 (locus LO C_Os02g17640) derived from phytozome v7.0 (chr-ID Chr2; po s 10153807 to 10154849 reverse strand)
ccgtcgcgagggagcgcggcatctacgtcgtctgggtacacttcttgcttccttcccctctctctctctcctctcgcggggtggctcggttcttgttgattagtgaagctccatttcgtcctcgtgtaataatttgtttagtctcggttgcttggtttggttgaatgcgacgaggactgcgaatttcgtggtcggattcaggaggaatcttgtgtagcctgtggtgctctaagcaagtgccacagatttcttggttcagtgcaatgtatgtgcagcagtgtgggatcaaaattcgtgggtggatttcctttggtttttgaccatcctgctcgtcgtttcggtttgcaggtgcagcatctgccagcatttcaacgtttaatggcgtggaattgcaatggttgctcacatttcctcactctgtagactgattgacgaatagaagttatcttttgatttcttgttctgtcaggtcatttagaaccatattctaggcaacaaaccagatattatgcattattttctgcatgagtgtatgcaaagaacagagtttatgtggtatagtagacacacatttgtttttatctgatgaaaaccaattttcatattggagggtcgctgctttgctggattaggtgactgactccctctatttcatctctaaatagcagaaggtaggtgtgttgtttaatgtttggcgctgcacgacattattctaaaatctacaaagcgaataatttgctaggtgcggtttccactatgaaactaaaatttggttcttttgaattggcttctgcaacttatacatgttcatggttcattaaatgtaattttgaattttactaaacatgctattatgataatcattggacgtgttgcaaaactagcagctaacctgtattaatgtgatctacatttcccccttcctatgcaaagcattttgcttcaccaggtagggattttaatgccaatagatttacatgtggtcatagttttgagttctgagaccttggttgatgatgactgcatgtaggtggtcagagagc

SEQ ID NO: 9510 - DNA, 583 bp, Oryza sativa
  Intron number 1 from transcript LOC_Os01g72740.1 (locus LO C_Os01g72740) derived from phytozome v7.0 (chr-ID Chr1; po s 42206179 to 42206761)
ccctcactaaagaaattgtcagcgccgtgttgtttgtaagtactccctctgttccaaaatataagcattatagcataataacgagtcaaatatttttaactttgaccattaatagaaaaaaataaaaaagatcaatcacgtaaaattaatgttactagatttatcattaaagaaactatcatatatgtaattttttttatttaaaatatcttattttatagatattgttagtcaaattagtatctcggagaccgtgtcagagtccataaatccttatattttgggacggagggagtactcaaattcaaacttatgctcaacctccattcctacaattacttgtgtcgtgctatgtggtaatggatcatatacgtaatatctctaggagaatatggttgtagtcccactggctaagaatatttgattatttgattgatgtttagtacaagatttagtcgtcaaatacttttcactagagggagtatgcatcataattacaaagtttatggagtattttttttaagaaagtgtaaatttgaatttatcaggatcttttcgctgctggctcagagactacatctac

SEQ ID NO: 9511 - DNA, 827 bp, Oryza sativa
  Intron number 1 from transcript LOC_Os01g62020.1 (locus LO C_Os01g62020) derived from phytozome v7.0 (chr-ID Chr1; po s 35896544 to 35897370)
ctgtgcactacaagtacaaccccatcaagacgatcatatccttctcgtcccggatctgcacatacctttgatttgcttacattcatgtcgacttgatttgatcttctcctttatttttttttattgggttggtgggtgggagatatgcttgaagcaaactagcacataagtggtccagatcaagctcgtatgctgaaacttttggtggttggtttggattcaagtgaaccctggatcctaaatttgcctccttttttcaatatcaagtggttgttctgttgagatcttaggaagacgcgatagatttgttagttgtgatgcacaggtggtaaatgtggggtagccggttctactgtagtgccatttatctacaggattttaacagagagtagtagttgttccatacgtccatgaacaatggctgtgtacatccgttttggatgtagaggccgggttctaacccattttctaaacatacttccatgaacaatccttggcaggattcgattagtttgttcattgaaatgccatatagatatagcacaaaccagcttctgttgtacgagaattaggaaaagagatcacctgaatttttataaggtacatttattttttttcttaaaaaggctttttatgtgctctatcgtaactcaatatatagttgaagttttatagttaaatataaaaccgttatgtcttttacctggatatttgaccaatcatgtttttttgcaacttattatgttattttcactatttacaatataatcatgtgttgcatctgtatattatcaaatctgggtttcttaacaattattacaagacca

SEQ ID NO: 9512 - DNA, 769 bp, Oryza sativa
  Intron number 2 from transcript LOC_Os01g47190.1 (locus LO C_Os01g47190) derived from phytozome v7.0 (chr-ID Chr1; po s 26971064 to 26971832)
cgtttgaagggaagagcctagaaacattgcctgaggtattcttcacccgaatgatgcatctttgccactttctcgtggaacgcgaagttgcaataaccggaactagtaaaagaaccgttggtcattttaacaatataatcgcacagcagagtgatacaagactgttgtgtgaagatgttggttttaggtgacattgggtgctagattgagaattgatgcaattagtgaaatactggttgccaactgccatgaagggcttaaaaatctttggctcctgatagcactgctactagtattagattaatagaatatgttaatttgactagtgtttaagtgttttcgcagacaggagtattctcgacctgctagttaaatatctcaacaaacaatgaacaatgtaatatataggatataagttccgttcattcttagaactaatttgaggaatggatatcctcgtgtactcactttatcatgattcatgaatcaaacatacaagtttattctgtttggttttaggttactgggaaataggcagtgagattggtacctttgataagtatagatatatactttcttggttagaaatcagggaatgaactaatatacacttccacgccagtactgatattgcagattttgcactatattgactgagctatgtttctttttctgaagcttcttcggtttatggatcagccatttttttgcttggtaaattccatcctgttctcattgaatttccctttcttgctatggatttaggtgt

SEQ ID NO: 9513 - DNA, 566 bp, Oryza sativa
  Intron number 1 from transcript LOC_Os02g39920.1 (locus LO C_Os02g39920) derived from phytozome v7.0 (chr-ID Chr2; po s 24139930 to 24140495 reverse strand)
ccttgctcaagctcatccacgtgagtctctctaaccctctctgtgctggaattcgtttgtgttcgctttgaaacgttttttttttgcctctcctgtcagggttctgctgtttgttggatttatttatttttattaatcctgttgattgcgtggtttcgggatggttggtttgatttcgggatggttcggaagctttggcttgataccattccgcgaggattgattcggttgggagtcgtgatttttactggactggaattccgctttagattcattttggtttctgctgctctgcaatccgtttgattttccgttatggcacaaagagcaagcatttgtttttctagagtattttccgtcgtgtttgttgacatatggagttggattgttgatatacggagtttgccgtggtgttgattcctgtaaatgcaccatactcctttaacattacagttttattaagagcatatatgatcttcttggttccctagaaaactgatctttgattggcatgattgtttgttcatgcaggaggccgaaatatatatattgaaagtggaacaagc

SEQ ID NO: 9514 - DNA, 557 bp, Oryza sativa
  Intron number 1 from transcript LOC_Os01g46220.1 (locus LO C_Os01g46220) derived from phytozome v7.0 (chr-ID Chr1; po s 26289431 to 26289987)
gccgtgtcgttattgatttctacggtgagttcataggcccatcaactcctccctgactgttccaaaatttattttcccatgtatggtcaaaattgatttttcttttgtttacagtcagggcggatcacacagctaggatagccaatattttcgtaattcaacaacattgaaaatcatttgtccatgtttttgtccaggtttttgaaaatttctagatccgttattgtttacatagatagtaccctctttaatcatgaaaatatatcattttgattttttttaattatcaaacctacatgcataatttgtatattttcaataaaagattatttgatggaaaaaattaaaagcttgactttatgtttagtaactgaagagaatatacagtagagcaccattaattcgagtagtagtgcacatacccaatacagtagtacattttttagatgatgatactgtgtgtagtacatgttttttttttttttgacatgcccaccatgtgcttgcgtatatatgttgcagcgcaagcactccagcttccgtttgtaccaccgagt

SEQ ID NO: 9515 - DNA, 730 bp, Oryza sativa
  Intron number 2 from transcript LOC_Os01g10130.1 (locus LO C_Os01g10130) derived from phytozome v7.0 (chr-ID Chr1; po s 5291187 to 5291916 reverse strand)
aagtctgcgtgatactgttagttacagaattaccccttttgcatctgcatatcctttcagcggtttttatatgtatcagtgatcctcagtttactattcaccagtcaccatatagcataggaatatccactatccagcatggacaccactggaactgctttaatgtcttgtaattttgtttagtagaaatgcaccaaaattgccatgctttcttccaagttcttgctgattagcaccataaattttgcactttaacaaggtgagatggagtttttgcaatttccttttagcaatgagaacgcatttttgtattcaaacaattatatattgctggcaatgattttgattgcaattgtgaagttcgttggtaaacagcggctaaagaaaatgtttagactagtaacttatgatactaaatacatctgggtatttggggcttcaggacttcaattgcatttttaagttcattttcccaaatttagactaacttgaacatgtagtcttttagacatcaggaaatctgtgtgactgtttttaataaatagaaaaaaaatctcaaatagaagatattatggattattaaaaggttttgaatttgtcaatgttaagaactaatgttctttgtcatatttcttccttgcatccattggttggtactgtatcacttatgtttgatcgcattctggtttgttctttacttattagctttatctgctgttcaacagtgaaa

SEQ ID NO: 9516 - DNA, 897 bp, Oryza sativa
  Intron number 2 from transcript LOC_Os01g04660.2 (locus LO C_Os01g04660) derived from phytozome v7.0 (chr-ID Chr1; po s 2096680 to 2097576)
cgtggagagaatacggtgagaccaatgagctctttgcattctgttcaactcttgactgctctgatgtgctttgcaaaaggatgttcgatttgacagatgtatagtactctttacatctgaaattcctcgcaccattgagacgcatgaaattcctaaatcctaatgcgctttacattgattgatcggatacttagttggcgatgcttgtgatttcagtgttgctttttgcccctaatgtgtaatctgtatctgaccttcctcttgcatagggtgttaggcaattagtctaatgctgcttcctgtaagagcaaggataatagtgggctataagcaagctatatgtttatgtagaagagagagataaacaaaagtggggagtgttggctctcatgcaagagctaactgcacacaaactccaagaaatatgcattaaattcatggtgagagaaagagagaggatgaaaaaaataaagataaccttatagccaacctactatacatgttagctttaacattgactaattgtaattagtgagctgtactattaaacttgctctaatctgtggcctgcaattttccccttcgtcgtaagtcttgagtaacgtgttggaatatttatgatgcgattattacatgaaaccaagtttcgttaggatttgcctcagaatcaaaattggggccaatactcaataggactcatgttcagatatgatgttcacatttagatgtgaagcaatataatctaattaacatcctagttgaacttatctcatgttgcagtaatgcaagttatgtttacctcctgaaactcaaatgctggtcatatctaggcttaattatggtacgcctgcttgtagaatactgatgttcttggtataagtattaattttcaacagg

SEQ ID NO: 9517 - DNA, 594 bp, Oryza sativa
  Intron number 1 from transcript LOC_Os01g03240.1 (locus LO C_Os01g03240) derived from phytozome v7.0 (chr-ID Chr1; po s 1312581 to 1313174)
gcaacagataagaataccaaggtattctcagataagattttgatctcaacagatcctgtttcgagcatggttgctttccacataaatatcaataacctattgcaatctttcccacataataaaccatcatcatccacaaaaaggcatgataccattccccaaacaccatacatacggcataatcatcctaatttattccttccacaatatatactccggactctgcattcactgttcaaaacacaacaacaacgaagacaccattcagagcaaagcttccaagcgcgctctcaccctccattccaccgttcttagtagtagtgactttagcctaccttgcatagtatattgaagcaaggagttgtgtaataacgctgtgtaaggtaagaacagcttgcttgtacctaccttcgggtttcccgaaagggaaaaccgtatgtaagcttatctgtttaatatgaagtaattttccttaagtattcctgcacgtttgttctagacaagtgtttatgctaaggaccctataggagaaacctcttcggtttgttctcgtttttagcctgcatcttgcataggcgtctggagaatcggtat

SEQ ID NO: 9518 - DNA, 780 bp, Oryza sativa
  Intron number 2 from transcript LOC_Os01g19850.1 (locus LO C_Os01g19850) derived from phytozome v7.0 (chr-ID Chr1; po s 11259352 to 11260131 reverse strand)
gattggaagcgtcggcagtggggttggggagagaggtgcagtggcatgggttgagaaggacgaggtgcgtgggaggagaggtggcggcgcgggcgtagagaggggagaatggaattaaatttgaaaatacactgtttattcaattttttcttataaatattcgggatgtaaaaatttttgcgtaaatatactgccgatctcgcacaaccgttgcgcgagaatgacgtgggaatgacgtcatggacagtatcacgcggcgaaggcgcgagaccgcacggtctcgcgggacaacggcgcgagaccgcgcggtctcgcggaatggtacagcgagacagaacgatctcgcacaagcactgagcgagaccggtgccatgctgattcaattagcgactaattatcttgattagcgattaattaattattaattaatccctaattaggataattagttgctaattattattagttaattgctaattaagtaattaagcactaattaaatggagccgctggacagtttcgctgtttgattccgcgagaccgaacggtctcgctcttccattgcgcgaaaccgcgcgctctcgtgccttcgctgcgcgagaccgtgcgttctcgcactttcaacgcgcgataccgcccatgacgtcacacccacctcggtatttagtgggagtttacacccaccaacaccaaaggagctatagacagttccttgaaatatatttttgttacattttttttttctctggtgtgcaggaaactgaaactaaacttgatacc

SEQ ID NO: 9519 - DNA, 469 bp, Oryza sativa
  Intron number 4 from transcript LOC_Os01g13520.1 (locus LO C_Os01g13520) derived from phytozome v7.0 (chr-ID Chr1; po s 7546672 to 7547140)
tgttcgcgcagattaccctgcagcctgacccggatgtgagtggtgaccaccaccgtttttttttcttcttttttgttgtgctcttgtcgcctcctctgatggttttggaatgtactttgtgctgctgccctgttctacaatcgtggtgatccttttgggttccccttaattttgattctgctttctttttttttagataatggattaaaaacccggcctctacatccaacgggatgtacacagccatgattctgctttcatgtcctgaattttggcatgttttaacagcggtctttttttactgaaagtaaatttacttgatgtgtactttggatcacattgtgttatatgccgaattggcccggaaaaggcagcaattttgggtttggtgtgtgaaaaaagggggagtgatttggggctccactgtttttcagcaagagaatctgccaacattacctgacccgcccct

SEQ ID NO: 9520 - DNA, 865 bp, Oryza sativa
  Intron number 3 from transcript LOC_Os02g39030.2 (locus LO C_Os02g39030) derived from phytozome v7.0 (chr-ID Chr2; po s 23568418 to 23569282)
agaagaagaagaggtggccatcaaacaaggcacaggttagtaatctgcagtcttttcttattgacaatgaaaaacgaaatatccttgtgagtggtatcttgactcttaaagtcttaattggcattttgtattttgatgcttgtgcaagtcgttatgatttcggtgctgtactgccatatagcatatcatgtctgatacatctcacataaagaagataaacacaggaaggaataatttcaggtatcctggtctcaggctatggggttgattaagtaacctgatcctgtgatctgtaaatctgatttgaattgtcacattttagaccgatttgtcttcctagctccagaaaatatctactgatagaaagttcaagactcccttttgtctgattactcctttatccacttcacttgtttttttttttaattcaaccctgctgttctattggcatcatggtatgccagaccaaaacttttgcttgatagcaaggtaagagctaatgcagtgtacaccagtaggttagctctagtcctggtttagtagctagttggaccatcaaaatttgtataattgtaaatagatataaatctcccgtgtgtgttttcccgaatcagttggatattttttgtgggatgatgaccattggggaagactggttgcaagctgtgttgctattttcctatctctagttcagattccggaagtcctcaaggcactggtggatacgcttcaatttttactatctatgtgttttgcaagagtaacctcaaatttcaccatcttgttttgtgtttttttttcaaagtaagaatgactgcttttacatgctttcatatagatttcgaagagcaacggaaggctcact

SEQ ID NO: 9521 - DNA, 987 bp, Oryza sativa
  Intron number 4 from transcript LOC_Os01g64720.1 (locus LO C_Os01g64720) derived from phytozome v7.0 (chr-ID Chr1; po s 37551769 to 37552755)
agagatccagagtgtagttcttgcagagggtgaaggtgcaatcttcagtatctcacaacaatatagaaccatctcttatttcgcagattaaaatgttgtagttcagtagttctgctgttcacttaacataacataggctgaaatagccatcaaaacctgttatgaatgtgttgatatatactcttctgtttgagttggcatattccgctttgcctgctgaaactatggcttacaaagagcataaacaacgaccgtacattatattgtactccctccattctataatataagacacaactactttttctagatgttccataatataaggcatacatgcatgtaggcaattaactattaccccttctccattaaattattacttttttaaatcctccactctcatgttctctaattctattggatgcatgcattgtatttattaggatgatccaaactacaagataataattattttcttggtctttgggttagggtggttatgccttatattttggaattgagggagtatttaattatattatatcttgaggaaattttatagtaactgctcttgcttcaatataattgcttggcaactagtactaattttcaccaagcactgtctcatgcgcctgtaacttcctagccatttcagttttagtgatctgtcattttaattttagcttgttggatttgctatacgagttgactatttggttggttctaacttaggtttgtaaatgcaattgccagtcacaggcactaggcaaagtactagaacgatatatacagttatacacaaagcaaggttgttaagtgctgaggataaaattatatgtttatattgtaatttaccgaataaatttatttatcaattccaattcggctttcagtttgttcttcttttagtcttggtaaaattaaaacggcacatattccacagtttatttcacacccttctttgtggcattaccactttaccaggtg

SEQ ID NO: 9522 - DNA, 854 bp, Oryza sativa
  Intron number 1 from transcript LOC_Os02g35190.2 (locus LO C_Os02g35190) derived from phytozome v7.0 (chr-ID Chr2; po s 21149688 to 21150541 reverse strand)
gccaacgtctgccccatcgagagcctcgactacgagtacgcattcgcgcgccctctgttcatctgctcaatgcttttgttcttttagttacatcatttatgggtgatttattaggtggttcggttgcatttaggagacatatttgatctttactggattaatcttgcaaattcaagtgcttttattgctgtttcaatgatggggaatagtgcaaaacatgattcttgtttctatgtcattagcgattagtcgaggcgatgttagcacataatctcgaatctcgggtagccgaatgctagcttttcccttagctagctccttgctgatctggcttgtacttcaaataaccagtactcccttttgtttctttgggtgattattgagtatggaaacgaagttactaggagctcatttgaagtaagaaaaaagaggtggaagctacaatggattatatcaatcaatttagacattgtttttgaagaataaatgcagtgatagtacagaaccaataatttgaaagataaaatttcatgcaaataccacgcggcagttcattagatgatttttttcttatttgggagatgtttactgaagaatgaattgcagagagaaaggacatgtgtagatactaatatcatgtaggaggaaaactgtattaattaattaagatgaacaagaaccaaaatttgatccaaagagggctttttttttaagccaaagtgaacttgaacctgtattcctagataaatgcaagtatcaaacatttgtattagacactttagtccatctgttacatccttcatatgttttatgtttcagagttgttgagaacgaccttttcaagcaagactggc

SEQ ID NO: 9523 - DNA, 930 bp, Oryza sativa
  Intron number 1 from transcript LOC_Os01g53700.1 (locus LO C_Os01g53700) derived from phytozome v7.0 (chr-ID Chr1; po s 30854090 to 30855019 reverse strand)
accgcatcgccgggagccacttgcgctctctcaaggtaccgcaccctcccatcccgatccttcccgctgcaaaaccccccatccgattcgcccgacgcggggggcgttccgtgtaggaattgatggtgattgtggctaatccttgtttacttagtcagatgttgaaacgggagatagattgtttgttgtcccacgatgagaagaagaaacctgcatcccgatacatttagcggtcactgattctctctagcacttaccgttttcctgttaaatttattcagataacgcagctgaagtcctgtaaatcctttaaccaacatttttcgtgacggtgcgggatgctatgttgaatgcacggacgccacattttcttttgcctattgcattatattattttgactttttaagctgttttctttgcttgtctgatctgtctagaagtgttgggttgatgagttatcgctaactcaatacacatagtgcttatatcatcttttcagattgataatgttaatacgatattttgagtttttttgggtaaggttcacctgaatgtttaaaacaactattttaatgtaactattatactgcaatttgattccaaagggaaagggtgatgtatgacagtataagttaagctgcaaagtttacttctcggagatttcttttcgcaatatgatcttgctagtttggtttttcagtgaccactgcctccagtattttctgtaatttgtatagaatttttttcatgtgcaagtttttcagtttgagtaccttcttacttctaagtaatttcacctcatgttgtttctgccacattatttgttttcctttatttccataaaaccatatcatgtatcataaagacgcatctcttttgcttatgtggttgcagagatacagttatagtaggtttgctagtacaagtgt

SEQ ID NO: 9524 - DNA, 977 bp, Oryza sativa
  Intron number 1 from transcript LOC_Os01g13360.2 (locus LO C_Os01g13360) derived from phytozome v7.0 (chr-ID Chr1; po s 7445123 to 7446099 reverse strand)
tttaactaaacatatccatacccatcactttggtaagtatcatttatgtgccacactatatatgtatatgcacgtcatttattttattggccacttttctagaaatcttaacccccttttcttacaaattcatgtgttgatgggtatattctgtggatttttattattatttggcatttattatggaggatggattcgaaggtaacatgtagagtaaaatacattgttggtccttaaagttgttgtgtgatgtcatactagtccctaaactttgaaactttgaagatggagtttgagaggaggggggggggagagagagagagagagagagagagagagagagagagagagagatggtaaccacaccagtatccgaaggagtatttggtattttaataagattaggatgtgtacttttttctcaaagttaagggatcaacatggcaccatgcaacaagtttagggagcacttctagtgtattttaatctttacttaaatgtgggaaaattatgtcttttaagtacactgtaggtcttgtgggagctacttttatggatgtgcctttttgtgtggcaacactatgttcaatttatttaggatattgtgcttatgtagtgtgattaaaatgatcaaatcaaaattgtgattgatgtcctaacacatactcctttgtcccaaaaaaaccccccaatcctagggatgtatctggacaacgtgtatgtctagatatatatctaggattggatttttttttttggacggatggagtactactttaattaatttcacaataactatatttggaattcgaaatgcaaagttcctttatctatgttcttacaactatttctcttcatgtacttgatttctggagatggcttccaagatattgtaattaaaaacacatccctcacagcttccatagacgctactaaagtttgtggtgcatatcaaagaaactattgttgacaagagc

SEQ ID NO: 9525 - DNA, 691 bp, Oryza sativa
  Intron number 1 from transcript LOC_Os02g30410.1 (locus LO C_Os02g30410) derived from phytozome v7.0 (chr-ID Chr2; po s 18104845 to 18105535)
tccgccgcaggacgccgtgctcaaggccatctcccgtgagtaaacctttccttcccgttccccggaacccccttcctcgcctcgccgtgccagtggtagttctgctcttccctcttttttgactagcgattgtttggggactgtcgctggtgatttcagtggccaggtgatgattttttttttttgagattgggattggggttttaggtgtgtctggatttgcagctctgctcgccgccgattgcttacagcaatgtgagtggaaagataacatagggggcaatggtgctgaactcctgataggatggacttccttagatattcttcttgtcccttggtcaaacccctaccagcagactgatttggagtaaattaccgacaaatggtggtaggggaatcttcgatctggttgcctcatcgttattttcattttaaaggagaagttacattcagtgtcaagttggtcactctttggacatacggttattgcgaatttgtaggtctcaatctttggttatatgcatacttaatgggctaatatggtgagaatatactatgttcagttctcttcctattgtttgtttgtgttaagttttccataggttataacatagtggtggtctcttgtggttttaacttttcatttcctaaaatagaggtagcgaactctaaaggacgggttgcacagaca

SEQ ID NO: 9526 - DNA, 729 bp, Oryza sativa
  Intron number 2 from transcript LOC_Os02g30410.1 (locus LO C_Os02g30410) derived from phytozome v7.0 (chr-ID Chr2; po s 18105586 to 18106314)
gcttgttctggataagcaggtatcctatcctctctattgggtgtttcattattacttctgtttgttctttctttcacaacaggcaagtgaatgtgcattttaaaaaaaattaatggaagcgcttgtttcatggagtcattttgctccattttcatgtaaatattccatctgaagttggaaaggtaggaatttatgtgtccctctagatttcaacttagattttttgcatcactgttcttacactagattgtatactgggaagctacataaggcaacagcagacaatgtcattaacatctgcagtcactagtcggtaatcatggctaaggcccagttcttttctccaactccaaacttcaactttctcatttttcgttagcaagtttttcaaactattaaatgatacgttttctgcaaaaaaatattctatatagaagttgtttaaaaaaattcaaataaatccatttttcagttttataataattattaatgcttaattaattatgtgctaatgagctttctcgttttgcgtgagctaaaaatttctatccacacaagccgatcgaacgcagcttaaggagtgcgagttggttgtcacagtagcctatggagtatggaacaatgaacactaagtgtacttactttggattttatttcaaccatgacaagggcccttgtttcttttattccctaggtaaatacatatcctacagttagaggatttactgc

SEQ ID NO: 9527 - DNA, 881 bp, Oryza sativa
  Intron number 3 from transcript LOC_Os01g60050.1 (locus LO C_Os01g60050) derived from phytozome v7.0 (chr-ID Chr1; po s 34732690 to 34733570 reverse strand)
tctgggtggggttggacgcggcggaggttttcgttgtaagttcaactagaatggatgattatggagcatgattatgatgaatcacctgcattaatttagctcatagggatggtgtgtgcctgtgtggtgccactcacttggtctcctacaatttatactgtagattctaaggtgtattgttctatttagttgcaggcttgcttagtgctaatcgattgttattcaatatctaaagtaatcaaaagctcctctcaacagagtttttcatttaacttacaccatatgcattatagcgaccgtcatggtactttggacgtatactggatcaagtcgcactatcatttggatgaaaatgatatattgatagagaaattttacgatttttgataaagtacatgttggacatatactggatcaaattggacgtataaatgtataatggatctgcattttgtgcaatcgcataatcctaacggcaatgcgatgtatagattttaagagagaaactaccttaagccattgcttttaattagtatgtagtacatttctaaactatattgaactcattgatgcataagcttcatttggtataatctgtcatcatttatttgccgatgcctacttactcttctatattttgattacgtcttattcctttcaatactttgatttaatcatattatttgtaagagaaggactaattttgttgttatgatcatatcctgatgcgaggcaacaagcctgtgccttagaccatcttctctttaaattgcttactcaaccgatctaaagatttttcatctctttgtattaccacattttgcctcttgtagttatcgtctagcttaaacgcacttcatattttgcgctatcaggaatca

SEQ ID NO: 9528 - DNA, 957 bp, Oryza sativa
  Intron number 3 from transcript LOC_Os02g22140.1 (locus LO C_Os02g22140) derived from phytozome v7.0 (chr-ID Chr2; po s 13182074 to 13183030 reverse strand)
ctcggcttcaacatcaagaccatcaagtaccacaagtatgagtcccatcggtcctcttctgtcgctcttactgctgcattattatgatgtaaacttgctttcggtaaggtgattttttcatgtgaaatgatgggcataaccattaaatggatacgaggtgacacatttcatcgttgatataatttagttgcatcttctatatgctgaatttgacatgtcttcattttcaagttagatgaaatttcacctgatatgatccagtgagcacccacctgacaatggtttttttttttctcaaagggaatcatgtgatgttggagtgttcctatttttttttccatcaaaatggtgtacagatcctatttaggaccatcaaaatggtgtacagatcctatttaggacaaaaccttgcagcaagggagaaattcgataattcatctataccacgtaattttaaagcttgttaaatcgtgaaataaaaaggcataggctagtggtctgatagatcagttttgccagttgcttcattcgaaatgtgaatcttatgtgttcttttgtaatatatcgcatgaccattcacattaattggggaagaatatacaaaagattacatgtagggagctagggacctcaccacagaaaaaacttaactcaggtgctagagctaaattagagtgagttcacggtttttggttaagtacctgattttttttcccctcaggcttgcatttcttcaatctgaagtgcccctgttttagtgcattccgatgatgttagtcacattgttgtcaacaaacaacacaaaggtagatacaaaagtctcatgttcaaggcagccactcactgatcattgcatcagccaaaacactaggcatagcaattccatttgtattacttcagggtggaaattaatgaataatgtttgttttgtcattgtggcaggtactcattgaacat

SEQ ID NO: 9529 - DNA, 626 bp, Oryza sativa
  Intron number 1 from transcript LOC_Os02g22140.1 (locus LO C_Os02g22140) derived from phytozome v7.0 (chr-ID Chr2; po s 13183406 to 13184031 reverse strand)
gccagcttaattaattttgtgctctcgaaaactcggtaatcttctttcgctactccaaaaattttgattcaggaattagtaagagtgattcaattctagagatatatgcactctttcagagtcactgctgcattaggattgccacatcaatcaaaaatgtattctgcaaatattgtttactgctgtgttgggatctggctttgcgtttccaattttaatttcagtggtacaagaactaattgtctgcaaatacatttcttgcgcatcatacatgacaggtgagctctaattttaatgccatacaacattgctttcatttgaattaaaatagtaatcggagcaatgcaccctttcacaattaagttctatcaatgcaaaatttgataatcatgtttctttttgagaaaaaaattataatcatgttgaattttttttgagggctttggtataggttgtttctatttctatctaaaatcatagtgataaaattagcatgtgtggtatccaacgcagatttatcaacatgtatatgggatttatggtgttcgaaaaattttggtatgtaatatgaacttgtgatttgtgaagtaggactactaaacgaaaaattcctagctacgccactg

SEQ ID NO: 9530 - DNA, 886 bp, Oryza sativa
  Intron number 2 from transcript LOC_Os01g41240.1 (locus LO C_Os01g41240) derived from phytozome v7.0 (chr-ID Chr1; po s 23342738 to 23343623)
ttcacccacctcgtgctcgtcggcgcctccccgaggtgagaacttggcaaactaatactaggccaatagatagcatgcgtatgtttaaattaaattgtttgatcgattcattgcaaacttgctaaggtaattaattaattaattaattcgatcatggcaaaaggaaccactcctgtgttcgctatctcttaacgcacggaaaacagaacgattcattagcgtatgattaattaagtattagctattttatttaaaaaataaattaatttgatttttttaaacaacttttgtatagaaactttttgcaaaaaaaaaacaccgtttagcagtttgaaaagcgtgtatgcggaaaacgagaaagagtggttgagaaagggggcatccgaacacagtttcaaaaactagttaagctgaagatctcgagtttcagttaagccaggtttactatttggaatgcatgaaacctaccaggggtgatcgaagttccgaaaatttggaattgaaaattttaaaatttgaacaaattcatgctatttttttataaaaaaatattaaaacattcaaccggtagaatattctagctaacagtacccaccagtagaccctgaaatttcaaatatttagtttcgtaactgtaataaattaaccatggaattaagctatcattttatcttatctgaagtctatgccggcttaaaatgcttatataattattaggctagtggttgaccatcaccagctgcgtgcttagattagatcaaaatgatgaaattaacgacttctaatctagatgtttttcttaatttcaatcttaattccgcgcaaggaaccatccggattacaattttcaactttggtaattttgtttgcaggtacatcaactcgg

SEQ ID NO: 9531 - DNA, 624 bp, Oryza sativa
  Intron number 1 from transcript LOC_Os01g05830.1 (locus LO C_Os01g05830) derived from phytozome v7.0 (chr-ID Chr1; po s 2790500 to 2791123)
cgctctccctggagatcgagcgcaagctgcagaaggttatatcctgccccttcctctccgcattccggttcctgcccccccccccccccccccctcatcgtctcgttctttcattgatttccgggagggttgggttgattcgtgctggtggtgtcctggcctgtttctgttgattattgagcatttcttggccacctttttgggttctttgcgattaatttcggtttggagtgaggaaggtgtttttttttgtttggatttgttttttctgaatcaatggtttttttcgagactgttgttctgttgggagttttcagtgttgaagaatatacgattttgatttgttttccacgtatcagttagagaaatttgggcctgtttcgtaatcccagaatttccccttttcgaatggcgctaagtcgatggcaattaccgcagttacagaatcgaaattggttctcccgttttcttttctcaaattctctaccgaattaaagattactttatatgatctcgaaacgatactgataatttgagtggtttggatagggcaggtggcactgtttcactggttgttgcttgcgtgtaggctctcaactccaattcgcaacgtcttcagctgct

SEQ ID NO: 9532 - DNA, 759 bp, Oryza sativa
  Intron number 2 from transcript LOC_Os01g05830.1 (locus LO C_Os01g05830) derived from phytozome v7.0 (chr-ID Chr1; po s 2791162 to 2791920)
accgcgctcgaggtgccatttctttcatagcttcagatgttaatcaaactaatgctttttcgtcatgtgtgtatttgtggacagtaatcatgagattggcaccaagtttgtggtagttttacctagagtttgaacctttgtactatttttttttttttgaaggaaggcaaaagcattgccttcctttgtactatggtttatatccattcccttgtttaacgtttttggcggagaactaacaattcattgatgtcagccaagagttaaaaactagttctttcccttgtcactttcactatattttgcttttcaaaaatcgtttaccaagattggcattacttcatttttattctaggaatccatcttaattgtttattttatatgcatctgtagattgaagtgtctaaaaaagttggctgttttggcatgcacttgctaactagggaagtactgcatacaccatcgttactgtgcacacctgcatcacaggaaaacatgatatttgacttaattgtgcataacaataaggctatactttaatagaaattcaatccattttttcttttagattcagagtattgagttttggttgcttggattcttctgacagtaagaactttgttgttacattagtatatcacttattttctgcacatgctctgtccttacttccttttatgatcaatgtttgggtcataatactactcaatcttgttacaagtgtttttgctatgttacatacttatttctttttaacag

SEQ ID NO: 9533 - DNA, 969 bp, Oryza sativa
  Intron number 1 from transcript LOC_Os01g09480.1 (locus LO C_Os01g09480) derived from phytozome v7.0 (chr-ID Chr1; po s 4836195 to 4837163 reverse strand)
cgaacaggccaaaaatccataattattcagcggtaattaagaacagtagaacgtgaccaagtccggacatgattagtgacaagcaggggcgtaatcaggttgatcacgttaatttaattgtggaactacgcgagttttacgccaatttatcgcagttttttgaactatctgcgtgatgatggatcgatcaagtggtcgtaagggaaggttcctacgcgcgtgattctcgttgtggcacctgtgacatgttgacatcaccatactgatctcaagaaaagcatctctctggatcaacggtcctgatcttcttgtgcaattaggcaaaattcgttataccgtactatatccgttctaatttttagctataaacatggatatgtatttatttaaattcgtagataaacattgttatattttagaagggatggagtactatttaaaatcaaaacttaaaagttgttcatctttaagtagaaaaaacgtattcatatgcttcatccgtccttaaatataagtgattttggtggtatgtgacacatcctagtatgtccagattcgttataatagaatgtgtcacatcccacactaaaatcttttatatttagggacagatagagtatcaaacatgaatccacaattttcaaatgatgtttagccacaaacaatattcaactcaatatgttaattttccatcttttgaaatggatactgtagagtataccgaagctgcacatgtaaggattgctcatgtgactacggtgtgtttggggtgttgaccatgacgacttttatattacagtaactaccaatttattacaagtaaaacaaatatatagatgtacggcgctgcagcaattagtaaaaacaaatacacgtatattctcagtactcgagtggtagtatactatactgatttttgtttttcaaatttgaaggacttgctctctttgcaggacactgttggttggg

SEQ ID NO: 9534 - DNA, 477 bp, Oryza sativa
  Intron number 1 from transcript LOC_Os02g14820.1 (locus LO C_Os02g14820) derived from phytozome v7.0 (chr-ID Chr2; po s 8234075 to 8234551 reverse strand)
caggtaattttcagggcaacgcactggctccggttttgggcacagttacaaaggtgtgaggatgatggggagttcctaaaggttgcatgccgcaagttggagtcgatggttatgcaactatttgccaattatagatggaggttcacaaatagacttcaataaatgtgttctccttattttggcttggtttcttctgtttttgtttggtgtatcctatttagctaaactacgctcttttctggattgctacaatgtaataattggctgtagctctttttgagcaaaggctgggatgataaattccattatctaaaaaaaatatatgattctcaggaatttaactttgtgtcactaaaaagaggtgattttctgaggagaatttaacttttttttcgaggggaaaggaaggagccctgccaattgcaattaaggaaaatttatctatcttttgattaattttgagcatcatctctgcag

SEQ ID NO: 9535 - DNA, 778 bp, Oryza sativa
  Intron number 1 from transcript LOC_Os02g09430.1 (locus LO C_Os02g09430) derived from phytozome v7.0 (chr-ID Chr2; po s 4840622 to 4841399 reverse strand)
cgcggcaaggtccattctccgctctacttctatttacacttccatagcattgtaaggccatgttcttttcagctcgttcatcggattattgaaacagattgtttgctccatgcttcgagaaatacgttttctcaaaaaaaaaatatcgtctactgtattgtatggtttagaactttagatcacttgtttcaagctattttgttaagtttatttcttaatataatattcgatttactcctataatcaagtagataatccgtgacaacattccactcaataatctaaatcaaacagggcctaattgtcgtgttaggatggcatcaccgttttggtgcattgagtattgctcggttgctgtgtggttggggcaatcggcaaatgaatttattaatagtagaatgcgctttatgatgtaaaattcctttcttcagcctatagctggaacattgcactgtgaatttgggatagtaacggttctcaaagtagtattagttaatgtgttgtttatacctgcatgtcattattgaagcgaaagtagaacgatattgtagatgtgccgataggtttctagtcagcagtatagtctggtgcaagatctttggtttcggaaatttgtcggcttacaaacattgaaatgcatttttcttttcatctgatacaggaacgaatttcctgttattagatgtgactgaaattgtatgttggttgtccatatcttttgtaattgatcttttataattgttgacgtgcatatgtctgtctttgcagggtacttcat

SEQ ID NO: 9536 - DNA, 809 bp, Oryza sativa
  Intron number 3 from transcript LOC_Os01g60260.2 (locus LO C_Os01g60260) derived from phytozome v7.0 (chr-ID Chr1; po s 34852366 to 34853174)
gactgggacgctcccagaggtatttgtgttgattgctacattattttgtgatgttcagttattttatattatttgctatctctgcattatgtgctagcaagtctatacagaaataggaaagtaaagaatatacaagtagttgcaattacaacttgtgcgcggggaaagttagggaatttaatcaggaccttgttgatggtttcattaagatatactccaaattcatatgaagttgtcttaattgcgtttggacatagaattgcgctgtgagtgacaaattaatttaccctggaattcgataaaataaggacatttccagtactgacagcagctccatctgaagcaatcgtgataactcctaatttgatcagaacaactaatatacagcagctatgtacagtttgaacatgacatattggcagtatgatacatacataaactctagaaaaaaaagtgacaggtttagagggcatatggaatacaggataggatttagttgtcaaagtggacagcgattctcttggtacatctttcaattctactgttgtaagttcttggttgattaaaacaatacatgcatatcaaatgatctctgaacatttggatgcttcgtcattggattagcttatgaatagtgcgaagatgaacaatacaaatcttagtttttttacaagcatgttgaaagggcactagaattgtatttttcctgtgttcgtagattctgattctcatgttgcttgattatttgtttacctccaaagaagtgtattactgaagtactcatatactaagagttgatcggcagaaaa

SEQ ID NO: 9537 - DNA, 697 bp, Oryza sativa
  Intron number 1 from transcript LOC_Os01g32730.2 (locus LO C_Os01g32730) derived from phytozome v7.0 (chr-ID Chr1; po s 17949650 to 17950346 reverse strand)
gagctcgtaggaatttgctggattactttgaacatgtatgtatttgtgtgagcatctttgttgaaaattgagggtactttgtttttttttctgagcttttgcttgccactttttcctacgacaaacatgctggttccgtttctattttggtaacatttatttttcaactgaaataagataataaatccttcacaatttggagttctaccattcaaggtttgttttgtggaattataggtgcaggaagcttacctgagttagcccatatataattttttatgcttaacacaacaagctaacttgtcaaataggaaatgccaatttatgtgtttcaccctactttggttgattctctgataatgctaagctaactttgttgcagtggtttgaatacataagctgcggagctttcttgctttcttgtttttcttgcttgcaatattagtacacatggtaaacaggaacccaagttcacagttcatgtagttgggattgatcatagaattcactgtagcgaattttatatgattgataatggagtggccgcctggccggtggacactcatgttgcgccgtataaatatcaaatagaaacttacacattctgaagagcgaacaattgttttgaatctttctgacatgtgctaccacttgttttgcagagcaaacatttcctgtccctttactggttggcaag

SEQ ID NO: 9538 - DNA, 486 bp, Oryza sativa
  Intron number 2 from transcript LOC_Os01g72230.1 (locus LO C_Os01g72230) derived from phytozome v7.0 (chr-ID Chr1; po s 41881956 to 41882441)
tgaccacggcaatcagcaaggaggcaatccccaaggtttctcccttttgatgtcccctttgaaatcttggcatgtggaattggatgctgcctacattccaattgaaattatagagttgctatagcttctttttttttccttttatataatcgtcaacatgaacatccgttagggaggaacaaataaatattaattgtaaagtgtgaagtctactttagcattcaacttcttcttggctgctgttattaatttcaagcagaatgaaatacttcctgccactccattaacacttagcaagtttctagacagatgaagctagttgtttcaaaaagaaagagggagaagaagaagctaaatgtccccttgtattgtatagaaatccagatgaagttgctacttatccatttgttgtttgtgataatgaccgatgttcatccatgattggtgccaggtccagttggtacagcagagagattagagcatctt

SEQ ID NO: 9539 - DNA, 950 bp, Oryza sativa
  Intron number 2 from transcript LOC_Os01g19840.1 (locus LO C_Os01g19840) derived from phytozome v7.0 (chr-ID Chr1; po s 11249002 to 11249951 reverse strand)
agcccaagcgccaccgccagacctccaccaagggggtaagccaatccacgccctcttctagcttccgcgcgtgtgcgccatctgctttgatagcccagagtcgccaaaagtctctagtagattcatgtatcatgtggctgggcagatgcggggtagggtagtttgtgttgttgcggtagctcctcaaattgctgaatgtctcttgacagatttagtacatcggtgaacacgtctaattttggtagaaatttcatagtgatacccattactatccgaggtttgtttgccttcacgggactgcttcttataatcgtggatcaagtagtgattttctgtatgggggtactgttatattgttgtttttggtattggtgggtttttaattttgagcttctgcgtggattacaagactcgttcatgcctatataccatcaattttttttgtctggagttgtgctatttgaagataaaatgttgtaaaatcgatagcgattaatgtactaatagaaatactgtagtcagtaatatcgtggtgctaataacttaagttgaactagtctcattagatttcatccctaatgagtacttgctttttggcgatgggaaatcgtatagggatggatctctccttgagacttcatcttgtagctagtactacggtgctcttgtactgcatatcatcttctggaagttaatgtaataattttgaatagccttgtctgaattacttcattttgaacaactgtcaaacccaatctgttttttttatgtctagatgttatttgtttgggttccctacctgtcttacctttgtcaaacttttagagttagtggaatttgtagaatttctttatcttgaattgtttatcaatcaatcagtattgtgcacaaatccaaaatttttgcctcctttacacttctctcactgatctttttcaccatgtttatag

SEQ ID NO: 9540 - DNA, 409 bp, Oryza sativa
  Intron number 1 from transcript LOC_Os01g34870.1 (locus LO C_Os01g34870) derived from phytozome v7.0 (chr-ID Chr1; po s 19251891 to 19252299)
aacggtcaagaggtacttcctgcaaacagtaaaacctagacacattttgtgtgtggttagagcatgcattttttgggggttgacagcttttgttcttttcttctttttatttcccaatgtttccaattactggagttttctgcgcagtttaaaaatctatgagaattgacattaaatgaatgtgagaaaacattgattaatcatggtatcaattaatatttttttaagataaaagtcaaattgagtaactttgtaggatgcaatttgatgcctattacttatccattcattcaccatccaatgacatttctttgattgaaatgtctgaagtactcagttcaaattatggtttatttgtttgttttctgaagtataaatatctgagggtatatttttttgcaggaaactg

SEQ ID NO: 9541 - DNA, 630 bp, Oryza sativa
  Intron number 3 from transcript LOC_Os02g15920.1 (locus LO C_Os02g15920) derived from phytozome v7.0 (chr-ID Chr2; po s 9012118 to 9012747)
tgagcaaaggatctctcgagatacagaattcaacggtatgcatgcaggcagtatttaagcaactctactcaagttaaaaaacattattgatatatcttaatttactgtctaattatctacatcatgaagtagtccattaaaaaatctgaatacacatatttaaatacattttctacttcttctcttgagttgattctgataaaaagttctgaaatatggtccaagtactgctcaggcatataaaacaaaaacaatttattcatttatacccttttaaggttgtgagtcatcaaggatttcatcaagattctaaaaatacatgccatgccagtacatagttccacatttagactgaaaatcttattgctggcattcattacttgatttctagcgataatattgtggtccaggcctagcacttgtgtatcaattagattgtacagaagtcatttcgaatttattccatcagctcattacctgtaccggtcctcagccgaagtattcttgcctgtgtagctccatgttgtgtgcttacgtgttctattgaatttgatttgttctcttactgaattgatgattaattgttgcttgtgtgatgactcagacagattggagaaaccactcacaggt

SEQ ID NO: 9542 - DNA, 433 bp, Oryza sativa
  Intron number 1 from transcript LOC_Os01g06280.2 (locus LO C_Os01g06280) derived from phytozome v7.0 (chr-ID Chr1; po s 2981817 to 2982249)
gaaaaactgaagcttttccagagcttcctgcaaaggtactacttccttttccgaattctgccactttgttctcctgaatggatttttttggtaattttttatggagtttttttggctacttttgatggagcatagctaaatttctgcctaaacctgtgattgtttaagttagattgttcgaaatttgagcgctcggtacatcaatttaaatgcccttgtttttgtgctgaaaaaagagagtaatattctgtgggtttctccagtattgttgtgaaactgaaccctgaattcgtctatggctttgaaactgaactatgaactcgtactgatgtgatcaatctcaatctcatgtggaagtactaactgaagatttatctttctcatgatttgatctttaggtactcatcatcaattgtgccatccaaattgaagt

SEQ ID NO: 9543 - DNA, 749 bp, Oryza sativa
  Intron number 1 from transcript LOC_Os02g20394.1 (locus LO C_Os02g20394) derived from phytozome v7.0 (chr-ID Chr2; po s 12019286 to 12020034)
aggccaagttcaagcagatctccgaggcctacgaggtcacaacaccttcttctgtatctatatgcgcattccccatcgttcgcgaatttgcgcctctgatctgtatatatgcgcccggtgtgctccctagttgatgttggtccgccaagaatgggggctggtatagagggtgcacctaaacgagagggatcaatcttacccccatttcctctccgctcgccgattgaagtagtttttttgttcgccattacctaaacgaggttgttcttgcgatgcgatgttgttggtaggaagatctgggtgctgcaaagcaatgctgtttgatctgaaaatgctgcattttttcccggtgcttgtgggatccaaacagagcaatgtagtgcctttgttactcaagagacgattcatttcatgcaacaatatggaacatttgaccttaggttgggaacaatggccttttgtatttctggattctgatgttattgtgccaccttctttgttattttggaatttgcccactgttctttttgatctttacgtatgttttgtaacttcagggaatggcatgttatattcaatttttagaacaaaaattgctgcaggaggtattaatgagctaattatgatgcagctcatactggaaatttggaaccctattatgcactttattattgactggatggttatggtataattcatattctttgcatgatttcaggtgctaagtgattcccagaaacgagcagtct

SEQ ID NO: 9544 - DNA, 1016 bp, Oryza sativa
  Intron number 1 from transcript LOC_Os01g25820.1 (locus LO C_Os01g25820) derived from phytozome v7.0 (chr-ID Chr1; po s 14625606 to 14626621 reverse strand)
gtttatttgggctggaatctctcagagggtttaaggtaccgttcctttcgtcacttcccccaaagttttagcctgcaaagtttgttcttcttcttcttcttcttcttcttcttcttcttcttcttttttccctcttgctctgtgtctgattcttcctttcccttttcgttttgtttctccacttgtgaataagcttttgttttttttacattcagtagtacccactcactagtagaaatgttcctctgtttcttctccactactgttggacatgtttgcttgctgtttgtgggttgtggcaccaagaaacggatggttgattgagggggtgggtgttggtgtgttcctgcattttcttggaagcagcagcttccagatctgagatggcagaggtattttgcggctcatggtttgagttccatttcgagtgaattcgttcattccttccttcagtttcttggtttatttttgaggggtagtttcttggtttatcttggggcagttttaaagttttcccctcttttattagctaatgctgctgaagctgtacatccctggaggctatcttctccatatttaatggattggtagtatcttagattcctagtttattggattttctctctcccgaattttgggttttggaatagatgttctggatctcatagacttcaagagaggcagttctgctatttaaattgctatttctttcttcagttatatatttttttctgtacctagactgcagataattttggtctgagtgtctcttaaaaaaaaggagataattttggtctgaatgaacagtgaagtgttttatttcactgatttttgtccgtatcactatattagtagttattttcatttttgcccagacttcacctttttcttttttgttgttgtgctaaaagaccaaattatcactttcaatcactgaagttcatctttccttggttgctaactaaattatccgttgatcagaggaaaaaggaaagaggagaaattgtaaggacaag

SEQ ID NO: 9545 - DNA, 667 bp, Oryza sativa
  Intron number 1 from transcript LOC_Os02g38040.1 (locus LO C_Os02g38040) derived from phytozome v7.0 (chr-ID Chr2; po s 22973737 to 22974403)
tcctcgtcctcgacgtctcgcgaaatcagctcaaggtattattaattgctgatttgtttctgtcattttctgtggttatcgatcgccaacctgcaaaacctgcattgcgttgcgcggttgcgttcgcggatcacgagttcacgtcgtttcagatttagaaattagaagaactgttcgtccgatccggggaattcgggtgatagggagatttgttatgttttgcatttctcgggtagtttttcagtccagaaatgcagatcgtataagacattgcagatgtgcatgccccaaaaataatggatgacgggtagaacgcaatgctggttaattaaaattgtcactgaaagcaatccacttatgagttaggtttatgagaattgtttttgcattttttttttaagatcacgcatgtttatttttgatatcatgattattgaacacgaatgaattatgagcatagaggagtcaaatatggtataaaaaagaaatcattttcttccaactacgaaattgcgcaatatgctagtaaaactgaatgtggtgatgtggtccattcaagaatttctggtttacaggctacagtcccacaaagctagaaaacactgtaaagttcagttttattttctttccatctgttagtactagctattttcattgaatttgcaga

SEQ ID NO: 9546 - DNA, 477 bp, Oryza sativa
  Intron number 4 from transcript LOC_Os02g03950.5 (locus LO C_Os02g03950) derived from phytozome v7.0 (chr-ID Chr2; po s 1682229 to 1682705)
gagatcacacgttgattttttttattgtacaactggtacgagttccacaccttctgtaatctaattcaacaaactgttttttctttactgaaccaatactgaatacatctcagtaggatttctccaactgtttaccctaaaaaatgaacatgctacaatactgaactcaagcatgacatggttgcaccttattctgttaatgtataaagcagtaatgattttatggatttatattgatatcaccatttctttgaagagatgtggtagttagttcactgacttcttactaatacattgccatgatttctggcgtgagatccaaaagataaacgtttttgaataaatgcacaagaaagaggcctgaaaatggtcacgatgtgctgctgtaagatgcatctttgtttttgtcttacaatcttatccgttttcctgcctgataggttgttgctttattgggtatgctagtatacagatttt

SEQ ID NO: 9547 - DNA, 855 bp, Oryza sativa
  Intron number 1 from transcript LOC_Os01g27390.1 (locus LO C_Os01g27390) derived from phytozome v7.0 (chr-ID Chr1; po s 15290826 to 15291680)
gcgagcacaagcgcccgcctcatatctcccgtaacgtaagtacaaacgtcgcgcgcgtgcgtcttctcttgctcttgtgtaatcgatcgcttattaccggagttgcaattgcacacgatggtagcttagtactaggtactagctaagatagtattcaaagagagtaggaatagctaggcagctagtgacgtttcttagccaagtttgtatgatagcgtaaaaaaaatcattaacattaaattaggtttattaaattaactattatatatactttttactatatgagcatcttatattaaaaatgttgctatatttttttttataaaactggtcaataaatttgacttaaataaaaccagaacatataacagacgctcgcattgaagttttggcatgctcatcattagttacgaagagtagctatatttttagcatcatattaaaaaaatattcaaaacgtttttatatgataaataattacctactcttacattgtaattacgatgtaaattttcaatcttaaactgcaattatattatacgatttaatatttacatttggatttttcctaatacacaacatataagataattaggattaaaactaatttattatctacttacaaaataagaggacataggacagatagaagcatatgcttacatatagaagagagcgggaaaaaataaatcaaatcaagttaaaaaaacgtggcaccatatttttaataaaaccgttaattattactagtttcgacgccatcggtgttatctttaggttctgttaatgttaatcacgtcttttgtatctctctctatgtgttgcagccctttgggcaggttccagcgttcgagg

SEQ ID NO: 9548 - DNA, 803 bp, Oryza sativa
  Intron number 3 from transcript LOC_Os02g14000.3 (locus LO C_Os02g14000) derived from phytozome v7.0 (chr-ID Chr2; po s 7644752 to 7645554)
tcttttcactctaccccaatctcaggaggaagcaggtatatgacttcatccgccactaccacatttgtgtgcttgtattctcttttactccctccgggttgataatacttgtcgttttggacaagagcacgctttccaaaaaacaactttggccattatttttaattataatatgtataaaggtgttaacaaatatatgattttattaaagtactttttaagactaatctatacatgtagtcaccatattttaaaaatgattcataatcaaagattctaaaatttgacctcacccttgtctaaaacgataagtattatcagtccgaagggagtagtttctcaactgtgtgaaatcattgttgctttttattcctagagaaaagcttgccttatttctcgaatagttagtttttcttcttttcccccaattgtttatccatgctgcttttcttctataccatactatttgtcctggctagggaaaaaacaaaagaatgaagcctattggaaatttagcttttgtgagattacaaggggacctttccaaactacagcaatttatgtcttagatacttttattttggatttaactaaatctgtagtgaactccttatttgatgtcctgtatatatgttttttttttgtcaatttctatggtctaaactataagtctgctctgggtatagaagcaataagttgcttactgactattgacaactgtttttaggaacatccaagttgtaattgcatcagttttttttttacttctagggactaaataaaacagtaactttccatctctc

SEQ ID NO: 9549 - DNA, 615 bp, Oryza sativa
  Intron number 1 from transcript LOC_Os02g35392.1 (locus LO C_Os02g35392) derived from phytozome v7.0 (chr-ID Chr2; po s 21274960 to 21275574)
gaggtaaaaacgtgagtctatctaaaaattaaatttaatcagcacaaattatagaattgactaaaaaggataatagaataaacaactcacaacattatgattgtataataagtaatttaatcaaatcgaaaagtaatttatatatatatgataaaagtaacttacatatataataaaattaatttacaatatagatatttcttttatcaaaatatagtcatgtaagatcttgttgtaaagatttaattgaaacgaacacaatggtgtaatcggattaaaaatcggataaataatttaaaagaaaaatctataagaagaaaaaaaatgtatcatttggtgtactagtatgcaaccaggtctaagatgagtctctggttaagacaatatagagtgcggtctctatctagtcatgtccaataattaactgtaataccaaataccaaatctaccctttcacatactgctaataccaaatctatcctttcacatactgctagtatcaaatctaccctttcacatactgctagtatatactagcagtagaatgtaccgtaaaaagtcctctaataatgttatacaggtggtgattggttgcgacgggtggaactcggtggt

SEQ ID NO: 9550 - DNA, 885 bp, Oryza sativa
  Intron number 2 from transcript LOC_Os02g28980.1 (locus LO C_Os02g28980) derived from phytozome v7.0 (chr-ID Chr2; po s 17153534 to 17154418 reverse strand)
ctccgttcaagttcaccctgggccaaggtaacaaatcgatccgatcggatcccatttcgtcttgcaagctaggatcaaagcgaccctttcttctactactagtagcactcgaatttcgcaattgttcttgttcaaaagtggaattttctttgctagttgctactactcctacctaccaagtaggatgcaggctggcagaaaaaactggcatactcacttacaatactctgctcggcctgtgattgatgcgtgtttcgtcttcaggagtttgatcttgactgttaattaccaagactaggtttaacatgtagtgtatttcatcactacatgaatggtctagggtatataacagtaacataaatgagaagcagctgtagtagatcagatcgttactgtgctgatttccgaaacagtagtatcatggactggttgtaaaaattttacaagttactaggataccagattatcttcaaatagctcacataacgaagttgcatggatgactgatcagacattagatgaccattccaatggtgctgaaaagatatatgaggtgatctcttcattagtgtgacaggagagcattagatgattgcaacttttatttgtaaatcactagatgtggcttattctttttccttacaaatctagctgcttgaatttcttcttgtatatttaagcttccttgtacaaggaaaattttcccttttaagttagtttcatgtaggaggccactggctcatgattttgtattttccatcttaatgttgcaatataaccaccaacaacatcatataattatgagaggagggagtatttagcaaacagtatattataaggtaaatgatgatgttactctctaattacaggccaagttattaaggg

SEQ ID NO: 9551 - DNA, 456 bp, Oryza sativa
  Intron number 3 from transcript LOC_Os02g51090.1 (locus LO C_Os02g51090) derived from phytozome v7.0 (chr-ID Chr2; po s 31243468 to 31243923 reverse strand)
tccaggtagtatttttcctatctcattttttttctctcgattagatggaagaggtatacacaccagggtttgaaatttcggttcgaaattaatttcggaaatttcggcccccaccggtatgctcaaatctcgtccgaaattttcgtttttttgcaattttttgtgaatttgtcaaattttattcaaattcagttaaattttcaaataattccggccagaaatttccgaaattttggtcacccccggcataaaatccaatttcgaaattgaaaaccctgatacacacacgcccctgtagtcctctatcctggtgatctttgatgggcgaagtcatttaccaacaattccattaccttaccataagagttttcccgtaattttccatctatgtaaatagtatagtgtctaagtttatatctgagcaaatctgaatttcatgtcctgcaggagctaggg

SEQ ID NO: 9552 - DNA, 817 bp, Oryza sativa
  Intron number 2 from transcript LOC_Os02g33230.1 (locus LO C_Os02g33230) derived from phytozome v7.0 (chr-ID Chr2; po s 19744956 to 19745772)
aagatcgtggctgtggctcgcgatacattcgagaagtaaggcgcgcattgctttgctatctctccgtccacttgtttaaaatgtgtggaactgtggattagggggggttgttttacattatatttattttcagttgtgttaagttgctgaaatgatgttttacattatatttattttgagttcggttaagttgctgaaatgataatgttagttcaggaattctggcaacgggttagagtagatttatttattccgacatctcttagaagttacgggctgctggagttgctatgaaattcacccacttttttcttttatgtaccctttgtttttttggcaaattcgacatcaccaccctttttggagttaacaagtattgtgataaatggtacaatgccatttccatatgcaatgctcgtatctttaatgccgaaaatagttagaaatggaggattaagaggactattgctatcctgatgattttggtgaacatagcaagggatgattaaggtggatattgctgtcctgatggtttggaacaacatctatttgcccagttgaatatgtttgtgtaaataccttgtagagtgcagtcttatgtcacttaaaacattggcaaaccacacatgatctgcagaaatctgagtgttttttctcctagcaatatattttgtttgctggttgctttatgatattttctattatgctcatgaaaaaatagtttctcttgtcttcctaaaaatagtataagctgtgaacatgacagttaactcttctttcagggaagggccaactttaattgtcgcgtgtggctggg

SEQ ID NO: 9553 - DNA, 804 bp, Oryza sativa
  Intron number 1 from transcript LOC_Os01g37910.1 (locus LO C_Os01g37910) derived from phytozome v7.0 (chr-ID Chr1; po s 21229668 to 21230471)
ccggctccaacggctactacaactaccgccaccaggtgagacttttgctcgcccgcaacccctcgaaaaccacgctcctcgccgcgcgcggcggcacgtatggtttggtttggtttgatccttcgcgtgcgtgcgctcttcgttggtttggtttggttggtttcgcgggattggttccatctcctccgatgcgccccaatcgccgctgaagtagaaatcctgcgccgtttcgtgttgccgcaaatcccaaacatctgttataaatctctcgctaatctgatttatgacgagtgtaatccacaattaagttgagattactgcggcgaagagagaattcgtcgaggaaatgctacgtgcgcggctcatccggcggatggattttggacatttgcgtgttcctccctactttaccatgttattttttttgtcaaaatgggaaaaaaaataatggtgggggcgggtgggggttgatatttactccagctgacttctgggggccatgactgttgcgtccgctgcacgcgttcgtgaccactaacgtatagcccgtgcgacatctgatatgtacggttctttgttactagtgataacctcgctagatcagtacgacgacgataatttctcatttattgcactatttgaggttcatggccaatcttgtttctgcatgatttgagtttactattgctgtaattactggtaatttactgctggcaatagcatgatggttcttgaaattgggcatggttgatacttgagtaacatatgtcctgtgtttcttggggttttgaaacttgcaggcgg

SEQ ID NO: 9554 - DNA, 344 bp, Oryza sativa
  Intron number 1 from transcript LOC_Os02g52910.1 (locus LO C_Os02g52910) derived from phytozome v7.0 (chr-ID Chr2; po s 32346081 to 32346424 reverse strand)
accctggggtacttcctggtaagaacactttccttctgcagcaactttcagcactgattaaccgtctgatcatataaattgacaagctacatgatttaattatgtttgtaaagtcagatgcattatccccaaaatccagacagtagaatcaaaagatttcgtaaccaaatgatctcaaatagtggtagattagaagataccagctactcatgctagctaagctttcagcaaatatgaagataaagtgtgtcaagcttacctttatcctcttatgcatctctcaaaagaaaacgcctatcattcctccaggtgaaattcaggctagcttcttcttgttaaagaaa

SEQ ID NO: 9555 - DNA, 812 bp, Oryza sativa
  Intron number 2 from transcript LOC_Os01g03640.1 (locus LO C_Os01g03640) derived from phytozome v7.0 (chr-ID Chr1; po s 1498117 to 1498928 reverse strand)
ggtacgtacgttgtgattacgggaaaatatatatctaatatccagaccaacgtatatagtgaagacatgtaaactaccattaaattaagaaaaatatatacgcttgagatttatccatattatcataagtaaaactgttattcatgattaaatctgggagtaaaaatttcaattttggtgtcatgaacaaatcttagatatttatttttagatccaacaatatactaccttcattttttattagatgatatatatgacttttgaaattatgtttgactatttgtcttattactaaaaaataataaataatgtaaatatgctaaaatttaccggtaagaaaataaaaaaggactacctatatatgtgaaagtttcatataaattatattatatactccctctatttcagttatatactccctctatttcagttataagacattttgactttgagtcaaagtgctctaagtttgattaagcttgtaaaaatagcaataacattttcaacccaagacaattttattatgaaaatatattcaattattgatttgataaaaactagtttagtattattaatattactatatttgtctatgaacttaaataaatttgaaacagtttaattttgaccaaagtcagtacatctatagaagttacaatgtagctatattatacggttaaatatatttatgtctatcgaactttcaagaaaaaaaaagaactttcaagaaaaaaaatatcaataaacatgtagcaaaatcgaaaaataatttcaaaatgggatgcttgcgcatgcagcaattccaccgcgac

SEQ ID NO: 9556 - DNA, 1045 bp, Oryza sativa
  Intron number 1 from transcript LOC_Os02g48720.2 (locus LO C_Os02g48720) derived from phytozome v7.0 (chr-ID Chr2; po s 29816394 to 29817438)
cttttccaggttcagatcgacgcctccttcctctggtatgggaggatctcctgttcatctgttgactgggtggtcggttgcttagatctgttctatttctgctttattttgtgcatgtattgtgtggtttgtagggttatggctcccctgtgcgcggatcatgtgggtttgggtttcgtttcgttcgtagaatctttggatgttcgggttggctccgaatctgtagatcggaaggtcattggtcaggtggggatggtggggcagccaaaagggttgcgtttttttactggttttctttattttcactgacgtcgactagatctggtcgtctcatgtgcctcagatgcgtgatctgaacgcacacaacccctccaaacatgactctgtttctcgatttgatctgaccgtgaccgtattacagtaacgatccatccttgtttataaacttgtacagatttactagtataatcctgtgtttcatgcatgctagttttatacttctcattacctgttggtagaatttaataatgtgctctggaattgcgattccttttgctctgcacaaaaaggaacggccctgcttggacagggaccatccttttctgcgacctatttaaagttctcatggtgcgtcgtgatggtgatgtgcactactgtgtagaacaccttatactgtttgtcatcaggagttccactgcaatttttaatacattctggatgcatttttgtagagactgtacaattgtgtaattacatgcttatatatagttttttgggcttttgttcttggtaaatatcagtttattagctctttccgtttagtttcttaagcactacctctgtttgtacaccatgatttcttctaatgaatgaaatatctcaacaataaatctttcttctgcactgtctgttcgtatgctatgatttcttttgagtgaaatatctgaactacaaatattttgagtgaaatattttgcctgtgatcctggatttctaaaccagtactgttgccttttatgatgcaggacattgttgctagttggtg

SEQ ID NO: 9557 - DNA, 390 bp, Oryza sativa
  Intron number 1 from transcript LOC_Os01g37110.1 (locus LO C_Os01g37110) derived from phytozome v7.0 (chr-ID Chr1; po s 20713381 to 20713770)
tgcaggagacgctcatcttctctgataccatcaaggtcagtagtcccaaagttcagagttcaggcatattctgttcttccctttttggtttcccttcctcttctttgcctgcaaaatcatttgtcattgctcaagctttaatcacagtcaaactcaatgaaaatatgatgaaatattgtcaaattggatttggtgttgagcttattaagggaaaaaagaacaaatattgcttggctgtttctttttcagttaggccgtatagtatttcgtttcttttctttttctcgttgacattaggcaactaaagaaaatactgcatagtttgatgagatttgagtcttcaccggtaaccagcaacacgttgcgatcttcttatttcaggatctcaag

SEQ ID NO: 9558 - DNA, 852 bp, Oryza sativa
  Intron number 1 from transcript LOC_Os01g65010.1 (locus LO C_Os01g65010) derived from phytozome v7.0 (chr-ID Chr1; po s 37740684 to 37741535 reverse strand)
gcgtcgcaagttcgcgctcggtttcttccagccaggtaccgccacattctatgtgtttgtttccggctttaattgtttgtgttacaagaaaagagcgtagtaaggaaaattttagaatgtgtatagcctctagaggaaatatgtcggtgctttaatttctaacaatccaaatacgtggagcgagatcgtagcaacaagaaagaaaataacatgaacaaggttcatagttactccatttcatctagttaacatttatacgagatttggttaaatttttaaaaaattgatcatcaataattgattcaattgtttagttttaaaaagtggtatgtgaagatagatatgccttgaaaaatactattacgatagattcattatattttatagacttatcctaatataaaattaatggccaaagctccaagagttcggctgaattttgtcctaaacaacaaatatttataactggagggagtacatgtggttttccacaacaacaaaacatgagttattgtggtgcaaaacaactttgaatgagaggagaatagttttgtcaacttttttttcttaaatatattatagttactacaaattaccattggtataagatttaatcttttcagatgcacttgatagtgtagtggtaaaaggtttaaccctaaagttttgtgttcaattttaatacgcttataactttttctaattaactaattgataaccaagttgccccttagttgttcttgtttcttttatgagatttatgcttttgatttttgtgtgcttactaagaggtactactccttttgatgtgcaacagaaaattcacagcattggtaccttggcatctggtac

SEQ ID NO: 9559 - DNA, 613 bp, Oryza sativa
  Intron number 1 from transcript LOC_Os02g02570.1 (locus LO C_Os02g02570) derived from phytozome v7.0 (chr-ID Chr2; po s 933501 to 934113 reverse strand)
acgtcaccaccctccccccacctccgcccttcctggtaaagcctcatgcttttcccatcatcgtcttctccttctcggcctgtggctatgctcttcaattggaggtctcccatccaaatcttggatctttgccacgagttgttggatcccgagtactcagattctctggattactaggctgcctgtttggattacaatcgttctagcacttaggttgttgattgcagttttaattaggattcctgaatttgtaggtctatgtacaatattagggggtgccttttttgactcagtggacttgattggtgaattgatgacttgcttgttttgttcacatattatgtgtaaagaaaagagttgctgcatgatatatagtcattgttctcccttgtttttaccaagtgcaacaaatgcaagttatacttttgagtttgtacacaccatatatgttaaggtgggttcattgctcatctttccctttatgtgagtgatcttttttaataattaatttacgttatgttatgatacttcattaccttatcggctttacttatggagttctgtttcatcaataacagactttggggccaagaatcgggtatcttccactgtt

SEQ ID NO: 9560 - DNA, 437 bp, Oryza sativa
  Intron number 3 from transcript LOC_Os01g51840.2 (locus LO C_Os01g51840) derived from phytozome v7.0 (chr-ID Chr1; po s 29804035 to 29804471 reverse strand)
cagtgaaggcacaagcggccttccgaggttacctggtaacaccttttgcttggactgatccattttgttcctgccatcttgcctcttgttaatgcacttttgatctggagctctctgcaaatgttgctgctagcttgtcccaaacctttctatagttttatggggtcatcgtttttaaaagtttcagaaaaggaaacataaacagccagccctgcagaaagaaaatttgtgtcctaaaaaactgatgagttggctgtctgatctatacctaaacattagtaactgctgacacattagcacctcttcgttttcttttggaagttatagaagaactgatcagataatatgtcccaggctttttgaagttatataatttgccattgttttggacctttggtgcaggcacgtagggcattccgtgcattaaaaggtatcat

SEQ ID NO: 9561 - DNA, 883 bp, Oryza sativa
  Intron number 2 from transcript LOC_Os02g03550.1 (locus LO C_Os02g03550) derived from phytozome v7.0 (chr-ID Chr2; po s 1444601 to 1445483)
ccgactacaccgccggcgtcgtcgtcgccttctacgtacgtaattaagcacaaccaccaattaatttaccccgttttgatgagagtgaattttaaattctcgaggaatcgttccttatcgattcacttaaatagttagaaaaaaaatagaaaaatgagaacatatattaacagtgtatcaatccgtaaatatgaaagttaaatttcaacttttaaaaattgtaacaaaaataaacaaactaaattatacaactgattagcgtatatttgcagttaaatttgtttttttcgttgcgatatctagaagttaactttgaccataaaaaaaccttttgatgagagaattttaaattctcgaggaatcgttccttattgattcacttgaatagttatggaaaaaaatagaaaaataagaagatatattaacacttgtatcaattcgcaaatatgaaagttaaatttcaacttttgaaaattgtaacaaaaataaacaaactaaattatacaactgattagcgtatatttgcagttaaatttaatttttttcgttgcgatatgtagaagttaactttgaccataaaaaagatgaatattatggaattacttaatatcaaataaggtgaggatttaaatccaagtcgtctagcccatcaccttgtgcagctagctggaaaacgactgggtgtttctcaaaatttgaccatacatatgtgtgatatatcacaaattagtctatctagttgaatttattgataatcattttgaatggtatgcaaataagaggggttatctcggagtttagaatttacatcaattaaactctaatttaattgattaattatattgcagacatcgaacggcgacgtgatcgagaagcggcacga

SEQ ID NO: 9562 - DNA, 894 bp, Oryza sativa
  Intron number 1 from transcript LOC_Os01g08814.2 (locus LO C_Os01g08814) derived from phytozome v7.0 (chr-ID Chr1; po s 4424665 to 4425558 reverse strand)
cttcgtcttgctccggtgagttcattcttctgcaggaatttttctagcttgctcttgcggtttcttggatcttggttggtggatggttgtgttgtccgttcttgatttcctgcaacttcgattggaaggatgatctgggtgggtggaatactcgaatctgggttgttgattttttggtgggactgtgtgaggacggtcagttcttgttggttttgctgccaatgcgatgagggagtacggacgatgaacgcgaagtgttcgacgaaattactgaccggagttatctgaggaggtagagagctatatcaggatttgatgcctctggattgtatttgcttctacgtatcttaggacagcacattctgaacctccggtctggccggagccccgagcccacggtttaggagcgcgccttcgtcgtgccctagactcgtcactgtgtggggtggagcaggacaagatgctcgtgttgatcacggctcctgcttcttcggaggcgtgcaagatgagggtgtactctgctgtaagcggccgccgatggctttgtgggtatatctcaagcatatggtttgattgttcccacatttttaaaagttgggggttttggagttgttttttttcccttctgggttgggagtatggggattacaacttggaaattgatttctagagttaaaactttctaatgctaattgcggtttcaccatattcatcatttgtgtgttgtgtgcatgttcagaaatttagacatggcacttgttgtcagtagttgctatttcctctttttttggtatttcttttttcaaattgcaattgcacaaagtattttatcaactacttatgtgtgcttgagcagaattctgatacatattgttttctctccagtacagcaac

SEQ ID NO: 9563 - DNA, 839 bp, Oryza sativa
  Intron number 1 from transcript LOC_Os01g47380.1 (locus LO C_Os01g47380) derived from phytozome v7.0 (chr-ID Chr1; po s 27066772 to 27067610)
aggggccggggacctcgagccaccggtgcgggagatctctggtggaatataatctgcacaaagcgcatcgccttctcccaaagatacatgattccctgcgatatttgcaatgccttttcctgctcgaatcctttatccttgttagtgaaattcatttttgccaaacaattttcagctagcaaacagcaggtttcttagtttcgatctgttgagataaggctggtaaactgtagtaaaaactgaattgaggaaaaaaaatagtttataggtaaaagtttttttcctaaacaagatttgtgggtaaaatatttatatattagcggtttgaaagccaaggctagaaaaataaactacattaaaaaaactctaaatttaagttttaaaattcaaattttggttgcagtaagacaacaagcagaataagcggttggtattgtggttgctgcttactaagggtttgttcagttaattccaaataatctgactggagaggatttagaggaataaacataactatagaaacagttttcgtagacaagcccccctccagccttgaggtgggccatgccggcgttcgcctgtgataatgttggtccgggagaaggacaagacccatatgcaaaaatcaaattttatataagggcctcttaacatgcccgcttacaaaaataaacaaaatttcacaagcgacggttaagagacacgtttggccagctacccagtctcttcttttattttatgtcctctcttagaaaaactctttctcaccccactcctcactccacactactcccctctcctccctctactgattgtcgccaggagcgacgaaagcggcc

SEQ ID NO: 9564 - DNA, 715 bp, Oryza sativa
  Intron number 1 from transcript LOC_Os02g14760.1 (locus LO C_Os02g14760) derived from phytozome v7.0 (chr-ID Chr2; po s 8165228 to 8165942)
ccagcaacggcggcgggcagccgcagaatcgccgggtcggtgagctgaacgagattgttgttttggtcgcctctgcagctacgcggattgatttgaccggatatggtttgaccttttttgcattgagttcgtgatcgcgtgaggatttggtgatttacgcattgcgatcgcctagaatgacggggttttaggccacggtgatcatttttgttccttcttttgtttgtcttcttttgcaagattcttttctccttttgtcttgttttttttttcaaaaattttgtgttaaaatcgcagtctttgagcgtcaaataaaaaggatctttttgccagtcttgaaaaaagaacaaaaaattcaaggacataatcgatcggatcgtgttactttgatttcagatgtttgatcggtagtaatcaggaggctagggagtgtttaatgatctgttgtggttgtacactggttgatgaggatttgatttgtgtatttattttttgatgtgatatgagcactgtgcttgatgtctactaggattggtttttgtggacctacatttttcggctgttgattctcagaacaaacacaagtgtactgataattgtgtgcatattgaattattgattgattgactctggtggtgctatgctttcatgatcaattgaccctggcttggttgtaacagagaaggagtggattcaaccagggaaggaggaggac

SEQ ID NO: 9565 - DNA, 897 bp, Oryza sativa; identical to SEQ ID NO: 9516
  Intron number 2 from transcript LOC_Os01g04660.1 (locus LO C_Os01g04660) derived from phytozome v7.0 (chr-ID Chr1; po s 2096680 to 2097576)

SEQ ID NO: 9566 - DNA, 675 bp, Oryza sativa
  Intron number 2 from transcript LOC_Os01g64020.2 (locus LO C_Os01g64020) derived from phytozome v7.0 (chr-ID Chr1; po s 37186240 to 37186914 reverse strand)
ccttctgttgctgctgcaccacctgccagcttcttgtactgctctctctaccttctcatagctcattttccttgcaaaattgatcaccatcaggcatcagctaagctaagcttgcttgcttctcctgttcctctcaccccgtgcaagaaagaagatggaggtctagacttaagaccagaccactacaacttctctcgttgcaactagagactgatagttttttttttctcaattttcttgagtgcgctgcttcttttacatgtttattatttctctggccttgttcacctccttttatccatctttttaacaaacttattcctcatatatgctcatgccctttccattggattacacctctgcccacaaaccaaaatttcttaatgcctaaggcctgaatcctgcgagtgatttgggcaccaagcctccatcttttcgccctcatccttatctgtccagctctaatcctcttattagctttaccggcctcgctctgcatgcctttccattcttgaaaagtttttatcttctcgcgcgcttttaattgcttgccctatagcttagctaattaataagctaaaaaccccagctttgattaagcagccggtgtgatgagctctgtgcgctactgcttgggcagggacttccagcctgctgccgcggcagctgcctact

SEQ ID NO: 9567 - DNA, 576 bp, Oryza sativa
  Intron number 4 from transcript LOC_Os02g04800.1 (locus LO C_Os02g04800) derived from phytozome v7.0 (chr-ID Chr2; po s 2206632 to 2207207)
ggactttgaggtgaggatgtttcctttttttaaaaaaaaaaaaaacttccatatgccataacagtgtataacgtcctaacactatgctatcatggttcttaacacaatgatactcaattcacgtatttgcgaaaccatgttatcataatcatccaatgcaacaacctggcagccaacaccatgagagctgcaagctcttgcagaaatagtatatgcatccgtagaaagccatttctagttctactgtcagttcagcaatccttgttcctctgagtgaccaagatcactaacttcaatcagtcatcaatcatttaacatagacgtgaatcagttggtcaaattcgaacctgaatagaaatggcatgtcagatcttttggttaattatagagcacacactcaagaactggtagacttatactccatggtcaattagctgtgtagaatgtttactgacttttgagccctgctcattcattgctcttctctcttctgctgtcaacttctttgaatcttctgttgtcgaattgtgatgtcctcggtacctttaattcctgtgcaatgtgttatctgtagga

SEQ ID NO: 9568 - DNA, 567 bp, Oryza sativa
  Intron number 2 from transcript LOC_Os01g64010.2 (locus LO C_Os01g64010) derived from phytozome v7.0 (chr-ID Chr1; po s 37177610 to 37178176)
tccactgtgcctgtgagcttgctattctctgagattttgcttagctcttatgtggtaacaatagtgtgtttccatacatgtctttttttcttcaaaatagtaatattaacgatcatgtttatgcatttctagaaccacttttaccgtctcaacttgatgaagatttttgtattttcacacaataactacatcgtatcattttgattgtttagtcacaaacataagtgctttgatgttttgattatgcatgcttttcaattatcacgtcatgcagttattttagcatttctgatttatatcacatacaaatcgacatgaagttaagttccctcgcatagactaaggcaaaatttatggcataaaacaatatccattatgattgccatgatattcatgtatgctcatatgtgcaattcagatttcaacgttaacatataaatgacgggaaatgtaatgatggtatcatactttatataacaccaagtttcatgtaacaacaggtgttgtaagtgtaggccacagaatcacaccattcatcactgaccttttgttattttgtaacaggcc

SEQ ID NO: 9569 - DNA, 848 bp, Oryza sativa
  Intron number 1 from transcript LOC_Os01g17190.1 (locus LO C_Os01g17190) derived from phytozome v7.0 (chr-ID Chr1; po s 9886750 to 9887597)
ggaggccttcagcctcttcgacaaggacggcgacggtaacccctgcctcacctccctccctccctctcgtaattttgttgcgggaaccagatcgataggctgtccgaagcgagatcggcgatctttttcttgggggttaattaaatcgaacgccctgatccgtcgtctccgtgtcccgattcttggtttgctgtagggatccggttgggatgcgtttagctgctctgaaatctccggatcttttgataatataggcgttgctcgtcggtttgggagtagatgctggtcggtcaatcgcgtgatccagcgtaattttctggcctttttgagatttggggcactggctagtgcctgttcgtaatgattcgtgcttgattaggtttagatgggataattctcacgagtcctcgttttcattcccattgcaatagtgtagtaatttgggttagtcatctcgtatgataatacgacgacactgtcctggtgtttttcttggattttctacagaagatctgtggtggtagaggataagaagtttacaattagcactaacatgagctactactgttttcgataatctttacatatatgatcagggagtaataattaagcaattttagataacacttcgattctgttcatttcaagtagtgctcagcttttggtcttgtttctctttcttttatcagtttgtaaacagcgacaagccttgatgatctaaagcagtactgtgaatactatgtagtgatacactgacacctcgagttgaacgatttttagactttgagtgacatagataaagttattttcttccaggttgtattactactaaggagttgggaactgtc

SEQ ID NO: 9570 - DNA, 661 bp, Oryza sativa
  Intron number 3 from transcript LOC_Os01g16146.1 (locus LO C_Os01g16146) derived from phytozome v7.0 (chr-ID Chr1; po s 9114958 to 9115618 reverse strand)
gtgtttggaaatcatcaaccgccggtgacctcatcgtacttcctcttatatccccttaatacaagttacaacatccggcaaaatttggcaaaatttgatatatgctgctctgaatgttgccttcataactagtacatttggatattaccatgtcttttttttttggttaaaatgattggcaacatcaattgaattatacacactttgaccactactttttggtaataaatttgtaaatactctgaactctgcactgttatgaaaatagtaatatggaatgaatcttacaattttatttttagcctacaaagtagaatagctttgaaattattatttgtccaaatttaattaggcgagtcaacattgtcaatgattaaaaaatgtctgttcaaagattaaaatggaggtcatgaaccatggcaatgctaccgctacgattatttccctaagagaaagaattgctaatcttttaaggatgctaatattaaatgaggagttggtaagcttttctgaaaagatggaaaatttataatggattttttttattaaaaaaagaagatggagaggaaggagttggaattgttcatttgtttgttagtactaaatgattctggcatggctttcaggtggaactttcttccggaaaagaggttgctgatat

SEQ ID NO: 9571 - DNA, 659 bp, Oryza sativa
  Intron number 4 from transcript LOC_Os02g44890.1 (locus LO C_Os02g44890) derived from phytozome v7.0 (chr-ID Chr2; po s 27182587 to 27183245 reverse strand)
gcactcataaaggtaagttggatgacttttgagttttttcggatgagtgacttatgtattgtgctttatgtccactaccatgaaacagcaaacttttctgcttaactccctatgaaactgttggtagaacaatagctcagaattcactcagaagaatgctcaagggaactgggggcaggctccttgatagcgcatagacaattggaacctagaaaatgtcaacctgaatagaattttgcgcatatgaatataattatctaattatggaggatgtttctttctggagaatcaatcaatgcctacatgtatttttgtaatggttgatctgcctttatcatgactaaggaccaattagatcttagggatgggcatggattactccttgagtacacaccaagtgacccgcgttcatccttactagaattgtaaatatgcttgaggaactttcatggccattccagattggtgttgtctaagcattgtgtttgcactagtttgatagtttgaggacagtattttgatatcttgatgctgttaaattacatatatataatgcgttgacgatgctttgatcttcagatagcatgtgagaaaatattttcatttggctgttcccttccccagaatctattggaagaggacaaggacctagcaaagca

SEQ ID NO: 9572 - DNA, 865 bp, Oryza sativa
  Intron number 1 from transcript LOC_Os02g52280.1 (locus LO C_Os02g52280) derived from phytozome v7.0 (chr-ID Chr2; po s 32002321 to 32003185)
tgaaatcttctcaagtacgtttctgcgcttacctgtaaagcatattcattttcttatcctcagcttcagtatcttatttctgtgaaagcaatagcattacttgtcatttccattttacttcattctgcggtaccatgtacaagcactcacctttcggttgagttaggaaagaaaagcctgtattgcataaagctgaaaatgtttatggtcagtagtatgtgaacccgcaccaagcaaccagctgctaaaaaaaattagcacctaaacttaaaaatgaaacagttttcttgttttgaggaatcatctgtccagaatctagattacctgatactgtttgttgcattctatatctcagaattttgttcgatagtatgtcctccacaactccatagttctctgagaaaaaaaaatatttccccccttccatgaatattttctttttcttttttttggtggggttccatgaatattttctgaagcagaattgtaatttagttcactttgattatggtctggatgattaaaaaaacaatttttgcttctggattctaaagagaaaccctctcctaggattatctgtcataaatctggaacatttgcttcctcttgagaaaagcatgtgcgctgagcaggtactgtaatcttgtatgcaaaaccgtttttaaaatgcagttttctggggaatgttttgttgtcaagttttctataaatgatccaaactagccaaaggaaatcatatatattgagaatttttatattgataagttttcagggaacaatatgtgatgtgttgattgaacatgtcgcacgatgacattgttacttttaagttgtgtaattgtgatgattgatttttatgtgcagg

SEQ ID NO: 9573 - DNA, 1005 bp, Oryza sativa
  Intron number 3 from transcript LOC_Os02g47110.2 (locus LO C_Os02g47110) derived from phytozome v7.0 (chr-ID Chr2; po s 28750264 to 28751268)
gtttggtatgttttgtttcctttgtggttatctttttgggaatacgtgaaagatttgtgcatcgttgcattaaagaaggaaagaagtggttatttgattttgacagacttgtgtaatgatatagtattatatagccattctgcataggttattgtggttgactttgagacaaatatttcttagtttgacttattggttaaagttgtatggcatgtatgcaattgttttatccaaagtatccataaggctggtgaggttgctagatgatcctttgaacatttttaattaaaaaattaaatgcataccaatattgataccgcaaatatgtgtgtttaaaatctatggtaattcgatttgaatttatgtggagttatagaactcatttatttaaacaattatgatagtgagataacccaaatgagtggtatagaatttcccagttctcttttaattaacatgaaaacttacggatctagaagtaccctgtgcttggcatactatctattttcatgtaatggtattgtaatataatataatcatgcttaattatccagttaatggataatgttgtcgagtttgtcagatctttcactgtatgagattatagcaatgtttctactaattcaacacttaatgaattgctcttttgttgatactgtaaatgatatctttgcttgatttgatttggtttgatttattacagctgaacagagccatctttccagatataagctcattctggattattttgtgctatattacctaatgaagttactaattagctaatgttatgtctataatgtaaaccatactactcttcagttactaattagatgatgctcgtcagtaaaactttattctattttcttgttgatttgttttccttgagagatcggcgtgatactgaaattcggatgtattcatgagcatacccaactacatttataaattgtaatagcaacttattcctatatgttatttttgcacgttctgatttgcagatct

SEQ ID NO: 9574 - DNA, 916 bp, Oryza sativa
  Intron number 1 from transcript LOC_Os02g33110.3 (locus LO C_Os02g33110) derived from phytozome v7.0 (chr-ID Chr2; po s 19676911 to 19677826)
aactggatcaacggtaagcaaagattgtgctcagctagcttctctgaacttttggatgttcttcagttcctctttgtcttggtttcttcgacatcttctcttcaaagcttggtttgttttggtttcttcttatcttcagtattagctatagcttagctttattacataactagtacaagaaaatatcatgccatagacgaacaaagcaatacatggctctgaattttagctgatgtactccctccgtttcagtttataagatgttttggctttggtcaaaatctaactgcttcaaatttgatcaaatttatagaaaataataataatattttaaagccaagataaatttatttaaaaatatatttaattattaatttaataaaactaattttgtaatgtaaatattattatatttgtctataaacttagtaatctgaaacggagggagtatgcaagtagtactttgcaccttggtaaaaaattaaaacagcttctgtggttagtggtttaatctcgtgttaatctacataaccgctggtgatttctggtggacaaaaaaattacagcttgctgagttatcaactttatattggctatgttagttaggtagtcctgcagttgttttcttctccatcagaaaagtcaagctgcaggcttttaagttatcacagtatccgacaacggtgaagacttgcagttcagcaagtacccgaataataatacaccagctttgtttttgagcattaagctaataactcttgattgatacctaattgatgcttgctgcaattatactgttctaactcgatttttttatttctcttcttgtgtctggttctgatcatatcgctgcgactgcaaattaatctcatcgacgacagatccgaacggtacgaattttccggcccacttcttg

SEQ ID NO: 9575 - DNA, 1034 bp, Oryza sativa
  Intron number 1 from transcript LOC_Os02g50840.2 (locus LO C_Os02g50840) derived from phytozome v7.0 (chr-ID Chr2; po s 31058847 to 31059880)
ctccccgtccagcttcatcagattccttcttaaaggtgcctcctctgatgggattcgctttgatgtttacaaagcttgatgagatttatatgaaattgagcatgttgctgtgaccaaatcgcctttgtttttaagcctagataaacttatgtttgtagttacttatatcgttgatggtaacctgtggcatatcagcaaattttcaccgagtaaatatgggatgcatttgatggatgtattgggtgggtcgtgctatcatcaaagtagtttaagatggttttccatgtattatttgattgagtcttttggacagttcaatttgacaatttttggcacccctacataagatttgtgtgaaggcgtgttcttgcttgtgtgcatctcaaaagccattcgaacaattcatttgtctattttttaggagtagcatttcttggataatcactgggcatgatatatccaaagaatatatggctaaggggtgcatgtggcattatttttggatccgtgtgcagcccatgatgtaacttacggtttattaccatctatctctacatcttctaatacttgtttcattaatgtattgtataaaaacaagataataataataataataattattcttttcaaagttagaaataagataaaaacaaccggaatatcacaattaagcctgggtgcaagtattggcgtagacagctcgcattgaattatgtaaccatcaactttacatgatctttactttcagatcgaacaaattcaatggcatggcaactattgctatttctgttgcaatttgatttttagtgtgtattgtatgtttcaacaacaccatgataccattttcttctttcttctttctttatacaagtatgcttatatttcttctatgccaacatgcatttttcagtgttttcatatgcccaatgttattttggtggatacatgaattgtgttttgtcccttgtacacatgataatttttttattgaatatccaggacgggcgtgaattccgtgttggcgactgcgctct

SEQ ID NO: 9576 - DNA, 1016 bp, Oryza sativa
  Intron number 2 from transcript LOC_Os02g30650.1 (locus LO C_Os02g30650) derived from phytozome v7.0 (chr-ID Chr2; po s 18247158 to 18248173)
tcgcaaggtcaagaagatactcaggggatttggtaatggagaaagcctcttctcttcttctttttctgtttatctctagctttcttcttgttttctggccttgttcttcacttcttgtgctactgtgtaatgtttttccctttggttcagagttcagactttacagggtttacacttaacttgataataaaatgtggtactacctagtagtttttatacttcagataactatttttttagcatattatattggcatgttaagtgtggtctcctagtttatcagtttggtgccagttttggacttctggttcccatcttgtttgtattttgtggaggaagagtacttcattgcttcgttctcgacatgttcttttacctcgttaaactttagggttaagtgatggcttatgtttttttttaaacggcaaacaatttagtcatttgaagtattggggtaagtgtttgttaagtacattttatttgcttctttgtaacgtaagtttagtgcctccttcagaaacttttttgagttcgaattggcaagttttgttttgtggtgtgctatttttctttgaagggttattcaaaactgttattgcaacatccggcagcaattgaagaggtttgaaatcattcagattcgcttaattagacctttctttcaagattttccacgtgcatttactgttaatgatggggaaaacaactcctgatgcagataactttttactcggaagataataggatagctcgagtgccataaagatgaatcgcaactgctatatgttgatgctcttcaaaaaagtttagattatctttgaatgttgaatgaaaagacatacataacacatttaaaacttccaagttctgtactagcactcagtgactccgatcacaaggcacacacttattttgcagagatcaaaattgttatgattcttggtattttggttcagttgttgtagttaggcatgagccaacgaaaactaaaaaaaaatgggatgcaggagtggaag

SEQ ID NO: 9577 - DNA, 909 bp, Oryza sativa
  Intron number 3 from transcript LOC_Os01g70920.3 (locus LO C_Os01g70920) derived from phytozome v7.0 (chr-ID Chr1; po s 41052743 to 41053651)
aaagttgcgtctgtgcagtactacagtactagactgttgctagtttttaaatccacaatgtcatatttctagacatagccaagtaagtttattgtgttgcataatgatgattgaaatcctcaatttgaatctaatgaaatgtcaacttcatttacctccatagatcatctgttgtaaaatctgttgttacagctcactgtcttgacgctcacatataaaatcttattaacatattgtttgatgtactgctgttaggcctagggaagttaggtcttgtacaccatgcctcccataaaaatgaagctcacatgcacatatgattgtatcggtacccatggaaaaaagatagcaacttagcggtccttctgctgttgtgaaacaggcatgtttgatttgactaatatgtgttattatttgatatgcttattatcatttcacatattattaatttaatacgtgaaacaggcatgctcacatataaaatcttattaacatatgattgtatctgtttgcatcttgtgtgttacaagttcctttagttggagaagagagttcggccgttctatcccttggttcacttattttatgtatttaggttttaccccatctgatgcataagcaaggtgacttattttggagagagcttgtgaaaatgtggtcaaactattgtgccatgattagattcacaactggctttttggcctatttggaccgctgctttgttacacataagaaactaccttcgcttgaagacgctgctgctacttctttcttttctccagtgagtgtcacgcaataattcttttagttaatattccatgtgcatttgtgataataatctgcttacgtatctatttctgtacacacaactgatcatgtccttctgccaggtcttttcctacttcaata

SEQ ID NO: 9578 - DNA, 876 bp, Oryza sativa
  Intron number 1 from transcript LOC_Os02g08080.1 (locus LO C_Os02g08080) derived from phytozome v7.0 (chr-ID Chr2; po s 4267728 to 4268603 reverse strand)
tccgccgcctccgcgcggccaccgcggcagtggcggtacgcgatccttccctcgagcggagttctagaatccgagtgcgctgcgttgttttgcgccgtggttgatgctgtttgccctcgcgggtgttcggcgtgagccgttgccgtccgtcgctggagatggtggcgcgtccgtgtggttggttagcctgcgaaatattcgagtgaatttggcgctacctaatcctgtagttaatttttgcacaaaccgagtgcagcatcacacgaacacggagttagaggtataataatatgatcggattctctaggttttagtagtggtttcatttgccaatttggagagaacttggagaaatattttttcctcacggatattgtactgaacctgttaattttaaaactagagaagtgtaggtggccttgtgttttctgtatgattgccagtgatctggtcattggtttgaacagtagggggaaaatggtgtggggtgttgggctgaatcccattgtacaatgcttgaaaattgagactggaatttgaccttgtcgatgctcctctctctgccacctgaagtttcagttaatctctggtaggacaaagcattgaaacatacttagtttttctttttcctgtagcttttctaaaagcacatgcattctactcctacattatctaagaacgccatacatgcaactattgaatccttttgatgcgatactttgtagcaacagatgattagattaaccccattactctgttttgtgcttcacatttctcgatgatgaaaacacatcaaagtttgctccctttttgcctgatctatatcttcttaaatgaacagataatactgcgcactttgcttctaacaatcagttc

SEQ ID NO: 9579 - DNA, 963 bp, Oryza sativa
  Intron number 1 from transcript LOC_Os02g47220.2 (locus LO C_Os02g47220) derived from phytozome v7.0 (chr-ID Chr2; po s 28815453 to 28816415)
cgagtctgcgcgtaagtttttttttgtgtgttgtggtgaacagtggtgataattattgcagggtttttttttttatcttgtgggggtcgtgtccctgttgggacctcggatctgttcttgtttcgtggctaatttggattttatggcagaaggaagacgttttgtcacaatagattgagaacgctctctttttccttcccatggatggtcataatctgtgccttttggtgcttagcgttgtaatttgtgattagggtagcaatgcagattgtttcacatcatgttccaacccaaggcaatgcttctgagttacgaaatgtttgtaatatttatgaccttgctgtcttgccatgcttgatcgatcattgttgttaaattggatacccgcattacttccaattttttgcacttcttaggtagttaggggtataggatgatcattccatgtcgacgccttattgcaactgattgaatagtagcatcggtgtcaatattttgtcaatgcagcagcaacactctaccttatcaggcaatgttacctatagtgcatttttttttattctaggaggaagtgtatttgattgctgccaagaaggcagtgcttcattttgcacacatcagttttggtacttgcatcatgtggcctgtacatcattgtttgcaaagaagagaaagctgaagcgctataaatccttcaagcagttttttcggtctaaacccagccatatctgagtatgttagaatgattattatgtgcaaggtttctgtcggttttgattgtgatcctcagacataccttgtgacgcagatattcatgctgagttgattccttctagtcactttgcatgtacctatagtttgaacatgtgcacggaagtaatgatctttgactgtgttatatgtttctgacttaaatctgttatattagattggaccagctgtgatttggggagcttaaagttt

SEQ ID NO: 9580 - DNA, 910 bp, Oryza sativa
  Intron number 1 from transcript LOC_Os01g65940.1 (locus LO C_Os01g65940) derived from phytozome v7.0 (chr-ID Chr1; po s 38284543 to 38285452 reverse strand)
cagtgagggccacgctcccccttcttttcccacgggttaccttctcccagctctttctccttgaattaaaactccctcttttgttaactcctacagctcagaaattgtacttagacgaattaacctacccgaaatgctgtctagttgcattttgcatttacatagtactccacaattgaagtggtattacatgagtacaagtggaagcctaaacatgtgcaaattctagagtgggaatggattgtagcacactagcacttttatcgtacatttagatagaatttttatagtggcattcttgttttgttagtgaaagagatgtcaaatagatgtgcctactgcaattctgtgctgttggtcatcaatattggggcaacatctcgttgggtaggacaacctataatgtcatgtaagggaaacagagtgacgaagaggaaaaaagaaaataaaagaagaaaaaaagaagatccatgcattctttattcagcgaatcactgaagacaaagttggatttctgaacatctaattccatcacaaggaaactgttagaattcctcttttcttgtttcaaaaacagaatcctattcatttattcaagagatagtccagcattaatacgatgatatgtttagatcctgcttttgtgaaatttcacattgaatgtcaatgataacagttccattttaaaaatatctagtctgaagctgtaataattcgattttaaataatggttagctagtgcacccttatccatcttagtacaggtatgtttggaaatatggattcagttcctgtttgagtgtttgtgctacttcgaatgttatatgttagcaaagtaatgattgcatttactgaaaacttactagttctttttatttttcctttgtttagtgggataccaaaccaaggc

SEQ ID NO: 9581 - DNA, 821 bp, Oryza sativa
  Intron number 2 from transcript LOC_Os01g64280.1 (locus LO C_Os01g64280) derived from phytozome v7.0 (chr-ID Chr1; po s 37318185 to 37319005 reverse strand)
tccaggcctacatctcctatcgcgtcatcaccaaggttctctgattcgttctgaaaccctcaaaatagttagttagttcgattgagtatttcgtgatacggggcttgtctccctgctatggcaattctagagaagtttttgcccgatatgtgatgccattgtgaaagctggactggtataactcaaattctggaatataatttgctaatatagatctgattttttaaaatccagtattaaattaactcggtggcatgcaaatggattttagtagcgagctttaatacatgcccggtcattagtagtgccaactatgtactagaggaaaaaaggacaatgtttaacattacattgacattgagggataaagagaagttatgcaccatcatggtgatacagagagggttacctaatgcattgaagaaaaggattgtgagtttcagttttgcaaaatagtacttttactttcacatataagcaagcaatgaactaaaatatatataaggtttcgttcaagctaccgtccaagataatttcatggggtgacatggcaatcttgtaatctggcaaatgaatgtgcagtttgtttttatttttttggttccgtttcgttgtatactcttcagagctagcctagaacacctattttacgtttcttcatcccttcgtttttttgggctaatgcaagtatgctacccagtagccataccatgttgactgtttcgagcaatattttatttttggcactaacatgaccaactaatttggaaaggtttgcctgtgtagaccaacctgcctgactttgaggggcaagagaaaat

SEQ ID NO: 9582 - DNA, 889 bp, Oryza sativa
  Intron number 1 from transcript LOC_Os01g65350.2 (locus LO C_Os01g65350) derived from phytozome v7.0 (chr-ID Chr1; po s 37916456 to 37917344 reverse strand)
gcgtggcacagctcaagcagctgtacagggataaggtgtgtgtgtgtgtgaactgtgaaatattagcttgtactccttcagatcgataatacttatcgttttcaacaagagcacggtctctaggaaacaatcataacctttattttctactataatatatatagtatcaacaaatatatactttgattagagtactttttaaaactaatctgtgcatatggtctgacaaatattttagaaatgattcatatccaaaatcataacatcattcttgttcaaaacaataaatattatcaacctggagggagtagtactatatctgttttgttgttgtttattaaacatgtgagaaatatatatgcttagttgtagtcacttaagtcaagtactttgcatgcctttgcctacactcacatacctgtatgtaagtgagtcgactgacacataaggatactgtaggtgttgtgttgcgcttgcaagcaactgtgtgtttcgtggtcattggtgaattattgatccatgctgatgtccaattctgcatcataggagatcttgcattcttgtgctcgctaggagagatgacagaagaattggtgaaattgatgcccgtgttcaacatatatgtcaaattttgtgttgaaactgttttgggtgaaagttaattttcttgttgtaacacaactaagatcctgaaaagaaaaaccttagtgtcaggaaaagaacagagtacaattgtgggttctcctccaggcctgatttgtgatatttatttcattgtggcgaccttactgcacgaatattagatgtctttttccctctttatttatcctaatttccgcatacctgacactgacacttcatgagtttttgcagttctttggcaagtcca

SEQ ID NO: 9583 - DNA, 593 bp, Oryza sativa
  Intron number 3 from transcript LOC_Os01g13720.3 (locus LO C_Os01g13720) derived from phytozome v7.0 (chr-ID Chr1; po s 7676481 to 7677073 reverse strand)
aataccaactgggaaaggtgaacactaaaatgtccccaccgttattgagatatttgtggatgctatgctatttagtaatttatagttgtagattatcaccaaacctagttccgatttatgaataccacttgtatttttacggagaagatgaagagttatcaggttaaaaattgtccaatggaaacattgaagaaaatgtactgatgattttttttaacttctatgcaatctaaaactctacttagtgaataagcaacactgaatcttttggtgagatgtactgacatttcacccaaagatcagtgttatctgcacacgatgttaaatgaggaaaaacattagttgcatcttgtcctacaggggtaccaacattttttttttgtttttagcttttctttactctacttgcttccattcatggcggaacttatgacttggcatttgattgtgaagtaagctaaaagtaacagcagtagttttagatttcttttgcttcaattcgttgaacaattatgttgacttaatactgttggacaacagctgaaactgatggattatgctgaattactattcttggacaacagctgatactg

SEQ ID NO: 9584 - DNA, 710 bp, Oryza sativa
  Intron number 3 from transcript LOC_Os02g53430.1 (locus LO C_Os02g53430) derived from phytozome v7.0 (chr-ID Chr2; po s 32690222 to 32690931 reverse strand)
tgctcccgttagtggtatgcatttccgatttctctcaagtattttgagcagtatgcatttctgatttctctcaagtattttgagcattatggagcatcatgtatgatctgatcagcttttttcctgaagtaacaacaagtgaacatgaccaagttatttgggtgacttacagtttataaacctcggctgcagtttcgtttggtgcttgtttagtttagatcggaagatatatactgtaatcgcaataattttcacttctgaaatgtatgtttcacttcagacttaatgtgatatgaagtatgcattagagaatatgttttacttaaagaacacaagggaagtttacgaggacgttgctgtgtgagcaagaggaagaggatatgcgataatctttcctcacatgtttcggcaattgtttttcttccgtctgtccctcctaacttcagaaagtaaaatctgtttctttgtttggactactggagttccaattttacaaaagcaactatatgcttagaccatagagcttatataaatcatctgcatttggtcatgtaagaaaaacccagtcaggttactagttactgccaaatgtctgttcctcctgtaaattctattgtgtaacatctagtttgagcttgatggcatcttttctcattgtcttgcaaaatactgtagggctggcaactattcagcagcgtcgaggccagcag

SEQ ID NO: 9585 - DNA, 671 bp, Oryza sativa
  Intron number 1 from transcript LOC_Os02g17940.2 (locus LO C_Os02g17940) derived from phytozome v7.0 (chr-ID Chr2; po s 10386513 to 10387183)
tatcgacgccgacatcgagcacgccccaactccatgtgagttcaccccatctttccttctacttgctaatccagtgtttggtcttggatgtcagtctgatagttctgctcctgctatgagattgatgaatttgtttgttgcttcacctgtccgttctcccaaaacatgttgaactcggtgctgctcgaataaaacttgtagtgttgatttgattccttagtttagggatagctataagggtcaccaccattgacatggtaaattgtaggtcccaaacgacattacattttagttgtgcagggagttatataaacttcgaaataattcattctaatattcagtgaaaaggtttagggtgagaaatactgcaagttttattttagactaaaagagtctaaaataacaatactctctgcatatctccttgaaaagggggctactgcaacgaagaagtattatggaaccataatggtttgttttactcagttgtttgagtaattgagtttaatttccataaacatccactattatgatgtaaaatatttgaagaccggacaggtgaagatgatctttaccagtagaagccaatagaagacttattcagtttggccttggtaaaatctgaaacctgaaaacttaatgttctgttttcatatatgcagatccaacaa

SEQ ID NO: 9586 - DNA, 971 bp, Oryza sativa
  Intron number 2 from transcript LOC_Os02g17940.2 (locus LO C_Os02g17940) derived from phytozome v7.0 (chr-ID Chr2; po s 10387207 to 10388177)
gtggaattccatcgcttatcagcctggtaaagaatactgttattaattttctaaaactaagagcaatgccataacttattctctatccacttatgataggaggttttattcttatgaaattgtttatttcattattgattcctcaattttctgtagttttttctatgcgtgctaactcagcaagctcttttatgggcctaattgctcaaagacagattcttttttactctagattgaattaaattatgtacataacaagttgaaatcagatgtgcatatttaatggctcagttctgccgaccaataataacataatatttaaacatttagttcggatcataggttcgtctcgatatctaattctagctgactgactatcaatttatgtatttttgaaaaaaaaatcaaatttaaagtataatccaattataatatattatggcccatatatacacaaggctcttatacgggcatcacaaagtcgcgcaacgcgcggctaggtggctagttatactagttgaaatatctaggagataagagaaggcaagcaatggaatttgtttttcccattcaggcattcagccccgtttggaactcaattccacaatgttactagctcacttccacaatgtcaaactgcttgaaataccagtccctttcttctgcccaattccacaatgttaaatagtttgaatacctttagtttaatttcaaaaaaggaatttgaagattccctttcttgtgctcaattccacgatgtcaaacagtttgaatacctatccctttcttcagctcaatctgaatctttttatcttatctataacgagtcattttttttcaccatgtacatcgtacatcatttcttctactgttgaatagtagctgagaagcagtgtccattctcattatgcttgaattttcaatccattttcatccaagtatccaattcaagatgtatttgcaggctatag

SEQ ID NO: 9587 - DNA, 859 bp, Oryza sativa
  Intron number 1 from transcript LOC_Os02g01280.1 (locus LO C_Os02g01280) derived from phytozome v7.0 (chr-ID Chr2; po s 158736 to 159594)
ggggagatcttcttcttcgcttacggcgggtgcaggtatcccatccaatccatcttcccctcacctctctccctctctctcttatacaggttagattggacgacattccatcaagaatgttagttaaaacaatgtcaatgatggatggatcgaataagaggaatatagattagctgcgattgaccgcgatggatcaatcaaattcaatccatcgattttttcccctcgagtattttggtggtcatcttcattcgatctggcgttcaaggccaagttttgcacttttcatcttgtctcacagatttgatcgctcaacttctcttctaaaacatcctcctttacctacctacttcctcatctccctgattttccctgcttcctctttttgccgctattcccctcccctctcctctcctctccttgcagaacttgttttttttttttaaaaaaaatcatctcccttttattttcttgtagacaagcagtgtagagccctggtgctactctgttagagccaatcttacagatcatggatggatgcgaatgctattgaccagtctcggtcaaactcaaattaatcactacatatatatatgccacaacacttgaaacaaattacttcaacttttcaaccatctatttttccctatatatgcctgtactagtatgactgcttttccttgcaaagtaattgtaacctgttctagcaactagaaacttcttttctgtctgcttagtttgccaaaggtctctttcaagcatttttttttttaaatcagagtttcttcttcctctgttttctcccttcttgtgttcactcatgctgatgtagtctggcaacttctctgcaacagacaat

SEQ ID NO: 9588 - DNA, 976 bp, Oryza sativa
  Intron number 3 from transcript LOC_Os01g37980.1 (locus LO C_Os01g37980) derived from phytozome v7.0 (chr-ID Chr1; po s 21275472 to 21276447)
gctgaaacgttgggggtatgctgcttattctgaatagatatcattcctactatgcaggcgaataaaattcagggggtgttaggtggagcgtgattcacatgttttttttttcttgcgtttgaactttaggctttaatgtctgatatgataacatgaaacacctttgtgttctatgctaattacggtggttggtgataacatgaaacacctttttgatctatgctaattctgattggttcttgtcaaaattgtcccatgaatcaggataccagcacactttatggctctgttttaatagaatgattgatgtattgaaacgctcaatctatagctaaaccagggaggttagggaaaacaatagatggggcttaatttgcccccaaatgttcaggacatatactgatgtaatttcttttgattttctttttgtgcaaatttgaaaggaatgccaagtgaattatgttagtgtgagcttatagagtgcttcatgatgacttggtgagcagacgcatcatatatatactgactctgaatgaaaacatgcataatggccatgccattggtcagatgtatgtactatcatattaagttgcatctgacttatcacgagaatattactgtattgcatcgataagtcaatttttcttttcaaccagtatgaatgtctagggaatgttagtagatttatacatattttacatagtgctaatatatatctgtcaaaaggaaggctgagaacataatctaaagaatcatatcatcttgtaaaatccatactttcaatcaagcctgattctattgtactaataatctcatacacatgttgagctattcatctaagtttatttgacttattagtaacataagtttatccctttgccagtcaatagctatccatctaatgaaagcacgatcatgtattttgatgttcaatcatgcaggtatctgctgatcaaaagtcaagattgctcaggat

SEQ ID NO: 9589 - DNA, 423 bp, Oryza sativa
  Intron number 1 from transcript LOC_Os06g13660.1 (locus LO C_Os06g13660) derived from phytozome v7.0 (chr-ID Chr6; po s 7574296 to 7574718)
gcgcggggtgctcgtgaagaccagcagctcatcaggtttagtaatttataatccctttagtctgattgatgattagtacttcttccgttttatattataactcgtttgacttttttcctagtcaaatttcttcaaatttgaccggatttatagaaaaatatattactattttcaacacaagaaacatattatcaaaatatatgcaatgtgagatttaatgaaactaatttgatattttaaatgttgctagctttttctataaaattagtacttaatagtaaaaaagtcaaacgacttttaatatgaaacggatggatggagtagtaagtttctgcttggtatgtatggttcggtttgtaattgtggtgaaattgaatgtaatccacagcctcagtcgaatcggcaacccaggaggtgggcgca

SEQ ID NO: 9590 - DNA, 946 bp, Oryza sativa
  Intron number 1 from transcript LOC_Os04g49890.1 (locus LO C_Os04g49890) derived from phytozome v7.0 (chr-ID Chr4; po s 29557674 to 29558619)
gtttctccgctggggattgctccgtgattcttcaagtaaggtttaatcataccctgcatctgcatgcagagattggttcatgcatacgtctgattcctccccgccgagacatccatgagtttgattgcactgcatgggttttctttgctattatctttgtttctcctttttcccttcttgttcttttttcctgcctctgcaaaatgtttgcaaaagaaattaggggaactggaaaaaacgaaaggttcatgataagtttggggttctcatgttgggtgagttcatacattcttcacatggataagaagaatgtgaacaaatgaacaatccaagcatctgtaaccattagcagacaggaaacagcaaggaccaatacgtggttgcagttcataacagtcgtggttctgttaaacgtattcatgttgataggtgggataacacgcagaagttacatgtttactatgagaacagctgtatacatttgcttgtgcccatacacatgttccttaaggaaaactcaccatggcaatcagtgattaactttctgttctcatatccatataactactttggtcacatgtgaatccatataactacacggaacgatccagaacattattagatattacaagtctcttacataacattactagatatcatggattaatggttacaacaacatctgaatggattaaaagaaatattatggtgtcattagggaaatggaatattccttttccagtacactggacttcctaggaagaacttgtatcctattagatggaagacaacgataatactttgtgttggttcattgtagtaaaagcttttgataaaagggtatatgaaaaatgactcttgaacaaatctattctcctgttagttcttaacacataaatttacattgcaacattacagattccactaaattgcaacatttgcaaga

SEQ ID NO: 9591 - DNA, 445 bp, Oryza sativa
  Intron number 2 from transcript LOC_Os05g46770.2 (locus LO C_Os05g46770) derived from phytozome v7.0 (chr-ID Chr5; po s 27023688 to 27024132)
caccgaggtcatctagaagtgcagcacgtggtgaggtgtgtaatgatatctgacccttttcttatacatatccacctgttagttggcatactatgttcttttgtttcatgtttgtcccttgttgctgttctttgtctgataacctgcacccaaatgaatagaaagtgaaaaaaattatgccttgttatcagcattgttgacactaaacttgtgggtctgtattccatgtaaacccttcttgcttcagagttcagattctagaggatataattagttacccgctatccttttcatttcatactaatgtggtttcttttcatgtttgctatcatatgtggcccgtaagttgcaacctaaactttgtatttgatttgtttcaggacttcatgccatatgacttctttgtgcagggacattctgattggaagaagtttaggccaggctt

SEQ ID NO: 9592 - DNA, 285 bp, Oryza sativa
  Intron number 1 from transcript LOC_Os05g07940.1 (locus LO C_Os05g07940) derived from phytozome v7.0 (chr-ID Chr5; po s 4301889 to 4302173)
cgtcgccccggatccttcgacttcgacggcgcgtacacacaattcacatccaatgtttttcccttcgatctggagggtttgtcgtagtcgtgattttcgctcagttttgatctcgtttcttctttaaaataggatatcttctttatataaaacgtcggtaacagtataaccgttcaaaaatacatcttatgtttttctctttttctcttcttttgttctggtctgattggtgcatgcaacgcaataatatcatcgatcgtttaattattggcaggctgtttaatt

SEQ ID NO: 9593 - DNA, 638 bp, Oryza sativa
  Intron number 6 from transcript LOC_Os06g22060.5 (locus LO C_Os06g22060) derived from phytozome v7.0 (chr-ID Chr6; po s 12796032 to 12796669)
ctctttctgctgagaaggtaaatcagaacagattttcagatgccatattaacagtttaacattatttcttggttgtgtataaattcttgatgaaatagggaaattgctgtaatttttttattttcttgacatttctaaatactactaagtaccaacccggtaaccccaaaaaacatatggcatatcaaaatgatgtaatgcgtaaaaaatgtaaccgtaaaaacctattggttctttttagataatacaaataaggggctagaaataaacctacagcccatattgatagaattgaaaattaatggctggtttttccattaagcaactctggatccagactgcaatttatcaactgatcaggattatttgcgctccaccttgggaaacctttttttatccaacttggtccatcttgggaaatctattatctgagcttccaatatatgacccttacaagtagtatccaaattgcaaagttcctctatatttatatttttttatattttatgccattagagatttgctgcatatccttatgtcctcatgcacttacacaattcacttacacagtatcaattgcttatatttctcaaatcttcatttcttacctttggcagtattactactttgttcggctg

SEQ ID NO: 9594 - DNA, 746 bp, Oryza sativa
  Intron number 4 from transcript LOC_Os03g03430.1 (locus LO C_Os03g03430) derived from phytozome v7.0 (chr-ID Chr3; po s 1476177 to 1476922)
tcgtcttcttcccggtcgcctacccaatcagcaaggtgcgcctgctggcttagcctgtttcgttgctcttgtttgcttgcaaagaatttgggggaggaattggaaccttgtagttggtcacttggccggggtgtgctcacaatttggatttggatgggacactacaagtggctgaccgcgactaggacgcagatcggttacttactgattcattaattaattttccaatcaagggacttgtcccattctcatttagtcatctgtctacaaaattctttgtagccggtgactaattaattagtaaatgtaatctgtcccattccccattgaaccagaataagcaatcatagccgtgaagcaagaaccctgttttagtgttcttttttcctttgccagactaggaaaaatgccttcataagcgtgtttgattgctcctgaataattttagatgaagcaattcaattcgcttcttagtttaattatttcctgctaaactaattgttttctgaatcatattttacaaagaaaaaagaacagaatttaattggggctgaaacacagcgaactacttattgtcgcagatgaatgttttgagttgcattcaactaaccatttccttgtttctaatgcaaaattagctataattagaggatgcatagatatgcttgtgttttccactaatgccatgtcttaatttgattcatgtccatctttccagttgttggattgggtactcggaaagggcc

SEQ ID NO: 9595 - DNA, 1064 bp, Oryza sativa
  Intron number 2 from transcript LOC_Os05g37830.1 (locus LO C_Os05g37830) derived from phytozome v7.0 (chr-ID Chr5; po s 22098262 to 22099325 reverse strand)
acgggctcaattgcatcgacaagcaacaccacacggtaagctttgtagtattgttgtgcctaactgcctatgaagcctaccaagcaccaaatttatagcacgtagatgtgggtatgtgggcatatactagttctttagagaaatttgatataccagtaaagaatttgttagtaatatttttcaggacctttttgttttatgagatcaaatacctgtcgataaataacatgttacctagtcttcaattgaatggctagaattttccgagaagacgcatgttagtcataaattcgttagagaagaaagtttgtttgcacgagaaccttaaaaaagacttgagcaccatagcatttcccttgaaatactatcaaataatgttataactggctgcaagcctgcaacgaaccgtcattgcaaccaaagtgctcaaataagctgtatatctgtcgattctggttcccagtgcgattccggaacactggccttcttgcacaagcatttctcttaatagactctgctgtctagtcgaatgcatacacaaatctggagtctttagtctgtcatgaaaattaagtatagtgtagtcttcccctctcaaaacaacttacatgctaaccattacatacctaaactcattgccgtgcattttgttgccacttgccagtaatatcttgtgcatttccgaagcctcttgtatctagctagcagttcattgctcactccggtactggcatggaaaacataaatatagtttaggccctgcaaagagaactaatggttgatgattgttaggaattccaaagttctgatgtggagttcttgtgtcacatgtgatggctcatatcattcagatcaggggcactaacatgtgtaccttatatcctcgcaaaaaaaaaaaaacatgtgtaccttatatagaatacatttccatgaacaacagattatcgattctaatttcaccaccatgcgcattctgtaacaaaacgacaatactctatgaaatggttgagttaattgttatctttacagactggtacagggtttatcaaagtggaaagacccaa

SEQ ID NO: 9596 - DNA, 952 bp, Oryza sativa
  Intron number 2 from transcript LOC_Os04g49490.2 (locus LO C_Os04g49490) derived from phytozome v7.0 (chr-ID Chr4; po s 29331582 to 29332533 reverse strand)
attcatctccaaccaccttgccgcgcacctcgtccgtacgtttgctcctctctcctgatgaatccactttactcatttcagctgggtgtagattgcaggatgtttcacaggcttataggtttaaatctgttatatttgatagtcttggatcattagcgttgaatttttggtagttagtatagttcatttcttcaattgtttttcagggttgcatgtgcactggtacacctcttttctggaattataggtttaaatttgtcatatttgatagtcttggatcattagcgttgaattttcaattgttttagtgtaccatacactccggcagttaaaaaaaaagaggggtgtcttggtgtatctatatagtcaaaccttcttaaaagtcccgtttctaaaaaaaaaaccttcttaaaagtcaaaactttgtctatttatgtcattattaatcttgaggttaaatgcacaatggatgtagatattccttatgtccgaattatcatggtggagattgtttgcagtattgtatctgcaatagttatcggcccacatgtcaatttaaaacccttcccttcttaataaaacttgtccggcttatgctggcccagaggtaatatacccttttatcatgaatacaatgggtaatgaaatgacctatgtttgttctttgtgtttccctgcaattactaatgtaattctattaccaactttactctaaaaagaagggaatatactatcttggttctgtgacttctatcattatacttcatagagtaatgtgactaatcggatctttccaaccaaaagaaaaaaaaaggagtggtcgagtatgtctctgtccttcatttctttgttcaactcgctacttgtgacggagtgcttaaggaacttgacttattcatgttgttactgtattccaggtctggctcaagagcgtggaacaatttcggaggat

SEQ ID NO: 9597 - DNA, 999 bp, Oryza sativa
  Intron number 1 from transcript LOC_Os07g38380.1 (locus LO C_Os07g38380) derived from phytozome v7.0 (chr-ID Chr7; po s 23072266 to 23073264 reverse strand)
cgacgccgctgccggcgaggaccaggctttgtccggtgagcctcctgctgctggcttgtcttggctttttttttttggtctgtctgaaattttggtttttgaagccacgtagaggttcagggatttgttgctgttattttcaagattccatggtttaatatgtggaattaataaaaagattttcgttagatgtttcatggacctgcgaatgcgtgtcattgaggttttcccgaaaatttggaatttgtttccttttcttctattcatagggacgattcaatgatctgtggcctgctttcctttcctgctgatactaaggaaggattgaactgtcctcctttgctggttatattacatgcttgattttggtatatttcatctactttgttggacttaagaggatccctctctccatggttgttagacattgctaaattttttttaattaggtgttggagttgttgactagatttactagtaatgctcgaattgaggcttttagtcaatatttcgttcatttagattatggaatttgaaataaaactagtactttttcatgctattttctaatcgagcttcatgctattttctaatcgagctttagtgtgtgtttttgtgggaataaccaacctatggagtgattgggtattactgttcagcatttacaaatgtaaattcaattttcaaggcattgtacacaacaaaatttctactccgtagtgcccacgatgcgtagtttctaaacctggggtttccaatgcgcgctgtggctgcattttttccgtacaccaccgaaacatggataagtccgacaggtcaaagtgtcatcataagaaggcaacaaattgggctcatgctttggattctccatactccataccaatgaatgccttgtctgtttgtcgtattattgatatcaaattactgtatatttcttctgtaactggtttactctatgtttcagaccttcgtgaaaagcatcaatttgacctggagaga

SEQ ID NO: 9598 - DNA, 644 bp, Oryza sativa
  Intron number 1 from transcript LOC_Os03g63770.4 (locus LO C_Os03g63770) derived from phytozome v7.0 (chr-ID Chr3; po s 35999451 to 36000094 reverse strand)
accacctcctaccggtactgcttgctaatcccgatcccaccttcctctctctcttgtgcgctccatctcttgttattttactactatcatcttcagggcttggcttcgattcgttctaggtttttcttttcttttcttttctttatatatactcttggtgttgttcttgtatggtccgaaatgatccatgttgattggggctctagactgcacaggcatatgcatccaatatcttcttctaggcacaattaatttaatttcttgtgtgactctaggatctaacctcgattggtggatgttaactgctagttccctgtgttgctagtatgttctcttcatccttcactcattacatgtcatctaaaaggtacatgtttcatgtttcggcggtttagggagcgttcttatactaaaaatcatcatacatgccctaataaaaattatatcttcccccccccccccattactgcacctattgtactgctggtgccataaataaaccaaatccgcattcatcacttgctaaacaaaccattgcaaactgagtttgatttactcaatgttatggatggtgcttatctaattggcataacaagctttgtgcgtcagggttcatcggtcatcatccagctactatattcaca

SEQ ID NO: 9599 - DNA, 719 bp, Oryza sativa
  Intron number 2 from transcript LOC_Os05g13370.1 (locus LO C_Os05g13370) derived from phytozome v7.0 (chr-ID Chr5; po s 7420990 to 7421708 reverse strand)
tcgctgaccacttgttccaggtacaatgacaacgctaagaaacaaaaataaaaagtaggatcgattagttggttgttttaatctgcacaaatcaatcaatgtgggttgcactgtagagcggcgggctagaaagattgcacaattcaggaagatgtagcctcagagttgttaatttatactagagtacttcccttgggcatattttgattgtcattacaagcaaagcaaccctcaataaaagatcaacggaaggagaaataagccatcttattattttttttaaaaaatacaaccatagtaggctaaaggatgtgtgctttgtttattagaaaatagaaaacatgaaatttggatataaatctctgtaatactagcttgcataacattataacttttggaagaggctaataggctgttccactggctttaggccctaggctcagaggtgcccatggacactccttgagtgaacgggaagagtctctggcctttaacaaaccaaatttgtaattttctaacgtcataagaggtgtcttgtggattgttatttcttgatctatatctaaacatgataagcagttaagcgcatatcttgcaaagctgatttatatacaaaacaacacgggcacatatctattcttcttaattcatctgttgaaatttatctttactttgttgtttgttgtctccttgcatttcagattgaacatataaaggca

SEQ ID NO: 9600 - DNA, 305 bp, Oryza sativa
  Intron number 2 from transcript LOC_Os05g37160.1 (locus LO C_Os05g37160) derived from phytozome v7.0 (chr-ID Chr5; po s 21651709 to 21652013 reverse strand)
atttttgtgactgtaagtctgtgctgctcatgtaaattatattattttctgttgcttgattgataaagaatggcatgattctcttggtgttttttttttggggagatttagcgcatatatgaattgatctatgtatgcgcatatataaattgatctatgtatgtaagttgagtcataatatgctagggcaatatcttctgttcgatttacatctccatgtaccaaaatataaacttttctcttctttagttggaaggagtacgttgtgctcttcattgatcctttgaattcatttttaggctgga

SEQ ID NO: 9601 - DNA, 675 bp, Oryza sativa
  Intron number 3 from transcript LOC_Os07g41720.2 (locus LO C_Os07g41720) derived from phytozome v7.0 (chr-ID Chr7; po s 24997781 to 24998455 reverse strand)
agcgacatacctcaacacaatctggtaatgcatgatatttaaaagtattgtcataatggtaatccggtcttagtatagtttcagatcttattgtcgcaacatattcttcgcttcaatcatgtctctttaaaacacatttgtagatgctgcttcttggttggcaatcgtttgtctatggatgtagtgccaagttgaatgtattcatgataccaatacgttcaatgattatttgcaagctcatctatgctatagtgcaagtgactttatggtagctgtaaattgtgacgagctgctgtggtcttaggcaaccttttttctggattatgtgaacttttcatttgagtttccacatgaaacccatattggaacgaagagtattatcatgtgtttccacatgataatagttcatatgcgtcaaaactcaaaaccatgtcatctgttttgtatgtaatgctcacgtttcaaattttcctttattgttgttattactatgcttctcaccaaaccttcgagtaatcttttgcatattctgaagtgacagttttgatgagtctgtcatttcattagtgagttttcctgttattccttctagtgctcaatttacatcgattatctctgttaatcattccggtgcccaacctaacatctcgtttgtccttttttccccctcagaca

SEQ ID NO: 9602 - DNA, 882 bp, Oryza sativa
  Intron number 3 from transcript LOC_Os03g56660.3 (locus LO C_Os03g56660) derived from phytozome v7.0 (chr-ID Chr3; po s 32259233 to 32260114)
aggttgcttgaggagcactttggtatttttcagaggtttgcttctgtttactcgagtggaacacatacattttttttacaagcatgaaattcgagattcattgtcgggtttagatgttaccagtgaacgctgccagctcgttgtcgacaatgcatcggtaatcattatgggggcgtgacttgggggaagtggaggaggttggattgggggtatagtatagggtctcaacacgctcacaatttcttctatttatttgagaaccaagttcctccttggttgccatcattttattggatgtgtgttgggggtagtagagagaatttaggggtttttatttttgaatgatccaaaaagtgcgtgacacttttttttttggaaaaaagctatatgcttgaatctgatagcgggatggtctgtttaaatttggttggtttacctgcaaatcctagaaaagtactggaataagtggaattcctcctctgtagaaaccaactggagaaacttgcttattaattgcataattgcagtaataactgtcagaaatgaaaggcaaaacattacaaagctccactaactacttcccgagaattatctgaaacagttcttgaccatttttttcttggcacttatgattttgaacatcatagtcctgttttaatttcagattaccaggttacctacataccatctagcaaataaaccaggatagaacttctgtttttccccaagtaacagaaacaccaccaaaatatggataaagcgttgttctcttgaaattctttctttgtatctgatctcaaactttgaatgttacggatgtgatagataaatgctaccatcattaatttggtctcttattgtttcttatccaaaagatctttg

SEQ ID NO: 9603 - DNA, 476 bp, Oryza sativa
  Intron number 2 from transcript LOC_Os05g14160.1 (locus LO C_Os05g14160) derived from phytozome v7.0 (chr-ID Chr5; po s 7910059 to 7910534)
aaggttggaatctagtaagaacaactctacaacaattcacatctgcaatttcccgattgatcaacagaaagaaactaatttgtgaatgaacaaacaattcagcactgtattatacgacattgtgcttctgatcctttctatgtctggcagaaattttaagcgtgttatgttttgatcaactgccattctcttcttaactgctttgacaactgcttggattacacactgttgtgtatcctctgttgtcagcgatcagatttttttcccctctttttgcaggaagcctctcttatatgagcttatataaaacctcttgttgcatgaagcctaaaagcaaagtccaatcttttactaattggtgtggttaaggctgtgaacgagataatgatttatggagttatagtattatcatcagaactcatagttggaattgcaactaaataagcttttgtgatgttcaaagcataacttttcag

SEQ ID NO: 9604 - DNA, 506 bp, Oryza sativa
  Intron number 1 from transcript LOC_Os02g32320.2 (locus LO C_Os02g32320) derived from phytozome v7.0 (chr-ID Chr2; po s 19078599 to 19079104)
ttgttttgagttatttctttcttccgatttcagttgtaagtcgctttaaccttctcaacttttttcttccaattttttgcactattcagataaatgaatgttaattctcattaagttacactatttcatactccctctatccctaaatataagggttttagttggatgtgtccagatttcttgtattaagatacgtcacatccaaccaaaaccccttatatctagagacggagtgagtattataagtcgttttgattttctttagtcaaatttattcaagtttgatcaaatttatgaaaaaaatagtaatatccgcaacacgaaattaaacgtttaatatattttgattatatgtttgttttatatcaaaaatatttgactaggaaaaagagtcgaaacgacttagagtatgagtatttttcttaatcctcctgcacaaatctaaaataatacatggttcatattttgaaaaagaataaaaaaaacagagagacagtagtccgtcc

SEQ ID NO: 9605 - DNA, 758 bp, Oryza sativa
  Intron number 3 from transcript LOC_Os03g01580.2 (locus LO C_Os03g01580) derived from phytozome v7.0 (chr-ID Chr3; po s 363898 to 364655 reverse strand)
gggaggatgtaagttattttagtaagtatgtaattttaatggtaaaaagcatagatgctcatgctggtggttgctgttgtctgcttttgttaacaccacgaatatgcaacagaagtctagtgatcctaaccatacttgactattcagttacttgtgtaacaaaataattttgatgaatggaactgaaagtgccatattgatgttaatggcagtcaattccttcatgctaagtgttttcttcagagccagaacatatctagagcaagtatggagaaaagaagtcgtccaaaatccaaatgcaacatatgaacttggtactgcttcgaaaacatgcacgggaaagtttagcttaatgcaagttgtggaacaataaacttaaaaaaaaaagcatgacaaaatgatcccacatatacttctttttgcctacttatcatgtgtaggcttggatttagcaaccattattccttctttgatgaaagggacttgattcaagcattctgcattaaccagcagagaagaaaaaatttgagtagacagtactagcaatctttacattgtaatctgttgggtgagttctaaaaccagatttgcttcaagtgtatgttggcatggtaaacatcaaatagttttaactgatatagctttccatcaagcttatgtttatcatgtagacagtactacctatttcttttgatgcatgttaaagattacttcttggaataagtgtattgttcttatatttctcagaacatagagga

SEQ ID NO: 9606 - DNA, 591 bp, Oryza sativa
  Intron number 2 from transcript LOC_Os03g01580.2 (locus LO C_Os03g01580) derived from phytozome v7.0 (chr-ID Chr3; po s 364675 to 365265 reverse strand)
aggaagcagaaggcacactttcggtgggctttcaggtaattctctccaggttcatggttaaagtaaaatgtaatacctgatgaacatgatgacaatgcaaataggatcgtgatcatgatctgagccacttactttgctggtagaactctgaggatatggttttgaaatttaatatgcattgtggtcatctgctatacaagagactgaaaacagaatatgtaaagcattcttattattatctccagaaaaaaaaactgattactgtcagtaaatatgaaagtcgacaattttgcttctcgtttgtttgattaccattactaagcagtttgtgaaattgtgtcaactatgtgcagcaatataagtaatgcagcacctgcatggcaatacaatcaatctatgatatttgaccttcagtaaacatttttctgatgtcatagactgtcaataaatccctctaatctacatttcggaatcatctggcaaatatgaaggcattcaagaaaaatatttagttatcataatttgtatatcttcttacaactctgcatggtcgcaggtaggaggcactcaagaaagaaatccagggacttt

SEQ ID NO: 9607 - DNA, 476 bp, Oryza sativa
  Intron number 1 from transcript LOC_Os06g09679.3 (locus LO C_Os06g09679) derived from phytozome v7.0 (chr-ID Chr6; po s 4933069 to 4933544)
cgccggagccgacccgcttcgaggcgaatcgagaggtacgggtgctgggatacgtcgccgatgttttccggccgttttgggggggggggggggggggatttcgggggtgtgtggtgtttttcgggcgggtgggtgtttgtacgatttgatttcgtttttgggttgtttttggtgttgaattcgtggatttggttggaggattcgggctgaatagtgggttggtttgggtgggtttccctaaatttggtcgaatcgagtattcgagtgaggagtattgttggcgtctgatttggggaggtgttgacttgtgcatccccctccaaaaaaatggataaatttacagtcgtcttcgttcagatttggggactctgttctcatatagattaatgggtagtatggcagattttgccacaaattttgagttagttgataagtccttgccgttgcgcagttagctttccagccagcaatcgagg

SEQ ID NO: 9608 - DNA, 955 bp, Oryza sativa
  Intron number 2 from transcript LOC_Os05g47540.1 (locus LO C_Os05g47540) derived from phytozome v7.0 (chr-ID Chr5; po s 27169537 to 27170491 reverse strand)
gcgccgccgacctcgacaaggaggagcgccccgaggtgactgaatccatccatgaacccatacatgcgtgcccgccggatcaacctgcagagatctctcgtgattattattatttttttgcaaattcctcttgcatgatctcgttcgttgctgctaagattctgtctggcttgtcttcgtacgttgtcatgttgctatactgaaaaattcggtgatatctttggacgttccatcgcgtactaaacagtgaacaaatgatacgcccttttggcccttataaagtcgatagcaactgctgatagtgacagtattggagctaattcgtttctgggttatacaggttggcaaattgatcaataggaactgacgagtactagacttgatgcagatagcctgatgccgacccttcctttttgtgatcctgcaattttcttggtttctgctttggcgaggccagtagtaattatgcacagatctatgaattagcagagttttgctaattttggtatggatgagaaaaaggttaatctctgttggatggccaactttgcatgtcatgggcttgggagaagtggacagtactactgggaattagataagcatatctttggttgttaattaaattttgattggaggttacaggcatgtgtactactacacaataaaaaaaatatctgggttgtgcttgtcgttctcaggctctacctgccacttatattgttaactatcaggaattcaggatactccagtcgtttagctccccaatgggctaattgctatttagagtatgctttgctttcactctgctctcatattattattatcatgctaattatgcaaagtttgtcgtgcagctctgtctttactgttggagtaactgtaattttcgctcaggactgattggcactgttgatgcgcaggtcctgtctgtactcccttcttacaaagggaaatc

SEQ ID NO: 9609 - DNA, 845 bp, Oryza sativa
  Intron number 2 from transcript LOC_Os07g43940.2 (locus LO C_Os07g43940) derived from phytozome v7.0 (chr-ID Chr7; po s 26260205 to 26261049 reverse strand)
tcttctgttcgcctttctcctcgcagacgcatccggtgtgtagtgtagctatctcgctttctttttctcatttattgagattcctaacgacacctttgaaatgcattgccaatttgatacgaagttgatcaactgtttgtggatgacttttaagctgcaaaatatcaaaaactttgcatgggaagctttgcttagcccggaattgcttgccatccttttcatgtctccagtgaaaaatgatcaggctgccacttactgcacctgactgaaattactactaactttttactaaacctgaagaatatctgaatatacagcccactagtcagaactctacagcatgataaatgcactaccttttctgaatctgaacatggattactagtttcagatgatggttgtagattgctacggtactactacctccgtccctgaatatttgacgccgttgatttttttaaacatgtttaaccgttcgttttatttaaaaaatttaagtaattaattcttttcatatcatttgattcattgttaaatatacttttatatatgcatatagttttatatattctataaaagtttttaataagacgaacggtcaaacatgttttaaaaaagtcaacggcgtcaaatatttaagaaagggggagtatttgttatcatgtctttttttttattatagactatgtgcatcttaattctacagatactgagagtttatgttaagagaaattatattatcttgattttttttaaaaaaaaagtttccttgttaaacttttcagaactcatctcataaaatctttacagggagtcttcttgagagcagcggcggccaggccgag

SEQ ID NO: 9610 - DNA, 831 bp, Oryza sativa
  Intron number 1 from transcript LOC_Os05g02670.3 (locus LO C_Os05g02670) derived from phytozome v7.0 (chr-ID Chr5; po s 940536 to 941366)
cccgtttggatcgcactgactcgctgaccatcactgtgagtgagtgccctgttctttctttttttgaacgaattttttttttgaacgaagtgccctgttctttcgatttgcgcttgttcttgcgtttcttgctctgctggtgctgggtggaggcgattcggtgttgtctcggatcttctttttattttatttctgcaactcttgagttctgatgctttctgaagttcgtttttttttttggttgttgttcttcttcgtcagttcagttcatggttcctgcgagaggtttttgcggaacaagatctcgttttgaacttttgatagcttattaatcgatgagtggttgcagaaggtaatccttgaatacgattgctgccgtgatattgtttctccgatcttgttttgattggttgaataatttcttgctttaccccgtttatgtgattgcttgcttaccatttcaatgacatagcgatgaaagaaataaataaataaaagatctcgttttgatttgtgaaaacagccgctaatcctaatcttaattcgttctgaatgaagatcccatccacgatacctcaagatttgcatctgcttctcccttgtacttgccctcttgtctctttctgcatttgctccgccggcattttggctcttcttgctactctgatctggccaaatttgacacctgctgtcacattcagttataaagctagtagtagtggttgggatttttttttccagttcaattcttggagcaatttgaatctgcatttgaagaatcggtgctcctttgcagaattgggagctgtgggcagaaagactaggccttgt

SEQ ID NO: 9611 - DNA, 554 bp, Oryza sativa
  Intron number 1 from transcript LOC_Os06g20770.1 (locus LO C_Os06g20770) derived from phytozome v7.0 (chr-ID Chr6; po s 11974312 to 11974865 reverse strand)
tggcgctccaaggtacacactgcatatgatcaaattatcccaaaattgacaaaaaaaaatgcaagaggaaatccgatcgcctataagactgcacaacatttttttctcaccggaaggggacccctacacacaactacacaaacatagcatgtatatgacaaattaaatgtagctaaacgtgcagtcttcacaaatttgaaatcgtttgagatcgtttacctagccaaatatatttattataaactctcatatcaattttttttttgaaaataaggtatttttacaggcggttctgtatgatgtccaaactttgaaaattcatagaaaacccattttaaatctgattgaggacttgaaccatagttaagatagttgttttagggacataaagtctcccatagttttgaaatgctgtataactggtaagtagcctacacgtgaatgagaggatatcggtttgaattctatatttcgcatgaaaaatcgtgcgatttgtgagtaattattgctgtataaatgctcactaagttataaatattttttaggtttttccc

SEQ ID NO: 9612 - DNA, 1039 bp, Oryza sativa
  Intron number 1 from transcript LOC_Os04g46020.1 (locus LO C_Os04g46020) derived from phytozome v7.0 (chr-ID Chr4; po s 27077929 to 27078967 reverse strand)
aaagcaaggaccttgccgtcattgcggagtcaccagtgagctctttttttctttctttcataaagttagatttttccttctgcagttctttgtttccttgttttagttctgattccccctagctagtttattttttaggtgatgttttctcccaattatgcatctgggaagagtcttagataaaatcgcaaaaatcttcagaatccgtcgggctgggattcctaatcctttttccctgtggttccctctgtttgttctctgatgattattagctgaaattcattgaaccatcagaagctgtcaggagaactttgtggatatggttgaggtctcggtgtcctttgggtgtaaaattctggacaccaggaacagattatttgattcagatagacacatctagacttgtttgaccatggcagatgtatgctgttagataatttgacagataatgcaataagatgcagttaacagtctattgttcaagataaaaagaaccacctgcttttgccaatcagacattcagagtttcatagaagctgcaactgcagaaatgcttgctgttaggacagtactaaagtgaagatctttgctgtgctgtctagtttgcacaggctgggtcttctctttgcttaaatctcagcagcattataagttctggagttcttagctcttcctagaacagctgcttaattgaaatgatcatctgcatttagtatgcctcaccttttagattagcaaatgaacaactacatggttgtgctaaatattaaaaataacgtctgaaagatgcaatttgagtatgtatgtgactaatcagtaatcactcactgtcactgacaaattattcttctaagttcccttccctgatgccatcctatcctgtagcttcacaagcatgattcttctaaatttgtgataagaattccttatggacactctactaataaactctatacttgtataccacacatattactgcaaatcaattttgtactgttacttatgggaaatgatggaacaggtactcctctctggagaa

SEQ ID NO: 9613 - DNA, 999 bp, Oryza sativa
  Intron number 2 from transcript LOC_Os03g07226.1 (locus LO C_Os03g07226) derived from phytozome v7.0 (chr-ID Chr3; po s 3694415 to 3695413 reverse strand)
agatcaccaaagctgcaacagaaaattccaccaatgtaatttcttaccacattgcaattgagcatgcatatgaaactttgtccttatacactacttcctccgtttcacaatgtaagtcattttagcatttcccacattcatattattgttaatgaatttagacatatatatctatctatattcattaacatcaacatgaatgtgggaaatgctagaatgacttacattgtgaaacggaggaagtaaaagaaagtcttacacgctatgaaagtataaaatcttgaacattacttgtttggaactaattaaattacaaacaaaaacatttacctccagaaaaaccattcttgctatgacaagcgcaaactaagatgctttctttgtaaaaatatattcagtgcatttccgtagaaggtcatctgaatttttctacaagtaaatcagaatgtttccttgttatgttaaatagaaaggaatatgcaggtttcaaaatcaacaggctaaattttaacttagattgcaaatttgcaagtgctatttaatctcaagaataaaatatgttttgtttgttttgttgttcaaatatcaaggggcaccacaatccattcacaatccaaggtaaccctttttttgtgttctatgacactaatcactgacacactgtatttgctccaggtaccattttctggcctaataatgactaaatcaaagcccaactattcttgaaacaggatcgctgttttatcaagtgcatttaatattaagagatttggttgcttcgctaaccatgtttagtaatgcttaaaattatagaattttattggtaaaacattctctacagccaaaagtatttgaaaaatctgcacagaagatgaaattgttggtctcattcgaaatacacaaataacaaaactcaaatatgcattgacaatacatgctcaagcacaaaagagatgtcaatgagatatattgtcgtggtgttaggctgttcacacccca

SEQ ID NO: 9614 - DNA, 572 bp, Oryza sativa
  Intron number 1 from transcript LOC_Os03g46480.2 (locus LO C_Os03g46480) derived from phytozome v7.0 (chr-ID Chr3; po s 26290768 to 26291339 reverse strand)
tcgccgtcgctcgtcctgctgcttccgccgcatccgtacgcacatcctctttcccatctctctctctctctctctacccacgcactttttctcgaagtgcgttaaccctatcttctgttctagaaatttgccttttaaccttaatactagtaacagtttgatggttcccgaaaaggtttgggggttcaactgaatccccatgtcccatgttagatccgctactgtgaaaaaccagattggctgacatgagaaagaggatgggacaaaagaatgtaaactgtatattgatgctgatcattgaattgtcacattatcagctttgcagcattatataaactgttctatgagttttgatcgttttcatgtgatgctaagccactagacattcgcatcccttgcaaataagtactttttgtgattttgtacatgttgagaaattagaattattttctgtttctcctgtccttttatttattgttcattttgttattataatgctgcagctaccaagtaagagagtaatggacagaccctcttttggtgttcacagggcggagtcttcccatcagcat

SEQ ID NO: 9615 - DNA, 949 bp, Oryza sativa
  Intron number 1 from transcript LOC_Os03g11140.4 (locus LO C_Os03g11140) derived from phytozome v7.0 (chr-ID Chr3; po s 5734111 to 5735059)
agagggttcctgatcgcgtccgtggtggttcgcaggtgagccgcattgccccgcctccggctgttttctgtttctgtttcttctcgtagcggtgcaatctgcgaatcctctatgggttggtgatcgaaatgcgggcagtggtgggtaaaatatgttctcatgtgcatcgtgaatttgcgatgagtgcacccgttttttttttttttgattcgacaatgggatgtgcatgatgcgttgtttccctcactgggggaagtattgacatgagagaggtggaaggagtctcgcatttctgcttgatgtggtgattctgaatttcggattgcgtaagctacatacgcagatcgctgcggatacagccgaaggtttgatccgtaggtaggacggggtgtttcgcttatggtaattttgggattggttggcgtacattgcagctttcgctcatttaaatctgtgcttcggagagaatttggtcgttgatttgatcaagcgggtgcctcattcaatggactccgtttggagctttaagcataactacctactattttgatcttcgtatatctgctcgaatgtgcaatgtttcagactctattaaatggtttggctcgtcagccttatgggaagtgcaaatatatcttatgtttgtctgagaaatgtttctttaatgccttaaggtgtatttagaaatcatgcatttatgctcgtgtatgtaggcaccacttggaaattttaagttgtgttcactattccataatatcattacgaaacaaagttaaaattatgtgcggcataacagaaccaaaattccagctgcatgacagtagtcttgccattttactctaatttgtaacttcgtttatgtatacctgtgatttcttctctctgttgtgatttttcttgatctgaatcatccccaggtccaactaacggcttaaaagcttataggctg

SEQ ID NO: 9616 - DNA, 890 bp, Oryza sativa
  Intron number 3 from transcript LOC_Os07g41900.1 (locus LO C_Os07g41900) derived from phytozome v7.0 (chr-ID Chr7; po s 25100597 to 25101486)
aagttcctgggctcttggacgctctccttcaagttgtaggttcttaatgttaacttccccccttccaatttgatctatatgttatggaatgatgcatatcttctgaagccaaaaatcatgtttcccaattcctctagcatgcattaattgatcaatttgaatcagagttcattttagaaaatgattagtcagtcaatcatcaccctattcattttttatggtggacctccagtactgttgatgccaccagtggccgcagccacctgttccagaccaggaggatcaggaaatggattgtgagactgatttatctttactttttgttcgcaaattattctttcgtttaatctgcagaagttgttaggcaatcctcctacttaaggatgggactatcgctacttgaaggcaaactagaatagttaccctaccccctgcttctctgcgaacttccgtgtacctcctgtcttcctcctgcacaatggtgcccaagcgccatggtccaggtctccaggatcttggcttcctgcctctcgctcctattcccttgccaccagaatcttgcccacaatatccagacactgatgaaaatgtgatgatctcatgcaatatccaggactggcattgttgtccactgtagccatagaaacgtaaataaaggttccgatatttgcacttacacttaattggttggtggccaaagtatcgctttatttaattggactaccgtgcttctttgatatgactaaatttgctaaataactaaattttttaaacaatgcactgatcaattttcatccagaaaagaaatgatatggtgatcatgtacggatacgcttattaggactttatttctgcattctgtttgatgcatttccattttgtacagatag

SEQ ID NO: 9617 - DNA, 901 bp, Oryza sativa
  Intron number 1 from transcript LOC_Os06g12780.1 (locus LO C_Os06g12780) derived from phytozome v7.0 (chr-ID Chr6; po s 6979765 to 6980665)
caccgttctcgctattggcaccgagtgtgacattggtatgtatagcccacactcgtgcgactttactaggactatggactagtttttggcaatcggaatccttgcaatgtttggtaaaatggcaatgtcctgtgaaacagattgaaaactgcagatgtgcactgctcataaaatagctagaaacacttgctatttactattgcagattttgtatgttcggttgttttacaaatcttcacgttggcataccagaaatccagattagtcaggtttagcattgtaatctttttatttatgttcactctaatcacaaaggtttgagttcgatgataccatttcaacagatttggtcatcacatggagtagtgtgataataggtggcaatctagattggacagagtgcgtatcaagcttgtgtagaatgccttgtgatatttttaacaggatagggaatgataaggagtagctaaagtaatgccacataactttagggatagcaactaaatctcatgtgccctttcttgtttatttaaggctttacggttgcttcgttgcacataaatgcacagttgtgaaattgttatagtacttgtgcaaaagaaatccaaaagctagtgctaatttgagcgcttgatggtgattacaagtgaacaatattctattattcttggtctaatgttatcaggaacctgcctatgtgggttattattttggaggtactgggtcgatcgtttggaagttgccctgacctaaaaaaattcaagggcaggagtcaaattgtattattcaagcaatttattattaaattgcaaagatttgcctgtcaatttattgtttaataattcaagaagttagctttcttatgttatttgataattaatataacctttccatttcagca

SEQ ID NO: 9618 - DNA, 1016 bp, Oryza sativa
  Intron number 1 from transcript LOC_Os03g21940.1 (locus LO C_Os03g21940) derived from phytozome v7.0 (chr-ID Chr3; po s 12542198 to 12543213 reverse strand)
gccaactcccgtaagaactcccctcaactcccgtttgatatcatctttgtgtgcgattggtagtttgtgttgcgcgtgatttcctttagatctggagctatagtgctagtctgcggcgcgaaactgttgccgtggcgattccgatgtggagtttcgtttggttcgcttagtcggagtagttttgatgtgttctaggtagtgtgttgtttaatttagttgcggaggaagttgcttcatgggacttaaaccgttgcctgttgcagtttttctaggttcgtttttgtgatggatgcatagaggtagaaaagtttcgagaaatgatttatacatggaacttagggttagggtttagattgatcttaggggttctgtcaaatccacggtgctgttctggggatgtgtgtgcttattatcctccattagatgaaaaatagacatgatatagacatgatatgtgatgcttgatgtattacttattcttgttcgtcacctatgccaggtaggatgaagactgcaattcatgcacacaggattattaatagggaatgcccacacggttatcaataggggaacattcctttgtctgttgaaattacaattctataacatctaagttcattcggttcatttcgattgttcatcaccatttgtagaactgcagtatgatactgtgtaaatgtatgcattgtggtttgtttacttgcaagttttgttgtgctaattataagatatattgtttgctatgctatgttgggtatcgtgcatactttcataaacaaagtctatgttctgttctgtttggagtataaatactcatttccgatggtctagtaattatttactatcgtcttgaaaagctgttctagatacttggttttatttccctgtgacttgtatatgtgcttgcatggtgatgaactttgatttctataacacgttcctgaaatgctgggaaagctatctgatgttctgttccttcctacttgcaggtcagaacatccgtaagttggtcaagg

SEQ ID NO: 9619 - DNA, 931 bp, Oryza sativa
  Intron number 2 from transcript LOC_Os07g29600.2 (locus LO C_Os07g29600) derived from phytozome v7.0 (chr-ID Chr7; po s 17400495 to 17401425)
tcagcccagcactgcagcgcgcggtgcagagtcaggtatgcagctcttcctttgagctttcataatgttcgatcgagtaagaaaccattactctcttatggctcaaataatagtttgcactgctagctatttcagtttttagggggttagatggttttaatgtatgaaaagaaaatatttttaagtatggaaatgattttaggggagaatgatgccccatactgcaacaggaagacctctatagcaactagaatatcaagaatagcattttaatgctaaagacatcaacccctagagacatctaatggcttcctgtggacatgtgacagaaagcattactccatcccatatataatgtatggatggtcaagtagtacttgggaacactgagagtacaactaatatagggttgtgtaacctggcctggtaggaaccttgttaaaagcgttcggaattttgaaactgaattatccaataaaggtaacaagacacggaaccataacttaaaacatatattaaaaggtgttatgcatgaattttaatgctgtaagtaagtatggtgtaattttttaaaaaaaaaatgaaaacaaaaaacttaatacatatactatttccgtccataaaagagcgtattttttgctatgaacctggatttatgaatgaatacaacctcccaacatccaaggcctacacataaggtttttttttattggaccaggtggtgtttccttctgtccacatacccttgtcagattttatagggcaggatatttatccattatatgcaaaactcaattgccggaagcaacaactttttaggcatgataagcatataattgcatttcgttgatttaactttgcaaggttctatgcgattgcaacagggtctatgtataattctaagtctgattcattattctctctaatgcag

SEQ ID NO: 9620 - DNA, 623 bp, Oryza sativa
  Intron number 5 from transcript LOC_Os04g35240.1 (locus LO C_Os04g35240) derived from phytozome v7.0 (chr-ID Chr4; po s 21243644 to 21244266)
cccgcctcaagatctgcgacttcggttactccaaggtagggagaaggccttctttaaccttttcttgaatacagtaatcttttccctcgaaacctgcctcaacacctcttttccctgcccggatttcttctagaaatggacaagcttttcttttttcccttgtcaaaaagcactctatttttaaatgatctatagtcgatttaattacctataaatatatattacactagtaatatttgatcttacctgttatacatacattttaatacatacattttaatatatgctacagctaactataaataaaatttatagccggttacttttctcttttatcatttatcttcggtttatagttacctagtctcaaaagatcaaaactttttcttcactgtttcaattcactcccccaagaaacgccattgcttgcaaacgttttcttctacaaatgctaaaaaaaaaaaaaactcctatgtgctttcttgcctaattttctcccccttttcttacgcgcaactgcctaaaagaagcaacattttcgctttgatcgcaacatgacgccttttttgtttcttctcctcgtcgcagtcgtcgctgctgcactcgaagcccaagtcgacggt

SEQ ID NO: 9621 - DNA, 558 bp, Oryza sativa
  Intron number 1 from transcript LOC_Os07g05620.2 (locus LO C_Os07g05620) derived from phytozome v7.0 (chr-ID Chr7; po s 2645776 to 2646333 reverse strand)
atcgcccaggtcagctcacccatactattttctatccccccaatcgattctcgatttggagaggtctccatggatttcttcccatgatgatagtactgttcgaatttctcgccttcttgtttttttttaatcatatcatacgctgttcttgagtgaatttcgtggacaatttcaattcctatacgtacgagtcccaaatcatgaacagtttgtactactgctgttttgtttcctctcacgacaagacgtgatgattttgttttaaccagaaacagtaaacattactaattactactagcgttcttgctgcaaaaaaaaaaaggtttggtatcgttccaaaattgcgttcttacttccaaaattgcaacagcctagactttgacgtgaggttagcacgggcgcctcgtgcagtgttcgttggaacttgtgctgagttagttattattaatgtgcatcaactttggcttagcttctgactttttgtgggggagttctgactttgatgtgtgtttgtggtttgtgtggtggtgtttgcagataaagcgcgagatctccacc

SEQ ID NO: 9622 - DNA, 435 bp, Oryza sativa
  Intron number 3 from transcript LOC_Os06g09450.5 (locus LO C_Os06g09450) derived from phytozome v7.0 (chr-ID Chr6; po s 4799751 to 4800185 reverse strand)
agttgattgcactcttctctaggtgaagatctcaatataatatcttgtgtcttcttggaacctgctactaattgttttgagttttcaatgattttatccatacagttggttagttcttagtcaacccagatgtgaaacgataacatgttagtatgttacaaattcttagctgacaaggttatgcatctctttagttttaatgatggtatctataataatctgtgatgagctctaacatttttgtcttgagtcatgaatcttagatgatgttgaaatattgtttgttcatagctagattaagtacagatcatgtggtcttaaaaataagaagtaaaaatcaggtttatgtggtagtgccattaacatagttcagccgcagaaaggatgtgagatctaagcattggttctatttcttaaatatcactctatgcaggt

SEQ ID NO: 9623 - DNA, 451 bp, Oryza sativa
  Intron number 2 from transcript LOC_Os06g09450.5 (locus LO C_Os06g09450) derived from phytozome v7.0 (chr-ID Chr6; po s 4800259 to 4800709 reverse strand)
aggaattaggatctaactggtgctaatactaaagggtaatttggaaccatgccattataattttgcaaagtttgagatatgccatcggtatctcaatgatacttactaaaacccaacaaatccatttgataaagctggttcttttatccctttgaaaacattgtcagagtatattggttcaggttgatttattttgaatcagtactcgcactctgcttcgtaaaccatagatgctttcagttgtgtagatgaaacagctgtttttagttatgttttgatcttccaatgcttttgtgtgatgttattagtgttgatttagcatggctttcctgttcagagatagtcttgcaatgcttagtgatggctgttgactaattattcttgtgcaagtgagtggttttggtacgtgttgctaagtgtaacctttctttgcagttcctgaaattgagtc

SEQ ID NO: 9624 - DNA, 752 bp, Oryza sativa
  Intron number 1 from transcript LOC_Os06g09450.5 (locus LO C_Os06g09450) derived from phytozome v7.0 (chr-ID Chr6; po s 4800723 to 4801474 reverse strand)
ctccattcgtttgctcgtctctgaccaccattgggtatgttgcttccattgccaaactgttcccttttacccataggctgattgatcttggctgtgtgattttttgcttgggtttttgagctgattcagcggcgcttgcagcctcttgatcgtggtcttggctcgcccatttcttgcgattctttggtgggtcgtcagctgaatcttgcaggagtttttgctgacatgttcttgggtttactgctttcggtaaatctgaaccaagaggggggtttctgctgcagtttagtgggtttactatgagcggattcggggtttcgaggaaaaccggcaaaaaacctcaaatcctcgacctttagttttgctgccacgttgctccgccccattgcagagttctttttgcccccaaatttttttttacttggtgcagtaagaatcgcgcctcagtgattttctcgactcgtagtccgttgatactgtgtcttgcttatcacttgttctgcttaatcttttttgcttcctgaggaatgtcttggtgcctgtcggtggatggcgaaccaaaaatgaagggttttttttttttgaactgagaaaaatctttgggtttttggttggattctttcatggagtcgcgaccttccgtattcttctctttgatctccccgcttgcggattcataatattcggaacttcatgttggctctgcttaatctgtagccaaatcttcatatctccagggatctttcgctctg

SEQ ID NO: 9625 - DNA, 699 bp, Oryza sativa
  Intron number 2 from transcript LOC_Os04g31210.4 (locus LO C_Os04g31210) derived from phytozome v7.0 (chr-ID Chr4; po s 18505090 to 18505788)
ctgggtctgtactattcatcccctctactacttagtagtttctactttccttctgtgttgttgtatcaccatgcctgcactcaaaaaatcaattttgtttgtgatggttctaacattgaagatggaagtgttagctttactacatatgcataaaaggtttcttcaatatactccctccgttccaaattgatctacatatttcataggtacaccaagatcaagaaaagctaataactctctcatactatatttattttagcaacaaactcgatgcatgcaccatccccaatatttcctagccaatagcaaatcaagatattgcatgtgggttataagtacttgtgtgcatggatgcatgcatcaatgtccatttactccaatgcacaaataacgaatagacttaataaatgaacacaaatatgtagatcatttaggaataacctcaaaaaaactatatgtagatcaatttggaatggaggggagtaatttttagcacatgtcacctgaaacatcaaatatcagagatggctggttatacatagattggtcattgacagacatgaaattcttttccttatattgttgtcaattttattcttgaagagagaagggtgctgtgaactgaattttcttgtgcatggcggtttaagttagttgaattttgtgactgatatatagttgaatttattttgttcagga

SEQ ID NO: 9626 - DNA, 967 bp, Oryza sativa
  Intron number 1 from transcript LOC_Os06g38100.1 (locus LO C_Os06g38100) derived from phytozome v7.0 (chr-ID Chr6; po s 22535730 to 22536696)
gaacgtcagtgacatggatagcatttcctcagctctgcaatgtgcatagtttgtgtggcaggaatggaatatgtgtgtatactcctaagccggcctgcatgtgtgtgtctccctggatatgattttctcgacccaagtgaccggagcaaaggatgtactgcaaagataaatataacgtgtgataggcataaagtaaaatttgttcaccttcggaacactaatttcttagggcttgcaatataagtgttcaccgttttgtttctcttgacacctgcaagaacatatgcttgagtgactgcaagtgtaatggattcgcatactggcaaggaattggggattgctatcctaaggctattcttcttggtggtgtaagccaaccacatggtactggtagtatcaatctaaagctacctgaggacctagaagtggcagagccaattccctagtcacaattttatggacctaaatacactcctgactgtagcaaaacaagcgaatatttcatagcagatttcttggatgtgcttaagggcagtcagagtcaatcaaagtatttgtacttctatggtttcttatcagcaatatttcttgcagagctaacattcatattgttcgggtggcttattttgctaagggagggcagacaattaagaggagtatggccagctgaatctggctaagaaatgataaccaaccatttccggaggtatacctaagagagctagtgacatcttctagaaagtttcaggatgaaattggaaggggggcatcaggcatcgtgtacaaggggatcttgacagacaggagagaagttgctgtgaaaatgctggtagacatacatcaaggggaagaagaatcaagcatgaactgagtatgattggcagaatctaccacatgaacctagtgagggtttggggattctattctgatgatccacacaggatactggtttcagaatacgtggaca

SEQ ID NO: 9627 - DNA, 876 bp, Oryza sativa
  Intron number 2 from transcript LOC_Os07g27870.1 (locus LO C_Os07g27870) derived from phytozome v7.0 (chr-ID Chr7; po s 16264211 to 16265086)
tcagcaccgcctatctctccgccgcccgactcaatgtgagcacacacacaacatcgacctcctcccaaccccaacaggcgaacctacgtttttcttttttcagaaaaaaaaattgcatcgttaaataaaatttgtttcacttattggattattcctatcttgggtattggagggaaattgattacagcgaccgatctgtggttggggtaattggtgctgggtaatctagcaagagatgagctttgttttctttaggattggaatctggcaacagctagtccaccatctgagatgaagtagtttatctaggactggtggtaaatatatttcaggactgcaagagggtgggtgatccagctgtagaaggtgtatttatttctaggatgaatcaaaatcatccaaacagggaaacaactgttctaaacagatggtgaaatgaacatagtttattcttttgtcacttaaatagttccagtgatatatttgaaccctttgctattctcttgatatatatgcatgtaataatttaccaatgaaagctgattttgcacaggaacaatccagattacagaattcagtccttctggacatggtgccagtttaataatgtgcagacattccacagcataaaaatgtcattgcactaccactttaccgcactgtgttgctagcctggtgcccaaactcacaacatcatataccctgtatgaaagcacaaattaaccatttcaaccacaacatacaaatgcaactcctcgttttcagaaacttccatcttattagaggtttagagtgaagtgtgtattcttttccctgatgttcccgttgtttgttgatgcagtccgaagtggaagttgaagcgcagatactcaggaa

SEQ ID NO: 9628 - DNA, 524 bp, Oryza sativa
  Intron number 1 from transcript LOC_Os08g08260.1 (locus LO C_Os08g08260) derived from phytozome v7.0 (chr-ID Chr8; po s 4727414 to 4727937 reverse strand)
gcgctcattatcaacggcgttcgacgcggacggtgacgacgacgccgcccccctcgacggcgaccgagcgggtgcgctagtcaccatccgccgcgcggcgccgcccgtgactaggcctaagcgggagcctggctcctctgcattcacggtcagaatccatggggaaatttctcgtatctgaatattcctttggactctcacggtgaaagcagtggaagcaggcctctcacttaggcagatgctgttcttccagtgtttggaatcaaaccatcaagtggagttcttttggatcatctgtctaactgttgttgttgtctcagtttgaacataatggtagtgagacggatgatcttgaaatgattccactcgctggattgatcccaaacactagcagaacatggtctgcccaagtgtgagctgatggttcctttttttttctttgcgtgccttgttttttccccttgtttactttgtttggtgggttcagtgtctgtttgtttttattttctttctttacagagaga

SEQ ID NO: 9629 - DNA, 523 bp, Oryza sativa
  Intron number 1 from transcript LOC_Os05g45875.2 (locus LO C_Os05g45875) derived from phytozome v7.0 (chr-ID Chr5; po s 26517772 to 26518294)
gcagacgcggccacgtcggctggtccaatcctgtagtgagctcgtctctttgatccatcgccccatcggcctcttcgtcgcattgcatcgtgtttagtgtttctgtgttaatgccctggcgtccatagcttgtttagtataccgctattcttttttagagtatactccattcggttcatattataggtttaggtcgtttcgactaaattttagaaaaatacagcaatgtttccaacacaaaataaacatattatgaaaatatattaaaattttagttttaatgaaacggagtattatactgctgcaccgagacaaaaagaggagggtgtattatactgctgctttgggactgaactggaggttctttactactgttagtggctaagtttgattcgtttaggttaaatagcttaaaatctttctttggttctctggaagaaaaaaaagcttggatagtagatataagactgttgctttctttttctgattgagtatttcaatttgcagtctttaacagaagaat

SEQ ID NO: 9630 - DNA, 921 bp, Oryza sativa
  Intron number 2 from transcript LOC_Os03g30010.1 (locus LO C_Os03g30010) derived from phytozome v7.0 (chr-ID Chr3; po s 17118436 to 17119356 reverse strand)
gcccactgaaattagaagagaaagtgagagttagttagtaaagcaaattttgcattatatttaaatcattttttctttaggatagaaataataaaatcaccaactactactacaaagcatattcacgatctctcagccaccacacgatataaaacgtaaagatttttagtgataaatcagtttctatcaaacaaatggaatgcgtggttatagacatccattaatttaatcaaagaatcactgagtagccgcagtttttagataaatgaatacacagatcttgtaaccagagcatattgaaaatatagattttttaagattaataaatgaatacattttataccctcaatactttgtggactacacacatttttttctaagaatcaacgaaaatctggcataagtcatgtcctgtaacgagttatgatgagcaccaccatcacagacctaccatggcaaaaacaaaacatatatggcatatacggttgtgacgatttttccatcaactttaataccagatgtttaaactctcaactgttaaaatggtctattttaatataacccttcccctttcaagctatatgaggacgatgaaagcatggaaacagttttaccatgtagttgttcaggcaacaaagataaaatatatttaaaagttatatctagcctatccataatcttgttcctctcttctctcccatctctacctccaaatctagattcttcctctccccaatttgtcttcccaaatctacctatctagctagcgacatctactcggacactagtgaggaaagacatgaaagctttggtctaagttgggtgctactttccctgatggccaactctaacctctcatccctccttgaattttccatctctgtagccactccctctattgccaattgaactgatctacgg

SEQ ID NO: 9631 - DNA, 829 bp, Oryza sativa
  Intron number 1 from transcript LOC_Os03g30010.1 (locus LO C_Os03g30010) derived from phytozome v7.0 (chr-ID Chr3; po s 17119375 to 17120203 reverse strand)
gcgagatacaagtggcagaaagagctccgggtaagaaaccctatctataaaattggcaagtgcgtaagatacgacggtgaactgaaaaaaaaagagaaaaaaagctgttccatgtgcgtagctaggccacacggtaccacaacccaacagtgtgtgaccggactagtgcaaacacgtaaaagagagaggaaaagaaaaaaaaagacagaaaaaatacttttcgtaaaattctttacaaattattcggggcaagtatcgtgactacatatcctatgtttcgagaaactaaaaataaaaataatagatagaaaactaaatgacaaaaacaatttgctcattctttctaggattgaatcaaactctataatcttgataaccattttctaaacatatgtttttcttacattataaaataaataatacgtaaatctttcaacttttaaaaaacacaacaattatgataaaacaaacacttattccggtgttggattcatatctagagttctatgccaaatctaatctcactgatgctccaaatcataaaaaaaatattagtatgttaactatgtagtttttaaagaccgtacacacatactactcaattgacacaccaatcagcgtgtcgatttcttagtaattagtaaagaaacaaaaacaacaataaaaatgacctactgtcttatatataatagtgacgggatgatcacttatcatgtagtaatttggtgtttttaggttaaataaccaagcatataatgcccaaaatacgctcgatagacatgataatatcgtataaataataattttcatttgtagggtgaagtctcta

SEQ ID NO: 9632 - DNA, 757 bp, Oryza sativa
  Intron number 1 from transcript LOC_Os05g16990.1 (locus LO C_Os05g16990) derived from phytozome v7.0 (chr-ID Chr5; po s 9695295 to 9696051 reverse strand)
cggcgcgagcacgattccgacggcgagagcgagcggtgagcggcggaaacggaagggcggagctcggggagggtttaaatagcgccggaggaaggaaagagcggccggagagagaggaaacgggcgcggggatctcggccgccattgattgcgccggcgacgattacgggcttgattcgaacgaatccgagggagagagagaggggaaagagggggaaacgggggagggaaacgcggggagtaaatcccccctcttgattgcacgcggggcggacgggagcggcgggattcgcggcggcggcggcgctagggcacgggcgcggcggcggacgcggcgggaggaggaagatgacaggtgggacccacccgtcagcgagagcggcgggcgggcccgcctgtcagcggcgcgcgcgcgcggggagccgatgggccgcgggagaggagagagagagggagggaatgggccgagccggcccaagagggaaaagggggggggaagcgaactttttttagggttttctttttataaaaccttttccactttgtttatttcttttctattattatttgtgctctgaaaattccactaaaatttatttaagcattttaggcttttaggaaatatacaaaaatcctccaagcctcatttgacttttatctttgcacattttaattgttggaggctttcacattgaattttaattattcttttgcacaatttcgaggatagattttagagtcgatttgggacgcgaca

SEQ ID NO: 9633 - DNA, 789 bp, Oryza sativa
  Intron number 1 from transcript LOC_Os06g35050.1 (locus LO C_Os06g35050) derived from phytozome v7.0 (chr-ID Chr6; po s 20400003 to 20400791)
ccgtcaagcagttcccccgcaacctcctcctcgaggtacatacaccaacactttcaccagcaaacacatcacatcaattcaatcgtccattgatcgcactggttgctagtagccaccaacaccatctctcgaatcagattttgctgcctccaattcgatatgaccatgtcactgtcattggagattagccacactaatcagcatccaacacgtaccgaccaacctactagaagaaactctaaactagggggagtcatccgtcttgaaaggcggaggatagtactattcttttggtcttgttggttagtgactttgtggtagtgacatcgacacactagacattttttgattcgaggtcctgccaagcacacgacgccaacacacatttggcttgatgtgggatgtgtaactgcactaccgctagtattagtacaatggtgctctctctggtcgagaaacatgttactagtgttttggacactgataggcctctaagatacaactttgaccagactctttatattgtcatttatttgtaaaacatgataaactttggatattatgaaagtgctctccgagaaaaatctacaaatcattttcatgcagcaccaccagttaaaaatatttgaaatgatattgatgtttaaagctctaaagtttgatttaaagcacacccaaaacaacatgctttcatgactagatcggaatactacattagcttgacttcattagttaattattgtggagtgatacattttgttagatcctccctccggggttcgggattgt

SEQ ID NO: 9634 - DNA, 476 bp, Oryza sativa
  Intron number 2 from transcript LOC_Os07g16140.1 (locus LO C_Os07g16140) derived from phytozome v7.0 (chr-ID Chr7; po s 9398717 to 9399192)
accaagtaataagtttgatcttgctttctcttttttcttcccccaagcattgctgaggtcctgatataccttttgcagtacactaggtgtattggtgtagaaactaatttcagtaacggcgaaagatattgaatttgtgatgtgttgtttcaaaatcagtcagcatgatttaggttaatgtattctgacaatttttatctgtaactactgactaacgcaaaactttcttgaacatatttacaaaagttggatggtctgttttttttgttctttgaatactatttctaggtgaatatttcgaaatttattatggtgcacacctaactttataggagcctaggagatgttgttatatggttattttccttaattttcttgcactggaaaacacttccattaaactgtttctttcttgtgtttgtgaaacttgttgaaaggcatgagtacatctgttattcctttcagggttgcacagt

SEQ ID NO: 9635 - DNA, 336 bp, Oryza sativa
  Intron number 2 from transcript LOC_Os06g02430.1 (locus LO C_Os06g02430) derived from phytozome v7.0 (chr-ID Chr6; po s 835557 to 835892)
gaagctcacctggtacaatcatccattcttccaatagtttcagcattcagtcttccaatagtttcagttcaattcattgttgttactttcatgtgtcaaacaaaacatgcgcttgtcagaattattttgtagatgcactctgctgttgataatatgcactctattaagtccttaagcttctgtttttcttccatacatcaattttcccctaacctcttttgtgtcttttggcttgctgaaaaagcgtagtgaagagttgtaatttggctagcaatttgttccatgtggacacctagatcaaaccgaagctcatttagttgagtattgcctgtagga

SEQ ID NO: 9636 - DNA, 826 bp, Oryza sativa
  Intron number 1 from transcript LOC_Os05g44630.1 (locus LO C_Os05g44630) derived from phytozome v7.0 (chr-ID Chr5; po s 25900819 to 25901644 reverse strand)
atccagaaggccttcagaggatacctggtacgtctcccaagtactgttttggtgtcttgtttttcccctgaaaatgttgagttttgttctgcagctgctgcatgtgtttgaactttgaacattagcctagtattcgtaaatgacattttatttggttttccacgattcagttagcaatcaatgcaaggataggttcacgggattttagtagattcttctttttgaaaatactccctccgtcccacaatataagggattttcagtttttgcttgtaacgtttgaccactcgtcttattcaaattttttttgcaaatataaaaaataaaaagttgtgcttaaagtactatagataataaagtaagtcacaaataaaataattaataatttcaaacaattttgaataagacgagtggtcaaacgttacaagcaaaaactcaaaatgggacggagggagtaggtggtatggattctcctggttttatattggacaggagatttgacttcactttactaactgttgttaatggcagcagttgtttgatagtttcttgccgttgagtagctagccattgcacaatgcacattgtttaatctgcttcctactatagataaattccacattttaggatatttttgtttagtgatgatttgctgcaaacgcttaggtaactgcacagtggggacacaagcctagtcgtcatggcatatagttcaaaaacttccatattgtttctgttgatttgcttttcgaagcaactgtaaaaatttgaattttccaccgcaaatgcaggctaggagggcattgcgcgctctcaaggcgcttgt

SEQ ID NO: 9637 - DNA, 913 bp, Oryza sativa
  Intron number 2 from transcript LOC_Os04g32960.1 (locus LO C_Os04g32960) derived from phytozome v7.0 (chr-ID Chr4; po s 19756367 to 19757279 reverse strand)
ccgtcacgctgtcgtgcatcatcgcgcccaacctggtaagatctctgatcgatcgatcgccaaggagggtatttcgtcaatcttatatatatctgtacgtttgaagaaaatacaacttcaaattatcaatcttatatatatgtgtgtgtatgtttgaagaaaatacaacttcaaattatcaatcttatatatatgtgtgtgtacgtttgaagaaaatacaacttcaaaaacatattagaatttaagattttctccggtccaacaaaaagtacctcaaggtactggtacctcatggtaccaaatcgtttccgatcgttggatctaacaatacccatcccgcccaacaagatctaacgattagaaataatttagtaccgtgaggtaccggtacctcgaggtactttttgttggaccggagtaaatctcattagaattacctgcccatggtagtttagtcatattagaattcataggagtaataatgttaatggacaagaacatctcaattttgatgattgggtaaaagctcaaacattaaaagaagggtaattttaccattcttaatgaaattttttggtacctcgagctactgagataccaaattttattctagaaattatggttacctctagtactacaaataagtacttggaggtagtaccaaaatttccagtgtaatcttcctataaaatttctcgtagaagaaagtatgccgaagcccattgacgcctctcgtgttgttgaattgtgggccttccttgagtaatgtctacaaggttttgggcttaattggtatcctcgatcggcttgttagcttgttgcagctggtgcaaatacattcatacaagctatatatattggctcacatactactattatgtttattatgcaattgcaggctcgacgcggtggg

SEQ ID NO: 9638 - DNA, 849 bp, Oryza sativa
  Intron number 1 from transcript LOC_Os06g33710.2 (locus LO C_Os06g33710) derived from phytozome v7.0 (chr-ID Chr6; po s 19613465 to 19614313)
tgataagcttcgtttcttggatctttaatctacctaccaacttaccgagtttatctctccttggtcgtcggtgttcgtttgtttgtttgttttggggggattgtttttcttttttttttgttcaactttgttcttcaactttgtgctaatcgcgcccttttattgttttatacataattgtttgcagtattttgttgattggatttatgggtttgttttggtggcgaggtttttatgggggaagttggggataatctggggactctttgtaacagtgatttaatttatttaggttcggttccatgttctgggatagttatatgggttttacggatcgattacctcattgattcttctttaatcgaaacgttattattgaattttcatgtctctgatgatagactgataatatcttactttattactaatacatagaaactaaaattgcaataccatgaaaaacataatgatgaatttagcaaagatagttcttaaattatttttgtgtatgtatagggtagaaggatgatggcccctaaagcagagttgcagtgatgacattttctattcaccttaaaagccttgtgttgagatagtgaaattattaattcaacatatgaaaatcttttattgcgttgtacatcatagatgtttggctgagcatggcacttcttgtttgtttgaaagccatggttaacatgttgcagtagttaagcaatttggtacttttgagtctggggctctgggctgcttgcttataagagttgttcatggctgtagcctgaatattttgttcccttttcttcatgttgagccagaggctgggaacttcaaagctgaaaaggacta

SEQ ID NO: 9639 - DNA, 664 bp, Oryza sativa
  Intron number 3 from transcript LOC_Os06g33710.2 (locus LO C_Os06g33710) derived from phytozome v7.0 (chr-ID Chr6; po s 19614660 to 19615323)
tggcctggtatttctcttgttcttttcccagtccttttccatcaagattggtcccaattcaaattcatcatgattttcctgaaacaatatttgtactgatgtatgtgaggcgtaacctgaccgattccatggatgtgtggactgaatctatttattaatgagaagtttagctggttaaattaaactctgaaatgctcctgtagttgtttctgatttagaaatgtaagcctgagttatagccaattatctctcagttaaaaaataaaaataaaaatcttggtgttgctgcacttaaatcattaccccttaggttttagatagtgtattcatatcctaaatttgaaggcggctttgatatgtgaagtgatataaatcactttgttcatcttttttgctgggtgggccaaagattggctggccaatttcatgaagattgggggaaataaaagttttaattacaatgacaagtctcaagcaaacttaagccaatgtttttgtcaggaaatttatgtttctaatacgaagcattgtctataaaagttctctcttctttacaaaagcacatgttgaattattctacctctttgagcctgtcaagaatattactgatgttttgtttttatacacaggagaagctcattctctgaaagtagagaatattctg

SEQ ID NO: 9640 - DNA, 842 bp, Oryza sativa
  Intron number 1 from transcript LOC_Os03g46690.1 (locus LO C_Os03g46690) derived from phytozome v7.0 (chr-ID Chr3; po s 26418956 to 26419797 reverse strand)
aggtaaaccatttattacatgatctcccttcgttttaaaatttattgacttttcgcataatgcttcatcattcgttttattaaaagatatatatagataaatactctctccatctacttttgatggtcatatttccaaatatgaaaagtttatttttgataggcatatttcaatccaacaacctatcatcttaatgattttctcaaatttaatgcgtgactccccattcttccacacatgattggctacatgggcattgagaaatgtaaatattaatgaatcgcttatttacaaggaattactagtaacatgtttaaatggatgataaatataattacttattcttggtctgtgtgtcaagatgaaatatgtctatcaaaagtatatggagggagtattgtttattttgttatgacctgctttttcattaagaaaaagtaatcttaacttatacttttagatatttatactaaatttttgaataagtcaaatggtcaaacgcggtataaaaagttaacagccttatacattttgaaaaataaggtactctcttcatcccagaatataagaagttttagagttagacacgattattaataaagtaagtagaagtgaatggtgaagggttgtgattggttagaaagagaatgttggtggagaaattgttaaattttgagataaatcgtgatggctaaaagttgttatattttgggatggagagagcagtatattacatcctctattatattagtgaaacaaaaatgttattactcaagttatgggtgatttgttgatatcatattttctttcgattatttgattctgcaggttttccttgtcag

SEQ ID NO: 9641 - DNA, 843 bp, Oryza sativa
  Intron number 2 from transcript LOC_Os03g08860.1 (locus LO C_Os03g08860) derived from phytozome v7.0 (chr-ID Chr3; po s 4592033 to 4592875)
gacggagaccctcaccggcaacttctggcaacactgtaagcttcaattctgaagttattggtttttgttctgtatcagtttaccaatgcttggtttttctgcatattatcttcgttttggagttatgagtagcatgtaattaaattaagtgggggaactgggtattatatcggtagttagcgctaatggaatttgacgataattcgtgttgatgagttcgaaaaaaaaaaggcggcctggtgagaattgtgaattacagtagtgcttgattgggtatttgtgctgtctggtgagatctgtgggttatagtaatgctgaatgaagaaggttcactatctattggcttctttggtctgtttgaaactttgaattggtccagcgcatatggattatgggtggtgctgttgctattaggctatgtaattggatttatgtggagttggcgttgttgatgacaacggagaaatgctgggtatattctatcagtcataacacaatttatttgcagtgaatagctcatgcatattaatttgttaggtaaaccatatgtcttaacaatgtagagagtaaaaagatgttttaaattcttgcagtgttttataatgctgatcattccagatagatgtctcattgtgctacctctcccttattttctagttgcactgatttggtgttgtattcatgcattgagccttctttgttcacatgctcattgtactgttgatcccttgaaatgatatggtataagtttcttaaattgaattcgagcagcgtgagataatatagtcataacacgaatcttaatttgccttgaaacagtgaaaactggaccaagcattacag

SEQ ID NO: 9642 - DNA, 813 bp, Oryza sativa
  Intron number 2 from transcript LOC_Os03g16874.2 (locus LO C_Os03g16874) derived from phytozome v7.0 (chr-ID Chr3; po s 9375290 to 9376102)
ctcgtacgcagataattagtttaagaagttgtacgaagcggagattacatgccatcgttctagtggaacgattgggatttacttgtaatagattatggatcgtgcaaggaattactggtcatgtttgaaaacatcggcaatggagatccattttgtgaaaagcaagctaataggcttaacagttaacagagaaaagagatccagttgataggatgaactttggaagtgcagttttacctcagaatcgtgaacttccttttgatgaaaaaaaatgaaaacggtggacattttcctttttataggtgtatttcaggattgtcctgtgaacatataaccccttagaggcttagattgtcaaagacatgataattggagaatcaaatgggtcttttcctttgaactctaaatggatttgttgggtttatatctggagataatagacgtagaacaaatgatgtgtcagtttgtaattatttctacagctggctttgaaggggaattaagatatgtacatgtagcgattccaatcgccctaatgctatgattgctatgtacagttaaaatcagcacttatcacctgtaacttttggagaaaagttttgcaatttacatgcatagaagaaaaaaaaaacatgattactgttataggagtatttagtagaacagcagtctatgataaatgtgtattccattttctagcgttctccatgttttttgtttcaaacatttcatttcttacattgcttgtatgcccatttatcttgggaccctttttattaatatgtatcaatcacatgaaggtttagtgcaaga

SEQ ID NO: 9643 - DNA, 575 bp, Oryza sativa
  Intron number 1 from transcript LOC_Os07g30680.1 (locus LO C_Os07g30680) derived from phytozome v7.0 (chr-ID Chr7; po s 18154947 to 18155521)
tcggtactcattgaactcgaacaaaatcagtggtatttaatagattctctcgagttaaatctacagatttgtgatagtttagtcatagtatctgtaggtttgagaaattttctcttttttcccaaatttgattacatgatatcaaaatatgttctcatattgtacaacttggatgctgaagcatcaagcccctgttgttaattttggtaattaacgataagttgtggactaactattttatttgatttgaatgggataatttgagttaggacaacaagatgtgtatgccaagggtgattatggcagattaaaattgatggcacaaaaaaaccaagatgaagttgataaatctagcgttttgtttttattgattgacatgttgggtactcaactttgctaggttttctttctagctttgttgtactagtgtactatcaagagggatagtaatcctcgcaaagaagtggtcaaaataccatattagtgcatatgtatgagggtatctttgttttggctttggtcccttgcttttctttggaggttggacagaccgagatactgggccagtcggtctg

SEQ ID NO: 9644 - DNA, 645 bp, Oryza sativa
  Intron number 1 from transcript LOC_Os05g30535.1 (locus LO C_Os05g30535) derived from phytozome v7.0 (chr-ID Chr5; po s 17635911 to 17636555)
gagctttttctttgtttgcttgactgcctggccgggtaaatccatgctctttgaacgtttcttgcttgaatctgttgtgcctttcatgtttttcttaggacaaagtaccgtttttgttagatacaagtgctagtgcatccagcaattctagtggttactggttagtgcggctgctaatgttgatgcaaagtcatcaagagttatatgattgaactattaatacgtggtttttgggatcttaatcgtttgttaatttgaattgcttatagaaaagaaaattgcaaaatattgatatggaatcggctactattagtattatatcgctatttctttataaaagctccttattttttttttgtatttttaatatatattaatgtaatttccttaattttttgtgtgttttcaatatatatatagacgtatccccgtatccttggtttttggaaaatgtcgtatctccttatcgacgtatcgcgtatccgtattcctgtatctgggtaacgtaggtgatggttgaacagcaaactgtgcatccaagtgaattccacatgatgtgcatccaagtgaattccacatgatgttttggatttgcaagttccacatgatgttttggatttgcaagttcgtatttggccctctttt

SEQ ID NO: 9645 - DNA, 719 bp, Oryza sativa
  Intron number 2 from transcript LOC_Os03g18720.2 (locus LO C_Os03g18720) derived from phytozome v7.0 (chr-ID Chr3; po s 10479970 to 10480688 reverse strand)
gcaaaagagtaatcatttgcactttagttgataactgatgttttaatttccaatttgatttttttatatggtgtgtatgttttgccttagagtaacattgcattgctattttttcacatgggatattaagtatttgcagagttcagtctggtgccatatgttgggctgtaaattttttacaacaaggttctaaattcaatgttaaattttcagtaatgaagctactcagatggttatcaatttaaattttcagtgatgcaagtaatgtacagttacacatggatccatttattaatagtatgataataccttgatctggctagcaagcatcatatcatttgcgttctacaatgttttgcgggatgcttaggttaatgaagtagcatagataaacatgcattcttcatagtgttggtcttacatacattataatttgattatgtagtaagcattcacctttttgttatttgtagaataacatgtcaggataatctctatctagatgctgaaaaacatatgccttaactactgtagagtcaattgctcctaatacaatctcttgtttgtatactgggcaagtgaaaataaacaatttatatggacggtctattacatcacaatcagaagaaaatagatcaggcttaatagtaccactctatttattaccaagggctagttacaacttaattcttttccttgccctgtgcagcgagtacaat

SEQ ID NO: 9646 - DNA, 711 bp, Oryza sativa
  Intron number 2 from transcript LOC_Os07g22494.3 (locus LO C_Os07g22494) derived from phytozome v7.0 (chr-ID Chr7; po s 12654295 to 12655005 reverse strand)
ctagctgcctctccgtatgatctctctcttccccacctctctgtctctttcttccctcctgcacgcatggagaagggtccttgtggatttgatttgtgaagagaagcattttacttttcacctggacagccgcaaagggctttttgctggaatatgatttttttccctctaaatatagaactacggagcttttttggtttcaggcggagaacttggagcttctaactggtagctcggatttgatttctagtgtagctagtgactaagacatactccatccgtttcacgatgtaagtcattctagcattttccacatacatattgatgttaatgaatatagatatatatatatctatttagattcattaatatcaatatgaatgtagtatcaatatgaatgtaggaaatgctagaatgacttacattgtgaaacggaggaagtacttatattcaacttgtcatgtactttttgatagcacctttcttcagtgttcatttgttttcagggtttaaaccgatctctgacaatgaaactatttttttcatccttcataatgataaattgtagctatttacaagaggaatcagattatcgaattctccactttattagagcccctgttagtgagaagaaacaattttggatgagattgtcacttatgtactatccttgcagaaccaagtggagataaaattcttgttttatctata

SEQ ID NO: 9647 - DNA, 700 bp, Oryza sativa
  Intron number 2 from transcript LOC_Os06g12490.1 (locus LO C_Os06g12490) derived from phytozome v7.0 (chr-ID Chr6; po s 6781852 to 6782551 reverse strand)
caagcgcggggcagggggccgtgagtctgcttacctttctcttccatttgcgtaagctctccatctcttctcctcccctcaagccatcgccatctaattcgcctccaatcgcctggctgaccacgagcacgacgggcttcgagcttgaccggtcccgacgaagctcctccggcctcaagcttggccggccctcactagtggcttatcttccctccttgcttcgaacgctgccttcatcttcttggtcgtcgccgtcgttgtcttccctgacagctcagtcatctccgtgctgaatacctgccactccctctcaatcccgaccagatctggtggccagcctatagatccggcgagcaaccaaccgatccagcagctgcgatagcagggatccagagcggcgagctgtgtgagcttcaccgacgagcagtgaggcaaagagagatgagctgtagggcagagagctgctgctcatcaacgcttctttttccttctccttttgttttttgttttttcacacttatccattgactgatgatatcaaagtagtattatcaaagtgcctagcacaaaagtttaatgtttaccgacataattttctttacagccgttgcttgaatttatttgtgcgataaattgtttttctctagtttattgaatttgatatgttgatgtttattacaatttaccgtattttaggctt

SEQ ID NO: 9648 - DNA, 689 bp, Oryza sativa
  Intron number 2 from transcript LOC_Os07g08440.1 (locus LO C_Os07g08440) derived from phytozome v7.0 (chr-ID Chr7; po s 4338214 to 4338902)
ggcaggccaccgatccccacagtatcgctgagagggtaatgattaatgaaactcaccaccctggctaacgagaaccgtatcgctacagcaaattcgaccatgctgcacatatatgttcatgaacgaatgcttgtgattgtggtagcaaccgagttattttcggtgcctttttcagttgtaacgaagatagcttgccaccgaatttttgcgattacaagttagattatggtgcaagtaattggatgttttaagggacaaggtttgtcttcttagccaagtgttgggcagatattgcggtgaaactgcatggtgtgtggtttaagcatcatcataggctgctcgctgctacaaccatgatgttgtagtgtattggaagtcaccaacttttggccattgttatatcaaattggaaccttgttttgtagcgaatgtgctatgattgtctttagggtatctaataattgtggtttgagggtgtatactccttgtagcttcattactatattactaatagtcattaaagatggaaaggctaacctcttgctggtcccttctataagtttacaggaccatgttatttttaactgcattatttttttccctagaagttattttccatattcttctaggtattttctttaacttccatctgttcaatgcagctaaggagagagagaatagccgaaagg

SEQ ID NO: 9649 - DNA, 910 bp, Oryza sativa
  Intron number 1 from transcript LOC_Os06g15700.1 (locus LO C_Os06g15700) derived from phytozome v7.0 (chr-ID Chr6; po s 8890252 to 8891161)
acatcgccctcaacgccgacttcgtcaaccgcaaggtgagcccctctctctctatctcgtgccccgacccgtgtgttcgattaggatgcacccgcccgtcgtgattagtgtgctatttgcccgaggttgaaattctggtggcagagatgggaattgggtgtttggggatgggaattttgtttttttttgtttttgttagaaaaaagaattttcctgtttagttgcttggtggattcaactctgtatgattttgatctcgattggttgctagcatgagagtgtgggcttgaaattttggtctagaattttttgttgcagaggaaataatctgttcgcaggaaaaaaaaggaaggctttttcctttcaatcagtaacctcgggtatgggtacagttcagggttatttgtgttcatttcatggctaaagctcatgatcgcaggtagagtattagggtttaggagaagtggagaaggggttataaagcttatttgcaattcacctttttcagttggagtgttgggactaatccgatacagtgtaatgtttgtaaattatgttgaatgcaaagcttctagaatacaataaagttaacagaaagtatcaaagctggagtaggtgattgttcttttctgctaacctgatttgttgtggtgagtagcatacagtagtcctcttatatgtgcatgaattcaccactaaagacacatctatgttcaacattttgcgatccatgaggatcatggcgctgctggtagcccaatatgatacatttgttcattcacaagtgttgcatacttgaatagaaacttataccgcaaaacttgtgaaacccactagattttgggttttccagttactttattaaaacagttctatttttttccctttccagttgtcaggatctgctatc

SEQ ID NO: 9650 - DNA, 564 bp, Oryza sativa
  Intron number 1 from transcript LOC_Os06g20820.1 (locus LO C_Os06g20820) derived from phytozome v7.0 (chr-ID Chr6; po s 12014036 to 12014599 reverse strand)
cctcgctgcaagggagcttgtcgagacaaccaaaggtaacatatatctctgtttatacttttgaaaaagactgaaatcttggtatgtcggtggtcaccacaatttcataaatatttaaaatttaacaacttttgcctgaatttaaataaatttgaacaaaatcataaaaaaatagaaaaatccggaaatttcatacgagatagttgcttccgcggggattcaggaatttcaatctgaaatttcaacccctgcatgtatccgttcgtatcaaatgctaggattttctcgattcctatggccagtcttctcattctgaaagtctgtacatatattggaatttcctcatacttggtgtgtgtcactcgaaccttttgttgacataatgtttgtcattttgatttctggtcatcagagggttaatgtactgttcttaaaaacatcacaaggttcatatatatagtgtgttctgcatgtgccaccaatttgaatggcatggcaggatcgaatatcaacacatgtcattatctaactagagtttgcctgctgattttgcagttgtggtag

SEQ ID NO: 9651 - DNA, 803 bp, Oryza sativa
  Intron number 2 from transcript LOC_Os04g28180.1 (locus LO C_Os04g28180) derived from phytozome v7.0 (chr-ID Chr4; po s 16475337 to 16476139 reverse strand)
ggtgggaagcagaaagcgtggaggaagaagcgaaagtaatgccgatctcccactcttttttttattttcttgcgtgcgtttccattcggttcgagcgggcgttgttgttttggggattaggtgtgttggatgagtgcatgatttagattgtttctttggatggtttgttatgtttgcatatatgatggtatatacctagatctcttgcatggcgcagtgaaacttagattagaaagacaattgtgttctctcgataaatggttgggaaagatgatgctagtatgtcatttttccacaattttagttggttatagttatatgtgagaatgatgtgcttgcaaatggatgtggctgaaattcctagaacttgacacgcttgtccctgtttccccacaaattagttgtagatagttaaattatgaacgtgaaagaaattactccccactgaagatgtgattattgaattattgatgaatgagtcggtcactgtttagaatgcagaagtcacatagcgttgatgattgtcctcacctcatttacctaatgcaattatatggttaaatatgtgttgcagctgtgtgtgattctaagattgttttgtgattgttgtatgcacaagcttccattctgatgactttgttgtttctgtcaaaaacaatggaccaccactaggaagaatttgattgagccatgacaatgttaaatgctaaatgtaggctgtagctgtgataattgtgatgacttggttgcttgtgcttcttgttccagagtgtaatattgtcgttctggtttgttgttaaggt

SEQ ID NO: 9652 - DNA, 542 bp, Oryza sativa
  Intron number 1 from transcript LOC_Os05g27520.2 (locus LO C_Os05g27520) derived from phytozome v7.0 (chr-ID Chr5; po s 15952979 to 15953520 reverse strand)
ctggcgagcagggtaggggaggggaagggatcctggtgtgcatctacatcctcattctgattcatctctctcccgacctatttttgtcttgaatctgtgcttgcgttaaccctagcttcctcctctagatctggaagaagctcctctcttaatttcagagtcttaaccttaatgcgagtagcagtttgtttgttcccccccaaaagtttgggggtttaactgaaccccaatgtcccaagttggatccgcccctgacgtacaattgtttgctaatttgaaataggcatgtatgcttataattattccgcataatcaaaacttgtgaattttaggagaaaaaaaaaggggcaaatgaatcctgtatttcactggtcagaaatggttactaatgtttttccttgatataatgtttctggatatgtatccatgcttaacaatgtgggtcagcaatattgaactatgcaaaccattactctgtacaatcttttcttttcaaatgctggccacattgcgctcgagcttactgctcatgtgtgcagctc

SEQ ID NO: 9653 - DNA, 858 bp, Oryza sativa
  Intron number 1 from transcript LOC_Os04g49685.1 (locus LO C_Os04g49685) derived from phytozome v7.0 (chr-ID Chr4; po s 29443464 to 29444321)
gaataactgatttatcttgtggttagggattcatgttttggatttttttttttttgctttgattcccttcaagctaaggaagaagtttgtacttattcagtgtttcagtatgttgtatctagaactacaaatacaaatacatgatatggttgatgatctgcaattcttcttcactatatactgtctgtgttaatcttttagattgaccaatttgggattatcagaaaaatgtttctagattatcagaaaatgtcatgaagtcttgtatgtttctaaattatcagaaaatttccttcaaaaaaaataggggctattgcattcttacccctattttgaagttcaattgtgattttgccctcgctttttagggtttgcgtttttactcctacttttttgaaacgaagtagagatttgtccctggtttggatggtcaatttaacggggttaagtcgagcacgaaaagacttttatgcccttgctagctattgcatatttgcccctactttttaaacaacacttgtctttttacccttattttgtactgagctttcgtgaaatgattcaaaatccgtatgaaaatctaatggcgccacattgcatgaacatgaatgatgtctatgaatggtaagttcattaacatcctgtgtcttactgcataagtgcatagtatcagccacatcaggtatcttcatgttggtcaagtcctttcgatctgatgaacccgtcaagagcaggattcatcaccaatggtttgccgctccgaggagtcgctgccatcgcctgctgctcctgccatagcgctgaggatcgccgtcgctgccaggtactcctgccgcctcctgctgctcgcgacgccgt

SEQ ID NO: 9654 - DNA, 602 bp, Oryza sativa
  Intron number 4 from transcript LOC_Os04g57650.1 (locus LO C_Os04g57650) derived from phytozome v7.0 (chr-ID Chr4; po s 34137342 to 34137943 reverse strand)
acttggtgaagaaacttattattaagggtaacaagctactgttcttctctgaattctttttttcttaaaaaagttgtagtctctgtaattctaaatttttcattttgcatacttaaaaccaaacagcttatattttgtttggatcaactcaaaccataatctttgtgaagttccatttgatcttagccatcatcacattgtgtccgtgagctgtatgtagatgagaaaaaggtcaaaagcggctagctttcttttgtgtgattgcttgtatttccatccagcggattttttctatcatgttcctacgatatgtggcctgcagatcgaggagccttgtttctccaattccaactttacatttagctaaataagtattggcttggtattctcggactttagtagcttgtacttctgtttacatccaagcctaataatcttaattttagcatcatttttataagtaaggatatttgttttccttttttattgtactacactcatctggtatgccacagcatcaacactgacagctgtttttttttttgcccttttgttggatatttatctccacagttgtgccatctcagttggagcagcttaag

SEQ ID NO: 9655 - DNA, 793 bp, Oryza sativa
  Intron number 3 from transcript LOC_Os03g47740.3 (locus LO C_Os03g47740) derived from phytozome v7.0 (chr-ID Chr3; po s 27052613 to 27053405 reverse strand)
aggtgtgtgaatttgttgcccttctatttcttaaaacaaaaattatattgcccttccctatacctcgctatgaaatcgaagtgtcataatggtttgtttgtgcttggctaaattcataccaataatttgcacaaagattactaatatgagcaggcttaatccagatactccaaagtaaagctccagaaacaaatacttgtctagtagcagttgcagcttattctctcgtgtgccaaaagtcaattgcgttgtcctgccttccgttgtcttcctagaaaagtattggttggacactggaatctccaccaaatcagtgttagatatgaccttagtattcactattagcatagatgggtcatgatccacagttcagaactgttttgacttattgctaaaagaaatgttttggcttctaacaagaacttcataagttgggcttcttacagaagttagagagatgggtcaaagcctcgaaggtaactagtctaggtgggtttagaaagcttagctgcctatagtcttacatgggaaaagcctttatcttctaaatgctcaagtttttatcttaaggccctccaaacaagtttgagaaagtcacatgttctattgaagtgtccagtagctgcaggaactaaaaataaaaatctctttcgagaagtcaaactgatagcattatcaataagatgagtagtggttttactggcaagctaatgatatccttgctggtttgtaatcataccatttgttttaattttcaggtggaccgaaagtacaaacactattatcatcaaat

SEQ ID NO: 9656 - DNA, 720 bp, Oryza sativa
  Intron number 1 from transcript LOC_Os03g47740.3 (locus LO C_Os03g47740) derived from phytozome v7.0 (chr-ID Chr3; po s 27055072 to 27055791 reverse strand)
aactgaaggtatggtgttttctgcagttttagttggtgtttcctttttacatcctcacctcaaaagttgttctctggtggtgtggatgcttggaggaactgagcttggtttgctggcttcagaatccatggcttgtgttcttgaattctgggtttttgtggcgttcttggtggctcaaccaccatttggtgttgggagaagagctctgagtttctagcagctgcttctccagctaccggtagagctggcttttttttgggagagatgacagaattgagcttgattacagtggagtcctactttgatttgtggcttgtgttcttgaatctttaatctctgtggatgcctgcatgaaagccatatgctcataaaaagccctgttcctttttctcttttctgttgtggaaatgattcttgtgttggattgctatctcatattcctcttgtaatcgaattcttagctctcttctcatcagaatttgggtgtgcctcgtattctgttgtgcgtggcaacaaagtttttgccttggtcatttctcctagtttccacctctttcatatcgttaaaaacaagtggaaaatttgagatgtaaacaagtaaaaaaaaagaagtaacttttattttctctttgctggtctctattctctagttagtcatctcaggtcattttatctcgtctttcagtgtgattacaaagcaaggaaccctcctaccgcgtc

SEQ ID NO: 9657 - DNA, 751 bp, Oryza sativa
  Intron number 1 from transcript LOC_Os03g04930.1 (locus LO C_Os03g04930) derived from phytozome v7.0 (chr-ID Chr3; po s 2376046 to 2376796 reverse strand)
ccagctgccggcgcccttgcccgactggccgcaaggttcggggacttcttcgctttcctcgtttcttcctgtactgtttaattggttcttaatcttaatctgcgtcgtcatctatggtttggattgccggatagtgtctttgtggatggatgtaaattttcagctgctatgcgtgagctcgcgccaaatttgatttgatttgttgcttgtccgttccttctttcctaaacgggaaatttttcatggcagttgacagaattgatccttaatttcttcggcgggtgacagtcaaatagttaataaacagatttttcattttattagatatggtatcgtcgattctaatatggtcttagcgtaaggattgagtcgaaatcctgatgcttggcttggaatggaagtggtatagccaggaatattctgatttactcacaaggcctattaattgataagctagcacactagcagtcgtaggctcaaagatttgcacccatttgcaagaaaccaaaatctttagttcacttcaatttgcacaggctatttttggggttatgatggagttgatttttcttttaccgttcttagttgagcaacgagtagcaactagcaagcgcataaaacagaatgttccaaattttaatttgcatgccattagttttcccaaaattaaggatagcttcctgaattcctgaacctctatgtaacattttgtcaacttcttcacaggaggagatttctctaagggcacaat

SEQ ID NO: 9658 - DNA, 1015 bp, Oryza sativa
  Intron number 3 from transcript LOC_Os05g28730.1 (locus LO C_Os05g28730) derived from phytozome v7.0 (chr-ID Chr5; po s 16791178 to 16792192 reverse strand)
aaagtgcaggttgttgaaacggcagtcactgtcaggtacctcctccatctcttgcattgtcaatttctgataggaaaagatcattaagataatgctcttaggataaggtgtttctaatctaagcctatctggctagtagtatcatgcaactgtgaactgtcaacaccagtaatgtagcactgtacatgcccttaaacggagtcttaaatcagtaggtaacactctgttttcaaccaaggaaccaaccaatcatgcaatgagagacaggattagcatactaacaaccagtggttgatgagatgatctgtgtagccatttattaatgttaagatggccactcaggtagatcccccaagatgtcctagataagccacaggacccaaccaacaaggcaagtataccttccaaactagggaccacaatgacacggtgacagctcttaagatgttaagatctatcaataatacaagacaagaaatgcagtaatgcatcttggcatattacattggcctgattagtggttctccaatgagattacagagataaagctgcagctcagttttcacacagaaccatcacaacaaaatataaaaagagagaaaaaaaaaagaagcttcagctggcaacatttccacacagaactacactgaccaattgcgttaggctgtgtgaaatgccattatctgaacaaaaatgtacaatagggcatcatgccaaaaatgaccagatagacagccaaatcaaaccgtgaagtatgagctgtggatgcatcggtgaggcgtcctgtcaagagcgtgcgtccaaatcacacggtgtcaatgcacaaatccaccttcccggccatccagcattccagctaacgtggccaccttagtcacactcacatcatcacccggggttgcatcttgctgcaaggtttcagcagttgcaaccaccagatcggattagatgggggacacatgtgccaactcggtacactgcctgatgcagagccttcttttgcagagacgaggag

SEQ ID NO: 9659 - DNA, 714 bp, Oryza sativa
  Intron number 2 from transcript LOC_Os03g12950.1 (locus LO C_Os03g12950) derived from phytozome v7.0 (chr-ID Chr3; po s 6994349 to 6995062 reverse strand)
gggcagaggacatcgcagtataggggcgtcaccaggtaatctgcttacaaagattcagcttttgtgtgcatcatgtatcatcagatcatcatctgtgagctgtttgcacatagggtgtagaggccggaaggttccttccttgttatctgaaaaaaagagaaaaaaaaactgttcttgccatggttcttgtactgactagttggcttaatgtgtttttagttctatctactgataggcatgtgtgatctcttctatgtggcatttgatagtttggttagtacacacttgtacattgctgtttttgagctaatcagttattgctcggttgccatttcttgttgtcactcctactatactagtagtaatagtactagtttccagcattgatgagttcttcattccttcttacggctctgctgctcttgttagtcagtggggcgtctactgtttcttgattactactactaataatcagtttaatgcataacgctgcaatggttggatttattctctagaagtacctcttattttggtcctttgcacaagattatggcttggggtggctctgttacatctgatgcctcttcagttccttgtattgatgaggcacctactcttttgtttttgagcaaatcatttgaccctttttatattgaatgacgaaggtttgtgtgtgtttgattcactggagcaggcacaggtggactggaagat

SEQ ID NO: 9660 - DNA, 786 bp, Oryza sativa
  Intron number 1 from transcript LOC_Os08g16570.1 (locus LO C_Os08g16570) derived from phytozome v7.0 (chr-ID Chr8; po s 10137869 to 10138654)
cgtgctcgacgccaccccgaggtcgcggtggcgcggtacgttcgtccctctcccggctctcctctcctctcctctccgtctcccgcctggcagccgcgccgtctcctgctctgcattgcttctgcttgttagctgctctgcgattcaggtcgttcgtcagtaactcagtatgcgtttgattggtgcctgtggtgcatcgcttcgttttcacccgaaaatgcggacggcttggacgaatttaaccaagttgtgccgtgaattggagtattgttgttgaacccaatttctcaaacttgcttagcagttgagttcagttcagttcttctttttgtttagtatagagtttgctattaactgatgcccgatagtccaatggaaaaaaagtccggatctatttctcgaatgggtggtcttgggaaagctggtcatagttgatgtattatgaacgcgattgtaaagcaaattcgtttggtgactttcagattggatcagctaactgacaagaatgctcagtaggtttcaaaaaaaaaaaaaaaaacaagaatgctcagaattccggatattggatattagacaaacagacatatagtgcttcagaagtttaatccttagcacagttgtcaatacatttctacgaacgtcatccttcctaaatagtataagtgttcactttcttcttatgtatgagctgatgtagcatgagcccatttccctcccagtattggtgtgtgcagtgtgctggtactttctgagctaacactagagcagatttggtgtttttccaga

SEQ ID NO: 9661 - DNA, 264 bp, Oryza sativa
  Intron number 2 from transcript LOC_Os03g59040.2 (locus LO C_Os03g59040) derived from phytozome v7.0 (chr-ID Chr3; po s 33598780 to 33599043)
cttctatctcgtgctccgagccctcgacactgttggtcagcaatttctctgaactactttgtacttttcaattgctttttgactttaccacgatttggtgatttggtgaatttttcttttcaaacaaagtggtttgtggcgccttttgaattattgaattacccatggtttttgtgttttcctttatcgacttacatactatgtttttttttttcatgggtgcgtgcagaggacgacactagcattcctgccgcggtgaaggtg

SEQ ID NO: 9662 - DNA, 746 bp, Oryza sativa
  Intron number 4 from transcript LOC_Os03g59040.2 (locus LO C_Os03g59040) derived from phytozome v7.0 (chr-ID Chr3; po s 33599244 to 33599989)
cttgtctccacggctttcttggagcttggtcaagggtaaattcagttccgagtcttctgaatgttttccttgtctgacttttcttggttcctagtacttcgcgacttgacatctttgaggcttctcatatattggcgttttctcaaattctttggacgcatgccatttctcaaattgtatattggcgtagtctcaaattctttggacgcgtcagtccagatattcatatccatgaaactacttcaagacttttctacataatgtggcgttcacttggtagtagtagctagctgagaaaccatcctgcatggtcagactcaaatggtgaaataaaaagctgatcatgatatttacacagtaagatgatttgtacgatgataattgctatgaattagcaaacaagcatcctacagaaaaacaggggactacacaaacttgaacggcagttatattcgtgaaccctatgaaccgtgttcttttgattgtttttgttagaacttcttcaatcctgttaatgttaagtattcttcacactcgattatatttggtcatatttatattatttcgacgaggagcagaccaaattttgttggaataacggagagcatgtgttcagccgtttctgaatgtaaaattgcattttactttggttgcccatatccccggatacttgcatcactcaatattctgatatactcttttctttcttagttatcaagaggcaattgaagaaatcactaggctaa

SEQ ID NO: 9663 - DNA, 949 bp, Oryza sativa
  Intron number 3 from transcript LOC_Os05g44570.1 (locus LO C_Os05g44570) derived from phytozome v7.0 (chr-ID Chr5; po s 25867136 to 25868084 reverse strand)
cagcaattgaaaggcagctgttctaggtaagcctcagctcagtttcttgtgagatctccatgttgtcatttgacggaactggcactgatggacttttacagggtgtttgaattttattgcctttttaggaaagtgtatgcctagtgcaattacccatttgtctaggaaaaaataatcctgcctttttccaacaaaccacctaactttgtttagaaaaacattgcttggagaaggagagccacacatcgcaaggtcggtttgttgggtgaaaatgaacatgattagattttctatattttgagcatatgctgtaggtaaacttaatttgaaatcttaagtttttaactgcacacaattgtatctttcaaaaagactatgtatgtgataataattttatcactaaatctaatttagagtgtcaagaatctataaaaagctaactaacattaccctataaaaactatatggccttagtttttctcccttcagtcttcaagaaagtagcttaactttcctaactggcatagttctcaggtttttatattaagtttatccttttctcaatggaagcaaatatgacagtttcgaacacaagctgaaggagaacttccagaagcctgatgtacctgaactcccaccacacgcacacacaacaaagaaaagaccttcaaataatggcctgcttaatatcttgtgaaattctagtgaacggtcagggaatatgttaaacagagatatttacagagacccatattgctttgattggtgcagccttgcaggtgcacagctggtagatcatgagtacatgctcactccttatttcattatttgacatgataaaagaagctggcaatttgcttagttatacatatgtgataatcttttgtgtactttatcaatgcttgacatgatatggtttgtcacagcattggtgcctccagggtgaaga

SEQ ID NO: 9664 - DNA, 800 bp, Oryza sativa
  Intron number 2 from transcript LOC_Os06g16430.1 (locus LO C_Os06g16430) derived from phytozome v7.0 (chr-ID Chr6; po s 9400816 to 9401615)
ctggtatgttactatgctttcatcattgtcttttcaattatgacataggtaaaactgtagaagaatcaagattcaaaatcctggtgtttaacttagtggctagcttgcatgttccgaatggttttgcattcttaaaaattgtcttgtccttgaggggttttgttgctgatgttagaaaaggaaaatggcattcagtctcaggaatagctttttgcatcatctttttaccaattgatcatatatgaaatgttgacaaactggtaaccagcctgtccttgttcttttcacattgaggagaacaaagcataattgctattcatgatgctgtgatttccgtgaacatatatgaaatagcattgcatgaggaaccgatgaaacttacccagtaaatttggcttgaaaggttaaactttcacttcaaactctacaacttgtgaataccttcagccctaaatagcagaaaaaaaacacaacaaaattcaagaatttgagagaccaggttatgagattttcttgtgcagagctctattatttttaacttacaaaaacattttatttcaagtgtttatgtatgagcacttgttgcctttcttgggaggtatccgtctttaatattcgaataatctctcaactccagtgtcactatcatagtggacattatttgctagctagagaaggaaatgaatggattaggtaaaattggtactattagtttgtaatatagaatattttcttgtttagtgcttaaagcaagacattcatgaactgcttttatgctattttagttttgcagtttagaa

SEQ ID NO: 9665 - DNA, 768 bp, Oryza sativa
  Intron number 1 from transcript LOC_Os07g03150.2 (locus LO C_Os07g03150) derived from phytozome v7.0 (chr-ID Chr7; po s 1215618 to 1216385 reverse strand)
tgaggtacaccctgttctagtattttgtttcttgcagtttgttgcccttcacagtgttctgctagttcttaagttggagggattgtgatttgtgagaatgtgggattttctgttgctatttttttggtcagttttgtcttaggatggcaaaagatgaggggtttggtgtgaattttaatgtgaatttttaggagtgtggaagagtagttcatcttggttcatgtgcttgtttgcccctccgttcttcatgatgctttgcttcagattttgtggtttgaatgggttggagagtcttattttagtggttgaaagttgcaaatttggttattccttcattctgattccaaaggtagttcatttttttatatgtgatgaatatgtacctaatactaggaatgaaatgagagttaatgtactgggtaaagtttaaattccggctctatttcattggggaaaatgtgaatgggagaaaattagctatgttctattaggtaaggaaaaaaaacatgaaaaaggaatcaagaaaagaaagcctgcaagtgcaatgaatcatgccatgttctgttgtttgcttactggagatctttttgactgcatcccctatttcagttattcaggtgaattttgactcttcagttaattattgtatgtctttgttcaggggtgtgcaatagtgccaatcataaggtcaaaagaagatcacatagttgttaaaaaactttctgaatcaatcttctctgaagatacaggcttcttctgaagacaagc

SEQ ID NO: 9666 - DNA, 662 bp, Oryza sativa
  Intron number 3 from transcript LOC_Os08g36420.2 (locus LO C_Os08g36420) derived from phytozome v7.0 (chr-ID Chr8; po s 22990767 to 22991428 reverse strand)
gtggattgccttgccatcttcggggtaagtgtggagtttctagttatcaaaaagtttttattagaacaaaacccaaactagcaaatagatcattgactgcaatttaatcgagtctgaatgttctactatggtaccagaatcagcatagtataccaatgggcaatgcatattggaattacagtgcagcttgagctaggtaatttaggtggctgttgaattttaattttagacaaataaatggccacatctgtaccaactgaatgtcacatcctatttgttatattacattgactttctagtttgggcatcaagaaatttagtcaatgttcttcgcgatttgtttacttgaaagccagggaaatggtcctacattttgtgcttttgaaatgtagcaactcaaagtctgttgagatgttatttcagaaaacaaaaccacatgtatttcttgttattcttgaactttggaaagtaataccaaagtttcttattaatatagttttccttggggaatcccatctgcatttctgtattcctgaagattcaatgacataactctgtgggcagtaatcatgttaagttgttaacagcaatagtcaatgttacaacttatgtatgtgtttttttttcttgtttggcctgtgatgattctgtaggcaggtgcg

SEQ ID NO: 9667 - DNA, 1033 bp, Oryza sativa
  Intron number 3 from transcript LOC_Os05g24601.2 (locus LO C_Os05g24601) derived from phytozome v7.0 (chr-ID Chr5; po s 14135362 to 14136394)
aagatctggacaccttgaggctgctctctaagcttgtatccttttttcccatatgttcattgttccagttttttgacctaactaacctatacaatcctatcctatgaaacatatgaaacatggttttttaacctacacatatattgctctgtagtgaataaatgtatatcagataatgttaccaacgtttgttttgtgggataaaatgaagattataatgtctcggtatagttgagcttgtcactatataccaccaaggggacaaaatatcagataatgctataatatgaaacatataaaatttttttcttttaacctacccatatattgcaatgtacagactaaatatcagataatgctattaatgtttgttttgtaggacaaaatgaagattataatgtctttgtttagttgagcttatcattatatgttaccaaggagacaaaagaaaagtaattattgtttatcatagttgcttgggaaatttggaaacactataatgactgtgtattcaattgagcgaatccaaacgttatgtaggcgttgcgggcagtgtcaacagaagctacgctttggtgcctggctggagctcttgtgctccaagttttcctttgtaggtcgttatcttaagggcactaggctgtcgtagggtggttttttggtcatgtgtcgccttgtgtgatgctatttgtggatgtgttttggatgaagggcttgttagcgcttggttgtatgggtggtttgtttttccttcttaatgaaatgaagtgcagctctcctttgttttctaaaaaaaacaaagaaaataaagtcactacattaacacaattcaattttgataaaaaacaacatgcaagctatacaatcatgaacctatcatatttttttaatggaatctgttatgttttggggctttatggatatccaccgttagagatgctactacactgcattggttttctttgttggcaataatcaagtactgtgatctccttaacagttccacaggtgcctgaatattctccctctcttg

SEQ ID NO: 9668 - DNA, 576 bp, Oryza sativa
  Intron number 2 from transcript LOC_Os06g45980.1 (locus LO C_Os06g45980) derived from phytozome v7.0 (chr-ID Chr6; po s 27866768 to 27867343)
tgcccaaaggtattgtgcgtttctttttaattactctaattattggtcatgtttcccttttttacatgaagagccccatcgtttggcttattcgtggaataagccaaatggcatatttgcaaacgaaaaataatttgtgaataaaacttttatatacgtgttcttagcgatctaaaagcaaaggctgaagaataaactttgatgaaaaaaaccccaaaatcaacttcaaatttaaggttgaaaattcaaattttggctgataagcataagcttaagcggaaagatgaggctagaagtgtctagctagataagaagcaattgttttgtggtttaagacatcaagagaaatgagagacattgtggcatcaaatccattgttttctactagtatctgatttgattagcctacccctgtatcataaagtatcatcgttttggtggctggttcataaaacccactagtttctacttatagcatgctcacctgctcatgatcctttggtgatccatttactttacatgctgagctatcagacagcaatgatgagtattactttccatatgttcactagtgca

SEQ ID NO: 9669 - DNA, 790 bp, Oryza sativa
  Intron number 2 from transcript LOC_Os06g15360.3 (locus LO C_Os06g15360) derived from phytozome v7.0 (chr-ID Chr6; po s 8720457 to 8721246)
ctgtctaaggtatgtgatgatcttgtttaatggcatttgattgtttagcagtaactacccttctaaattattatttacagctagacaataagggtatttgcagaccagagtattcttgataatttgcagtaaaatcatgccatattttgaatactgtggctttgtttcccttaagctgggccttgtagctttttataatcgtgctattatgtgtacattattagtgaatatatgtattttttttggttaatgctgcagtttcatactagatatttctttaaattgtaatgttataactgaatgaattgctaaatgtatgggatgcaaacttttgtgtgattggggtattcttcccatccgatagccaaaatcagagcccaaactttgtgttgtgtcatcaaacccgaacaaatcattgatatgcaaaatacgggtgcaagctttgcatgatatttattgctgttaaatacaccctctaattacaggaagtaattacctttttttttttagttttaacagccgtttgtgttatgtccaggaggctaaaattaacatgtttaggtgaagaacattccatgatttgcctgagttctaaatgatatctcgactgctctttgagcctttgacctctgatgatcttatgttaacattttaaattctgctgaaattaacggtggaagtgtagtttgaagctcttttaattattcatttttctgtgaatattaatcacttgttgaatatgtataaaatttcaggccaaagcatcatcaagtggagcttcaactgcttc

SEQ ID NO: 9670 - DNA, 643 bp, Oryza sativa
  Intron number 1 from transcript LOC_Os04g27830.1 (locus LO C_Os04g27830) derived from phytozome v7.0 (chr-ID Chr4; po s 16270316 to 16270958)
gattccctaccaccgtcgtcgccggtggctccgaggtacgttaattacgtacttaattagcgcaaattcaattgctgtaagaaagaaaaatcactcaaatgagaggttaaatttttttttggggaaaatgagaggttaaattaggttccaattgactgaaaatgcagcaaagttttttttaattgttcgagcaaagggatttcttcgggtttttgtgctcttagatgacattggtgagcgcgcccatgcacgacacaatggcatgttcagggagtttccccgcacgcactacgatttctttaggaatctttcgcatctcaaataatctagatttttacatggattctgaagattgaaaacctaacattttgagattcttattggatagttattcgataggataatagttgcttcgcagaatctcaagcaatccaaatgggacctatatatacatacatataacggctcaattttccgttatacaaatacgtttgtgattaaaaaaattagtttaaaccaaaatgggctcgcaagttgtcttttgagaaatttcaaaccctgtttgtcgctaccaaactctaagggctctggtgatctgttgcgcgaatatcatcctaaaattttgccgaatatttgacacaga

SEQ ID NO: 9671 - DNA, 970 bp, Oryza sativa
  Intron number 1 from transcript LOC_Os06g10690.1 (locus LO C_Os06g10690) derived from phytozome v7.0 (chr-ID Chr6; po s 5581715 to 5582684 reverse strand)
tagccgtatgtattttcatgacacaactgtattgtaatagttggataccttaacagcataaataattagaaagaccacaaaacacttaggaagaacgatgcatgggttactactatgataagaatcttatgtatatgaacaacaaatttgagggcatgcatagtgtaccgatagttaagttctctatgatgtcatatggtggttactccattatttaagtttgcatgtcaaatcagttgtagcattctccaggttggtctgatcaataaacttattatgaggctttgatcttatggttatagattcctgtcattagaaatcaccaataaaatagaccctctatctatagtgcttcttgaggaaattttatgtattcatgtaaaaaagagcaatataaattaattaattttgtggacatatacttgatattgccttgagaaaattgatcaggttgttgcatctatgcacttgatgtgatgttcctatttcttctaggtggtggttaagggagccataccaatgaatgcactgcacaaagatacttaatttactaggtggattttcagtctgtttgttagctgtgctatggaagttgtgaaatagtaaattagtaactgcacaaagatacgtgttgttcttgctggatatcattatatccagatttgccttttatgcaaactcacaaaggtctgataacatttcaacaagtgaatatccttttcttaattattcaaatgatttttcggatgaaattcccagaattgagcaacaggtgggccatatcccaaattattactccttttgctggcagataatgggaatttgttacattaagttactattactctctctcctcaatttattgttttgctactgattgttatttcataaaccaggtgcaggcaatactatttgtcgctttataatatatgattttttaggatactaactttatgtgttattcaggagc

SEQ ID NO: 9672 - DNA, 769 bp, Oryza sativa
  Intron number 2 from transcript LOC_Os07g25420.1 (locus LO C_Os07g25420) derived from phytozome v7.0 (chr-ID Chr7; po s 14528041 to 14528809 reverse strand)
cagtggaagagctgaaaattgcgagtaagattaattggatgtttgcttttatattaatttctgcctaaaatgtgctacacttgttacatttgattgattctgtacatggttagttactcttgaacttctcatttgcacacaattatagatcagtgtatttcattgttaaacttacatctgaatatctgatgctgaaatttggtggctgtatttcattagcatgttttccacatgctttttgtggtcaatatctttcctatcttgattcctcttaggaaattgtgtatgcttatgttttatcgactcatgattatgatctagctattcagcaatagacatttgaggaagtattttagccagttaatttttatgtaacattgcagttatccatgacagaacacatctctatctctatctcttatcttctctactatattataaaaattgaagatgtttttgccagtactttggtatgccatttgtgtatgagtcggttttcaagttcgttcacttttggaaatacatatcagtatttgagtcgtttattaagttcgtttgcttttggaaatacagaggagtcgtataagatatctctttaaaagaactcgcatgctaacttgaggtgatcggactctaattgcaactcatgattttaagcgaattcccacagtgaatttcactttaattaaactgtataacaataataagattaaaatagccttcacctgtctagtactaagataaatgtgtaatctttcaggggacatct

SEQ ID NO: 9673 - DNA, 633 bp, Oryza sativa
  Intron number 1 from transcript LOC_Os06g08060.1 (locus LO C_Os06g08060) derived from phytozome v7.0 (chr-ID Chr6; po s 3899776 to 3900408)
tgcggtcggctctgcagaactggggcctcttcctggtgagcttctcatctttcattctaaggctgtgtttagatccaaagtttggatccaaacttcagtcctttttcatcacatcaacctgtcatacatacataacttttcagtcatatcatctctaattttaaccaaaattcaaactttacgctgaactaaacacagcctaaacctatttttttgtcggagtatatgatgattttgaactagtgatgggttaaaaaaaacttgcacttgcaccttagggctcattcggtttagaatattttcataagattattgtaggaatcgaatccttagaaatttttttccctatattcatctttcgttttataggaatggattctaccatattcctaaggattgtagtcttacaagttaattccatggaatttttagcatgaggtgagatctcgagaaaaaattcctaaggaatggagtgcatgtgacatcttattcaaaatcctataaacggaataagctcttattctttttgtgacgagtaattaacagtctcttccatcttaatatactctgtcggctgtttgccgacccggcgaaaaaaagtaattaacagtctgtgtgattaggtttctaacc

SEQ ID NO: 9674 - DNA, 445 bp, Oryza sativa
  Intron number 1 from transcript LOC_Os05g46530.1 (locus LO C_Os05g46530) derived from phytozome v7.0 (chr-ID Chr5; po s 26886085 to 26886529)
tcgcggtgagtgacgacactattgtccatggaagcttattttgatcgctcgagagggtccctcgtatttatatgtcacttaaataattataaaaaaattaaaaaaattaagaagacgtgttaacctgtgatatatcaccccacaaacatacacgttcaaattcaacttctgtatctcgcaacgaaaaaaataaattaaaccaaatatagatgtttaatttgaacttggatatttgtgaagtgatatataacatgttaatacatcttctcgaattttttttaatttttttataactatttgagtgacatgtaaacaatgagggaatgatgttcctcgagggattaaaatccactcccgctccagaaatggtcagaaaattacttactgctcatgtcatggatgaacagtctgtctattgatgttgatgcaggcgggtaacaagaag

SEQ ID NO: 9675 - DNA, 692 bp, Oryza sativa
  Intron number 1 from transcript LOC_Os08g37390.1 (locus LO C_Os08g37390) derived from phytozome v7.0 (chr-ID Chr8; po s 23645739 to 23646430)
gcgtccgcagcgaggccatcggctggatttgggaggtgcattctttgatcgatctggcacaggatgcgccattgcctgaaagaaagaaaaaaaaaggaatgatttttgcgctgttttctttggtctttctgagtaaatgcaatagatctgccatgattagctccgttcatttaggggggaaaaacgtgtcttttttacttcgtttctggatggattcaaaaccattcctgcaacttgttttctcggccagttttcactaatctgcagctagcgttcgtccacgggcgtaaatgcaatgcatattatgcactgaagagttttttttttcactgtgtttcgagtaataaacattgtttgtcgtagtgcgataaatgtgacgatgacaaaagcaaattggggttaaattttgggaccatacatctcggacgaagctggcctttcatccgttcgcttactcacgagatgtcgatgtgcattgtctgattctagtttgtactactacaacgtttgcaatgatggggcggcattttttcggagccaaaaaaaaaaacttctgataaaagcatagaagataattgctgtggagttcttgtcctgaaaaatttgtttcttttaccatgtgatctctaacttattgtgttttttatctttctacaggtttacacttactacaacttcagctctgtcactgc

SEQ ID NO: 9676 - DNA, 580 bp, Oryza sativa
  Intron number 2 from transcript LOC_Os07g02710.1 (locus LO C_Os07g02710) derived from phytozome v7.0 (chr-ID Chr7; po s 977926 to 978505)
aaattctgcaaggttttgcttcttccttcttgttttgcacgccatttttcactcgatttacatttcaggtgctacagtttccgattcaataagtattcttgagttacagcaaaaaaaatatttattggatggcgtccttcgattattagtgtccaatttgttcattaatagtgccacttcgcagatggcaatgaactttgcagtaatattttgttttgcgattgcacttgttgtttcatatgagtatgtttgttaattacacatagattaattatgtaaagcttgtttttttcctatatgagctgttttgtggataaatccaaattatttactgctaagctgttaacctgtgaataattttgcatttgagcctccaaatcttgcttgttctgctgaatcctcacaattatttgtttggtaatactatggaacgtttgcagacttgtcttgtgtgggtatcagtatctttcaactagttagctcgagtttttttttttcataattttattgacccgttagtttactgatgttttatactctttgatgtgactagattttggagtactggcctgcaagggga

SEQ ID NO: 9677 - DNA, 900 bp, Oryza sativa
  Intron number 2 from transcript LOC_Os04g57080.1 (locus LO C_Os04g57080) derived from phytozome v7.0 (chr-ID Chr4; po s 33832958 to 33833857)
tcacctccaccttctctttgcactggctctcacaggtacgtatcgttatagtgaagtagcagatcgttttttcccacacaatttttgcacagagctgtttactgaaaaagtagagttggggtttgttacacaactcatttgcgttattattataggattgctaaaactgtagggccacatttttttttcacttaaattcggttattttttttccttacgtgattgctctctctctctctcgtataatgataaggttagctaagttttctcattcggagatggattttcatccctcgagaagacatctctcgtttcttacgtgtcacctattaaatcatctttttttaaaaaaaaaacaagatacaaggtcaaatttatttttttccaagttataataaaagaaccaattaaactgaaactagttaacatacatttaccgttatatttttttacgacttgtagagattgaatttaaacttgcatacttatggagtgatatatttcacatgtatctatcttatcatttttttaaaaaaaaatctaataactatttaggtgatatatgggaaacgagaaatgtcctcacaaggataaaaatattttcccgtctcattctactttatattactacaatagatggatgaaagagttttatcattatattttattgaccttgcaagagatctagtcttcggcccaagattaattttctcttgcaatttgattcaaacctgtcattcaacttggaatcgattgcacgttctaccatgcacgaagtataccgtattgaagaataagtttaggagaaattttataatcctgaagaaagcatctcaagaaaacctaaactttaataataacacaggtcccggaaggtgttgctgacaagcggtcagcggc

SEQ ID NO: 9678 - DNA, 469 bp, Oryza sativa
  Intron number 1 from transcript LOC_Os03g07110.1 (locus LO C_Os03g07110) derived from phytozome v7.0 (chr-ID Chr3; po s 3633782 to 3634250 reverse strand)
gacatcagcagcggcggcgcttcgtctcccaggtaacaaatctctcatttctatacacacgcagctagagctagttcccatctgattgctttggtcaagtagcttggcacttggcagagtagccgtgttgtcttgtcattgattcttgagtaaaatttccttacatgacgaatcgataacaagaaatttgaaaaaaaaatctagcaacaaattatgccatcagattttagatctctttgatgtctgcagctctgcaatttgggttctagttatacctaattatccattccatgtttgttcaaaaacgattaaaagaacatgtgttgtgtatttttaaccactccaaatatatcataagctacctcccttttctttctccttttcttttccctcggagcattcaatcacctcagaccgtgcattgttatttatagggtgaagacagcaacaaacccatccccgtgttcat

SEQ ID NO: 9679 - DNA, 964 bp, Oryza sativa
  Intron number 3 from transcript LOC_Os04g31010.1 (locus LO C_Os04g31010) derived from phytozome v7.0 (chr-ID Chr4; po s 18364040 to 18365003 reverse strand)
ggctcaagggttggaaaggcctctcttggggagtgagtgtaaatttggataaaatgatgatttatttgctgatgaaatttgtgttggataatgttaatttccgtactccctccgtccccccaataaaagggattttgatattttgcttgcactgtttgaccactcgtcttattcaaaaaatttgtgcaaatataaaaaacgaaaagttgcgcttaaggtactttggataataaagtaagtcacaaataaaataaataataattccaaatttttttgaataagacgaatggtcaaacagtataagtaaaatatcaaaatcccttatattaggggacggagggagtacaacatagtagcttcatgtactcctatgtattacttcctccgtttcataatgtaagattttttagcattgcccacattcatataaatgttaatgaatttaaacacacatatatgcctagattaattaacatccatatgaatatgggcaatgctagaaagtcttacattatgaaacggagggagtagtagtaagattcagagattgggaggagaatgtctcatatttatgagtatgttttcatcagaagaaatcttgtgttgttttcagtgaatctaatctgcaagtacccctctttacttatgtgtgacttctattatctatactgctcctatatagtacgacctccgtcccgatatatagtacgacttctattcatgttttatcatctaataacaataaaaatactaatcatatatttttttcaaataagatggacggtcaaacgaaacccacaactgcacttgtattgggacggaggtagtaaagtctttgctgatggtagttgcagttgttcacaagttttcgattgaatttttaacagcttgctttatgattgttgactatccagatttgcattttcttttctttgtataataggttccacttcttggtggagcg

SEQ ID NO: 9680 - DNA, 440 bp, Oryza sativa
  Intron number 1 from transcript LOC_Os04g52630.1 (locus LO C_Os04g52630) derived from phytozome v7.0 (chr-ID Chr4; po s 31130650 to 31131089 reverse strand)
gcaggcaccgaccacgaggactgatcccactgaaggtaatcgatcacgtctgttttgatcctgaataaaaagaaaatgttatctcttaatctctttattattatttttttggaactctgagataactgataaattgccttgaaattcgttcaaacaatctgttcatttggtattcacgaaaataattctgtttgtttggttttctttttgtttgttgttgttcattgtcttcatgtcttgacacctggtacttcatctatcgtccatatctgctttgctgtgattgattcttggccgtccgatcggcacgtgctgtgtcatcggacggtccaggagtacccagtcgtggcttattaacggttgggaacttgggatgtgaacccgtttctgatgtggattttgcagcggcggcgctgaacgcggtgttcgccaagctcggg

SEQ ID NO: 9681 - DNA, 944 bp, Oryza sativa
  Intron number 4 from transcript LOC_Os03g56740.1 (locus LO C_Os03g56740) derived from phytozome v7.0 (chr-ID Chr3; po s 32326027 to 32326970 reverse strand)
gggggcacaagaaggttagaaacgtcatgctggtggcgttggaaatataatgatttgaattggagcggatgcttttttttacagctcttttattgcttacattccaaaaatattttagtacacactgtctgcattggatgaaaatttgatagcttaactacaacgctgtgctatcttaacatttattaggtgttttactcaggtaggttctacagagacctagaaatctgagggacattagtgtgtctaagttatcttgaaatgtttcacgaaaatttttagtgttcaccccaagacatcattagtgtatgcctatgcttaatgaatgtcgttatccgcttgaatgaccaatgtttcttatgtttccttgtaaatcaaatgttatatcattgtctcttgtcatttcatgcagattttcacaccacttagcccaaccctgtttcatgtaatggcttcttgcttaataggccttccaagtaaagatggcataggctgagttgcaggatggaaatttatcaggagtcagctccactttcagtgaatccatccttctcctggaggaagagaagatacatgatgcagtgtatgttctttttattcgtgttctgacattgcatgaagtaacgcttcttatattttatttggaaattggaacgatctctatttttttccttctctcagtgagttcagttttctgaagaaaaaatgtgttttagtttaaacacaaccatttgtttagtagttaatccattacacgtttctgtgaaattttgatcattcgtaacactgttaaattttactttgtgatttgtaataatttcttctgcttctttttctgcagtggacaagttggtgaaaaaaaaggaattgaacttttgcaagatatactgaaataaagtcagtggttaagtctgataaattatctgctgcattgaagtcccctc

SEQ ID NO: 9682 - DNA, 998 bp, Oryza sativa
  Intron number 1 from transcript LOC_Os08g14180.1 (locus LO C_Os08g14180) derived from phytozome v7.0 (chr-ID Chr8; po s 8464481 to 8465478)
ggtagctccggctgtaagatcatctacatttgcaggtatccgggactttgtgcgtgataaagtttgaggacactggctagcaagtactcctatatactggcttagtttattaacttacacatgacatgaggaagataaccaattgtggagtaaatggtaataaaataaagtgattgaattaataggacaaaaaaaatgatgctacatctttcgcaaaatccttatgtaggccacaatgcaaaaaattcataccgaattcaaatattaagtctaaactcaaatgtgccggatattaaaagctagatattaggcacatgaaaatttgaaaattccaaacacctaaaattatgcattaattgctaatcataaatttgtagtgccatgttaatgtgttcgattttagttcattttaactacaaaaatatattgtagtagtatatagatttactttatttttgcatttcactttgttttttttaccaattgttaattaaattatttcatggtatttgtaaaattactttaagtttaggttataatatatcattgttacacctcttatctatgaaataaggataactttgcaaacagatagatataccacagggaacaatgagaaccgtgccttcctgatgcccttattacaatattgcttgaactgtcataggtaccggttagaaactggtcataggtatcggtttccgtagtcggcacctatgcagttgcgcataggtgtcggttcttaccacctaacaccggtgtgaggaacaaataaagcaaggttgctcgacatcgagcagctactgatccccatccaagaaccattcctataagatcccctcatcacatccaataacacaattacgaaatcaacactaagatacaaaatcaatatcaaagaacaatagagaatacacagagaggagaataaaataaatcatcgcagttgctgcctctcgacaaaccggtgctgctcccgcttgatccccttaaggagg

SEQ ID NO: 9683 - DNA, 591 bp, Oryza sativa
  Intron number 1 from transcript LOC_Os05g40170.1 (locus LO C_Os05g40170) derived from phytozome v7.0 (chr-ID Chr5; po s 23532012 to 23532602 reverse strand)
agaatcagaggggctctgaagattctgacagctaggtgagattcagttttttttcagggatctagtgggtttccctgttcttttctttaatttgatattttggtatattttaatttgattatagtgccatgttctcccccaatcttcttgttgctctgcaattagtctgtgcaagaaaccaatctgaactctcaatccacgagatgtttattgtcgaaaaaaaacctaacttgagttgcaacagtttactcccgtgcacgggtgtactggatgcccactgtcgccgtagccccgtactaaagttcatgtcgagacagcgtcaatctccaatttctcatcaccatttcccatcttcgctagaggtcaatgagtcctttttcccggcatgtccttgcgtagcaatgttcatcgcagcttttgttttgggggattggtaaatgattatgaagcagtcaattccactgcaattggtcaatgtcttaatgaggagtcgtaattagcagttatattcagttagcgagctgaagttgattgacttgaccttggcataaagaatgcattgatttgggggggtttcaggtttgaatcaag

SEQ ID NO: 9684 - DNA, 726 bp, Oryza sativa
  Intron number 1 from transcript LOC_Os03g62830.1 (locus LO C_Os03g62830) derived from phytozome v7.0 (chr-ID Chr3; po s 35538879 to 35539604 reverse strand)
caacccacagcccacgaagaagggcgccaaaggtatggtttcttttcttttttctcaatcctcttttaatctgggatttatctaatctatatacacggcatctggttttggttctggattaaggcaatctgggatttattatctaatctatatacacgtcggtgtttgagatgaagtttgtgtctagttctaatctagattcgtgggggtttgaattttgtgtgtagttccaatctatattcgtttgggggtttgtaggtacgagatttgttgatacaataattaaaggtgctcacttttgagggtttattattgattgcctgggtagattgggtttattgatcgactgagtaaattgtccgctttgattcatctggtgttctggatcgatagtctacaatttgaactgataatttaatatttaatatgcatgtttcctgctcctgaactggcttaaatacactatcgcttgcctctcattggttatgtacaatgttgtattgatttccacgagcattttatacatagtaactccgttgattcaattgcccttctggttatgattatttattatacatcaccaattgattgactaattagcttttgatcatattatgattaatcaaatgccctgctgcctgcagttttgtgtccaacacgatttggatctgacattgcattgttcttgtttgttttcagtgaaggggaagaataacggccaagaga

SEQ ID NO: 9685 - DNA, 833 bp, Oryza sativa
  Intron number 1 from transcript LOC_Os06g33800.1 (locus LO C_Os06g33800) derived from phytozome v7.0 (chr-ID Chr6; po s 19660235 to 19661067)
gaagggaataggaagtcggaataggtaagtcgcatccataagattaggggatgaaactttgaatccggtgattacgtagactaattctgttaaaaaaatagtgcaaatatataaataatggaagcgactacatcgagatgggtagtgcgatagcgctatccagcgacggggggttttcctccctccccgcgcgcgtcctggcaaaaaaaaaaaaaaaaagaaacgcccacgccctagcccaaaaaaggaaaacacgcacgaagagaaggagcgggagaaggaaaaattagcaaacaaatcgacggagaggaaacaaacagaaagagcatatccaaaaaaataaagaaaaaactatattaactaaagttacttcctctcaacaccaagttactttttaaaacatatgaaagttacttccttatagcatacaagttatttctaagaatcgttaaactaaaaagagtgtttctatcgttaccgttgcctccttaataatgaaatgcaaaaagactcatgagtgatctaatcaataaaacacacaagtcaagaaacattaaagttacttctcagtaataataaagttacttcctacgaagatgcaacatttattgagcctaggaaaagccaagagctagggaggtcgagacacagaacatttatcatcccgcacatcagatcaaagccaaagagaaaaaaaagttacttctaacaaacactaaagttacttctcataaacaagtatgttacttttatgacatataaaagttacttcatataaacattcaatatttatcaaagccaggagaagccaagagctaaggagatcaagacag

SEQ ID NO: 9686 - DNA, 453 bp, Oryza sativa
  Intron number 1 from transcript LOC_Os07g38120.1 (locus LO C_Os07g38120) derived from phytozome v7.0 (chr-ID Chr7; po s 22860294 to 22860746 reverse strand)
cgctggtcacccgcaccatcgtcgaggtcgtgcaggtgagattggtagcttcggtgatttctctattccttcgttgctttctactgtattttctgaaatgatcctgtttgatttcttgtcgtcgttatcgatgaggtagtctcacagtataatgaaaagaaatcgagttcactggtggagatttatggtagaattgttactagatgacaacaactgaaaagttcatgtttttatctgcttttgtttctccaataatgtgggaatcgttttcttttgctacatgccagatgattctgttgtctatttgtctgattaattagactctgatcagtttcggttttagttagttatccatgcctgcctctttgaattggtaactagattgttgcaacttcttttttcttccatagtgtgatgaataacgtgtatttttgtctgtctgtaaaacatcag

SEQ ID NO: 9687 - DNA, 821 bp, Oryza sativa
  Intron number 1 from transcript LOC_Os05g51000.2 (locus LO C_Os05g51000) derived from phytozome v7.0 (chr-ID Chr5; po s 29211214 to 29212034 reverse strand)
cggaggggacgtgcgcgactgactggtgactggtggtgggtgagaacatcgcttggtcacttcctcagatccattcgggtaaaccaaacccatttttcgcgatattttaatggctacgagcagcggaggggcgtggggatttgattgcggggtaggattctactcataatgatctagtaccactgccgattccgattgaaggaattggtgaattgattgaccatgattgtagcaggtgcgactttcactagtttaacttgtgtaaattgtgtggtcctttgatatgatcgattgttgttgctccatcctccagccatcatggatgttgtggtgatgtttcaccaattgacctaaataggatcctaaatcgccctgtgccttgttcaatcgaaagtcaatttactcaaagttgagtattatcaagggttaatacggcaacacaacttcctccattttctgtatataactaagaataactcctatgcatttagctttagcatttggatttccaaagtaaaatgtatctgtcatgtgtgtagccgacccatccactaaggttgtatggttcccctcttagaaaaggtgcttcaaatcttatgttgcataattgtattggcaaaacaagtcttttttaatataagggattttggctatagaattgcttgcatagccaaaatcccttatattatgggacggaggtagtattttgctaagtcagtatgggaactgcagcattagcacttaatacattgttgtactgcctatataggtcaagccagtatctttgtacaattggctgaagaaactggttttatcttagg

SEQ ID NO: 9688 - DNA, 781 bp, Oryza sativa
  Intron number 2 from transcript LOC_Os03g16150.2 (locus LO C_Os03g16150) derived from phytozome v7.0 (chr-ID Chr3; po s 8909571 to 8910351 reverse strand)
atcctgcatcaggtcagcacaaatactccaatctttttatctcacaatacagtcttttcagttcgtcaggcatgacaatagagtagttatggagaacttatttggggaaatggtaatgcaagatgaaaaatgtcagtttgttccattacccgagttggggataagatgtagacagttgatgttattggcctcacactctagtcatgtctcttatgatggatcgatccatatgagttgattcctcacaacagtagcatctatttgcatcactgaatttgttcattctagtcataaatagttgtgacaaattgatattacatccgtcccaaaataagtgcagtcgtagggaaccgtgtccgacgtttgaccgttcgtcttatttgaaaaatttataaaaaaattgaaaaaaaatagtcacacataaagtattattcatgttttatcatctaataacaataaaaatattaatcttaaaatttttttaaataagatgaatggtcaaaagttgaacatgaacagtgcaaaactgcacttattttaggacggagggagtagtaaacaattagtactccattttcctatcgaagtgaactaatattcgaccttttccatgtcccaatcaaagatctgattcagactggtatttagtcgttcttttcagaagaaaaaggacttgttgctacttgcactgatacatcatttctcgatgcatctttggactgattttacaatgcactgctcaccagatcgaagctctgaaagaagttggagttacagaagt

SEQ ID NO: 9689 - DNA, 344 bp, Oryza sativa
  Intron number 1 from transcript LOC_Os08g26870.2 (locus LO C_Os08g26870) derived from phytozome v7.0 (chr-ID Chr8; po s 16341877 to 16342220 reverse strand)
acctgactccgccctcgattggaatcgaatccaaggtatcccatcccatcccatccatttcttctctccctttccccgaccacccgaccatcccgtgagcgtcgatcgggaatccgcccggattttgatcggtttctttctttctttctatctttcttatccacttatccagtctctagtgctcgtgtgtttatttgattccggtgaaggatgagaggatgtaggagtgattatgcgttgggatattgcaatttagactcggtcacatccacggtttggaagaagacaaggtgattaagaatccgttatttatttgttttcttgttgaccatgtggctagattg

SEQ ID NO: 9690 - DNA, 724 bp, Oryza sativa
  Intron number 3 from transcript LOC_Os05g31780.2 (locus LO C_Os05g31780) derived from phytozome v7.0 (chr-ID Chr5; po s 18450871 to 18451594 reverse strand)
cccccgttgttggctatcgaggtatgagttttatcctcttagcttctcctttttacttgcttgggagctctgtgatggtagtaaaatcagcagtacagcataattcagttgctgaagatagctagtttgaactagggtagagttgcagagatcacttgttatttgttgctgagcatagtgaatgctttgatactactcacactttcagcaagaataattgtgaaatcaatactagtcatactggtgggttttgcctagaatcggtatttctagaactttgataatatctattaagatcctggaatctatataattatatattatcaaatatgctttgcatttggatgtcagcttgaacaatgttctccattctggtatgcgtaaaacatgtaattttcagaatttttctttggaatcatgttttgcatattatcaaagtttgttgtcatgcttgaaagcttcttgaaggtatgaaatgatgtgttcaacaactttggaactttagaagcattatcagtaaaaacaggcaactaactacaaaattgttgtcactatcataattgtcctaccaatctaccatgaaacatgcacattgcagtaatttgctaaagtaatttatgatgaaatgccaagaaccatggctgactacaggttttgacttttgctcttttttatggttctgtgaatatgatttgcgacttccagtttctctcacgggttgctg

SEQ ID NO: 9691 - DNA, 552 bp, Oryza sativa
  Intron number 4 from transcript LOC_Os07g48430.2 (locus LO C_Os07g48430) derived from phytozome v7.0 (chr-ID Chr7; po s 28963347 to 28963898)
ggtacaaaactggcctgatttattcatatggttcagaacattactttgtgctcctgattattagaaatgcctcacatttgtcagattgacaatataagttctttttgtttagaaaaaactattttgttcagcaacaaatctgccaattctcttagagctgacatctgccagcttcaaagatataagttttaaaggacatgataaaaaaagagaaattttcgctttcatgagtgaattaggcaaaataactattttcatttttgaaaaacaaaatttgggcaccagaaacaaatgacgaaacaaaatccaaatgacgaaagctaaacattgaaagtaagggcaccagaaacaacattttccctgaaaatagatgcagatcatctgaatccatgtggtgcactgttctgacagttaattcaccttttgagtgtttaggatctgttcacaactagtgattctatgtctagcttttagtccattaactgataacaagtgttgctcttctctatccttataggttaccatcaattatctgctggggaaattgggaaa

SEQ ID NO: 9692 - DNA, 455 bp, Oryza sativa
  Intron number 2 from transcript LOC_Os02g57270.1 (locus LO C_Os02g57270) derived from phytozome v7.0 (chr-ID Chr2; po s 35083867 to 35084321 reverse strand)
ggcggcgaggccctcctcttcgtcggcgtcgacgggtaatgcggattcttccctctcgtcagttacgcgagatgctcgattgcatttcgggatggggtttatgctctaggtgtgaaccgaataattgccgagccgaaacatgtttgattcggtttgtgtatacacagatctagccagacaacatcatctcagatgtcggggtggggtgtagagcacaccatcaaccccaatttgtcctttttaagagcaaagatatactactacaagtagactgtggtttcagcgaatgtcatcttgccagatattatcggttttgatggggctcaccaatgatgaattctttccatttcagaagcatagaattcagcattttcttttagttgtgagctgtattaggatgtctttcggtattggatcaatgttcgctaaatcttgcttattcgacgcagaaaaat

SEQ ID NO: 9693 - DNA, 669 bp, Oryza sativa
  Intron number 1 from transcript LOC_Os07g05510.1 (locus LO C_Os07g05510) derived from phytozome v7.0 (chr-ID Chr7; po s 2568825 to 2569493 reverse strand)
tcccgccgtttcgctcttcatccaccgcccctcaggttcgcttcgttcccctcgctattaacctaatcaatcccttctttctgatgatgtgcgatgataattggcccgttcaatcaccaccttctcttgtatctcgcggtttgcacgcacatgttctagcgattcacctctccgattagattagtgttattacccctaatgaacctttggacccttaatttcgttcattcaaattatcctatagtaccttgtgtgttttgttgtctctgtgttggttgacctaatttaactcaaaatcttttatttcccctgagatgaacaaaccccgatctctgttttttttccccttcgagatgaacagatcgagctgttttttatcagtattatctaccaataacaagtactagcatttactgtcctcatatgatactcgccgcgctgggcttattttcttcagctctattatgatcaaaccagtgactctaacttatgttagatgcaaacctcagttatttacctgtacctgtatatagtctcttccatctgagtttattaattattcgtagtaattggtttgtgtttgacattgcaccaccatctgactctctctgtctctcttgccttatatatataggctaagggtaagcttagcagcactgctactgccca

SEQ ID NO: 9694 - DNA, 197 bp, Oryza sativa
  Intron number 3 from transcript LOC_Os07g33420.1 (locus LO C_Os07g33420) derived from phytozome v7.0 (chr-ID Chr7; po s 19977781 to 19977977 reverse strand)
ttgacctgaattgggttggtcataagactatcaaggtattaacattgtgttttttttccttttttggcttaatcttctttgaattctacatccttatgtatattaaaactactttcatgttatgtatatatatgtatatgtgtggcacttttgtgattataggtcgcaccgttggcgaagaggctcacctttaatat

SEQ ID NO: 9695 - DNA, 655 bp, Oryza sativa
  Intron number 1 from transcript LOC_Os07g12730.1 (locus LO C_Os07g12730) derived from phytozome v7.0 (chr-ID Chr7; po s 7272742 to 7273396 reverse strand)
caagagaaggtaattaattaagtatttctttctttttttcttttgatttgtctagacctagtagacttgatcggggattcaggaggggaatccaagaaatcaagtactcgagggaatccaagaaatccaaggagtagtattttcaagtacaccaacagctagagagaggatttcgtcttgatctgatttcgtgttttttttaatatgttaatcacatggtcaacgcgtttcatggagattgattggatgagaaggtttttatattccttgaattttttcttcttccttttgagaatgatacaaaggtggtcaaattcgctgagaagagagagctcgtggaaattaggatcgaattaattagaatttcgtgtcttcgtaaaggcgcctggattatggatcgtttggcaatcgatgccgtcttggtgaactgaatctttctttctgcctaattaatcactgtcacaatttcaattggaacgttgactattttcgtgattcttgtgatcttgacctgttctttagatgttgaaatccacacaaggcattcaattcttgcacatttttagtattttacaaaagcaaacatttcagcaagttgagaatgatccccaattgaatatccacctaagaacagcaaaattttcagatacttagc

SEQ ID NO: 9696 - DNA, 601 bp, Oryza sativa
  Intron number 1 from transcript LOC_Os05g25540.1 (locus LO C_Os05g25540) derived from phytozome v7.0 (chr-ID Chr5; po s 14783502 to 14784102)
cttgtcttcggcagttccggcgcctccgcctgttggtacgtacgttgctggtgctgaaagctgaaattcagaattttggtgtgtgtgtgtgttcttactgttttgtcggtttcgagtttggaactgtttctctttacagagtttgtcctctctgcagatttggttaagcatgcactgttcttcttgatggcaaaaagaaatatatttttttggggggatcgacattgtgttgcctgcattcgaaccaacaactctgctttatttctagctgaacaaaaagaaaatcttctttgttttgagttctcaaaatctgcattttgggatgttacgttttgttcaaatttgagggggaaaaacgtggcatcaacgttattgcggaaatctcgctgcgtgttttaatgcaatcgtacctgttctttcgttagagtttactgtcatcaaatctttccaggattcaaggccgtttcaaagattaaaccaaaaaaaaaaaaagatggcgcatctgttcatgtccaattaatttactcctacttagtgggtctcaagctacctgtgctggcttgcagtgatcgtagtgcaccaccatttccaccgcgagctg

SEQ ID NO: 9697 - DNA, 488 bp, Oryza sativa
  Intron number 1 from transcript LOC_Os08g05440.1 (locus LO C_Os08g05440) derived from phytozome v7.0 (chr-ID Chr8; po s 2878371 to 2878858)
gcaggtatggaaaatatttactctctccgtcccaaagaaaattcaatttctaggtttccgtgtccaacatttgattgtccgtcttatatgaaatttttctatgattagcatttttattgttgttagatgataaaacataaataatactttatgcgtgcgtgatttatctttttattttttttataattttttcaaataagacggatggtcaaacgatgaacacagaaacccaaaaattgagttattttaggacgaagggagtaatatggaagaaatcttaataatatgttgtattatattgcattatattgatctgtcatgaggtacatacatagaatgatgagaactttgactatagtacgagttacagctgatttatctcaagaattctatttcttgtagtcttacattcgtcatctcttgatgttgtctcttgactctcatctattacagatacccagttgataacatagttatccctgcacgtc

SEQ ID NO: 9698 - DNA, 926 bp, Oryza sativa
  Intron number 1 from transcript LOC_Os03g12110.1 (locus LO C_Os03g12110) derived from phytozome v7.0 (chr-ID Chr3; po s 6354126 to 6355051)
cctgcctcatcaccaagccgcacctcatcaaggaggtaactaatcttcttttcttctctccccgtagttcaccgaccgggccgtcgcgcgtgtgcctgcatgcgtagtgctcgtcagctcatgccacgcttgcgccacatgctgcatgatgcatcttgctgtctcgtcgttgtcatggcgccatggattgctcacgttgttgcaccgccgcgatggaatgtgtatgtgccagctgagctgcgtctctgtttgttgttcggttgaccatgtgaaaagctatatattagctgttgccgtgttggtgttgcgttagagatcgatgcgattattccacaggtgtatgtgtgttcttcgtccctttggtcttggaatacaacgttcggttggtaactgtgttatcagtcaactctcgtttccttttcctccacaaaaaaaaaaagtaaacaaatcttaagatgtgatacaaactgtaagtcttgctgtcttggtcttgacctggacaagaacactgtaccttttccctttctcacctatggacctactaccgaccaaccaagttttttttcagatgtgtctagattgctttttggaaaaaaaaaagaaacaataaaagattacctactctgttgagtgcgagaggaaaaggtaggtaagcacctctgaattctctgaatgtcgaacattctcagagcattcagtttcatccatccttttccctgaagtaatgccatcgtttgactcaatttaatccattgtcaggatgactattctagtgtgtactgtgtacacttgaattgtgtttgttgcaccaacttctgataggcaggaccattcaattgtgtcaaatttacttcggacgtgaatatcacgattcttttcgaaagatcaaatgtcacaattgtttcaacttctttatgcaggttcac

SEQ ID NO: 9699 - DNA, 753 bp, Oryza sativa
  Intron number 1 from transcript LOC_Os05g30670.1 (locus LO C_Os05g30670) derived from phytozome v7.0 (chr-ID Chr5; po s 17701486 to 17702238 reverse strand)
ctaaggacggtggcggagctccgtaaggcgccgatgacggagaccctaaatggagtagggtctcctatcttaactcaaataaggcaaaagattataatttcactgcaatcaccaaggccttaaatatggcttggggcccatatgtggaaaaggctggtaggcataaggagggcaaggacaaactttatcatgacaccaagttcgcatgcacacaacagatcggagaccagtgtggtttccacgtgtgccacaacatgtcaacacttctaagaggtgaaagatttcgactctgagattgttgctaatggcaaataagctcatttcaataccaacattaatcttctaaacatgctaacctttgatttattgaacataaaggtagagttggcttgaagatttcacccatcaaccccccccccccggcgctatcaaaggcgaagtgtgcgccttcattcttgccgaaataatgaacaagaaaggacgttttcatgccagttagatgattgaacggggtagatgttaagtcatgaacaatacaattatctaatttcttgtgatgtaaaaaaagttgtttctatgattctgtggtatggaatgcaatgtaatttacttttatatgtgcaatatttatggtagtttgctaaattgtcatcaaatttgatcaactacgatttacgttgtactattcaattgttttctccattttttacaatagcaggtcgtggaggttcacaaggaacaggatacaagaaa

SEQ ID NO: 9700 - DNA, 904 bp, Oryza sativa
  Intron number 1 from transcript LOC_Os07g04940.1 (locus LO C_Os07g04940) derived from phytozome v7.0 (chr-ID Chr7; po s 2179230 to 2180133 reverse strand)
gaggaagaaagtaaaaccatgatctgaacaagaaatcagaaatgagaattttcacactggcctgtatgaattttacgagaatttgtttacagcgataagttcaattcccatactgttcaggaaaatctgtcacactcactgcaatggtttaatttgtcgcaccttttctcgatctagtgtcaatcatacaacaacaacaataataataagctaaccggtagctatagccaaattccatatcacctataggcagtatagcagctagcttgtacaatagtcattattcaccctaaccaagcccactactatcttatcttctaaaatctagacaataaaaacccacaaaatattatatctctcctcttttttcaaactacaaccaactacaaatctaaagtcctctacagtatatattcccctttttcttttctcaccgctctatataagattgtgcttgcgtgtattcctccctatagcctatcggagtatcggaccatctttaccgtgccaagtcatatttattgcacttgcttttagaacatccacattcaatttaccatacaatgacaatgatccaagttaccaacagacatatgcaacaaaatacaaccattctgaaatatgaacacaagtaaaattaaccaaccaaaatgaaacttttataaacaaatgccacatacaagtacttatagccaagcatactccatatacaaacacggctagaacaaaaattccaaaaaaaaaaaaactcgcatgcaacatacatttactcacagaaaacaaatcaagcagaggaaatatataaccaaaagcttgatatcaaatcaaatgacccaataaatgtgtaagcatcgacagcgtccttatgccgaaggaggaggtgccaagaacggcattggcacgg

SEQ ID NO: 9701 - DNA, 675 bp, Oryza sativa
  Intron number 3 from transcript LOC_Os06g24870.1 (locus LO C_Os06g24870) derived from phytozome v7.0 (chr-ID Chr6; po s 14585163 to 14585837)
acacaccggtggatcctgttgctctaggaatacctgtgagtatttttatttggtatcgctaggtgtaatggttttcttcctttgaaatgataaccttttggtatctttataaattttgatcttgaaaacttgcttctcgtaaattttggtgtagtattcattgcttccaacgaacaggttcatatagatatatgttaatgtccgctagatatgtaatcattactgttgttccgggtagggaaagaaccgattccatggaggggttaactctataatcagtggcttgccttccttatctgatatctctaattgttgtttgaatagtacattccatttctccattctgtagctaaattttacaactcataggctataccttgccagatgggtcatcttgcttgcaagatgagttctgcactccagttcattttgttgtttcatgaacatagttgagagagtaggaaacaatcatcacaaataaaatttgtttgcaagttctgtagatttttgtaaaagcatgtctcatgtttgttctattaccatagtaaatttatatgctcttaaatctactggtactggatttttttttcactttattagtgttccaacttttgtttatttgccattgacagttagcaaaatttgcaggattattttgatattattgatactcct

SEQ ID NO: 9702 - DNA, 672 bp, Oryza sativa
  Intron number 3 from transcript LOC_Os05g30350.1 (locus LO C_Os05g30350) derived from phytozome v7.0 (chr-ID Chr5; po s 17535568 to 17536239)
ggcgccggcggctaccacaaatacaaggtacgaacagttttttttttaggtctttttggatggtcgtaattgttcactataacatatggttggacgatattgtaatgccacgtgttcatttgttcgttcctttgggatttcgttgaattctggcgcctatttaattacctgtccttttccagtttctaagctagcggttttgatcgatgaatcggaaacaacgtgccttttttttctcatcggtcttttttttaaaaaaatataatggctcatatatacgtgattctccttttcttttctagtgcagagtttaatttccagctagttaagtgttgaaattattgttcttgttatcaaagaaaaaagtataatttaattaagtgtagttcaattaatacttctggcaaatgggaatatcaacctaaaaccctaattaggaattaagctaggtggtagtttgaatccaatttcaagttggattagaatgataattaaaaaggtcatgaggatgggaaaagaaaaatcaaatattttaatttctttttttctgcaattttctcagcagatatttcattgttccaacgttccttgaattgtttcttgaatttgtggccggaaaatgatgccaagttaattggaagtatctgcatttttcaggaggacgtcaagtta

SEQ ID NO: 9703 - DNA, 534 bp, Oryza sativa
  Intron number 2 from transcript LOC_Os04g02000.2 (locus LO C_Os04g02000) derived from phytozome v7.0 (chr-ID Chr4; po s 619154 to 619687 reverse strand)
aaaaccacagtaccagatacttcttccagtaagacaaatttcttacttccaaaatattttctttacctcatgctcctagccagtgaaataaaaaaaaattatcttctgatgggttaaaaactgtattctctatttcaaaagggcacttcaactttgcctctttaataaggcaagtgattcttagtggtaaatgcaaattcggaagtcagaactattttcagatgtttcatctgtggtaatgcggggtgatgtttctttgtgatgtcatatctccatgattaacaatttaacataagttgataataaccatgacccattccagtttgctatttttttcatattgctactgtaatgaatcttatattgtagtttcgacatttattccctgttcttgtcacacttgtgcttcatgatctgtcataaattaaagttctcttgttacattaattggtgccagcaaataatcaaattgtgagtcttcaatctcttcttatttcagcattaggaactaagcggttggcgtcagaggaactt

SEQ ID NO: 9704 - DNA, 563 bp, Oryza sativa
  Intron number 1 from transcript LOC_Os04g02000.2 (locus LO C_Os04g02000) derived from phytozome v7.0 (chr-ID Chr4; po s 619704 to 620266 reverse strand)
gctgtggatttcataactactcatctcgcacacaggtaattatatatatactctgctttaagtgatttcttgattcacacccataatcattatttgtgtagttttgacctgccttctgaaccgtaatgcgtcgttgtccacatttgtttttcatgtcaaacatgttgatgtgacctgctttctgaataaaatatttcctagaccatgcatacagctatttggtgctaacttaattttggtcctgacatttgattaatatatgatatcacctgttctcaggtcaacattagcgttttatgtaagatgtaataccttgttgcttttctcaccttctaaggttctacacttgtgtttcctttttattagtcctaaaaatgtgatcgactagcttgctattaccagaaacatatcccatgctctttattcgtgatataatgtgaactcatgttctagattctcaacagtgtatattttatctatcaagtgcatagagtgactggatatcttcttttttattctccttttcagtgtaaacagtgtagtgctcctgtaccatcaggcat

SEQ ID NO: 9705 - DNA, 410 bp, Oryza sativa
  Intron number 1 from transcript LOC_Os05g09440.1 (locus LO C_Os05g09440) derived from phytozome v7.0 (chr-ID Chr5; po s 5296764 to 5297173 reverse strand)
gtccttctccgtcgccaggttagagacatcatctccttcgagttcgtcttcttcttcgaattcggcatccatcaatcccttgttctatctcaagcctctgctttttatttccttccgtttttgttcccaactttctctacacccaccataaagtttccgtttgttttactccgccggtttcctgactcgcttcagttacaagcttgtccggcctaaaaaaaaactgattcgtgtcgttcattgcatcaaatccatgaaaatctacattaatttgagaattgagtctttccgaatcgcaaccgatcgttcggtggccataacaaaaaatttgaatttgaattcgaatttcttgcgctgtgatgtgatgtgatgcagcgggtacacgctgctgagagacccgcggcacaaca

SEQ ID NO: 9706 - DNA, 895 bp, Oryza sativa
  Intron number 1 from transcript LOC_Os05g48320.1 (locus LO C_Os05g48320) derived from phytozome v7.0 (chr-ID Chr5; po s 27637160 to 27638054)
cctgcctcgtactccaactcttcggcgactaggtacgatctcctctccccgtacctacgtcctctccaatccttcgcgtgcactcggatttccccttcgtatcaactcgttgtctcgctgtgctgattgaatcatcctgacccttttcggtttagttgtagctttgttcagcgcaatgggaatatgtcgttccggttagattttaggaggaatttgctgttcctgtttgattttaggaggttttggtttgtgccggtagaatgtcctcgttgggagtcgtgtgagatcttgctgttgacgctttttcgtggccaacacaagatcacctaacgatttcgtggtacaaacacttgcgtgatgcttccgttgtatttcgcccttgtagttcttgatacgaattctatcactgtgagatcccccgctgtattattacctgatgaactggtgttgccgtcttcctgttgttaaagtgacaatttctgccttccaaattattagttggagtgggttgattaataaagtgcatgatcattacctcaaattatgcaccattaaacactttagcttgttaagcttcctttgaggccaactgccatgtgccgatgtttccattggtactgcatgatcagttaatatactgttttggataatacttatagtagagtggggtttcttattagcacaagttctttctgctctactgtggaaatgtcatgtgttttaagtatatacaagttatactttccaagtatttttagtacagagtggggttgtctgcaatcatcaccatacgtaaaagtggactgtaccattaactatgcttgtgctctgtttaagtcttgtttgtgatgtttgtgcagacgaagcgcaccaagaaggcaggaatcgttggcaa

SEQ ID NO: 9707 - DNA, 911 bp, Oryza sativa
  Intron number 1 from transcript LOC_Os05g45220.1 (locus LO C_Os05g45220) derived from phytozome v7.0 (chr-ID Chr5; po s 26187750 to 26188660 reverse strand)
ccaccgcgggcgggatatcgccggccaggaagcaggtaagcctcttccgcttccctcgctctactgcgtactggctggaagagctttcggtgcttctcctctctgtgcggaagccgcagaggtagggttttaggcttttaggcacggacgacgacctttgggtggtgggggattaactggcagttggggaatttatggtcgaattggaccagttttcagcgattggagctcgtcagagtcttaggtgtgggtttggatcgaaggagctttctgatgttgctgcagaaaatgtttactggagtaatgcagaaattgtcactggagtagtgccttggttctgtgagattatgccggttgaactggccaaagattttacctcgtcgtttgatggttagcagtgcattggatttattttggggtaaaaccctgttcgtgtgagatctgtgataactgataaccaagtgcgcctgtacatgttttaatcagatctgttcgtgatggcacattgtttgtcatggttcctaaatcatacggagtatatattagaggcgtgaactaccacatgctgatgtgggtgggatgattttttactttgtgctgttactgggttttgtgtaaaaccaatagagcagaaccaagggaactaatcttctgaataataagcagcgttttagaattttagattaagtaattttgcaaggtgttgtataacaagctatttaggaaaatagtctcctgggcttctggcatggttcatttctatgcatacctagttggggataaatgtcagccagatgtatgtgtagtccgaatgcctatatgattaattcatactaaattctaatgtttgttcatttttcaattttgatgtttcagttccctgaaaagaagattgtgcaacagtccaggaa

SEQ ID NO: 9708 - DNA, 1000 bp, Oryza sativa
  Intron number 1 from transcript LOC_Os05g50190.1 (locus LO C_Os05g50190) derived from phytozome v7.0 (chr-ID Chr5; po s 28699603 to 28700602 reverse strand)
ccaccgcggcgtctacgacggccacgacgtcgcaggtgcgcccgcccgcgcgcgccatttctcccagtttttttacttgataccaaccaccgcgatatccatgcactcgcttgcgcccgtacggtgttcgacgaaatcgcgctgccaatgcggcgctgacggcgagtggaaccgccggtcactgtcttggcctcttgggtgctccttttctttaccccttttagtaaattgcgggagttgatgccgctgccccttttggcttttcatggtgttccccgtgacatcggttggattgggcggcttttgacgtgccctcgctcatcagcagttcacttggccatggttcttgtgatccctggctaggaatttcatggtaaagttgctttgcggttccaaagaaagccgaaaatgtcgaccttttagtatggagggatgtgcaacctataagtttgtgtactttttcaccagattgagattatccatcgatgcaaactcatgacacggcaacagcacaaaaagaatcccttttgatgattcatctatcggacctgagcatgtctataagcaattggttgatgattagttgttgtacatgcatagtttataggatgttcacattctatttttgagaaacatattccccagggattgttagctatctttcgtccattcccccatatcagcatggattccatcattttgcatttttttttttggaaaagcccatcaatttaattcccctacaaaaagtggatcttcctaagaccgaaattgtctttgtgtgcccttaccaaaagagaagggacaatttgatggtgtaatggtggtaccccctgctcctctcccaaccttggcacctttgcttagatcaattctcaaatcttgtttttatttgacagtttccaatgggaaattgtatgttctcattacaaacacctcttttcaaaataattcattgattcatattattctccagtgaaattacttgactggggagagg

SEQ ID NO: 9709 - DNA, 1033 bp, Oryza sativa
  Intron number 1 from transcript LOC_Os04g32550.1 (locus LO C_Os04g32550) derived from phytozome v7.0 (chr-ID Chr4; po s 19426317 to 19427349)
tcctgcctccgccgcatcctcgcctcgcctcgccggtgaggaacccgtcgccgcacatccctctctctctctgtctctctctctctcgtctctctacctgcccggacctgtggaagattttttttcttttctctttggcgttaaacccctcctagatctggagcacttgagagttcctgctgtttcttggatccgtggaggccactactcctcctctcccgccttagcttttgtctcgtggatctgggatgggatgggggtggcttcttcacagccgagatccgtgtgccggatacgacggtgatcgaccgggacggtcagattgcatggttcttgggttcagtttctgtaaccaaatttgcgtggttctcgaaccaaagcttgtcgcggggggattcgcttcccgttcccacagagcgccaatcaaaaccgacgggatttattttaagcttttcccgattccggcttcgcccccgagttgtctcttgctcgcgtggtgttgtactacctccgcatagatgttaatgaatctaggcacacatatatgtctagattcattaacatatatatgaatgtgggtaatgttagaaagtcttataatatgaaacggaagaagtactaaatagcagtctgtttccaagacaatttgtgagtaaatttgcatttcaagtttttgcgccagtgtccggcagatcaggagctgtgtaaatttgcatcctcgcggctcttcaatccggtagctgccagcatttttcatgcgcctatacttgctgtaattctgaatgctagaggagcctcacttgttattgttatagtgttgaattctgaatgctagggcctcattatgtttttattgtagtgctgaaaaaggatctgattttgatacctagctactgaagatgtagtaaactttactggttacatgaagcacagattcagattaatcataagtaaagcaccagacctgttttaagagaatcgttggtaatcgtatttttgaactgctccatgtagaacacacaagattttgagg

SEQ ID NO: 9710 - DNA, 879 bp, Oryza sativa
  Intron number 1 from transcript LOC_Os06g08480.1 (locus LO C_Os06g08480) derived from phytozome v7.0 (chr-ID Chr6; po s 4181561 to 4182439 reverse strand)
acggccccaccgagcggatcgagcgggaggacgcggtatggcggccgatcaggggggccctgattctcttctcttctgtttttggtctcagttgctctgatttctaaagctgttactgctgaattggctctgatttctgtggtttttgtggaattggctgctgccatgctaggattttagcttctggttttggggaatttgatggctgccttgctagggtagtcggttgtgaaatggcttaattgctgagaagcgggaggattagtttagggatttggcggtgataggttaagcttggctggctggtgtttgagaaagccagtgggtgatttggttgaatgagtttgttgcttggtaccgatggggtactgaaatttgaatttaggcctgatctgtctgctacgttaagcagctactaattcgggattatgaaaaaatacagtctctagtgtgcatcctgagaaatatacgatgccttagtataccaagtttaattgttggatgataagaggtgatgacggtgtttctaactgtccttgtcgtgatagctaaacttacattattttgttggttcaaagattttatcataaactagaagagttggcaatttgctgagatttgtaagaaaattaattcaatctgtttttaaacaaaagggagcatgccaatatcatcattctcatttccatttttcctcgtttggtgattttgtacttggctttttatttctcatatgtgtagtggagcttcagtttttcggggcttggtttcttaacttcctgtaattttcatatgcttatgtatttcttgatatatctattttcagtttaatggtcctgtatttatttgtagttattcacctgtgtgtgcagaaagaag

SEQ ID NO: 9711 - DNA, 850 bp, Oryza sativa
  Intron number 2 from transcript LOC_Os03g37960.1 (locus LO C_Os03g37960) derived from phytozome v7.0 (chr-ID Chr3; po s 21081785 to 21082634 reverse strand)
tgaatacttgtatgtataccgaatatttggtattgagtattcagttgttacttctgttttttcaggcatgttctggatgtggagcacaattattgagttactagcgtactgtgtttgatttcattcagagacgtaaagtttacatggcatggattatgatccctaacacaagatctcatagatcgctaagatttttttttatcactccccaaaaaatctgtctgatttgaaacaataccgttctttcatagaatctttcacatcaaatttatggtgtattgggttcttccccatatttttataataatttgtgactgcaacaattgatattgacccgcactctacaacaattgatatggagtagaaatttgctgcatctagcttttcatagctttccatgttcagtcttctactgtgactatgtcctttcacaacatgtttgtgaaatcttatagtttttatctatatttttggttttgtgctgaaaagtagaagctactacatggtacatgtgctttgactatctatttctttgtataactttttttttttactaaatcacccgcagggggggggggggggggctcccacctgaatttgtcattgcaatgagggggagaacaaaagtatttctttgcctaacttgtaaaatctcactgctccttccaaattttgactatctattgccctcttgtcccttttctaatcaatcagtcaatttctgatatgaatttgactcaccttgccaacagctcttcatatggacttgtcacgacgatgttgcttagtatttccttttctataatcttttgaagctcgtcctggcatattcgcccagagggacagggcg

SEQ ID NO: 9712 - DNA, 360 bp, Oryza sativa
  Intron number 1 from transcript LOC_Os08g09950.2 (locus LO C_Os08g09950) derived from phytozome v7.0 (chr-ID Chr8; po s 5752192 to 5752551 reverse strand)
atcagtagcagccgctggtatgtttttgtttttttttttactagacatacttccaatgttatatataaataacgttcattagttcatttttaactaaccaacgtcacattaaaaatgatgaagaaagtataaccctttagaaaatatattaaaactcgatctctgcatcgaagaacaaatgtgcactcccttacttgacatattgtttgcaaacttaccaaaaatttcatcgatttgatcaaagcataaatttattttcagctggttgagaaagaaataaattaccagttgcaacttgcaagttgtcgtgctcatgcatgcaggatgtgcaggggtagtgctgtcagtggcagcgcgatc

SEQ ID NO: 9713 - DNA, 845 bp, Oryza sativa
  Intron number 2 from transcript LOC_Os07g41750.3 (locus LO C_Os07g41750) derived from phytozome v7.0 (chr-ID Chr7; po s 25019272 to 25020116 reverse strand)
cgctacaagctcctcggtggcctcgccgtcagaaggttgtgctccatcctgaaactcgcgttccttagatattggtatagcagcatgtcatcttcacagcaaccggctgcttgttcgtgccagaattgtgttcgatgatgactgagatcaattaccgctcctctattgcattttcatatgctgtggttgagactgcttctcttccgcggtttgctgctttagagggatatatgattgtttattgtagctgttttttttatgctcgagtgaaggttgtgtttgcatttgttctatgtcatctataaagcaaataggtcactattgtaccaactttgtgtcggaagatgactagattatttgagctaactaggtactctactgagaagtgttgacaattggcttctaatgtgtgatcctgttgggcacattagtttaattttagtccctttttacttcaaatataaaaatatacaatatttcgctcctcttctgcaggtagctttagagggctatgatcatttattatacctgttgttttctgtacgagtaaaggttgtttgcatttcttctatgtcatctataaagcaaataggtcaccatgtaccaactttgtgtcggaagatgactagattacttgagccaactaggtagtctctgctgagaagctttgttaattggcttctaacgtgtgatcctgttggccacatttaattttaatctcttttacttccaatctaaaatagcttgtactgtttaggatgttctctacaagcatgctttgtttctctttatgtattttgatttttgtctgactaaatttgttgtttcttttgccagggcgtgct

SEQ ID NO: 9714 - DNA, 783 bp, Oryza sativa
  Intron number 2 from transcript LOC_Os05g35110.1 (locus LO C_Os05g35110) derived from phytozome v7.0 (chr-ID Chr5; po s 20786175 to 20786957)
ggggcttactaatctttccctctcacggtgagcaaggtttttatccttcagtgttgttctttcaatcgatggttattgtctgattggtgtgacttgtgtggtggcgttaacttttcgtgacataacgtctatacgctgttggtgtaatggtgggaagatttggattagctttgatcattgaaaatattggatatggcactaccactagaatatattccaagtgtcttagaacacacattcctatgcatcattattcaaccatgtcgtactattagaaaagtagaaaagcccatgtgcttagagcgttagatttgggtctgtgactgctgtaggtttttctgcaaccctatgcagtttcatgtacgcatcttattttaccacttatattgtctgaaggcctgaaaatcctaagaacagacttttcttttcatttgaactgatgtccaaagcaaatccagcatatatgctatagttaatataacccttaactattaaaaaactaacatgagatggccagggcaacatgcttcacctacttgaatggagactagtcactatttctgcttagggacactaagccactgacaagtgctttctatttgtattctcattcttagattaattaacatgtctctttgatgattcccatcatggagtacatgctactagtagtatttcaatctttgcaagcatattttcaaatggtattttctttgcatttccaagtttttagtatctgttagttgacctgaaaattataccatctgcaggtgccagcagaac

SEQ ID NO: 9715 - DNA, 991 bp, Oryza sativa
  Intron number 1 from transcript LOC_Os05g34650.2 (locus LO C_Os05g34650) derived from phytozome v7.0 (chr-ID Chr5; po s 20489203 to 20490193 reverse strand)
ccgtgccgctccagtcgccgctgccgcccgtcgaggtgagggcggggtgaggcccgtagggatctatggggattggtggcattcgtggtgttttttggtgttgggatttcgattccatggttgcgacccacccgtagggagatctgatttggagtgaaatgatgcgttctttcgtcctttttttttatggctatgttgttgtttcggcgattggttcgttcctcggtgataaattgaatgtttcgtgggcggtaacatctcctgatttgtagttagtttggtttgatgggatgcggaaaaagcatggtttaagcggattttctctcgttaacagttgtagtgtttgatgggggtgagatttgcagctctgttggtcctgactcctgagtgcaaaattggatccagaattgttggctctgacccttcaatgcaaaattggatccagaattgtaggctgtggtgttgatttgttaacaaacaacccgggaattaaaagttatgccgtttgcttttgcctgtttttggctgtgtggaggcaattagtgaaattcagggggatgttttcatgtattttttcccaggttcacaagctgttcacccacgatttaatttttttttcagttcagcgattaaaattcttatcatgggtctgcaggtttaatttgtctcagtttgggaactgcaggtgttgtagttttgcgctactccatgtttgatttatggctattagttgaggtcctttgctgttgaagctaagttgcaatttttttagaaaagtgatgcttgtgactctttagagctacttgttcgttggatggttcttaatagcacttgtttcttttgtttacattctcttggtgccaactgttatgttcttcccctagtttgttctactaaaatattaggtgcatctgctatgatcttctggaatgacatggcaatgagtgatgaactacgaaatgatttttaaacttttctgttgcaggaaata

SEQ ID NO: 9716 - DNA, 637 bp, Oryza sativa
  Intron number 3 from transcript LOC_Os03g15780.5 (locus LO C_Os03g15780) derived from phytozome v7.0 (chr-ID Chr3; po s 8704573 to 8705209 reverse strand)
tcgagaaggtgcttattcttcagtgtcatttcctttatctcattatgggctattttatttgattgcctgggaggaggattatcatagaatcaacctatactttggattttcttcatcaccatcagactatcagtaggagcatctctttcagtaacaaaagaaaaaaaatctctttataaaagaacctagtagtggtggtgaatcttccatcccttagatttggtgggatcttctaaggctggataaatatatatctctgtgaatgtggtttggtttttgtggttcgatgtttgcttgcaaattatatatgcatttttccaacaaaaatataatttttagtcaagaactttagatatattttttgaaatctgttgcaatgcacaatttagctagtaatatataacacactatttcctacactaaatttgaagccaaattgcaaacctgtgcttcttctctttggttgccaacaacagcagaaaccacggagctcatcctgtttgtgacataaaataacttgtagattggtagttccagaatttgaacttgctgcaaatgtgagaccgtgagttacaacttgtggaaaacctatatccatttcaaattctttggttcatgtgtttgctgcagaaagtat

SEQ ID NO: 9717 - DNA, 908 bp, Oryza sativa
  Intron number 2 from transcript LOC_Os03g56310.2 (locus LO C_Os03g56310) derived from phytozome v7.0 (chr-ID Chr3; po s 32094648 to 32095555 reverse strand)
agaagcttgtcaaggaccttggctaccctgaggaggttagttgcactgaaacacatgcatacttgtttggtgtgtaaagataaaactgtattagttggtttagatgttttgaattactgtgccaagttcttctctgtataaactgagatatttctccccttcgagtaggcagcaatttgtttgtgccgtagcatcctcgtgcgtccgctgtagtggctggtgcctggttgccaataaggtaccggcgcagcgacggcagcctgttgtggtttgttcttgtagctgttgtaaatactgtagcttggaacttcttctttccaaatctcaataaacttcagccggcttctacaccggcccggcaataaactgagatatttcatggcacagagggacttttcttcttttgtttgtaagattgtattatttgactgtcagaaaagttaaactgtgatgggacttcctttgtagcacgttagcactatcataatgcaattcttgtgatgtttgaatgtaacttatttaatgaaaatatagcattgtggactactgggatgatatgatgttttttcatatcatttctttacatttttttatatcatttctttatctgtattgagtaagcatatatgtggatatgaaaacaatgaagagaataccaccacaatgtatactaacattctcatgctctggcgtttgtgttattgactacagctgtaatttgctggtaaaagtgttatgtaatagtcttttgcaaatttgcttgttccatacattgtttttttattggacatgtcatctaacccgttccatatttaatgttttgatgctgagatgtatgaagcaattgttcctttgtttccttttgctctgaatttgatattctttgtttccattgtgcagctgttaac

SEQ ID NO: 9718 - DNA, 661 bp, Oryza sativa
  Intron number 1 from transcript LOC_Os03g56310.2 (locus LO C_Os03g56310) derived from phytozome v7.0 (chr-ID Chr3; po s 32095767 to 32096427 reverse strand)
cgccgcgtcgccttcttcggcctcgggccctagaggtaagcgcgtttttcctttttttttgttatatggcgtttattttttttggttgaattttgcggttctctggtgattcttctgtgcatgtgctattgttggtattttgttttgaaatggcagatttgatccgacgcgagccgcggaggaggctaaccgttttgttttagccgtcccatggccgacatggtgcggttatatttgccggtttttttaatcattttttgctggttgttatagtgaatttcacgctccatcttagtttacagtgcgactttgctctcttggtgtattttacatggttcgaattttgcggccgtttgctgaatcggtaatggcaattgggtattatggattttgtttgaattttgatgtattcttatgtgtgtttcacacttgttattacattgcaatcgtagtacaattgtttagggaatggatagcagttcaaatgttcattttactctatgtaatcggctgatcatccgtcaatttttacctagatgctggaattccagattgtggcactgcactttttcactgattacatggcgaacatcaattactcaatgtttagcgtgctctgtcctgaaatattgatctcatatcagggtgcagtgctgtaagg

SEQ ID NO: 9719 - DNA, 855 bp, Oryza sativa
  Intron number 2 from transcript LOC_Os03g10080.2 (locus LO C_Os03g10080) derived from phytozome v7.0 (chr-ID Chr3; po s 5087366 to 5088220 reverse strand)
aatcagtctcctccacatgtatggatgctggtgaatttagctcttcttcttgccgtcctgtagagacttatttccctcctatttatagaatgagattgaattaatatagactaaaaacttgcgtgtgtattctttctgtgaataagggtaggtaggctgggttgctattgtcctgcagaaacgtactatttttaatcttacagacgggttttttgcagtgacagtctgtactggtgagtggaagggataagtatagcagagacaatgcattaacttcttttggagtagtttcctatttgtttctatttgcaattgcttgataaagaagatttctgtgatttgtctcttttgacatatcatgaccttagctgaaagttttcttgttgacctcgtccattattttgatgatcctagctgaaagttcaatactgacttagtccaataaaaaaatttcaattatgtcaagctatcatatttgttgtcttggctttccttggaaagatctcctggtattgcaaccctattttaaattgattcaagttcttcaagttattgccttgttggggacaatgtaaatgtcaacctttttgtttcatgctgatccattctcagttttcatgtattgtttgaattgagtatcagattctcaagagtaatgttgtgacacataagcaatatgcatggtataacaatccagttgtcagatgctattaccattaaatcatttgaactcattaagggttagattccaaagccaattgttgcaaatggatatacttctctgtttcctgaaatatatgtctattgttggggaagaaagaacattgaaagttgtgcctctgtctcgatgtgcag

SEQ ID NO: 9720 - DNA, 901 bp, Oryza sativa
  Intron number 1 from transcript LOC_Os03g10080.2 (locus LO C_Os03g10080) derived from phytozome v7.0 (chr-ID Chr3; po s 5088241 to 5089141 reverse strand)
cagcaggtctcaacccccttccctccctgctttaccgtggaaaaaccttatttggcgcgtgcgtttcgtggttcgcatgctaggtgtttgtggcaatgcgtgagaagaacaaccagccgaccagttcctcggcattactgagcagcatgaagccgtgcccgtgcgagagagatatggttggatgcgagcaaagtaaattattgagctcgactttgaatcgataccacgcgtttggtgcattggcttttagtttattcaactggtgcttgatgtttacatgtgcatatgtaagctagtacctgcaacgatgccgtggaaatcgctcactggctaaagcctctaaaaaaaggaagttaataaaccttttagaaaacgaaaaaggggagaaattctccgaagactctagtagtctagtctctagcataggaacacgatgcgtcaacagcacagctgatacgccagacgctatgatataacaacccataagagttctgtgattgtagctcttgccagctccagccacaaattcgatttctctgttttttgatagatcgtagctggtcttggtgcatcctttggtttcttctcatctatctcagctcagctgtgacgcaattgattccaaggccatgtcagatttgtttgcttgccttcgctttcgtctcataatcccatttccttgctgtactctcttcttttctctccctttctcctctgttatttgttagtctcttttttattaagaaggatggtactgtaatccctggttcagacaataagttcagatcaacttctcaaaattttgacgctcacacaatttgctagatgtatgatatccactttgtcctttctcaagaaataattatcttgtggttcttgtgcagggcggcatttgtggcca

SEQ ID NO: 9721 - DNA, 474 bp, Oryza sativa
  Intron number 3 from transcript LOC_Os08g25390.1 (locus LO C_Os08g25390) derived from phytozome v7.0 (chr-ID Chr8; po s 15446452 to 15446925 reverse strand)
ctcaagccagctgctggtaatattatctatcatctttcatggccattgtttcactatgttgaatttgttcctttctcccagttcacttttagtctagtctagattgtggtataattttcaccccttttttgacggagaaattccataggctagattccattactcaattggaactgttctttgattaaagctattgcagggtacttattctcatttttggtattgcatctcaggttttgattttgatacaatttaaccactatcaatgttattgttactatcacatttttcttttagctttacttcccctaaagtggtaaagaaggcttgtctttgtctcattaagataacaaaaaataggaataaatagttcgttcattgtattgatagaagtggatcattaatatattgccatctaagtttatgaatttcttctcagctgtttcagttgagcaagctgaagctagtgctcac

SEQ ID NO: 9722 - DNA, 352 bp, Oryza sativa
  Intron number 3 from transcript LOC_Os03g38650.1 (locus LO C_Os03g38650) derived from phytozome v7.0 (chr-ID Chr3; po s 21459141 to 21459492 reverse strand)
acaagtgagcagggccggtcaggcacctgccaaaggtgctcaatgaacgagttttacagtatttggtattttggttcaaaaaactgtagagcttggctgtatttggtattttggttcaacaaccatcgcccacgctgtctgtgcaaaggcatacttgaacattattcttcaagtgctcgcctaaccttgttggtaattggtttttagcttcttggtcagtaatgaaaagattagacagacaagataaatcaatatagattctaactacactgctgccttcaaaaaaaatgtttcataaaatatttttgcttttgcagcttgcggtccgaatctagctgcaagaaattggctt

SEQ ID NO: 9723 - DNA, 652 bp, Oryza sativa
  Intron number 2 from transcript LOC_Os08g02950.1 (locus LO C_Os08g02950) derived from phytozome v7.0 (chr-ID Chr8; po s 1284450 to 1285101 reverse strand)
ggcgacgtgtcggcggcgacgatttggaatctgaggtatctgttgtgattggtggttggtttatccccttttcgctgctttgctcttctggactgtacatcgtaggcaagatgcgctttttttttttttgcaatcctgttttattggattgggggtacaaatgccattcattgatgatgcatgtttgggcgaaggctataaaatgcagaaaagttcttactgattgcgatggaatgcgagttgttgtcgtttggattatgtgaattgttgcggtgtcgcactatccaaaattaaagaaaggtttcctgtggataaaaaagattcaaatttcctaatgattccaaagtgcctcattttcttatccataagaccataataactcagtttccaaacttttgaacctgattgattttgagtcgtgctgatctgaaatcgatagatgtgagcccctgaagacagggaataggcagagtggccatgggtgagttttttcttttttagggggtggagggaactgtgttgcaaccttccgttaatccttttatcaaattctcgctgatgttagatgcctgtcttgtcatccttgtaatgtatgtttcattcgaccgctatcttacgttaacattatccatgtgccattgagaaagcttgg

SEQ ID NO: 9724 - DNA, 720 bp, Oryza sativa
  Intron number 3 from transcript LOC_Os06g50380.2 (locus LO C_Os06g50380) derived from phytozome v7.0 (chr-ID Chr6; po s 30497193 to 30497912 reverse strand)
agcacaacgtttggcgtgtaaaaggtctaattcaggtgagttctctatcactatgaacacagttttagctttgaagaagtttgattgaaggatcatttcatattgcctcctgcatctgccattattcccatcatcaccttccggatggtaatcggcttattaaactcatctgcatttgtaatgttaagacaaaaccaagtagattcgaggtggttacaccattggaaataaatgcaataaagtcttcttctgctcatggatgagagatgtcatctgtgattgatgattgtgatatcactcctatattttgtgccagtgaggagcttgagaataatcgaaggttttgcattgtctgttgtttaattgcatgttcatctacttaattgagagattttttttttcgtggtacagatagctgctggttgaagaaatactttgtttgctatttatctgttaggttcatgccatccctcaaataaccatttgttagtgaaaaacattttatgaatatccctccaatctccactcttcagagcttgatacacccttcactaggctaccatgataaggcatccaaatgtttgatgagtttttattgtacagtttacaaatctggcaatacttgctgctttatttatgtttcttccaaggtctaagtgaagattgttgggttttcctttaatttgttatatattttgcaggtctgcagatcaattggtg

SEQ ID NO: 9725 - DNA, 746 bp, Oryza sativa
  Intron number 3 from transcript LOC_Os03g60380.1 (locus LO C_Os03g60380) derived from phytozome v7.0 (chr-ID Chr3; po s 34333882 to 34334627)
gctggactgaccttgactactgcgagaagaacggggtgagcagtcttgtgtcttggcatctccatttttcttccattctcattggaattatttgacagtgtgcgaagtgcaaattgatgatgatattataacgagtaaatttcacaaaactgcaactgtttggttaaaactatcattttgctgggactttagcaacgtgtttcacaaaactgcaataatagcaaacatttttagcataatgctacaactttatcccctcgtgtgtgtatggcatgcgggtctaaaattgtcgagcaaataaagttatagttctatgataaaatcggacactattgttgcagttctctgaaatgcttagctaaaattaaaattgtagcaaattgatacttttgacaaaatagttgtagttttctgaaatttactctattattattatcagtttagaggggggaaataagtttctagcaagacaagaaaaggctgcactctccatgcatgccagtgctgtttggtgagatgaaaatgatatcaataatttcttttacatgttgctttctgcatttgattctcctagacccaatgggaacaaaattcagtcaatgataacatggaaaaggactgcagaatttacatcatgcagcccacacatcgctgcaattatatgaaccttttcgctggtatctgaggcacgctttggttggttgtgcataggtttggtaccctgcttcaaaaacattggcagagaa

SEQ ID NO: 9726 - DNA, 659 bp, Oryza sativa
  Intron number 1 from transcript LOC_Os04g59394.2 (locus LO C_Os04g59394) derived from phytozome v7.0 (chr-ID Chr4; po s 35125304 to 35125962)
catcgtcctctccttcctcgatttcctcaactccggtcactactcccgtctcccgtctcccatccccttttctcttctcaccaaatcacgctcgattttactgttttcctgcgagcgaactagtactagtatagtatgggttgcttgctgctgcggatcgatcaacccaatcggactacttcccttgcaaccgcccaccaacatgcttcgcttcggatcattatgcttcgagaagactctactactactagggttccatcccatcccatacgcctgccctaaatcccatttccgctttattggagtcgcgtgtataggttgcggattactacttgccctttttcttctatctctagatggagccatttcgcacatcgatgcgaagcaccattgaatttgctaattactaactagttagctacagtagtaggctataatattttcgataatcaccatccaaatctaaagcagcacaatatgcaagatttccctcccacaccaaaaaaaaaagcacagtagagacaaaattaattaccagcttagctccccttttttggaatcaaagatgtgcagtgttgcaaagccattggttctcctgacattggaattctgtttgctatgcagttgagttagctcctggggctgatcctgaagctctt

SEQ ID NO: 9727 - DNA, 744 bp, Oryza sativa
  Intron number 1 from transcript LOC_Os03g40410.1 (locus LO C_Os03g40410) derived from phytozome v7.0 (chr-ID Chr3; po s 22451357 to 22452100 reverse strand)
tcgcccttgggtgagtaataataagcctgcttttatttaaccttgcaatcaaatcacactacgatacacagcgactatatcggatttctcaatccttccaaaatgagtgtttgttgtctcctttctgtgataaagatgcaatttttccccctaaaatctcacatatagcttctaaaaaaaagcaattttgtttcgtaaatttcgcatgtaccttctcaagaatgcaacaaattttgtacaatctcacgggtagaaaaaaaaactgctatctttaggcgtttaatccgtccaaatcatgagttgtgtgatgcggatcgttttccagaagactggtagtctgattctaattctgactgccccaatctttgtgcaaaatcgttgtgttcttcgtgtccgaattggatccgatgtccctttccaatttgggagaccctgcttaccagaagggattccttgtccgaactatggatgaatttgatttgttcgttcttatatatgaactagtaacaaatacagttcgcatgtagattatcttatttgtattgaatataattcacaatatgcaaatgtttgctgcagcaggaccttgtgcaagccccagctggtccgacctctattgatctcctcctaatcatcctggaacgactggagcttcctcatgcacttgccttcgccgcagtctgcactacatggagttccgccgccacggctgccggtgtcccacgttctcgcactccatggatc

SEQ ID NO: 9728 - DNA, 789 bp, Oryza sativa
  Intron number 4 from transcript LOC_Os05g50280.1 (locus LO C_Os05g50280) derived from phytozome v7.0 (chr-ID Chr5; po s 28759822 to 28760610 reverse strand)
tggtgagcagctcttcttctccctcaaattactctcaacggataagcatttgttttttcattctggcgtcctaatgtttttcaactattcattcaggaattgtaaaactgttaccttcagatcaaatgatgatattgtgctgagatgcttttattattaaaaatctcatattatttactctttacatgttcatgccaaagtaacacatccaagcccaacacatgggaaatgaaacagtagagtctactggaagtgtagtaagccacataagtaccacagaactaaaccaaataataggtgtacttatatgtgaaattaaggaaataaaagtgtggaattaaatattattttgaggatttcccatatcttaaacatggttccactctatttgtgattatagaagaaaaatataaatcaacctaactccttcgttctgtgctatacagacatgagtcgaaattgaccagaatataaatcaacatgcctataggagtgaccaaaatattgttgtgtgtggtgaggtgtgttatagatcattctctcatattagatattgaatctgggaattatatactaattatgcaatatattgaacttcagtatttaccttgcatgaaaacaacatagctagtagtacttcaacttgttttatgttttccagactaagcatccactgttcaacaacacctttttgtttaaagagatattttggctttaaagtattctgattaaaacctttgtttcatggtctcaggtgccagtttatatagcagaaattgctccacaaac

SEQ ID NO: 9729 - DNA, 359 bp, Oryza sativa
  Intron number 2 from transcript LOC_Os07g08240.1 (locus LO C_Os07g08240) derived from phytozome v7.0 (chr-ID Chr7; po s 4198570 to 4198928)
atcatatatcaactcaagctgacccagtatattatgtgagtgtcatatactccttccgtccaaatataaaacatagttagaaatttgttccaaaataatgcaactcatatcttcttacctatcatcgatgaataaatcgataaatttctttcaatatcccatcaccgtacctactaatataactttcctattaatttggggcattttggttctttgtctcctttcttaactccaccataggaagctaaaatttgagtttttttggggagtatgttttttttccctagatctaaaagatgcacttgtactcatgatcatgattttcatgaccaaatacgtactttggcagtttgcagcat

SEQ ID NO: 9730 - DNA, 866 bp, Oryza sativa
  Intron number 1 from transcript LOC_Os05g50560.1 (locus LO C_Os05g50560) derived from phytozome v7.0 (chr-ID Chr5; po s 28927516 to 28928381)
cagcaggagcagcggaagaaggtgggtttcccgggttccggcgatctctcgcccctcttcccccctcgtgtttctctgtgtagctctctggaacgtatatgggtgcccgttgatgttggtgcgatgcgcgaatcgcctcggtgtccttcgatgtttttgtcttgttattttgttctttataagttgtggattgtctaatggcgttctggtgttgctgttcatttcagttctagcgcgcgatttgcaaataggctagttttttaactccccatcgccatttttacataaacttttttgagattttttttttacttttttttacatgttctaatggatttagttattgcgttgttcatcatggacgaaatgtgcgatccagctagcaatctggagtatgtggttgaaaaggccaaatgcgatgtgcaccgaacggtgagttacgaacagctcatccttcacatgccaaagttgaccattaccgtgtcgctgcgagatgcttctgcgccgaactaaacaacgccgcatgctgctgctttgccctgtcggtgggaaaaagcttttcccttacctcgtgtactcgtgtggggctcccggcttcggtaatgcccacaagcaaacccatctcggtggtaaaacgaaaacaacagttcgttgctgtgtccatgatttaatgctggtggaagatggaagcttctcaatgttcggtttcgaattgcaataattttgtgacctcaacaatatggtgccgttttttttatgagattgattatatgaagttcattgcaatcttcagtgatgggctgttgattcggtgtgtgaaatttcttttttttttcagagctctgcggaggagttttttacagagt

SEQ ID NO: 9731 - DNA, 1048 bp, Oryza sativa
  Intron number 2 from transcript LOC_Os05g50560.1 (locus LO C_Os05g50560) derived from phytozome v7.0 (chr-ID Chr5; po s 28928725 to 28929772)
tcaattactccgggccctcaaatacattcatactggtaggaaacattaactccttcagctctagttccatttcccccttttagatagtgtgcatctgtagtctgtatattagttaccccctttgatctcatttcacaatgcagcattctgtggttagtcttatatgtattgcatattcattgcatagagggaagtcacctactcatcatgcccttcaaccactctccccatgtgtttgtgcttcagtataattataaaagaaagtgaagtaatggggtagttatggcttcctcggtgaccatgtctagataatctacagtgaatgtgagaatatttttatttaccaaaggttgcttggagtgcagtcaatcaaatgcagataataaatcaccatatttttgcaaaccaatttagcagcaggggctttcccctttatgatgtaaaaccaagttaaccaatgggtttgtgtatgatttctgtagattataattttacctattattaatctggttccttgctttgtgctagctggtccaaccatgatacctgttactatccctctatattttaatatgtccacttaacatatccatttacatatcagtctgcgtccttttagtttgttcaaactagtagctttcttttagcccacacgccttctaaaattaccatgaaagtaaattatacttaattgtaacagtcaaggtataagacctgactgtaagttcatggaagctttgtgacttatttagcactcttgtcattttcctcattacatttatgtagtatctactctgataaggacacagtctgattgcttgaggggattcttgtccaataattgtcataggtattgacttgccactggccactgctaaaaacacatcaaccatgccctgttgtttttctaccttattgacaccctgtgtaaaatcttatgactcaattgcatattattcttttatttttctattgccataatgtgtgctaacactgagtttatataactgtagctagtgtttatcaccgtgatctgaagcccaagaac

SEQ ID NO: 9732 - DNA, 912 bp, Oryza sativa
  Intron number 1 from transcript LOC_Os03g04440.1 (locus LO C_Os03g04440) derived from phytozome v7.0 (chr-ID Chr3; po s 2060998 to 2061909 reverse strand)
catcctgcaaggacgaccaggacgccgtcgcgcaggtcgggtgaatcttctttcccccctctctcactccttccatctgttcgttcgtgttcgcgttcgcctttgcttggacccaagcaaagggagatttgtgctgtatccttggtgtctctccaattgagttgctaacttgccatgagaagcggccttaatcatccgataatgcaagaaacggtgtgaattggtgtgatacgtcttgccttcaagccccaaagcgatcttttgggggtaattacttatttaatatagtgaataaagtggagactttagcatgatccttaattggaacagtttgctgatgattggttgatcctagtttcgacacgacttgggagttgttaaaataatatatagcttggatatgcagtacgcaagtgtttgttttctatccatggtgatggctaccatatgtatacaagtatactgccattcttggactagtaagttgcttcataggaaagagaggagtgtacacttcttacttttgtttcttcagttaagttccaactgctcaacttgtttacgtatcttatatttactcatcttaatatgaatttgcgatgttcctagcctttcttcttccattgaactagttgcaaccatttcttgtttttttgtgcaagtcatgctcttgacaagtacctttgcttgtggctgttactcatgtccctgtgcattgcctgaacgtctgtttcaagaaattttcacaggcagggcagtaacttataaagaaagagaagccgctaaattgttggcagcatctattatagtcttatggttgctctaacacgtgatcaaacacctgatattgactacattttctatgccatgtttgacttcatttctttgtttcatttcaggttgaggctgcct

SEQ ID NO: 9733 - DNA, 867 bp, Oryza sativa
  Intron number 2 from transcript LOC_Os07g02960.3 (locus LO C_Os07g02960) derived from phytozome v7.0 (chr-ID Chr7; po s 1101943 to 1102809)
atctcggttctttagtaagagcctaagaggcaaaggtgagaattttattatgcataccatctacctatacttatactaactgggtacttcaagaaaatatcttaataggaaaagcagtgaataaattgctgccactacatatctagtaatagttcctcctttctcactcaccttctatccattcatccgtctagtgggagtgaattataagcttagattgaaagaagaatagacatcaattacaatttgctaattgtcaatttttaatttcattaaattaataggataccactaaattgagagcccgaaattggtttccttttaaatcttataatttttaaatataaatcactttgtccttaacttcttaaaaacagcttcacacacacgcgcgcacatattgtatgtgtgtatgtatgtatgtatgtatgtatgtaacataatttagaggatttccctgcgcaattttgagcagacctagatttcaaaagtaggatcaggtttagtaacaattcttagcttaagtttcttagattcaattgtaatttgtatataacagattctaacattagaattggatttgatacttgatagacaactcttactttctactatttatatagacatggctgtattttttatatacaactatatcgatcaatctatatcattataatttggacctatcacgatcaaatggccaatatctttactttttttttcttcaattaatgtgataatttctacgtcccttaagcgaatatggtgccccatttcgagctctctctgcaacctaatcactttcactttatgtcttctgtcaaaatgctcccttttttcttttttttttctgtagaaacagtcctc

SEQ ID NO: 9734 - DNA, 928 bp, Oryza sativa
  Intron number 1 from transcript LOC_Os07g39300.3 (locus LO C_Os07g39300) derived from phytozome v7.0 (chr-ID Chr7; po s 23526428 to 23527355)
gaatccggccaacccaactccgccgccgcaggtgcgtgctcgcctcgctgctctccccccccgcccgatcgaactggattgccgtccggaacagcggcccgatcgccccccaacccgggggtggaattggatcctcccgcccggatcatcctctgcccattttctccgcttgagctgctggcgcgtgctgccgagtgagcccgtgctgagcgggagcgctgctctccctcgggttgtgtaggggggcaggtgggggtataggtgcccgggagctccagttgagctcgcgttgtgcggttctcggggccaatgtggccagtctgctcgccatttgcttgtagggggttaatcggtcatcggtggaacccgagactgtcatttggcaatcggatagggttctgagattttttttggtctggccgttctgtgttgttaaacggtagagtgaccacaacttggatggagatgctcaagctcacccatggatggaattgattgagcccatctctagtttcagttctgagctaagtgaagagacttttctggtagtttctgcagtgattgcgtctgcctggaagtcatatctacatacacacgggatgatggattaggtatgagaaaatgcataataggaagacagttgcaaaataagaaatcggtcaggctagaagaaccaggactgttgtgaatccatcacatcacatggcttggaaaagccctctacatctttagaattgctggtcgataacaattaatatacatatttttttatgttccagagagatattttatttatttattaggattttgagtttttgacttacatgcatcagagataaatctttggagcttaagttccagtgacttaatccttttccttcctctgaccgcagcagataagacgcagaacagttctgtaccacctgtg

SEQ ID NO: 9735 - DNA, 562 bp, Oryza sativa
  Intron number 1 from transcript LOC_Os03g61210.1 (locus LO C_Os03g61210) derived from phytozome v7.0 (chr-ID Chr3; po s 34754980 to 34755541 reverse strand)
gtcccggtaatgcaacgcagctcgtccccgtagctccccccctcgcgccagatctgtcgatgccttcgcggtttttagcgtttttttttgtggggggtgaattcgtggggggggggggggggtggtttcgcggtcgcgagctggcctggaatgcgagcccgtttggatggcttcgattacgcgtcgttccgagttcccgcctctgattcatggagcctaagcacctgcaggaggctgcaattaacttgcacatgattttttttctttttctttttgtgtgcgtggatctacgagtagatttgttggtcctgttaggtttgatcggtgtccagatgttgtgttgaagaaaatttgatagcacggcaactccgtggctgcaatcgctgtgctgattgatgaatttgctcgagctagctgatcctgatgatcttttaatggttgcaatcatttgtattatcatgtttcatctggtgtacatttacatttagcccttatattgaattgattttgtttgcagcacttcagcatattaactctgatgatgtttatttgttgcaggtct

SEQ ID NO: 9736 - DNA, 697 bp, Oryza sativa
  Intron number 2 from transcript LOC_Os07g47280.1 (locus LO C_Os07g47280) derived from phytozome v7.0 (chr-ID Chr7; po s 28257794 to 28258490)
ccgcggggcagaagacttgcctccacatccatcgggtgcgtatgaccagcttctctgatgattttttgtttgtttgttcattcgtacttggaattagctaatttcgctcgtcatttttgattcaagacttcaaccgagtctgcgtgtgtttgatgctttgagcgtgagtgtgagtgacgctgtgaggctgtaacacatttgtgtaattgtgtttgcgggttggtagccatccgcagcaagtagtcctcctcatgtattatacagtattcgtgtacaacaattgatgctcgtggcctttgctgtctggattcaaatttgaaaatttggagggaaatgtgtcaatgtgcttatcctcactgtacgcgcaccaaattcgaagtttggagctccaatttcacttttgaagtcctcttatcctggatgagcttaaccttagttctctactccatatatttgatgtttgcttgtattatatgcaatatttaatactgtgtgcaatcattttttcttttgagtttggatatacacacgatgattagctctatcatatttcgaatttgtgttgttgaatgaatacagatatacttgattttctcatcttgcttttccccagaaagttattcagactattccattcatccttagttgttccaactagttgtttttcttttctgtatctaggtccttccatttctgt

SEQ ID NO: 9737 - DNA, 781 bp, Oryza sativa
  Intron number 2 from transcript LOC_Os05g34830.1 (locus LO C_Os05g34830) derived from phytozome v7.0 (chr-ID Chr5; po s 20616044 to 20616824)
tcgaccgctccgcccgcaagaagaacaccctccgggtacatatatacgccattaattaattacctcgaatttgctcttaattcatcaaattcaaattcagacgaattctactctcagttaatcaagtttagacaagaagttctagctgattggttatcggcacgatcgatatcatatgattttgatgtggattaaccacacaaaattcgatcgagatgctaattactgataagataagtacggacttttggaaggacaaatgattcctcttgctaggttagcttaggttagcatctgtgtgccgctttcttgcaagtgtgaacgcggtggatgccggcgcgggtcaccacctccacgcgcgcaaataatttactttctctgtttcacgatgtaagttattctaatatttttcaaattcatattgatgttctatctatattcattaaacattaatatgaatgcggaaatatttatctagatttattaacatcaatattaatatgagaaatgatagaataacttacatcgtgaaagagagagtattgtataaacgctaagctttaaattgcgggcgacgatagcgacggatgcgaggagatatgcacgcccaccaataatgcgcttcggaggaatttcgattattgttcataattattgctgatactgtttgttttacattaattgggcggatttcatcatatatttattgttgtgatcacgaaatgatatggtcttgatgaaatttgatttgatttttggtggtttgtgttattgcagctag

SEQ ID NO: 9738 - DNA, 935 bp, Oryza sativa
  Intron number 1 from transcript LOC_Os05g01810.1 (locus LO C_Os05g01810) derived from phytozome v7.0 (chr-ID Chr5; po s 486957 to 487891)
aagcatccggtcgccacttccagttctacagcggggtcagtattagtcctggcttagttctccaacacttttttccaaaaacatctcatcgaatctttatacacatacatagaacattaaatatagattaaaaaactaattgcacagttaagggaaaatcgtgagatgaatcttttgagcctaattaatccgtcataggctcaaaagattcgtctcgcggttttcaggcgagttatgaaattagttttttcatttgtatccaaaaaccctttccgacatccggtcaaatatccgatgcgacaccaaaaattttctttttgcaaactaaacatgcccttagtatatattattcctatcttactctctctctctctctgtaataaatatatttaaaacgtttaacataagtaaatattctgtcaaaaatttaaaattctaactatcaattttatattaaagtaaattcccatttaacaatgcctaaaatatgttatgaacatagaaaagaaaacataccaagccgcacgaggaacatgacgaacaaacaatcacatgagctgtctaaatccgcttcgttcgctatgggcatcttgaattttgcatttacaaaatacaataagtttataatattatggtagtacatttgaacacaaatgtgcgtttaccgtttgttttgtctatcacactaagcatttggaaaactgttaatgaccagaattttaaactcagactaaattttgttataaacgtcaaataattatgtttaggcggacttcttttttactatttatcatataaaaaaatatttatagcatctttagaaccacatatttgtataccattgtatgagccaaatggatgatgagcaagtgatatttattagtagaattatatgatgatcatggatggtgatatataaatgcagggtgtgtttg

SEQ ID NO: 9739 - DNA, 640 bp, Oryza sativa
  Intron number 4 from transcript LOC_Os03g45120.1 (locus LO C_Os03g45120) derived from phytozome v7.0 (chr-ID Chr3; po s 25465235 to 25465874 reverse strand)
gaagctcgcggtggactgaaacttaacaggtacatcattcgtcccaaaatatagctatttttagcacagtattttatactaaaataaagttatttctccactttcctcatcctttcaaccaatcacaaccatttttctccacctattttttcttttcaaccaatcacacacttcttcaaatcattctcatctaatttcttaacctgtaccaatcttaaaaatagttacattttaggacggaggagcttcgttaaaaaaaatgtataggtaattaatgtttacattgctgttattaccgcagaaggatcacaacgacacttttcatatttgaaccgatctttcgtcacaaattaacttttggtcttctaaaacattgcctcaacatccataaaaaattcccagttataaaaagaaagaatatgagctataaatttaattaaattcatcttaagcccatgttttcggtgattatataaaatgcttcagttagagttttaggggagcagctcattttgatttaatcagtttttgctaaacgaatgaaatggaccgattaatcgcgactatatatccactgtgccgcacgccgaactgcccgtatctaatacgtacttctctactttgttttcataccaggggt

SEQ ID NO: 9740 - DNA, 504 bp, Oryza sativa
  Intron number 1 from transcript LOC_Os07g03920.1 (locus LO C_Os07g03920) derived from phytozome v7.0 (chr-ID Chr7; po s 1640807 to 1641310 reverse strand)
ttttactcgtgaggagacatttaaggtataaggaggtacgtgaagattgggaggttgagtatggcccgcaccgtttcgcttacaaagacttatttgatgccactaaaggatttaagaacaaaaacttattctgccatccttggctacaaccctaggagacggccaatttgtgtactacggcttcgctaacagtaatctcctaggctttatcttgcctaacaaccaactgccaaacagttgtttcatgaaaaacggaacattatcatggcaaagcaacgtgaattcagaataaccatcatcgcattaatcaaaatcttcaaaagcaagctcaaagtgatgccctggcacaacgagctgaacttggtcaaaaggaatagatccataacataaaaaggcatcgcttctccgtcaggtcaaatatcacgaacaacacctgcaaacatcaatcaagaattcatctacactaatcaatggtgtcgccagagggcttgctcgagctgacca

SEQ ID NO: 9741 - DNA, 716 bp, Oryza sativa
  Intron number 2 from transcript LOC_Os02g53740.2 (locus LO C_Os02g53740) derived from phytozome v7.0 (chr-ID Chr2; po s 32899578 to 32900293)
cttggaaggtatgcaatttatacttcattaagttaattttgagtttgtgcttcacattgtaagttgcaatggcaactttcttcttttctttttacggttttggcgatcttaattacagctgcaaatcattccatttgttgttggtgcagtctatagctgattcatgttccatctgttttggcctaaacagttagtaggtttgttagatctgatataaatgttctccaacaaacaacacttttttgctcaacatcgtggagctgatatctcttgtttgtacagcaacttgtatgtgtgttaccgataatgatattttagccattcatggtgctactttgatccagcattcccctcatcaattagagtaggccaaaccaaccaatggatttttatggcattttatgtaatcccgttattagttaatgggttcagcgctagcctagcagtttgaattaacatacacaattctggagcaactcaaacacacaatatcttttcaaatggttgccaactttttgcctattcgatgctaaattcctacatttactaccctctttcctatcctggaatggcaatctgactataagctttaaattgttaggttttgcgtgaaagtttggagggaatttatcaagggccattgggaaaaaggagctgcttatttgtttgtttttgattgcattaccttatgtgatgttatgtttaactgtgcagtt

SEQ ID NO: 9742 - DNA, 612 bp, Oryza sativa
  Intron number 2 from transcript LOC_Os06g09090.2 (locus LO C_Os06g09090) derived from phytozome v7.0 (chr-ID Chr6; po s 4572176 to 4572787 reverse strand)
gatcccatatccatccgtccatctaagttgaggaggttcgctcttcatcttaattcttttttgagaattttttttattattaaaagtttgcggggagttcatcttgacttgttcactccacgaattcttagttttttttatttaaaattttcttatcttatgtgggccaagtttgtgaatggttattgcaatggcagtatcgtagaatcaaacaagcagtacacggaattttacaagtatccataaaaatatagtggaggagggaaaaatggaaatgttttaatttgccatatgtacttgacttctatgaaatgcgcctaacagaaatgtgcaaatatatgcaaagaattattgttgttattgtgcagtgaagttcatttttgctcataggacatgagaatattggattgacaattgacacgaactaagtctgtgtttagttccacgccaaaattggaagtttgaagaaattggaacgatgtgacggaaaagttggaagtttgtgtgtgtagaaaagttcgatgtgacggaaaagttgaaagggaaaaagttggaatttaaacagggcctaaccttttttctttgtccctgattcagaaaccaagaggataa

SEQ ID NO: 9743 - DNA, 962 bp, Oryza sativa
  Intron number 1 from transcript LOC_Os06g09090.2 (locus LO C_Os06g09090) derived from phytozome v7.0 (chr-ID Chr6; po s 4572787 to 4573748 reverse strand)
gcgccatacctgcctgcccctgccgcctccatcacgtacgcccctgtgccgtgccatgtcttgccctccggtatggttagcctctgctgcttcatttcatcctctcctgcgcgcccatcatctccatgcgccggctggatggatgtgttgctaatctcgtttgaaagaattaattattttctgaaccttcttatccaacgagattttctgaattatgcgacaatgctatgtccttgcgattaactctctgtatggtgagatttctgtttatctggtttacgtacgtgaagtgcaaattaaagctttgccaagttcctgttaattcactagcttgtgtctcacatttgtctgcaagtttcctttaatttacgtttgtcaaacctttaattatcaaaattcgtcaaatctaagacaaattaatttgtcaaacctttgtcaaaatcgggtaaataaataaaaacttttgataaagtagggtcaaatgagcaagggcataaacgatatttttattacaggttaacaccattatgttgccttctcgtaatagggtcaagtgtgatcttcatttttaaaaaagagggtcaaatgagcaaacttaagaaaacagggttaaattgggagttaggctttaaaacagggtcaaaaacgcaattgccccaaaattttatgcataatgaaggtatattttgacaatgttggctatgaatttattgtctagcactctacatacttacttacaaatggtagtagcatatttgttgcgataacactcatctggtagaaggatatatttatgatcgtggataattccacctgcacggaatttgagtagtattttttttatgttgggctaaaatttgacatgcaaagtcatccccgcctccccacaccaactacaccgtctgaatcagagctaccttcctgtaggtgtctcctcggcacccaacccctaaaggccgtgg

SEQ ID NO: 9744 - DNA, 1046 bp, Oryza sativa
  Intron number 2 from transcript LOC_Os03g11960.4 (locus LO C_Os03g11960) derived from phytozome v7.0 (chr-ID Chr3; po s 6272993 to 6274038 reverse strand)
ctttggcgacaccaccaacggctgcaactctaccggttcgttgccttccgtttcccttgcttggttttgtgacttaggttgtgaaattgatgggggatttggccatttggagcactgctcgataagatcgtgtattgcaattgtgaactcgcatactcctatattatgtataagtagaacttacaacgctaactaccataagagaagataggcatctaatttgagttgactgctgatcaaaacatggataggacgaaaacgtcactgaggtaggaacttcgtttaccaattgagttgtgctgtgaagaattatcaaatgaccgatttatttgttaaaaagtgcactggacaaaacttttttttttgtcgggacggccaaagataggccggccaatttcattaagattgggggaaataaagttttaattacaacgacatgaaggatgtcgcgccggtctcaagcaaactcaagcactggacaaaactgttggttgtatttatgtgtgcactacaaaaagagattgtcacgcctcccgcagagtttttatgagttacaatgccttcggcaagcctatggaaacactactattagcctttgcccaatgaatgatggatcatggaatgggtagtgagtgtactcaggtgaaagttttggggaactgcataagctcaatgtatgctgcaaaaaatgtttccaatacagaatcatctgctcacccttccattctaattgtcctgttcaaatcttgctactgcatttttaagtgaatggttttcatttcttttatttagggtttgtttttcatgaaaatttgacttttttcttcttcacgtgtacggggtctatatttgaaatgttatggagagatggataacatcaaactctatgttactagatttatttgagaattttcataacccaagttgggggtgctccatggagcagctgaagtgttctctcatgccatcttgcaattgttatttttcatttgttctgattaaattacttgtcccagggccccattttaatcctcacaataagtccc

SEQ ID NO: 9745 - DNA, 650 bp, Oryza sativa
  Intron number 1 from transcript LOC_Os03g57220.1 (locus LO C_Os03g57220) derived from phytozome v7.0 (chr-ID Chr3; po s 32621731 to 32622380)
cctgttcttgctccttcctcccagtgtctctcaaggtaagataagctacatgcatatcagtgtacagaatttgcttttctatcggtttgatttgagtcatcttttctttcgtgatttcttcagtcgtaatagttcttctggcgtggccaagaatttgttgcacgcatagtttcaaaatgaccaaattattaggatctattgcatgttgtcatctttgtttctgattgattttttagttctcttgtttgtatgagtgatgagaggtttttttatatttgttcagttccaacgtcgtttgatcgttggtacagatgatgaagatttctttttttgtttatcatttctgttaaaagaataccacatattttctgcagaaacaaaaaaaatgggtatctgcatgcactccaagagaaaggagtcccttggtttctctgatgatggaaagtctttttttttttgtttaccttgttgctatgaacttttagcagacttgcatagttgcatgtgttctatcagaaaaaaaaaagaataagttatcatcatgcatgtagatgattgttattttagtaggaggaaagctatagctcaattcttttgacagtgctgttctttgggtgtagagcggtgcagggttcacaaggcaggagaaa

SEQ ID NO: 9746 - DNA, 661 bp, Oryza sativa
  Intron number 2 from transcript LOC_Os07g22390.2 (locus LO C_Os07g22390) derived from phytozome v7.0 (chr-ID Chr7; po s 12565431 to 12566091)
atcttccggctctggctccgccaaccatagcgcaggtacatgactcatgagctcatatgacttgtgattctcctcccaacatttatttttgttagtttgtggattggaatctgttgcagatcgaggagcttgagcgagttgttgggattaggtttatctatagaggtgcagtggggacacgccgccgtcgtcagcgtcttgctgaaccatggcgctgatgtaggcggacgcagtgatgatgattcttgactgtattttagggaactaattgctccaattctgacaaattttaactatatttttggttccctgaaatgctaattgttccaatcctgacaaatacaatgtattaggcaggtagttttgatttgaaatctcttttggattttgtagcccaacaggattgccaatttcgtcttcacaccgttggtttcgtcacttttggggggatcattggaatgcatgaagttgctctttcagatagattttctgctaattatcttcgttctttttttctccagctccatgcttttttacttccttgtaccactaacttcattattcttgcaattttgtttactggcatttataccttaaccatcattctggatttacagtgctttctaaagaatctactgtgctgaacacatgaactaggccg

SEQ ID NO: 9747 - DNA, 654 bp, Oryza sativa
  Intron number 3 from transcript LOC_Os03g24390.1 (locus LO C_Os03g24390) derived from phytozome v7.0 (chr-ID Chr3; po s 13884968 to 13885621 reverse strand)
taacttcaggctatattgagcaaacaattccaggggtaggtttggccatttacatgtatccataacatgcgttctgacttcttattttgcactattcaaccatctttctccacttttgtcttactgttgcccctataaagctaaatcctctggaccattatgaatggaaatgtaacaaaatggcggtagaaaattttgttgagtatagttcaatatgatgcctatttcttagttggtttagatgatcttagttttttttggaagtttagtaggatggcctggtgggataccattctatatgattatcttttttcttaggtttcacatctgcctctttttaaacatcttaataagttcatattgtattcaattccaatctatgaacttttgttgtattagaaaacttattatggttatattgtactaattcattgtccaggtttttcttttgtcctccctgcctaaaccatcttatgatgtgtatgtgatattcatgtgatggtggtgtgttttgatcttcctctctctaggaaagctctgtttcttgtgttctgttactcttattcaccttggacactgcatgaaatacctgacatgaattatgcacttattattacaggtgattgtcagcatagttggtcttcttgttttggg

SEQ ID NO: 9748 - DNA, 1001 bp, Oryza sativa
  Intron number 1 from transcript LOC_Os07g15300.1 (locus LO C_Os07g15300) derived from phytozome v7.0 (chr-ID Chr7; po s 8823676 to 8824676)
aagaagaatacaaccagaatcttcatgtaagacctcacattgaccttgacgatgatccccaagagcctgtggcatatgctcgttcagatcatacggaaggcataaccttgcgaccgatgcatttgtactcatctattataatgaatgaagtattttgttttattacagagacttgatatgtgtagtcatttatatggctaattttgttttattacagatgatgtttatatttgtcgtatattcaaattgaatttcaaactattaggaatatagttatacataaaagtgaccaaaatcaaagttgtagatctaaaggctctacaacttttctgtttatggcttttccatttgaaatcatttagtatttataaatgttgtttaaatttgtcgtacattcaaattcaattttatactattgggaaaaagttatatagataaatgaccaaaataaaagttgtagatctcgaaaggctctacaactttgttgttgaccatttttccatttgaaatcatttactatctgaaaatgtattatgactaataaaatgaattattatacaatagctatgtattttgcactcacaaatataaatacttcatgggaaaaatggaaaaatagtcatcggtgacgggccttagtttaagcccgatagagattaatctatctcaatcgggcattaccgtagggcccgtcacagatgagtcatccgtgacgggctccatactaatgcctgattaagatgacaatcaggcccgtcacggatgactcatcttcatgccaaatcaagaagatcaacgagtgtacgaagctatagtaagtgtctagtcaaaatagatgttcgtattgtttcccatcatgctgaaggagttggttgccgagcaacaagcctcgcaagaggcctgctctcaaagacgcgaggacgacctcctcgcgaaagcattgggcaacaaggaacaccgtggacggacacggagcgttgggtcctccgttccctagaagt

SEQ ID NO: 9749 - DNA, 652 bp, Oryza sativa
  Intron number 1 from transcript LOC_Os07g05310.1 (locus LO C_Os07g05310) derived from phytozome v7.0 (chr-ID Chr7; po s 2419698 to 2420349 reverse strand)
gctcgcccgccggctttccagcggcggcgaggtgggggaggggggagagggaaggcagtggtgctgctagggctttcgccccccgtgtcaccagtgcgggggcaacgcgggggggggggggtggtccactagatagtgctacagtacatgtccatgtcccatgtcactactcttttcgaaaattatggaatttattacttttaattttcttaaaaaaaaggaagaggggagaccaagtaggaggggagggaggaggcacgtacccacgtacacaatataaaactacaattaggtatttgggtaaagaggatagagaggtgaggtatatggggcctttattttaaaaaaaataaataggttcatcaatttattagagtgccacgtaataatttagtagtatgtgggagggtgacacagtcgttttatccaatcaaaacatcacacactatcacatcagctgtaaacacagtactcctcccttaagcacttccttcgttttcaaaataaacaaacttaatgggacacattctgtaacgaatctaaatatattatcttaataactaatttgttgtactaagatgtatcatatatatcgtatcaaattgtttattttagcttagaatgaatggagtaactaatgcgtttattacag

SEQ ID NO: 9750 - DNA, 829 bp, Oryza sativa
  Intron number 2 from transcript LOC_Os04g54474.1 (locus LO C_Os04g54474) derived from phytozome v7.0 (chr-ID Chr4; po s 32220566 to 32221394)
taggccatccatattagacggaagaactttatcaggtactaagtttctctggatatttgattcactgattctgtttttattatgtgtgtcatcttggtgaagaacaagttaagtcctactctttggctttcactatatgtgctgttgtgctagaattaatgataacttgcatttctatagggtttattacctgattgacaaagaaaaaacatcaaaccacagcttgcctttcatatcttgtttatcttttcattcctagtagagaggaagtaggaaaatatgtttcctgttaacctaaccagcagagtcatcaggtgggattttctccttcggtgatgactcgtttagtgaaagaaggacatgatttttcttggggactctgaaaaattttagcttctgaataagtgggctatctgataattctttagttcttccaagacatcatagctaagggtttttgattttgtctcgtcatgtctatcgttgtttcttttcttatttgaatgggactgcaaagtgctggagtggtactaaaactgatcatattcgcttctccagtaagtctggaatagcactcgtaaaccatatgttcattataatctttacactgttggaataaagttccttgagcgaaaactttttttttccctgagaacatatctttcttagagtattttctaagaccatatcttcttccatgttcatgcgacactggacactctagagcaactgcataactttcagtattgtttatgaattatgcagctaatattcccactctggcacatgaatttatgcagtattattattggaggagaccaattcaaga

SEQ ID NO: 9751 - DNA, 439 bp, Oryza sativa
  Intron number 1 from transcript LOC_Os05g19480.1 (locus LO C_Os05g19480) derived from phytozome v7.0 (chr-ID Chr5; po s 11326217 to 11326655 reverse strand)
cgtgattcatccaaggtaccgatatgtctaactcacctctgttcttgggattatttttttttactgtacaaactttgctatcgggtactttttcttgtttacgaaatatagggttctaaaggcccgctttgctgcattcaagcatatcggaatacacatattcgattgtagtagtattctttgaaggtctgaggtttcttagctacatccagattttttaaaaagaaaatggttgcctagtggggagtcactagtctctgttttcccaattaattgattcaaaaaaaattagttgtggtcttaaataaagagcggatttttgatctgtttgctacaactggcaggaaaaggttcactatattgttggggtagtaatgcattgttgaatttcttgtgtgatacagatcgctatcccaatttcaatatctagagttaacca

SEQ ID NO: 9752 - DNA, 1028 bp, Oryza sativa
  Intron number 3 from transcript LOC_Os03g64360.3 (locus LO C_Os03g64360) derived from phytozome v7.0 (chr-ID Chr3; po s 36375644 to 36376671)
ctgcaggtcagtgtttttcatgccgtcacatgcctcccctaaaaactaagcattcttgatgcaggatttatttttggcatgtatgggttggtttaccaatttttgctagcaaatcaaacacactctacattaccaaaatttcagaaattttcacatctaagcacatgcaaccttctaattccaaatatgagcaggtaatggatggaattctatttttaatcaagaagcccacatgtgtgtgcagtggtcttccatcggacttaatgtcaaacgaaatataacaaactaatggctgctgatcattggacaaatcactagctcgtagcgacttgtttaggtctaattgattgtttgtcgtcagaaaagaaaatcttattaccatttgcaattggttggatcaaccattacgagatagggcaccgtgccgtcatgccgttagtctcgagctttcttcgtctttttttttcttaatccatatttgacttggatgttgttttcgttttgaaaattggaactgtagcggccggttgaaatataatccatctgcttggatcatcaaaatcataatattatgtgtgctaacaaatcttgatttgtttcacatagaagctgcatcagcaaagggtaattgtaatactagcaaaacatgttaatggatcatttgctttgtgcctgctagctagtttgattagaaacagaattcaggacaatacatgctcacatttggaattatgaggttgcatgtgcttagattaaaaaaaatcggccaaaattttgtagcatcaaattttttttatcactttggttggtaacaaaccaaatacaatatattgccctactaaaccaaccctacatatcctggtagcagttttttgaatgtgctagatgtagaggggcaaatcttgtgttcctggtccaacatatataggtcaatacatcattgcagttctcgtgtgcaaacttgctgaatgtaaataatgtaccatattccaggaaagtgtccttcagtcttttaagcttccacgcgc

SEQ ID NO: 9753 - DNA, 900 bp, Oryza sativa
  Intron number 2 from transcript LOC_Os03g26480.1 (locus LO C_Os03g26480) derived from phytozome v7.0 (chr-ID Chr3; po s 15124041 to 15124940)
aggtaaaattgctattgttttatgcagtaaatatctaacaattaaggtcagatatgatccatgatattcactgtttaaccctgaaaaatgcatcgtatttctatcattctgaacttatcagaagacatatgtatgcagcactctctttgcataattcaaattgactagatcaaacaaggtttcttattacttcctttcacaaagtttctgttccagaagactgttttaacctttgtttagaatcgtttcatgtttctttagcttgggttgtttacacaatcccccctgaaaacagttcacaagcactcgacaattcgtgtagatgtacagtactacactttctgtagtgaaccagtgaattgtttccagccctttttttgggtttgacaaatccctgctctctaatccttcttgtggatgatgaacagcttatcttatttgtttgtttgctcgtatggcattacgaattgcataaaaatcttgatactgtatagtagtttcttaagtatgtcttaacctgattccactgggatttgtcatctcaatcattattcctacttgagttgaaagaaattttattgtatagaatacaccatagagcgttattctctggtaacgattctaattcctgcaaatgagggaagttcggaaactggaagactaccagactgacgaaagtggtaaactggtaatctaactaacgacctgggcagcacacgtttttgatgtttactgcagtgcattccctgcatcaagaacattttcatgttgaattcctttgcctgctgcatcatatgttcatatcttgtctccgctaaagttttcacagggtcacaattccattcctgggttatcaaactgaagagcaaatctctgacatgctgctgtcttgtcatacag

SEQ ID NO: 9754 - DNA, 904 bp, Oryza sativa
  Intron number 2 from transcript LOC_Os05g04170.3 (locus LO C_Os05g04170) derived from phytozome v7.0 (chr-ID Chr5; po s 1871574 to 1872477 reverse strand)
ggacgtgttcaggtacagggttggatcaacaacttcacttctttcttctttgtgtttctttcagctctttcacaacatagatctcactgtgataattgccttcttctagttttctccatggtacacatgtgtgaagctgttctgcgagttgaaagaaaagcaaaaaaaaaaaatctgaattgaataccgcagttagttatgttggcaaattgtttttgtctatttggttatatttatatattgaggaaaagtttctgcttttgtggggatgggcataagggaagttttggagttttgcaggaggagacatactcaaggattatgtgttctttttttcttttcttttttttttgccagtaacctataaaattctgcaacggattaattttttctcgtgtactttgacaatcttatttgtcattttgtgccctcctctcttttcaactagttctatataaacccgttttaatttaaaatgaaaatcaatgggtagatagatccaagtatcagagagagacgtagaagcagagctagttaaaaaaaacataccgtgtccagtgtcaacaggcatgtgtacggtcagtcctcaaggagagaacaagtcacacctagttggcaccttagtacataacctgtacgtgtacagagtaacaccaaaagatatgagtataatatttttaaatttcaactagtaatttcatgtaacatataatctactccacatgctaaaaatattggtttcatgcaacaaatgcaggatatgaaatttaaacaacagattatcacaagatacacggaaaagtcaaagtataaaagaatactccacaacttagaaaaatcttagttttcatcctttcacttatcctcctgcagggtcgcagcaggcaagtacccagataatcgg

SEQ ID NO: 9755 - DNA, 964 bp, Oryza sativa
  Intron number 2 from transcript LOC_Os06g13570.1 (locus LO C_Os06g13570) derived from phytozome v7.0 (chr-ID Chr6; po s 7487879 to 7488842)
tggttacccacttgtgaaagagtaagtttcaaattgtgtctaatgtaccgagtgaaatgctgtttttctcatagctaattaattgtctgatgctaccgtggtttaatttggaaattatgattgactatgcacttgttgccgcccctcattttttctccggtagcccatcaaaaaaaatcctagatcacaccctgtccctgtgaggtctaactgcccacggcaccgaccttatgtcacaggcctcaccgttgcttttgcttattaacctgttctttttatgaatggtgcgaaaaaaatgtaggtgaatactaaaagcgaactgatctgtgtttccatatagattcgtcaaaagccaaaggcattatattcctttaaatcatgtctttacatcctccaaccctgatagtgtactctggaatagcaatttctgaagaggatttttacacaaaatttcatttttgacttcttcatgtttttcgtatcacatattcacatcccagcataattttctacatttctgcatttcacaatcctgtagggtactagggtgtagagttacactttcattcctatgtttctcttgtgtttttggttgtgttttgtagattttggggaaaagagtgatagtactgtcatagttttatttatttccttgtatttttgtattgttagattggcctttatgtaaacagttagctgtacacctgtatcatgacaaaattgaaactcagggaacaaaaaagtttgaaacatgatgttaactggctctacattacctgattagtaagattatggcatcagctgactactttttttataaaacacacatgaatgctgaaatattggatcataataatgttccatgctgactttgttttaatgttttatcaaatatcaatgcatggaagaccatcattaatgctttgctattccctaaccctgttaatttgtttggcagaaatac

SEQ ID NO: 9756 - DNA, 586 bp, Oryza sativa
  Intron number 2 from transcript LOC_Os04g02780.1 (locus LO C_Os04g02780) derived from phytozome v7.0 (chr-ID Chr4; po s 1069351 to 1069936)
gcctacaggtacccactgcgacccccatgctctttttcagaatactccttcttaaacacaagccacagaaagaacaaactttgatttttagaggcacttttaatttccaaatcttcttggaaggataagctaagtcttgcatttttaatgccctgtagaaggatttgacagtaaagcacccatctttggtcagcttccagattaatttatctttcagattattcagtacaatcgactgaactttctgttgaaagtttatctccatgctaaagcaagttgtcacccataacaattctcctgaactttgtttctaaaaaaaaagaagaagaattctcctaaacttaaatccaatttcacccctcttttgtcactttggcaactgtaacatgcttggtgaaggtactgttataaatgaaaggatattgctcagctaatggtttcctaccaagccaactatccccccaaaataaatttgttttccccatttccaataattttgtcacaaaatttgtaaaaggttggttgtcacaaaatttgtgggtcttaactcttatgagctaggattggtttgttgttgtcagcatca

SEQ ID NO: 9757 - DNA, 1015 bp, Oryza sativa
  Intron number 2 from transcript LOC_Os03g10200.2 (locus LO C_Os03g10200) derived from phytozome v7.0 (chr-ID Chr3; po s 5175764 to 5176778)
ggcaggccttggtatatttcactccggaattgaaggttcttctctctgccatgtacaccttttccaaaagtgcaatttgtatgatggcttattttctctgcattcttcactgctgcttgatgttttagaaagagtagagctaataatcaacactactttctttctcttatcaagttgttactaaagcatgcattgagaaagcaagtctttccatgaatgaccattgcctttgtagtgcttgcttcttggtgataaattatgtttccttccctaaggatttctactagtagtaacttaactgtagtatctctcatcagacatcaccaccagtagccaaataactttcagtgctagcgtgtttcatatgaaatgagtaccagggaaagctatgagagtggggaggggcaccaatttggtgaattgtaaaaaaacattgttgtgcttgctttgtgtacaaagggaaggaggatgagcactttgatagtgctgggctacatgctggacttagggtagtgctagtatttaggggtgcaagggtttggggagtttaagatgttacaagggccaacaacaataaccccttagtaatttgaccaagtattgtttaatgttgctagttcatggtcacaagttttgggaattcccactagatcatttttgaactggtggtggcacatcattgttactctgatatattccattgtcacatatgatttaatggaggatatgaatattggataactcatttgtgcacgtttggctggtttgtaaagaaaaaaaaaatgcaccagtgtagtttctatttttgtcacagactactaaagatatgctatgctgcttgcaaaatatggaagacaacaaataaggctaataactggttacagagagaggagaaaatgtggcttgatcttttggttatacatcttattgaatggctttcttttgaaagaatatttcagctctggtttattgaataacatattatcctgatttgcctttgtctcatctgcagttc

SEQ ID NO: 9758 - DNA, 1066 bp, Oryza sativa
  Intron number 1 from transcript LOC_Os02g24205.1 (locus LO C_Os02g24205) derived from phytozome v7.0 (chr-ID Chr2; po s 14014913 to 14015978 reverse strand)
acacaagttatcaattccggtactcgtttctttaggtgaatactgactcatctacactttcttaattgaactggaaaaatgcatctagatttttttttctgaattcaattaatttattagcaaggtttccatatctgacatgatgcttcatgctttccatgcatacaatcagcagattaatgacccgtaaccttcatgtatattataatctgatgagtatgtgtcaatggttgaggacgtcaatcagatatcgattaaatgacctccaaatcatttcattatctgtatactttgttagcagcgatgcgttcacctatggtcaggtagctgctgcactaatctgcaaaaggaaaaaaaaaaagaaagagagaaaaagaaaacatagtaaggcattttgagcttaaatttagttagcattagttaaaaaaagttagcagttatataagttatttacatgattgttcgttaagatccaaaaccttttgcttacctgatgctaattttatggacatttgtctagttgtttataaaatcttctttatcttttttatggcacggagtaatctagcaaaactaaccccaagaaatcgtttctactatgctcacatcagtgggacaattttgacctataagaacagcagaaagaaattgccctttctattttgcttttaaaactagagtttctttgctttccattttcacctctgcatgaacgaagatcacaaccagaacttctgcttgggctaccctatagtcacaaagaactttgtcttgataacaagctgcatttcttttagatcacatatacttgtattatgctctctcaaaattatttgtttcatgttatattctgataaccgagtcactgccttatcctttagatattaaaatctgaattaaagtctaccatagctcaaattcaaggagctacattgttatgttccgtttcttcagaacacatgttttttctgttcatgaccttatttacattttcttaagttgacatagagtgctgggactgagaaatgcaggtgcagaactgggactttaaccactgtacaattca

SEQ ID NO: 9759 - DNA, 854 bp, Oryza sativa
  Intron number 2 from transcript LOC_Os06g51290.3 (locus LO C_Os06g51290) derived from phytozome v7.0 (chr-ID Chr6; po s 31052917 to 31053770 reverse strand)
ggccatctgtacttcaacaatcaccatgtcttgctccactgttccattgcttccctaactatgtatcagtaaatattaaaagcggaggtaatttaattttttaattcaaatcatcagatatcccctcacgtttaatatgagttgaaggtcactatatagtactccctccgtttcaaaatgtttgacaccattgactttttaatacatgtttgaccattcgtcttattcaaaaaaatttgtgaaatatgtaaaactatatctgtatatgaaagtatatttaacaatgaatcaaatgatatgaaaagaataaataattacttatattttttgaataagacgaatggtcaaacacgtactaaaaagtcaacggtgtcaagtattttgaaacgaatggagtattgaatagtaacctactgtttgagttgaaggttgctgtactacttactatttaacagcgactagcaagacacaaattggtcaagttttgatgtaatggtcagaattaggttattgatgggagttataacagacagaaactttgtcgtcagacttcacttgcatgcgatgcatctgtagatacaaagtcaatgaagaataaagtactaatagtactagtgcatttcttttaaaaccactatctatgcaagcatcacaattggacttgtagtaggctaaatggctccaactgtttcaagacatgtgaaaaaggttgagagaacatgttctctgagatgccaaatgaatatgaatccgtactactaacaatttcaaacttttaaatgagctagttcaggcatgaattttgaaatctgatgtatacctttttttttttgcagtgtggtgtaggaggacag

SEQ ID NO: 9760 - DNA, 637 bp, Oryza sativa
  Intron number 2 from transcript LOC_Os06g19680.1 (locus LO C_Os06g19680) derived from phytozome v7.0 (chr-ID Chr6; po s 11240265 to 11240901 reverse strand)
cgggaggcgtctgttgcaatcttcttttcgtttgagtaagctccattttctttacttctcgcttttggatttgtatgctctcttagacaacatatgcttaagagttgttattactatgagtagtatatggattttcattgctagatgtcaagttaattttgtaagttgcatttatagcataccggactatgaagcaattaaaataattcttacgtattgattttaggtaacagattcaatttgacttagtgtgttcacttagctatgcataaatttgcctaatatgctcataaatcctttcatttagatatttggtttttatattccaatttcctaatctatgatgatctcgttgagttttgcttgtttgaaaaaacacagtgctttaagaactttttagatcaccatgtccgactcttttttgacattagattttagtaagatttataagctgtataatacttatcttttttgaagcgtgggatgtgccttttgcacaatacataaccatattgactaatcttaccgttgcctgatgctattcttctctgtatctgactatctgccgatgatttcttcttgtgttatttcacaatattgagattcataataactcaaggatgtgcatatcaggtac

SEQ ID NO: 9761 - DNA, 930 bp, Oryza sativa
  Intron number 1 from transcript LOC_Os03g54100.1 (locus LO C_Os03g54100) derived from phytozome v7.0 (chr-ID Chr3; po s 31009097 to 31010026 reverse strand)
gatcgacgcgcggcgtcccctcagccggaggaaaggtaagagaagctctctctgtctcccgttgcctcccttgctttcttcgcacgaagagcagtggcatactggcatatggccgtgggactgtatcgagagcagctgttcttgatgtgtgctagtaccttatttgctgtttcgaccaccctagtcaatccctgcatcgtctcgcaaatttcttctacggtttgatgccctttttatggagaagaagagagaactggagaaatattatctaaacgaatgaggatagagataggtggggggacttggtcgacaaagaaatggacagatcgaggggagatccgatcagggtagtagagatcctcaatagtcaatacctgcacccttcccgtgaccaaagggcaactggtcaaaaaggtcaggctgccttgctttgattttggccttaaccagatcatcttgcctgctgctgctagcgtataataatgctcaagtcaaataacacattagctgattagggtttaggatgatggtaactcacctggggaaatggagcagaatggtttcacgtcctgctgctcaattagagttgctcatgaccagccgtgcacctctttccgatagaattcagtttataggaggcatatgcaggtgactggaattttctggcgtagcacacctgcaattggagcaatcagatattgtaggattctagcatgtaataattcacaaaaaaataatgcttagaagaatgcagcccctcggttctctgtgcaatcctgtgatatccagcaaatattgccttagttttacataacttttgagcttacaaatcctttctttccatcccacttatttgtcaaattgcacaacgttcatgccattttctgaattttaggtttttggctgtgaccgtaacagatccaggctaat

SEQ ID NO: 9762 - DNA, 402 bp, Oryza sativa
  Intron number 3 from transcript LOC_Os04g32920.5 (locus LO C_Os04g32920) derived from phytozome v7.0 (chr-ID Chr4; po s 19716962 to 19717363)
ggcgacggcaccttgacccccgccatctccggtaaaaaaagaaataaaatcaaacgcatcaatcgatcgattattagtcaacatttatcacattatgtcagtggtaagagttgggtttcgggcgatcttggctgtgttccgttgttggtttagcggcaatcggtcacgcttagtggtggccggttcggtgctagccttcttctggggctgtgtgttggtgctgtcggtgtgtgggtggtggtatacttttttttcctagttacgatcttccgaggttataatcttgcaattttttcctactctatctcgttaaaaaaaacatttatcacattatgtgtataccttgtgttgtgtgctttgcctgcagtgctctctgcggtgagcgggatcagggagaaagct

SEQ ID NO: 9763 - DNA, 924 bp, Oryza sativa
  Intron number 6 from transcript LOC_Os06g46754.2 (locus LO C_Os06g46754) derived from phytozome v7.0 (chr-ID Chr6; po s 28389835 to 28390758 reverse strand)
tgcacagtcaaggaagacatcctgggcatctcaaggcaagtatctccctcgatctcttccttctgtccacttatgcgctcctttttcagtgtttgctcttcatgaagttttcagtcgggacgggacgctaatgatgtctgaaacctttgctcatgcaagaaagcataactagtcatgtacttgtgtctagctagttgattcagaatctacatactccagtacaagcttgaaccttctgttctacagtagtggcataccataccattgctctgtctgctcttctccattaattctggttttggaaacttcagcctagtttggtgtcaaggtagacttgattgtcatatcagcacttgcacccttttttgccattgtctgtccccatcctggtggaatgcgatgttcagacttgcagcgtcgccccttgctgactaactctggaggagtgatatgtcggatctttcgtgggaaatcttgtgttgtcaggggaccaaacgtcggtgagtgaggtggcgtgcctctctacagttcgtccactgatgcagctccgatctcttgactgagttggatgactgaattcatgctttttttcttctcttgaaagagtttcatcatgattttagtgggttatgatgtaaaccctgcacaatctgcttttgcccaacccgtttagcaaacagaatttcagaagtcatgagaaaggttaagtcctcaggagttctctttgcgattctcgacagaattgaactgattttcataaaattcatgtagaattcccatatccccgagaaggcctaacagtctttctggtgaatcataccattctttaacaaatcatgtcaccctacctcctctcatttcattatgttttgtctttgaattgctgcagattttgacaaaccaccaagagccacgctcccaaca

SEQ ID NO: 9764 - DNA, 1069 bp, Oryza sativa
  Intron number 2 from transcript LOC_Os04g32220.1 (locus LO C_Os04g32220) derived from phytozome v7.0 (chr-ID Chr4; po s 19140925 to 19141993)
gcggagcagctcgcgtacgacgacgccatcagcaggtacgtgctccgattgatctcctcctcctccatctccatctctgccgcgcgcagccttgttgctttgtctctcctcttgctacgatttttcgcccaagattgagttgatctctcgttcgttcttgcgaccgagttgtgttgtgtgctgcaagatttcatcctattttggggggaaacgacgcacgcgcgagtttaaggtttttgtgcagcgaattcttaaccccattgcattctcacgatagaggtttcttcagacggattgaatcgataccaaccttctacgtactgcttgcaaaaatcaatccatgaacaattttaacatgaattttcaaaactctgcactagttaattttttcactgcgatggatgaacagggaaaatggattgatgacattgatgagcaactgtaatttttctctgtcatgtacatgttattctgacgaaattctctggaatataatgtttggttagcttcactgccccatatatgttgagctagttttggatctggaagacagcatataaattttcagaatgtaatataatttctggcattgagatcaacctttgataatttctgtatgtgacttgaagccaatgtttcaccatacaaatttctgttgtttctgttagaaaattacgacatgctaatgtactcgtttgatcatcaaaactgttcatcttgtttcatgcatatctaagtcatcaatgatcatggtatcccagtgaattgcttcacacatttgattaaagagaagagtgaaatttattctagtaaccatgcattctggtggatatagaatgatcgatagaaataaaattcgcattgagtgagttttgttgccaatgtcagcattctgatatttctgaattttgccaaagaatttcttaatcacgtacaattacttttttcatcagtgatcaactcataataagtgcgtacctgcactgtagcaactaacaatcagtgttgctcatggactgaattgattttggcaggctgatcaacaagttcgcggggcacgacaaggacg

SEQ ID NO: 9765 - DNA, 853 bp, Oryza sativa
  Intron number 1 from transcript LOC_Os06g17280.1 (locus LO C_Os06g17280) derived from phytozome v7.0 (chr-ID Chr6; po s 10002828 to 10003680)
cccagcgcgtcgtcgccgtccccgagcgcaaccaggtcgagtgccctaatctctaaacagaacaccccccgcgagttcttgtctctgaattttgcaagctactgttagaatccagatatacaactgttagatttatttctagtctgtactctgattgttgttagtgtagtcatattataagtgctttgattttttttcctactcaaaacttctttagatttgattaagtttgtagaaaaatttagcaatatctataacaccaaattagtttaattaaatgtagcattgaatatattttgataatatgtttgttttgtgttggaaatactgttatatttttttataaacttgttcaaacataaagaagttttgggctgataagtagcggtgtggatcatgataagacatagtcacatagatacaaaacgttactgcaattaaattttgcaatataccgtcgaaacccaaacatttattatgatcacttgcctattatgctgtaattcggcaattttggttctttgctaagctctgtttggcactgtggtgtatcgaatatcttaaaaactttactcttgttgtacagagtaattaattggaacacttttgctatgccgttgcaacaaaaactcactataattgataaatattctatattcatgtaatcctctagatttctcgttgcatcacattaactgcaatctagtcattgaaggccttaattcttgtactacaatgccaacaagttgtcattacctctgctattatgttattatacttttcctctattgtttgcgaattcttgcaagactgacatgttgtttccgctcacaggcttgcaacccttcgggca

SEQ ID NO: 9766 - DNA, 643 bp, Oryza sativa
  Intron number 1 from transcript LOC_Os05g03240.1 (locus LO C_Os05g03240) derived from phytozome v7.0 (chr-ID Chr5; po s 1310566 to 1311208)
tcggcggcggttggcgcgggcgtgggcggccggaggttagggaaagggctgacaggtgggccccacctgtcagcgcccgagagggagaaggaggccgggtgaacttcgggagtaggagggaggagcgggccggcgcgggaggaaatgggccggcggcccaagaaaaagaaaaaggagggaaaagaaaagataaaaaggaaaaaggattttcccagggatttaatattgcactttgcttattttaattgattaaaattatttccaaggctctgaaaattccactaaaaatcctgttatcatattttgacatgtagaacccaagaaaaattccacatgtcgattccgattattatttgcatttattaattagagattcatctctaggttaaattaaacaatttcttcggacgatttattttatgaatttagagaaagggaggggaacttcagggcgtgacatccaccctcgccaacgaaccccgccacctccaccatctccttctctctgaaaaccgagcaaaccaatcctccggccgaaatcatatttgatctttgtgtcatcgtctcgtctcgtttttccccttttgctctatgttgtgttgcgtaattcaatgtgtgttgttgtttgtttcagccagaggag

SEQ ID NO: 9767 - DNA, 903 bp, Oryza sativa
  Intron number 3 from transcript LOC_Os06g41440.2 (locus LO C_Os06g41440) derived from phytozome v7.0 (chr-ID Chr6; po s 24831926 to 24832828)
taaagttataattgcttcggggcaaacaaaaacatgtaagtcatctcttgttttgaaggactgatctagtttaatgtcataaaaaatgaattggttttcatttgtgtgtttcagttcagtttttcctagtattgcatgatagttctggaaatatgaatgattaaaattcttcattttagacatacctcacagtcttgaactaattatggtcttgttcggttaatccctcccccaaggggatttggaggggaataattccaaacctattgaggtgtggaattaatcccctttaatcccatccaatccattcctcatgtggattaaccgaacaagcccgtaagagacagatatatgaagtgactaatatgcactcttggcatagttaatactccctttgtcgataaatatagagcccacattgatttgaaggttcaaactttgtaacttttgactaacaattagtccaacaacacatatctgtaggtagcgtaccagggataccgttaagcttcatgttaaaaaatactttcacattatgctaatttggtaattttgctgatgcattctaaaagaaactaacattcaaaatttaatgttggaggccatgccaaatcataccatgccttttgttaatggaaggagtagtgaatattaaaagcagtattctccttaagtttttctaaccagtcgttctagttcctctatgaacctgctatattcttccattagtaatggattgttggcaagcatcagttttattcttgtagcttcattccaaggaaatgcttatagaatttctgtgtaatatctggaatttaattatctgaaccatatcaaggattttaactaagctaaaagttatctgcagacattgtacgtgtggagctcccgaagattttacca

SEQ ID NO: 9768 - DNA, 664 bp, Oryza sativa
  Intron number 2 from transcript LOC_Os03g61260.1 (locus LO C_Os03g61260) derived from phytozome v7.0 (chr-ID Chr3; po s 34779152 to 34779815)
caaaggacttggaatactcggcagggccaacagttgtaagttgattttgacttacccatgtctaatttctttgcttctttttctctctgaaaataataaattgagcagtgcagtaccacaataataccgtaggtgatgctattaacattttgtaggtgcacttatgtgaaaagatgattgtgcatccatatttgtctgatcagacaatcatgctcaattcaatctcacttgttcaaatccttaacctagtgtcgtctcttggagacattgattgcgaaatcaataggttctagaaaaacttaccattgaaatatctgacgatcctttgctgatgtagctctgaagaaaacccagaggaatgcacaaaaaatgaaagctgtttgaagttgtcgcggttgttttttatggttttatgcatgtggcatttccattttagtacatggttctgagctctacttacaaattaaatgttccacaggtcagatagtataggattaacagtgttgaacacgtatcttaaagtttagtgtgaaaaaaaatatatcgaatatatttctgcagttgtttcttgccgaaagtcacagctctgtttctgatgaaagttctctgttgttctggttggtttccaggaagtggcacaaaagattggtgaagtgattgccaa

SEQ ID NO: 9769 - DNA, 1027 bp, Oryza sativa
  Intron number 1 from transcript LOC_Os04g36050.1 (locus LO C_Os04g36050) derived from phytozome v7.0 (chr-ID Chr4; po s 21821840 to 21822866 reverse strand)
tccaacctcttccagaagggagagccgctggtgagaacgcgctcactgcatacgcgagattgattttagtgggggagaagcgtcttaggtttcatgtgcgggtttgtttgtttgtatggcagtgaaggggcggggaattttcggttttagggtttttaggagattttggttgttgtgatctttttttttctttttttttttggggggggggggggtaattgttgctttagtcgggtactgaactttagtcggtttgatgcgagaattttggggtttgggtgcgtgctggatgctttcgaacaactagatcatgcaaaagtatttgtttttttagcattgctggatactgatatgctgggaaaaggaggccatgattttgtttttgttagatgttatgatcgggattaagtttgacatcggaagccagtttcagcctttgagcgtagttttttttctttcaagaattgaagtatacaatataaaaagtgtatatattgagtgtacaatatactggatgctgcacaatttagatctgtatgtagatcacgtgaagatgtttggtgtttaattctcttgctgtctatggtgcttagtgtttaaattctcttgctgtccatggtattagtaggatattgacttttgatttgtttgtcatatagctcggaatgtcacagtattgcattgataaaaaaaacaactgttaagatcagtgaggtagacagtttggacgtgtggtctgaatgaagctggccatgtgatatatccagtacatggccaatcatttggtttagatcaaaattgactttatggtgtttacagtaggcttgtaggaatagctcatcgaagtaactactgtgcatttttttttgtggggaacatattaattcaagataataatcaaatgagtggagacagttggatttttatgttttatgtggcagaacttcttttaaattctttcatagtttcactgtttttcctctgcttaccgttggtttaatgtatggtggctgtattgctgtaggat

SEQ ID NO: 9770 - DNA, 787 bp, Oryza sativa
  Intron number 3 from transcript LOC_Os03g02670.3 (locus LO C_Os03g02670) derived from phytozome v7.0 (chr-ID Chr3; po s 991379 to 992165)
ttcaaatccaccaaggttaactcttcctctgtttcagagcttggaaatagatactcgcaatccgataatgtctgtagctgaaaacagtagtaccgagaatttatcttcagtggacagatttgtgcaccttaccttttctaagaagttcaaaatcacgtctacatggttttagttgaaaagcgacattttttatgcttagaagactccaatatgagaatgcaacatcagaggtgatgttcagtttggtgccaaactaatagctcaatcatatatctttctacgttaggatggaatggtactcctgtggccaaaatcaaataaattagcaagcaggataacgttgttgataagccccttcctcagcccatctttccttactatcaatttttattttagaaagtttgccaagaaaaatacttatagacttatagtatctgcttaaataactaagattttgcgaggaacatgatgcaaatttgggaatgcaaaaccaatatactagaattagttctgaaaaaaaaatgtaacgttaaagatagcgttttcctgtagtgcttcctcatttgtcatcccttggcagtacaatataagctgatatgaggatataagtgtttgtttttccatggattattaatatccagtgtttcgcaaatttccattgaaacaatattatttcccaaaaaaaaatctccaagtggtagtttggtcaatattgaatattggtgatgtctgaatgtgatttcagtgacacacataaacccatccttgtattcaggttttgccagtg

SEQ ID NO: 9771 - DNA, 834 bp, Oryza sativa
  Intron number 1 from transcript LOC_Os05g08820.1 (locus LO C_Os05g08820) derived from phytozome v7.0 (chr-ID Chr5; po s 4868150 to 4868983)
cggcgccgagtccaggatcaccgcgctcctcttcggtacgtactcccctcgctaaaaccctagcccccctcccctctcttcccgtcgcgtcgcgggtgctcgctagctagcctagccttcggttcttcccggcgcgatcgttcgtgctcacgatgcgtggcccatccgatttggtctcccgctgctcgattcggcgccgtcgaacgtagactcgcgaaggcgtccagattttcagacgatgggtgcttcttctgagagattttagagcagtttgatttgggggttcgaggagaaccctgggagagttgttttatgttgaacgagcaaatccaatttgagttaggttcccccatttcgcttcggtgtgttacggctgattttgattttgtttatttccatgtcgtttatttgtccggtgcatttgatttcatccgaaccaggtttctaaaatccaagcgcgaattagtgttggaattactttactctacttgataaatgataatcatgagatgcacgcatatttcactttgctaccttcgatcgtttcctcacatttagcaacaaatcatcaaatttactagtgtcgactgcaactcgatcgcttgaaggattccaaattaatgcacgaacatttcacctgctagtttcaaattacagtattgattgcaacgggatcgtttgctatattccaaattaaacaccgcgcacattaagctcttggtgaaacagtgacagtgtggcattgctaagctaacaacgccggtgttgttgttcttcctcttggcacattggcgtgcagacgtgtcgcagcaggtgcaggaggccctgcagggg

SEQ ID NO: 9772 - DNA, 834 bp, Oryza sativa
  Intron number 1 from transcript LOC_Os03g10450.2 (locus LO C_Os03g10450) derived from phytozome v7.0 (chr-ID Chr3; po s 5321966 to 5322799 reverse strand)
gtcggtgctcccgccaggcaacccctggctcggaggtatcccctcttcgttactctgggttcttgtttgctcgctccctagaaatatactaagctttcgtttgttcaaacatcttttatttatttgtgaaaaaggctagaatttgcacttctcatgctagtaattctaattctagaatcttgacattgttccacggacgttgaattactggctactacttatttacttcgcccaaacgacttgtgtttgtactcttgtttttcatccaattcattcaaaaggagatagtgtttgtatatttaattgaattatcttgtataataccttttcatgtgggataatccccgcgaattgtcttttaatactaatggtaagaagtgaacatctaggatgttttgatgattgaatttgctataatcagagtaccgacttcacaatgctacttactgtaaattgtatctgcacataagattttttatttttcttcaacaaatttggggctttcttggtttgctaaggactgtggtgcaatagtaatgaggaactttggggtttatacacaaattccatccgtggttctcccaaatttttcatatatatgttaatgcaattgagtgatgctctcaatttgacatggttccttgagacttgatgtatatattatcttgttcagcacacttgttaattgctatgtaaaatttcatactgtatggaaatctcttttggcacatgggagaactgtgtatttctttggttaaaatgtttattcagattactgcactgacacacttgtttttctcagttttgttaaggtcaacagattatcatctcaac

SEQ ID NO: 9773 - DNA, 899 bp, Oryza sativa
  Intron number 3 from transcript LOC_Os06g39875.1 (locus LO C_Os06g39875) derived from phytozome v7.0 (chr-ID Chr6; po s 23689075 to 23689973)
gatactagtaagaatttattgcgtcagattcagacgtttcaatcatatcttttgtgcctctgcgaatttgaaaccatgatgaattcctgtgaacaaccacattgaccataggatcaggatggtgactgttgaatgttttcaatttagttgcaaagcattcatctcttagcaattgtctggtaattcaggaatatgcatgcaagtattcgggatcttatatcggcaatgttttgagcagcctaggcagattgaaatgacttaaatattactccctccgtttcacaatgtaagtcattctagtattttccacattcatattgatgttaatgaatctaggtagatatatatgtctagattcattaacatcaatatgaatgtgggaaatgctataatgacttacattgtgaaacggaggaagtatgcaagaagcagcagaaaccgttcttttgtatctgcaagtttacagccatgatgaaaaatcacattggtcataggaatccccggaaatttgattactgaatgttgatctgatgtggtgactatttactattagatctttttaattagttgcaaaacattcatctcttatagcaaatggagtatgtgataatccaggaacatgatgcagtactcaggatctagatcaattatgttttcagtagcctcgatagcttgactgttaatccccaaatcttctctcgaagtgacagaaatgtcttcaatgttatgtaagaagcagtagaaatccttactggaactagatttgtcggcataaataaacttctcaaaaaatttagtgccatgatgttattatgatcggagaattatttttgttttgctcatgtgtacagtgtagaaccagaatttacttatccctcctgcttttttcatcagtatcc

SEQ ID NO: 9774 - DNA, 888 bp, Oryza sativa
  Intron number 1 from transcript LOC_Os06g42310.1 (locus LO C_Os06g42310) derived from phytozome v7.0 (chr-ID Chr6; po s 25416217 to 25417104 reverse strand)
cgggatctatccactatccgaggagcaccccggaggtatatactgaaagttaattagctatggatatatttatcgctatgcatgtgtgcatgctgcatgcaaaatacgtgtgattttgttatattcttcatatatatgctatacaaacaccaatgcaatctcaaaggatcatacaaactctaaaactaaagccgtacgtcatttatatttactctaattatttctcatagatcatttatttctactctagatgtctacaaatttatattctatctcagtttttctagtcatacacccgcacatcattatttttttttcaccagttgcttggctcttgagatcgttaaacatatggtcgaatatgactaacagaaataaatctgtacggtatttatttaagtagattaatcagcgcatcatactttcacagtacgtataattgtcctatactagcgatcgactagtcatcgtttgtacatgtatactttaagtactcacatgaagatcagtgttaattagctatacttacaggctatatgtcgtattaaatagcctaacccatggccaccatctaatttattcgttgatctgtcgtatatgcttgaaggctagtaaaaaactcagaattcgtatctcatatatatacatatcacgaatctcagatacacacatgctggtatacaatttatacagttatacaccgggagcgatatccctgttagacaaaaaaaaatcattctgatttgtataaaattttaacaatgttaactttattttcaatttaaatggaaattctagtttgatattttattttgttaatgtggtagtttttaattataagatctgctcatgttgatacacgtatataacatgtttcgcctggtgcag

SEQ ID NO: 9775 - DNA, 918 bp, Oryza sativa
  Intron number 2 from transcript LOC_Os08g26120.1 (locus LO C_Os08g26120) derived from phytozome v7.0 (chr-ID Chr8; po s 15885938 to 15886855 reverse strand)
aagtgacaaaccttccaggtataaaagagaaaaatattctaaaaataaaacataattaatttactacatgattctttttgaattctacctttgaacgtaaatattttttgttgttgtttagccagatgaattccttatcccgtgctacttaatttgttccaaatttgctgcttctttctccgagttagttgaataatataacgaacacatttggtgtatctggaagagggctgatatatagtaattaactacctccggatttaagtacatcttactatggctttatttaggcaaactattcaaactttgaccatcagctcttaggtacaaaaacataaaaaatccatgtggatagacttgtattacaagtacttttacagtatatattatgatgttgttagatactatcagcctcaacgtttggcatattttctgaatatgccaaatggcatatttgcaaacgaaaatcaatttgtgcatgaaacttttatatatgtgttcttagcgatctaaaagcaaaggctgaaaaataaacttcgatgaaaaaaccccaaaatcagctccaaatttaacgttgaaaatttaaattttggctgataaggatatgaatatgccaaacgatcaggccctatattatattctattagacaaaggtagtggtcatatgttttacactaaagtccaaaataaagttaacaatgtcgtatattttaagatagatgtattacaagaaactcttttctggcaagtagatatatagtctattacacattaattggcatacatatataatgtcgatgctacacatattacctagcttagctaggttgtttaaatttgttgaaaataatctgtagaccatccaacttgtgtacacatgtaggatcgaaaggttttacaccttctcggaacaacaac

SEQ ID NO: 9776 - DNA, 384 bp, Oryza sativa
  Intron number 4 from transcript LOC_Os05g07070.8 (locus LO C_Os05g07070) derived from phytozome v7.0 (chr-ID Chr5; po s 3719620 to 3720003 reverse strand)
tcctttatctgtgcatccaagaattcttcctccaggttagttttgacttcttctcttctatttgcagcttctgttctaatctgatgcgtactttagtctgaactgtaggtacgtaatcatatctcatatgtcaactactacttttttttcttctgtttgttgagataaacccaactcttatgaattatgactatatcagcattcatgattcatctagtagactaatgcaactacttcctttcaagcatagctttttcccactcaattttaatctagtccagtttcaaatgaaatgtgtgcttcctgataaggtggtatgcccattctctgaatttggtattatttaagaagctaagacctttctctgtttttgtctagggcctg

SEQ ID NO: 9777 - DNA, 387 bp, Oryza sativa
  Intron number 2 from transcript LOC_Os05g07070.8 (locus LO C_Os05g07070) derived from phytozome v7.0 (chr-ID Chr5; po s 3723184 to 3723570 reverse strand)
gtcaggtattcaggttagtgaatggttccagacatattagttgcatatatataatgagtaaattggaagttatcacttttaatcatcttaatcctttgtgtcattctcacctttacaaaaggacatataccttctcattcttctcccttttctcaaactgttataaacttataatagtttcctttgttttctctagcccttatagtttgttgctgttctaactctaaaaatgaaaactaaaacaaggggaatttatatctttgggaatactacctagctttttatcatacaaatgttgtgtaatacctttaccagggtattataactgttaatactttgaactgagctactaatgacattgcaggtactaattgattcttccctgta

SEQ ID NO: 9778 - DNA, 578 bp, Oryza sativa
  Intron number 3 from transcript LOC_Os02g57540.1 (locus LO C_Os02g57540) derived from phytozome v7.0 (chr-ID Chr2; po s 35250782 to 35251359 reverse strand)
gctaaggctgtcaagaaccaggtatttggaagataaatgcttagtttcatgtcattattttgccttgtgatgctctatgctttagatgcactgttgtgatgagccttaatatctcgtattggcttcattattcttttctattcactgctgtgataagccccaacatggaagaaggctcagagattgctcctgtttttctgtgaaatactcctgttacagcaattggtataacttgatctgaaaattagtaaattgccaattaatcacaagctagtctgtaaggaatgttttgtttttatcaatactcgaatcaaatttttttcccatgtttgaggttacaatgtgtgatgctgctgtgatgagccgtaacacataagaaggccaacctatcaattggttcttcgatgacaaatacttgttacgcttggcttctgagcagaatcaagctgctactgttctctctacagcagctttcctgtatgtaccttcctgaagaaatctttgatagcttgtgctcttaacagctgtttcttttctgcgcaggttagtgacaactactacaggccagatctgaccaa

SEQ ID NO: 9779 - DNA, 839 bp, Oryza sativa
  Intron number 1 from transcript LOC_Os05g18294.2 (locus LO C_Os05g18294) derived from phytozome v7.0 (chr-ID Chr5; po s 10545613 to 10546451 reverse strand)
cgaagtcgccatcttctgaagaactgcagcaaaaggtaggaataacttaccagtgatccttctgtataacttataggtcatgacaaataacaaatgcagtagaagttactgcttcaaaagcattagccatttagcatagcaagaaaacgaacggggcaaagagaattggggtagtgattgtttcttgcgtaaattaatttcagcaacatcccattttttatggtcgaagtatcacgtataactccaagtatatggttttgaagttttgttaaactagttcaaccccatgcaagttgagcatgcatttacttcaaatttttaaatagaatatacataaatattttaattactgatttcttgtttacagctagctgttgggttaactcttcactgctttgaattattttatttcagatatgctaatatcaattgagatttgcatagggttttaagaagcattagaccatacgctaggttcataatatatatagtcttcgggaaagactaaaatcggcatccgatttttccgaaaaaaattggacgttgttttgctactcaaaaaacatgtgtcaaatgattaaaacaatgaaacaaatttgaacaattaccgaaacattttagtataatatatgaaacctcaaggttcaaccaccaacaaatccgcatgaatcaacaacaaacttacagagcaccttgaaaaaccacattgcaacatttcgattcaatacaaagaaacatcaagttacaccagttgaaaaatcaaaaaatcacgctcgttcacactattctcgtgcttctctccagcgcgctaccagcggtgagccattgatatccacgcc

SEQ ID NO: 9780 - DNA, 349 bp, Oryza sativa
  Intron number 2 from transcript LOC_Os07g22930.2 (locus LO C_Os07g22930) derived from phytozome v7.0 (chr-ID Chr7; po s 12919481 to 12919829 reverse strand)
ttctagggggactgccccctgctcttgctgtaaatattctttgtcacgtattgttaaatccaacagtcagatcaaacctcagtgtttctagcaaaaaaatatattcacaaacacaggggtttgatctgattctgcaaacaatttatgctcctgttcgattgcacattcttatgcaactaggtttcattgagataactggttgaagttgagttaacaagatacaagttttgtacatcatgctaatatttaatgcaggatttatcattcatatgttttttcctacattgcattgcacttgccctttatgtacagttcatcttgtgtgaagaaactcattttatcataggca

SEQ ID NO: 9781 - DNA, 747 bp, Oryza sativa
  Intron number 1 from transcript LOC_Os08g14770.1 (locus LO C_Os08g14770) derived from phytozome v7.0 (chr-ID Chr8; po s 8885682 to 8886428 reverse strand)
tgatctctatcggtgcgcgcggttcagcttctgatttatgtcattcttcatttttggctagtcgtagtgaattcaagtacttgaatgtgtatgcgttcgttcaagtagaaattaaattgggtacatttgattactttagcatgttttgtttcgtgcatattattcattcaatgacatttgcttggtcgagctaattgatgtgatgcttgcgctgtatagttcctctacttaggagagctcaacgctagcaaatttcatctgcctcttacagatgtaagagagtaatgtgcacgttgtgaatgaacatattagctatgctaaattgtggcgagcaatcttgttgttttaatattttgtgaggttttatgttctgtacatgttaggatttttcatttgagtagttgatattcatgagctgagtaaatattcatgtcctacatcaatttctatgttcaatttacactactgtacacagtggcatatccatttgtcacttcttttaatatatgttttattcgttcagaagttatcacctgtggtgaactggcaatgccacctaatatttcttatcatgcattaaagtaccgtagataccttgaatttcttagaatgatttatggagaaccttgtaatatgtcaaagttaaactttggtatctctacatgctggtttgctttactttctggtgtaattgatcacatacaactcttaacaggtcctctaggttacctgcagttcttgttggag

SEQ ID NO: 9782 - DNA, 718 bp, Oryza sativa
  Intron number 1 from transcript LOC_Os07g23960.1 (locus LO C_Os07g23960) derived from phytozome v7.0 (chr-ID Chr7; po s 13555611 to 13556328)
gggatatcctagacaagcctctgctcttcctgcaggtatatatatgtctcaattgattagcctttcagatgttttctttcaaattttaaatttacaaccaaggcatctgttactacctgaccgattcattaaaattttacgcgcacggtttgcaatttcgtttctaaatttcgggtcccccatctccccctagcgcgaaactattttgcctaatgtttcttttttcttttctgaattaagaaaaaaaacaccccatttgttttagtattagatgtgacataggagtagttagtagtagtattatgaatttggacaaaccccacaacatagcctgttttgctcatagcatagcagtactactccctctagttttttatatgacgttagctagtttaaatttatagtagcccacgtcatatgcacggaggtagtagctaggttgtgttccatttagcactaggatactatatttggaacggaagtagtattcaaattggctcaacgtttattcaaaattcaaattattttggatcgaaaatattccaaattttcagaaattgtggatttatcagtccctgaatttttttttaggccttccgaaattgtgttagccctgtgttaagcgtacgtacatatgtttcagatctgaatgtctaacaatccgttggttaatcctatctctgctttcgaacgaatatatgtaggtgactcaactgaa

SEQ ID NO: 9783 - DNA, 628 bp, Oryza sativa
  Intron number 3 from transcript LOC_Os04g34984.1 (locus LO C_Os04g34984) derived from phytozome v7.0 (chr-ID Chr4; po s 21093226 to 21093853)
gcctcttatttttgctctaagttctcttataaaaggtacaccgtttactctttctaaaatgcacctttggaagggagttggtgtggaatcagtacttagcaacttttaagttcttttttattgatttgtctgtaattatctgtgcaatacataatttgagtggaaaataaagtgttggttcctgtgaccctagtggtctcaggaattaccgagcagtggtggtctggtggaatcgttacatactgtaatactgtaaacacggttcgtttttacaggtatactctgatgcagtgttgacatttatgaatctatttacataaattgctgaacatcatatcatgtcattgcattggttggtaaaatgaattgcttgcagctcacagtttgatgttcttgctccacttcacacatcacggtttcttccttcaatatgaaagaaaaagcatgtctttttaactgttgttttatttttcttaaaaagaatataacttgtgatgctcccagtttcaagttctatacttgtaaaacttcatttagttggttactcataaaatttcttttactagtttatgaactttacttaaatgttgtagacttgagcgtagttcgagacaaaaggactgaactg

SEQ ID NO: 9784 - DNA, 946 bp, Oryza sativa
  Intron number 3 from transcript LOC_Os08g17600.1 (locus LO C_Os08g17600) derived from phytozome v7.0 (chr-ID Chr8; po s 10760196 to 10761141)
gaagcattgttgtccaagattcctccgaagtcactgtatgttctgttgctactacctttttctttatataaaactgaagataggtggagttttttcaattctggcatatttccttatgctaaagcctaaatttattccgaaagcctatatactggcaaattttgtacaaactgttagctaacctgtttacttaatgtgacgtatcttaaaattgaatttatcagctattctttaaaatggaggataatgatgtttttgctcgtttataactgatgtgtggacttctgacgcctctgcttcaccacctatggggacccagactagatttaaaatgaaatacttcctctgtacaaaaatatatgaactacaaaggtaactatattttgggatggagggagtattgtaattgtatgatcaggttttgtgttattttttcaatgaccttagttggtgtagaaccataagagcttgtgttggttgtggagcatgaaaccaactatgctagagatgttataagatgcaattatttggcatatgttagaatttaagggctgtgcatgtagttcctgtttgaaaaatatccattgccattatggtaggaagattgcaccttatctcttacgtcagttgtaaggacatgttttgcctgcttatgagaaagatatggtgaacgccacttagcaagttaattaatgtggtttgcagtatagatatgctgatagaaaatggtttgtcattaactagttaggattttttttttatcgaagttatattttactaatgcaggaacctgcacattttaacactgacacatagttttatatttatatggcatggcagtatggtgtaatggttattggaatttatacctgccaaaagttctcaattcctttacttttgaattcatgcagcagtgacaaggagttacacaagcgccaagacacgc

SEQ ID NO: 9785 - DNA, 774 bp, Oryza sativa
  Intron number 1 from transcript LOC_Os04g52100.1 (locus LO C_Os04g52100) derived from phytozome v7.0 (chr-ID Chr4; po s 30762663 to 30763436 reverse strand)
gcaccgccccccgccgtccgtatccggtgtccgaggtatctattcatgattcatcactcccaatatgatggcgatatcgtcggattttggcatcgccgaaggttggctggatgggtggggggttcatgaaacttctataaactttatctcgctcagccgcgtgtgattttaggctgctgttgttgcggcgagcgtctcgctgtgcgaggtgacaaactgacaactttgggtttaatatcaggatattctaagtgctagattttggtttagtcaggggctttaatcagtcactagtgttgctggaacaatgctgtgaaggatggagaaggtttttttttctctctctctctcttactgctgaaaggcagaaacgatgctacgaatcaggaataatccgaggagtagataaagaaagttatgttttccgttactagagtctgaactctgaacaatgctatgagcaattggtagtgctaatggaatgggtataggagactgagtggttcagtgtgcataatcaataatatgatcaaactaataatgcagttaagtgacagaaagaacatctcgtaactcaaaatcaatgattcttcttataggtagcatttgcatatctgcatctgcaacgatattatggaagtatgttcagtaatacattatttctttctattactcaaacaaagtttgttttttgggaaacgacaaacaaagttatgtttgatgtcttctaatttttaaggaaaaagctgccttcaaaagcctttccttgtccaa

SEQ ID NO: 9786 - DNA, 446 bp, Oryza sativa
  Intron number 1 from transcript LOC_Os04g53210.3 (locus LO C_Os04g53210) derived from phytozome v7.0 (chr-ID Chr4; po s 31503654 to 31504099)
ggctcgatcgcttcgatccctttgcctgagaccgagtaagccatttctccctctgatcctcctgtgaaaatttctcctaacctttgtgattgtttgcctggtttctcttttattcttgcatgtgttgtttcagtttcttgtagcgtgattcttggagataatttacaaggatgagggttttctgttatttcttcccgaatctttgggatcagtcagatctgttctttttcactgtacagttcatcagtaatactgttggagcttcgattggaatcaaagtttagattctgcaaaccattcttcttgattgcatggcttcatttaatcatgcttcttctttttcttcagtttttttaaactgtactgtactagaggcagttagagtataactgttaatggatgaacttggtggctgaacttctaatggtgatgacttgagcagagaa

SEQ ID NO: 9787 - DNA, 891 bp, Oryza sativa
  Intron number 5 from transcript LOC_Os07g29770.3 (locus LO C_Os07g29770) derived from phytozome v7.0 (chr-ID Chr7; po s 17500372 to 17501262)
ctttgcaatcacctgttgctgttttacttcactgggtatgcacaccacaccaagttttgagaaatattttgttgtacgatcgtagatatacgattctcttgtttgtttttgacgaaaatatgattctcttgtcaatccagaccaaaggttcgaattcatttagacaggtgcaccaagaaataatcgtgttacttatgctatggaaggacagaatgaaaacaagatgcaagcttgtattgtcagtatcaataaaaaagagaatgataatttgttcattatctactttgggtgatgcggtcattggtttttataatttgacatacttcaaatttactgattgatttcattattttgcaaatacatccaagcatgctgtgcttgtgcttgctatattgcctatatatgcaatcttctgcttaaaaaaaaacagttggctactacacttcctgtacgtgggatgttttccttaaaatatttaattgaagcaaatgtcagcttggcagaatttgcgttattaaaaatatggtgatgtttcctatcatgtcttcagtcttatatctacattactagctatttctttgaaaacttcggcaaagaaccagtttactgaagcattctttccagtttacattcctggtcctcttttgttgagaaaatcgccttgatttcctttgtagattcctcttgaccatgtctcttaatatgctgtatactgcatttatagctcatatcatacatgttgaggttatgaatgtgtattgtgcattactgattattttgaaaggagcatcactttttttactaatatctgtttacaccaatgactagtatatttatcgcacttccaattttgcagccacttactttatatcattgcgttcaactatcgca

SEQ ID NO: 9788 - DNA, 1037 bp, Oryza sativa
  Intron number 1 from transcript LOC_Os06g11980.1 (locus LO C_Os06g11980) derived from phytozome v7.0 (chr-ID Chr6; po s 6394841 to 6395877 reverse strand)
cgcctcggccccggccgcgacaccttcatttacatgtaagcaagcaagcaagctgctctgttttttttccctttattgcctcttattttggtcaaatcttgcatgctttcctcgagattgatattttttcaaacaaaagatttgcggttattttgatcagttttggtttgtttgagctagttcttgctgatcttgagattaagggattgactggtttatgccggtcttccttaattattttgttcttggatatgtactagtagtagttttggatgatctgatattatgttgaggaaaaaaaacatatttcgatctgtgccttttcctaagttgaaatgagttcttgtttgatcagattcttcctgttttggtagaatattccgtctgttcattgcgtttgattctccctatagggtgtatttagatccaaactttggatcttgcaaaattccatcatatcaacctgtcatacacacacaacttttcagtcacatcatctccaatttcaaccaaaattcaaactttggatttaactaaacgcagcctgtctttataatcgttctcttttttttttgcgattaataaatactgtgttgtatgtatgcatgaatgtgacacttgtgcggtgccgctccgtttgcaagaatcaagtacaaataggatgtaaaaaaaggaatcagttgctccgtttggtttgcatgattggatatacagtcatgggcatggctaatcatcaaaataccttttgtgtcactcactcttttgcatcggtcggatgaacaaagaacgcattttccccccttttcttctgaaggaaaaagaatcaaaatttcccctttcttggtgtgcatgcaagtggcagtttttttgaaaagagaaaaaggctatcacagtagctgatctgcccttctttaactaacaagaagatagttcattaattaatcaaactacccatattacttttttttttggtaaatgaatcataattgagtttttgttcttgaattcattcaggggtgaagtggccttctgcagcc

SEQ ID NO: 9789 - DNA, 657 bp, Oryza sativa
  Intron number 1 from transcript LOC_Os06g12876.1 (locus LO C_Os06g12876) derived from phytozome v7.0 (chr-ID Chr6; po s 7046483 to 7047139)
gacatccttccgtctcggttcggatcggattgaaggtattcgtcctcctccgcccactttgcgcgaggcaggcgggcgcggtgtagattgggaattgggatggatgggcagggagaagggagggagcggggcctctcttcttacccccaaatcgtacaaatttgcgccggaaattggtccaaccaacaaccttgttgttgacatgttagcacgagaggaatggaatgttcttgctttttttagttgttcgatccttggttgattgtagtgaatgccagtgacggtgagtggcaggagtcattttggaattttagattggaaattcggagaccagctgcgaagggatccggaacttaagtagccccacgttttagtttgtctacatttcgtccaattcctttgatggttttggatttatttatttattttgtctggatatgcatcgttggcaaaatcttctgcactattttgctatgttttatgttgcagttaagtgtcagggttttagtgaggatttcagtacctatagattatagttgttttcttgaaaaatctgtgatttttttaatccctcagcacactgtacacttaaaaaaatattttagctggtacatttcctggtataattaactgccgtatctgtatgaaaaagcagga

SEQ ID NO: 9790 - DNA, 627 bp, Oryza sativa
  Intron number 3 from transcript LOC_Os05g03410.1 (locus LO C_Os05g03410) derived from phytozome v7.0 (chr-ID Chr5; po s 1419784 to 1420410 reverse strand)
tgcctacctgaggtttgcctagcatctctcccttaattactaactactactccctccatataaaaatataaggcatattttttttcttgttagaacaaagctttgaccaactattgctttattactaatatatcatttatgtcacacaaaagcataatcataagaaagtacttttgaatatgagtctaataacatcaactttgtgttgcaaaaaatatattctaatgaagtaattgttggttaaacccttgttctaacaaaacaaaatatgccttgttcggagggaagtatcttttgaagcataagtaagtaagaagttgttgcgatcaatatgtaaaaaaaactgatagtacttaatatctggtattatcttatatttctacataatagtgagcaattcgttagtattgtagtgagcatttgtgtctggaccatttttaggttgagtttatttaatagaaaagaagaaaacactttcaagttgctctcagtaaatcttaattctcaaagtatgatattttaggtaaatgtggtgataaagctgaatgctaacctgcacctgtattttgtatttcattggtggtttttgcagaagatcttcttggatactactagagaacttgcaaa

SEQ ID NO: 9791 - DNA, 717 bp, Oryza sativa
  Intron number 1 from transcript LOC_Os06g41384.1 (locus LO C_Os06g41384) derived from phytozome v7.0 (chr-ID Chr6; po s 24810086 to 24810802 reverse strand)
ggagggcaccaacggcgccgccaagcgcgcgagaggtgagcctcttcgtggtttccttcttcttcttgttttttttcccttttcttggttgctggctcttccattggaaggatggctggttcctagggtttctccagccggctaccttgttggggggctcggattctcggcggcgctccggcttggttttgagctgggtggtgattggtgaagacgggagacgaagatttggggggtgttgggattggggagcttgtggccgccttaagcctttcatgtttttttttcttgttttgttcgtttggagatgatgacggaaggctcgccactatttttttaaaatttatttttggcaatatttcgcaaagagatctagaaacgcgattggtgacctagtggacctgctaaatatgtgaacggatctagctgctcgtcgaattttcttgagtgagttgaaagagatgtccgatttctcaaggcgttaatttgaaagtgaaactcattaagctctggatactggacattattgtattgtaccatttaccttttttttttctttctgagaaggtaatgctcagtggattttgaaatgattaatgtgtacatgttgtttatatacatgccatgttttagtaaaaatcaacgctattaaccggcggaaataataaatttggtgtaacagcatcggagtcgtctcaagtgggtgtaggaagcaaa

SEQ ID NO: 9792 - DNA, 1015 bp, Oryza sativa
  Intron number 1 from transcript LOC_Os08g02460.1 (locus LO C_Os08g02460) derived from phytozome v7.0 (chr-ID Chr8; po s 985837 to 986851 reverse strand)
gctccgatcagatcgccgcgccgccgctgctccaggtatggatggatggttccgttcctccacgagtccgtacgtgcgaatccccccccccctcctgttgctgttagtgttggggtttactcgtgttccgcggcagttttggatcgcgttgctggtagccctctcgatcgtgttagctagtttaggttgctagattttgaagcgatccgagcccgagcagtgtccgcgattgttagggccttcttttttcccatgtggaatattacatggtgaaatgacgcatgatagttgatactcctacttgatagttgatactagctggtcggatggcagtaatgcatggctaactagcaatttccgttgcttgattggtataaaattgatgaagagggaacttctctgcttttttggtaggagtatatggatatggtgtgccagggaaatttttgtagctatacttgctataatggaccataatggataaatgagataaattagttgctgttttgtttcctttaatccctttatgtcattgagcgtgccttttttcggctggtcactatgtttgattctgtagttgatttctgtttaaactttagagttcaaccaatctttcataagtgtatttatttcactatatgatgttaagtaataatagtcctctgtatactttgccatgtgttaagggatcacgttcacatgtgtgtcgtgtgggcgtgtaaccttgtattagaacagatagattagtgctcaagcatgcaggcaaattccaaaaattcagaattgtttggtgtcaggttttcttctatatcctacttattgataaccttgcaatgaaaaaaagctgcatgcctacaatgtgcaggctaattccaaaagtcacattgtatgatgtctggttttcttatagatcctacttattgacgacctaatgatttcgtctaatatatcatataacatagtggtttgtataatgaatatcttttaactgggcagggtacctcaaaaatagaag

SEQ ID NO: 9793 - DNA, 885 bp, Oryza sativa
  Intron number 2 from transcript LOC_Os03g51350.1 (locus LO C_Os03g51350) derived from phytozome v7.0 (chr-ID Chr3; po s 29379786 to 29380670)
caaccctgggaccgaggtgcaccccagccaccctggtacgtgcactgctgctagataaaattaacgaatttgctatatatttatcgataaatttcctcaaaaaatttgtcaagatgcaattacagtacaatcgtagtgtaattacactgtaacttgcatgtaattacactgtaactataatgtacaacttgtatgtaactttcaacaatctctcggtaatatgttatttcagtaaaatagaggtcatggaaacaaatccttttatatatgtgtgtgctatgattttttttcttcctcaccagaacaaatcttgtaatagatctaacgattcaaaattacgtgaaacttaaatacaagttacagtgtaattacatacaagttacaatgtaattacactacgattgtactataattatatctgtcaaatttttagtagaaaatttgtcgacaaatgtataggtagtccctaaaattaatttgacacatccttaaatatccgtcttgaaaataggtacattaataaacatatccactacgaatcttgaatctggaaggatgtctaatgaaggatgtctaattttgtttcgagtaattttataatcttgagaaggtactgtaacgtatcaaaaattaaaatttagtgtaaaatttgatctctttataattttacaatagaaaagtgatacctccttgaggactaaaattgccttttgttttggtttataccgagtagttgggaacagtggttacaggagggacgtgaacttaattattaatctgaaaatttggattttgatctctgttttgattaataactggggttgctttggttgtactgcgatgtgtgcagagtacgacacgtcgcaggggtcggaggtgaaggag

SEQ ID NO: 9794 - DNA, 683 bp, Oryza sativa
  Intron number 1 from transcript LOC_Os04g48140.1 (locus LO C_Os04g48140) derived from phytozome v7.0 (chr-ID Chr4; po s 28463264 to 28463946 reverse strand)
gcgtcccagtgccctggcccgagagcctccacaaggtgcgtgtgctgtaggcattgccgcattggcgcttgcttccactaagccatagtagaaaaatagcacctgaagtgactgcctactgtggtctaagcttactgactcggtttccatgtattttggagaagcgtgagggggtaatttgatctgatccgtgtgcggttaggtgtgcttatggttgcttctgttggttatggaattgcagcttggtgctagtgtatgaccggcttctgcatcttatgctgtcaatggttagatgcacgtggctttctgattatatgcatgttccatatgggtttgcagatacacgattgcaacttgtggagtttactgaatgatgtataggtcactacatttgtacaacaggtgttggttagttgtgtttcgtttgcttagaagtaatttttggcaagcagaaaatgttggcatttggtccatcagatcaattgcttcaaagtttcatgtctagcccctggaaaatttagattgaccttacccactaataatgcgtaattggactggatggtataaattaaatgaagagtaattttgttctgattgcatgtctcaacaggatgtagactaatcgttccaactttctatggagagttggagacttatttcatttaattattctctatgcagat

SEQ ID NO: 9795 - DNA, 902 bp, Oryza sativa
  Intron number 1 from transcript LOC_Os08g13100.1 (locus LO C_Os08g13100) derived from phytozome v7.0 (chr-ID Chr8; po s 7780465 to 7781366 reverse strand)
tggtggtggatttggagaagatatctggaagagaggtgagtggtatgggttattttcttttcttttctcccctcaaatgccctgactagtcaaagtgtgtgcggtggaaaaatagttggtgcccgaagtgaaagtggtggtgcggaatgtatttattcagcgggatttcaatattgcgggaacccaaaagtgtgccctgacgggcaaaccacgtcaattcgtatatatcgttactatggtgaaagaacgtagagtaagaccttttatgatcaaataaaataattgataacaaagctggactatttcaatattttcaatccagtgagcactaataattcaacatttgaatgcaagattttaacacggaataggaaaaacgtggaaatagattgcaatactacatgatctcaaaacataggaacaatagaagtaatatcgtgttagctggtgcataagaatttagaattgaaacacagcaattttacaggaaatcctatgtgtgtgtgggagagagagagagagagaagagaagagagagaggggggggggaagagataatgtgcattggacttagctagcataggaaaaatgaaacatgagatatgagctcatgttaaatttcttatggagggatgtagggaagcaatccatacgaatcttacaatcctcttcctttgttccaaagggtctaacatacacaaattttaaatatattatatgaaaattaacttatagctcataaaaacttacaaaattgcatgcagaaaggtcaaatttagattaaaaaataaaacaaaaaccacctataacagagaaaaaaaaacacttacattctacaatgagtaatttcatgtgactgaatttcagcagcactccattgggccacttgtgcattctggcct

SEQ ID NO: 9796 - DNA, 713 bp, Oryza sativa
  Intron number 1 from transcript LOC_Os06g22829.3 (locus LO C_Os06g22829) derived from phytozome v7.0 (chr-ID Chr6; po s 13316244 to 13316956 reverse strand)
ccttcatcaccgagggacatcacaatctagaaaaggtagacaaaaaatcgtatgtggcgtttgattaccggagattcccagaaattgtgtgtgaggtttggaagttctcaagtctgttggtagccattcgtttgtgtagcaagtaagcaacatttgctaggacagggcatttgtcgtaatcaggctatcccttgtcgcaggttgcagctttcacgaacatatatcagtaaacatactgctgcattcaatcaacatattatcttgtcatctccatatttacacgagggattagttagcttgttcagtgctggtatgctaaactatagacgcatttgattttacatactgcctgctgcatgtacctgggaataatgaacattatttgctgccaatttcctttaacaaccaattttcttcctttagtttccttcaatattataatttgtgtttgtctttgatcttaaattaaaatcaggccatatggttgcatgaaatcaggcccatatcaatacttatgtctccataaattatatatgtatatatatgttctctcaaatacttatagaagattaataaaatgtcatcttaggaaattaatttttctaccattccatgtacacttagttcagtaccgatgattgaatagtagtgcatctgcattattttattctttctgttcatgaaattcatattattgcagatcatttcggtac

SEQ ID NO: 9797 - DNA, 858 bp, Oryza sativa
  Intron number 1 from transcript LOC_Os05g45900.1 (locus LO C_Os05g45900) derived from phytozome v7.0 (chr-ID Chr5; po s 26537653 to 26538510 reverse strand)
gtgcgacgccagcgacggcgagctcgacggcgaaggttaacctgcctcaccgagtcaccgtcccctctcctcttccttcctagctgctctgatttgatccagtttactcaagctttgctcttgtctggaggaaaaatggggggagaatttggtgtgcgaatttgtgttgttttgattgctaggcaatgaggggaatgctgaccagcatactgcaatggaagctctttcttgtacgcctttgtgatttgactctccttttttttttcagaagattaaaaaataatcccattcaaagaattggttagtttttttttctttagaactagaagatgtcatgtttaattttgtgtgtaagttgatgatcttgcaattgcaagtgccggcaatttggtatggtcattaatatctctgagaaagacttccattgtgatgtgtagctaggctagtactctctgcataccagcggctttcttttggtatattcaacctttttaaggaaaggaatgttaggtcagggagttcaaggatttggcgaaagcatgataccttttcgattcttttctaagcttgcttgagcaaaatgggtagcaaaaagtgaggataaagcaggcaacttttgcttaactcatagcctcgtttttttcttattgcttcaatgaatggtaatgtgaccatcttatctagttgactttactatctaatgacagctgctccctttgataaaagtcctgtaggtgttgtttttagttaacaacatgtccttatcaattgctcttcttgcacttaacttgcatatgttattgaatcatgcatattctgattgttctctttattatgccatttgtgcagacagggata

SEQ ID NO: 9798 - DNA, 595 bp, Oryza sativa
  Intron number 2 from transcript LOC_Os04g35380.2 (locus LO C_Os04g35380) derived from phytozome v7.0 (chr-ID Chr4; po s 21341889 to 21342483)
tgcttcctgctcaacgggttcatcttcctggggaggtacagtttgctcgtaattgaggttgaaatctcggctaaatttgtgcttgtttttttttcgaaatttattatgaaagggggcggccaaaattcaatttgcgtgagtgacacagtagttgggggtataattttgccttgtgaagcaatttagcctggggttagcgtgcaatcggcccattgcagtaaagaccaaagaggctagcaaattagcgaatcgtattatatgtctgagtctctgagaatgtttagcctgggatgctgtagggtctctgatggtgtagacaaatatgctctccgttttggaattattcagggcagtagggcacaatgagcacttgatttttgatatttctcttctctagatgagtctaagcggtctgtcactttgtttactcaagttcttccacctcgggattaggggatttatatgcaatgtcatgatcttgttctcaatattactagcatggctgtttttctgttccatctgattagtaccctttctaaaataactcttacactttatagcttgttaaccctaaaatcggtggtcattccaatcc

SEQ ID NO: 9799 - DNA, 724 bp, Oryza sativa
  Intron number 3 from transcript LOC_Os06g49740.2 (locus LO C_Os06g49740) derived from phytozome v7.0 (chr-ID Chr6; po s 30087149 to 30087872)
gttggggtgagttccatctctcgaatttcttcattcaatttatattcagaggcatattctgtagctttggtgaatttcgacacatccgtattcatattgctgtctctcatggccggttgtcgttgtggtgtttattatacgtgttttaagctaattccaaatgaattttctgaagttacttgaataattgtttgtcagtttgttacctagtagtatatggcatgttgttcctttcccatcagggtctaggttgtcatatcagtttctttgttttataagtttaacctgtgctttgcaaactttaccaacatatgtttctgtttttcctgcatttaaatattaaacctgcaagtgtaaattactgatgttcttaaacaagattatatgttatatatgctcttgacaaatgctccctataatttttgcgtctagccttcagcaatgcaacatctggttagcatttcttgttacatagtgcattgaatgtctggcaccatgagatgtctacttacatgattctttatatctggaaatccctgatgcttatgttatagtcagaaatcagaaagcatcaaggtagccgccataggcccatggttatagcttgttgtttgaaacaatttgagtttggccatgaactccctttgatctttttaatttaaacctcgtacctctatataaatgggggtgttctcacttgcagttttcaaccagaagaccttat

SEQ ID NO: 9800 - DNA, 989 bp, Oryza sativa
  Intron number 1 from transcript LOC_Os04g10870.1 (locus LO C_Os04g10870) derived from phytozome v7.0 (chr-ID Chr4; po s 5890551 to 5891539 reverse strand)
cctcagtgtatcccgaagcagattccgccgttcaggtatatcccgaagcagaggtgtgagtgcatgttcatgtatacacttgtgagttctgagacatataatagacttattaatcttcgatcactagttgccagcaatggtctatgagtacttcggttactgcacatcttatgctgcctagatgttatcctttttcttttccctatgaatagatctactctctttgcattgcgtgtactgtatcttagattcattggttgggtccaacgcactttccctagcctttatttagctcggatcctatttacactgttttcaagcaatcaatcaccaaattaaaacagatctgtaaaccctgattacatatgcgatcgacttttggtccttgtcatctggttgtcacttaattgtttacgatttggggataattttcttttctaattcattagcgatgagagcgccgtacattgttgagagactatcattaccatttgttgcactagcaattcgctcaagtatatcgacatattatgttatttcttatttaacctagtgcttaatttgttactctattttttgccgtcttccgttttttctcttaagtatcaactaactcaaaaacttgcatgaataacctaaactttgaccacaattttcttaaccattagtccacacaaaatgtttgttgtgaaactaatttgctatttgtccatgtttgacttttgtaacgaaatttggagtattttaagtttttattttattttttcatttaggaataacctagattatagtatgttgtttcgtattagtaaaacttattattaagtcgcagaattcaacagccaccgaaacaacatcatcactacgacatataatccgtcaaaatcggtcgatgtcatgtgttactactcaagtttgttaattggcacaatagtttatatgatgatcaactaagccgttgattttttttccttcttaaatgcagcttg

SEQ ID NO: 9801 - DNA, 730 bp, Oryza sativa
  Intron number 2 from transcript LOC_Os03g11910.2 (locus LO C_Os03g11910) derived from phytozome v7.0 (chr-ID Chr3; po s 6245066 to 6245795 reverse strand)
aaattggcataatcagtggaatcgaagtacgtgacctactaagtcctaagtttgtcttgtcgcagagaactcaactcattacttggttcattggtttttagcaatcttattccttggtcgatccaggatagtgtcatctagttacatgagttgagaccactatatacaactgtactgcaagacaagttacttgtttcaaatacgcgaattggttatctataattcaagctgccttcgcgggtgcatcaagtgagtccgatatgcatggatgaggacagagccagaaaaaaaaaaggaatttctttttatctgtatgtgaaatgtacaagtactgtcaggactcctgaaaaaagaaaaggaaatactgttaggattcagaaaatatcacttgaatggattgcttattttgaaatagtttcatgggtagctcctttaaatggctcgaataggtcatttctgagtcatggacatgtttggtttgctaggatttcacaccgtttcatcgagtgtcattggaattctgttttcttgcttgtttttttgccttatgtattggcttacacttttatgttacattttgcaaatgcaataaaatagtactatcataaacccttggccttaaaactactaattcaaatggcgggcatagtttggattaaccagatctttttccctttttagaacaagaagaatgttaggtacacaatactgacgctgcattgtttgcagg

SEQ ID NO: 9802 - DNA, 818 bp, Oryza sativa
  Intron number 1 from transcript LOC_Os06g33640.1 (locus LO C_Os06g33640) derived from phytozome v7.0 (chr-ID Chr6; po s 19583337 to 19584154 reverse strand)
tcgtcgccaagcatatcaaggcgcccctccaaaccgtaagcagagataataactaacattatctggtttttgtgtgtgtgtgtgtgtgtgtgataattttactatatattgatcatgattcttggaatcattaggttcttaactgcttgttttctagatgatatgtgctatatatggctttgtattgtgtcaataaacatatcaatgctttattagatatattaatttgaattgatgccagtaaataatttttttcaagaattgcacgaagtatgaccaaggattaattcttaactttttttttgacctagattaattcttaacattgatgttaattaatcaatatcttttttgagtgtactctcttcgccaaaaaaatataaggatgtatggacttcttaaaaggattaaagatgaaaacaaatggtggctgtgggagtcgaagggttgttgtgtgtaagattgggtcaaattaaacgagtggttgagaggatgtggtactcaagagtttcttctattttgggataaatctgaaacgcaagaattacctatactttgggaatgatggcatattatgtactgatttatttcaataccccaccaccatgccccaacacacgaacacacacacgcatgcgcacacacacattttggacttcacaatttgtgtgaaaatcactcaaacgaaaatgttgtgtgctttgtgtgaaaggcactcatgaaacaaaggttctatagtcatattggaatttaatattgtttggtctctttatatttattcaggtttggtcactagtgaggaggtttgatcagccaca

SEQ ID NO: 9803 - DNA, 715 bp, Oryza sativa
  Intron number 2 from transcript LOC_Os07g12540.1 (locus LO C_Os07g12540) derived from phytozome v7.0 (chr-ID Chr7; po s 7160254 to 7160968 reverse strand)
tcagtgttttgtctacctggttccagggacaccaggtaaaattttcaatctacactattagctgataactagtattgctctgtcatatgtattgctaatacatgtatagcacgcccagtaattcctgtacttgaatagccactgctaatggtgatatgagttttgactatttgaggtgatactttgctatgtaatttatgtagaagaggtaaatgctaaaggatccaaacatatttttgctcaatttgatgtgtatttccaaaattgtgaagtgttgtagttctttttgggtgcctggtaactgttaatgttagactttactgactgaacattgttcaggaactattaacgaatgatcttcatgttgatgaagatggtgcttagttagcgatctggataaatataactttaggcatgaatgtgatgtagtatgatgaggggaatgctcaaagaatcatgaatacagtctatctctctttgtttaagacaaacgaattgattgtcaagtgcatcccttttgcagtttttggatttgtttgatttcatttataaactgtacagggtactgttattttctatgaatggaagtcttgtcgcctcaattgttttgcctcaaaccacgtctctcattctattgttcttgtacaatagctgtaccatactttcggctggtttgactgtctaattactattctttcacctatactccaggcag

SEQ ID NO: 9804 - DNA, 1034 bp, Oryza sativa
  Intron number 1 from transcript LOC_Os04g14130.1 (locus LO C_Os04g14130) derived from phytozome v7.0 (chr-ID Chr4; po s 7895679 to 7896712 reverse strand)
ggggtgccgacgtgccgtggtcctgctgcatcccggtgagcatccacatcatctttctgattcatctctctctctctctcccacccacttttgtctcaaatttacctgcattaaccctagcttctcttctagatctggatggagctcttctcttattttgtttgtttgtctccccaaaagtccaagttcgatccgcccctgctagggataaataagattcaattcaacacgaaacacacgcaaaattaatctgaagcacaagccccttcactcccttcacacgcaaaatcacatctggttcttgtagtttagaatgaacataatgctacagtatgccttgctgctcatgaactgattgacaaaatgtctctcaaggttatatctgaaattctgagcatgttaatttgtgtctcccagtaaggttctgtcatcttctgtcatccattagtgcccaatcaaagaacttgcatataataacatatattctattcttttaaaaaagcagaagctattatctgaagttcagctctcagtttcacagtaaatttacataattaacagtgcatgtaatttgtgggtactcttatataggaaaggaagatcagcacaatactgacgggtttctcttcaagatgatcccgtggttctcagttttctgctttctacactgtctacatcttatatgtgttcattgaagctacagattgatggacatagctgtcaaacctgaacctaccaggcctcctggtcatgtttctcctcagctctcatcacatttatatgttttcttacccaattccatacaaaaaattttaccaaggcagacccgttaattttggtatggatcatgtgaattttgaagagaatacgtacaccgttaatttattcatgcattctgctttatactatagtctacccaatttattcaattattctgctttgtactgtggtctagccattttattcatttttttcgcgttgccctccgctgtcgtccaggaccgtcgcccacggcgctggcgacgattcaccgc

SEQ ID NO: 9805 - DNA, 728 bp, Oryza sativa
  Intron number 1 from transcript LOC_Os03g43620.1 (locus LO C_Os03g43620) derived from phytozome v7.0 (chr-ID Chr3; po s 24388142 to 24388869 reverse strand)
agggtaacttttaattccgcctaaagttttggtttttggtacttcaaccatttccaccctctttggttggcttaattcttgcggttcgatcctacaaggctaatttctcacctcgttttataaatcttctcgttcttctctccgttcatctcaaacatagactttgcaaacttcttaccgacaaaactctgaaccatttaactaaaaatacttgaaagttatagagaggtagattcaatcaaagtataccacctgctttagtagaaaagtctgtactctctctgttctaaaatatataacgcaactattatttttatatttcataatacaatgcgcgtatgcatgcatgtgcaattaattaccatatctcttttctctaatttcttttttcaaaacaaatcctttgctaatcacattggggtatgcattgtatttattaaaataattcgataataatttgtttagttctttgttagaattgttagtagtacttgtgtcttttatatttttggaattaatggatagggtgacacacacacatatattggggggttggtgtgcatgtagttttttttttcgaaaccaacgattactatcggttatggaacaaatcagaggaacacgaatgagtaatcttcgatagaattcaacgaaatttaagcaataatcgatcaattaccggttattcgttagggtcaaatacggagctacgtaccccatctcagttt

SEQ ID NO: 9806 - DNA, 936 bp, Oryza sativa
  Intron number 1 from transcript LOC_Os04g40820.1 (locus LO C_Os04g40820) derived from phytozome v7.0 (chr-ID Chr4; po s 24038396 to 24039331)
ggctcaactacaaaggtatgataatgatatcaagctaataaatgatgcatgtcgtaaacccgagtcgataattatgcacctttttaccaactttggatggagattctcgaatagaattcataaattcagggttcttttatcttgtgtggttgggcccaactacaaaggcatgatgatgatatcaagctaataaatgatgaatgtcgtaaatttgagtcgacgattatgcaaatcgggattctcgaatagaattcagcaatttagggtctttttatcttgcgtttgtgttttctttacagtgtgtgctaagtttgtttatgtgtggactttataataattggttgtagctcgttagcaaaggtcgaaatgttactccattatcttcttataaaaggaaaaaaatacgaattaccccctaaactatcgtggtcgaccaaaatagccccttgaactcaaaaaccagacatcgctcaccttgaatttttaataccagacaacaccccctagtactattgcaagcggtttagggttcaaatagcacatgtggcagtccagtcatccttttttttaaaaaaaaaatcgctaggacccacttgtcagaatccccacccacctctttcttttccatccccttttgaagcgtgcgacggccggggagagggcgtgacgctaccggcactcttctccctcctcttctgaagcgcgcggcggcggggggagacggggtgacacagtagggtgcgtgcgatcggcggcggcatggaggcagaggtgagggcagcgcgtgccggtagcggcatggaagcggatgtgagggttgtgtggcaagcacacagaggacacggcgacagtcggagtgctgctaaatctatcgtctatctttcttccctttggtgcgcagtgagattggggagggcgcgttgcgacggggccaga

SEQ ID NO: 9807 - DNA, 944 bp, Oryza sativa
  Intron number 1 from transcript LOC_Os03g43510.2 (locus LO C_Os03g43510) derived from phytozome v7.0 (chr-ID Chr3; po s 24274530 to 24275473 reverse strand)
gagcggatcctcgcgcagtcggtgcgtgcgtgcctcacatcctcagctcctctcttcttcctccttttcgtcctcgcaccacaaatcctcactacagttttttttccccttaaatttttaaccagcgattcctcttcttgcgccactccattcttcctcttgtttaacaaacggttggaaaaaaaaataaagcctcttatttggtcattttttattggggatttggttcatttcgatgacccatctcattcttttcttacggttgctagcctgcattctattcaatttctaccgcgaatccgtccgattttcttcttcttcaggttagttacccgtagactggtaggattcagggatgagttcatgatctgtgtctcgtcctcttcgtacgttcttgtacaacgcagtacaaaaaaaaaaaacaaaacaaaccccgcagcatctcttgatgtggggaattcatggatctttcagtactcgtcgaggcggttcggtggtttcgctcatcggattcccgctcgcctcctcctcgttaatgatctctgtttacctttgaccgcatgtttcgacaaggagaaaaggccaaaggagagatttttctcccccgccccatgggcgatggaagaaaccgtttttaatcctcgacttaaagacgtttttaattacgcatcttagtcccaataattaatgaccatggcaaacatttactaccatctgttacccactctgtgctcctctgataactgaattttgttggacaggataattgcatcgaatctttgtggtttttcagtccaacaaaaacttttttttctttttggtgtactgccactaatcaattgatctctgcaaatatctgaacctggtgtactgccactaatcaattcatggtgttggaggtgtgtgcaggaagtggcgccgctgacatccggcaggctctcgca

SEQ ID NO: 9808 - DNA, 847 bp, Oryza sativa
  Intron number 4 from transcript LOC_Os03g55950.4 (locus LO C_Os03g55950) derived from phytozome v7.0 (chr-ID Chr3; po s 31848636 to 31849482)
agcaaagtgttccacgcgttcttcggatcttgaaggtttgctgcagttaaatattggttctgtttattttctcagtttactgaaaatccatatagtcatcaattttcctttttcaactctctaagctaatatgcaaaatgaaaagggggtacggtcccaacttttaccattctgtcagaatttaattttacttatcatctagcttactacagtattagtcatatatcaaaatagccttccctgtattacaacttttgaaatttctacaagctttttgatatacaatctacttaagttgtcgttaatgtcagtcttttatgtctatccaacagaaatattccctagaagctattgttatttactaccacttgtaattaataatctttaatgtaaaaaagaagcattgcatgtattatatgcatgtctgtttcatgttgttacatcaaagggatatggtcttttatgtcttctatacccatatacttcaatatgtcacttaataactacaagttgacaaactctgaatagagcccacaactgataaatatatcttgccataccagttggtggggggttggaacaaaatcaagccaggcaggctgccatgcattattgtgtcagtgctttatggagcaattgtaaggaaaaattttccacagatcaggcccacagcatccatgggccttggtcatccctcaccaataagacatctcaattaggagttaggaccaaccaatgttgaaactttagaagaaatgcgccttttgttctatacattagtttggttgttccctgtataatgttgaatttatgatgtacaggttgcagaattattaggtttccaagc

SEQ ID NO: 9809 - DNA, 823 bp, Oryza sativa
  Intron number 1 from transcript LOC_Os06g33690.1 (locus LO C_Os06g33690) derived from phytozome v7.0 (chr-ID Chr6; po s 19604125 to 19604947 reverse strand)
tcgccgccaagcatatcaaggcgcccctccacaccgtaagtagagataatagcaaacattatatgattatctgatttttgtgtgtgtgataattttactatatatattgatcatgatacttggaataattaggtgcttaacagcttgttttctagatgatatgtgctacatatggctttgtattgtgtcaatatacatatcaatgtttttttggatatattaatttgaattgatgccagtaaataatttgtttcaagaattgcgcgaagtatgatgactacctagtaggattaattcttaacttttttttgacctggattaattcttaacattgatgttaattaatcaatatcatttttgagtgtactttctccaccaaaaaatataatgatgtatggacttcttaaaaggattaaagatgaaaacaaagggtggttgtgggagtcgaagggttgtagtgtgtaagattgggtcaaattaaacgagtgattgagaggatttagtactcaagaatttcttctgttttgggataaatctaaaacgcaagaattacctatactttgggaatgatggcgtattatgtactgatttatttcaataccccacccccacaccccaacacacgaacacacacacgcacacgcacacacacattttggacttcacaatttgtgtgaaaaccactcaaacgaaaatgttgtgtgatttgtgtgaaaggcactcatgaaacaaaggttctatagtcatattggtatttaatattgtttggtctctttatatttattcaggtttggtcactagtgaggaggtttgatcagccaca

SEQ ID NO: 9810 - DNA, 835 bp, Oryza sativa
  Intron number 3 from transcript LOC_Os06g16390.1 (locus LO C_Os06g16390) derived from phytozome v7.0 (chr-ID Chr6; po s 9353626 to 9354460)
ctccctccatatacaacttggatatttttggacaggtgcattttcttgacatccctaagatccctgcttaaattacatagttatcatggaaagttatagcgtatacactttattatccattagcaacaacatagcaatactatttcatttctcttgctaaacagtaaacacacgctcatttgtggtctttagttttttgtgcaacaatctattcagtcaaacatagtttttccgacctaatgctttatgtctctggtgattttttttctcttcatgtgtaaatgtgtaatggagatattgcctttcgttcttactataagcttgggaaatggtatagtataaaaatggaacaagtccttatgcggccccttgctacgtgccccacctctctcttaatcacatgcagttgcagacttgcaggctgggagtgtgtgttaaaacaagagcagcaaatgccacattgactgccttgaattcatcttcttggctttggtagcaaagctattgtgccagaaccattggctttgcctgctgcagtgtttcttttgcttttgctgtttcatccgctttatgcttcttagtgttctctttgctattgcgtgattttgtggagcagcaagcaaaaaatcagactgaaacatgtttttgatgaattgtttgttgatatgaatttaacagtatatctcatatgacaaacttctatttttctaaataagtaatgcaaaacatgcatggtcacagttacaatccagcatacttttagtttggagaggtagggcatcttaaggtttgttgaaatataagattttacaatctttcgtgcaggaaccagcgg

SEQ ID NO: 9811 - DNA, 916 bp, Oryza sativa
  Intron number 1 from transcript LOC_Os04g58110.1 (locus LO C_Os04g58110) derived from phytozome v7.0 (chr-ID Chr4; po s 34422501 to 34423416 reverse strand)
ctcgataccaaggttaccccctcactgctttgcttgtcgatctctacatgcttgtatgctgctgggttgttcggatcggaccagtcggggtagcttgcgtttgatacagagcggatttcgatttggatctgctcgtcttttttatcgggagaagctgggtttgatttggaggcagcatggtaggattatgagttgagtttacagcggtttgactttggaggactcgacaaaatggtatccggggttagatttgcctgcgcttgcgcttttgccttgtcgcagatggctggatcttggattgggggctcaggcttgcgtctccatgtgggtagttagttttggagtcttatggattctgagcaagtgtaagtgtgtaactggttcgtagtgtgatccgtttgcggtgttggtgagattgatgagctgcgtgcatcttgtttgtcatatttagctttacagttcgtctctatgctttttcaagttaatttattcatttgtagagttggattggaaggatggttaacagatcttgggatcggtggctttggagtatggagtgttcaaatcctagtgttctgattttgttgcttttgtaggaggatatgattaacacgtaaaagaaggctttattagtgtagtcatttcttctattatgccttgatgtttctgtcatgcacgtaactattggtgcttatctttttacactctcacacttcatggtttgctttgtagttcaaataagttacttacagaattgtactgcacacagtttatcttttttatcacttcttgtactgcaattagttccattatttttacctgtttagtagcatatttaaggcgattctgtggtgactgttctgaacatttcattcattgcttcagggtcctgagattcgtactggatttttgaagg

SEQ ID NO: 9812 - DNA, 794 bp, Oryza sativa
  Intron number 2 from transcript LOC_Os06g06820.1 (locus LO C_Os06g06820) derived from phytozome v7.0 (chr-ID Chr6; po s 3220237 to 3221030 reverse strand)
ccaagccttggacggttttaggacaagtatgatacctaacttatgtgatatcaatgcatatcttagatcaatgcatattttttcttttcttttttactttttttggctcctgccaagttttgtacatacactttattcttttatatataccgtaggggcctccttcactgtgctttgataaaaaaaatgatacataataattcttcagcaagcatctatatttctagtgatattaataattgactcgtgtttatttgtgaaataacgttttgaacatttacaaatttacatggatcactcaaagtaaagactgagctttgaagtttgcaattcacgttggcaaactacttttgcctcggagctgatgctttcctcattcaagaaatatgggcttcatttgtaattttcagccaatttgattatccatacaaggaaaacatttgtttttctattgctatacatattaaaccagacattaacttgttcacaattcacactggacttgcaactgctggcaagactaaagagctaacaaaaaaacattgttatgactatttgagttgggggtgaaggtgtgttcgagtctacacccctcccccactctagaggattttattttgctgcacttacgtaactgtgttgacgatataacagagaaggccgaaaaaaaggccttgtttcacacaattacttcaggatattttatgttcaactgcttgtttatctttcattcgatgatggtcatctagcaccatattaattatgttgtctactctttcttcgactacagagtt

SEQ ID NO: 9813 - DNA, 793 bp, Oryza sativa
  Intron number 2 from transcript LOC_Os08g12840.1 (locus LO C_Os08g12840) derived from phytozome v7.0 (chr-ID Chr8; po s 7612692 to 7613484 reverse strand)
gacatcaaccagatccgcgagatcctgccccacaggtgagctctaaccgcattccgctgctgctgctgctgcaggatagctctttgccttaccttgtgtgtttcatttcgcttgtaagatgttggcaatgcgaaaccattcgaattactcgatacaaatcgaaattatacccttttgaagttcgatgagaggcatatgaactgtgcgtgcaatctgttgaaaacaaaaaaaaaacaatatcctgatattagagttaacctcatactcttttttattattattttcagtactagctaaaggcccgtgcgttgcaacggatattataaaagataaaaacaaaagtaaaaattgcaacttcatagcatagttagttgattaggcatataatgccatgtccaaagcaaaaacaatcacgtgtggggattttatggctctacatgtcaacttgtggcgttggaggcagactcggacactaccactagcatcattaaagcagtatagatagatgaaagaaaaagatgcttcatagccctctgaattaatggaagctttatgttcatttcctttgagctcacttggtgaagaaaggcattgtcttttttactagaaagtactaacatgcatcttggatatttttatgctcgcctatgtggatatacacctgatgagcccaagcaagagaaatgattggtgatgattcacgaatatgtaattgtttagtattttctctaacttgtgcatttgaatgtgaatgttaggtttccattcctcctggttgatagagttattgagt

SEQ ID NO: 9814 - DNA, 978 bp, Oryza sativa
  Intron number 1 from transcript LOC_Os04g55930.1 (locus LO C_Os04g55930) derived from phytozome v7.0 (chr-ID Chr4; po s 33126606 to 33127583 reverse strand)
gaagatcaccctcgcctacgccgctctcgtcggaggtaaaaatgcagtaatgccacgaccagttcatttttagtactcctactgatctactgtagtgtgcaaacgccttggattcgagtagtttgattttggagaatgagagctactgcatttctttatcaaagtgattagccattggggtaattgtgtgcatttcaacttctggttcaccaactagttcccaataagttagaacacacatacttgtcaggttattctcgtgaataaaattaaatccttattagtcaggtcgaattattactaatttgatgagatcaataattgttggacttgactgggtacttgataatttccaactgtagaaaaccagaacacctatgcaacattcagattcagcagcctgctttttgagttttggtttctcaagtccagcttgtatcagaacaatgatgatacaactaccagcatgtgctttttgtagacacaaacacaaatggtgcattagcactctgtatatcactggtcacaggatgtgcacaaattttggcctacaggcaagcacaatgtgcacaaattttctcttaggaagaatgaaatggagtacagctaaacaaccacctaaaaatgaacatcctaaaaaaaaaaagaagaaaattaacacaagagtgatcatcctaaaattttgaattattttttctccattgtgattatgtctgtgaaactagcagatgatagtcctgttataattttagctgcatcatcggttcaataatagcgttatgatctactggagtgaatgactgtgtggtgttaccatcctgtgtgaggttctacatcagagcctgacagcctgttctagccttcaaggtgcatctgaggatagattatattgaagcattggttgttgccatcaaaagagagcttcatttttgttagaaattgactattgtgattccaaattctgtagccggtggagcg

SEQ ID NO: 9815 - DNA, 713 bp, Oryza sativa
  Intron number 4 from transcript LOC_Os03g62250.1 (locus LO C_Os03g62250) derived from phytozome v7.0 (chr-ID Chr3; po s 35255645 to 35256357 reverse strand)
tactattactcccgcgaccatatccttcttcagaggtacagtttttaatcgaacatgcgttgatattatctgtacgtgttcagaatttttcaggcgcttgtactttgaattaagtttttcttaacatggttgggtactttgttgatgacgttttatgttggttttgagcagatatataaacataatgctataatcgtttttgtattacttctatgtctccatcattttgtaaagttatctagttacatcattagtagtttattttattatcttcctttttactcttgtggatatctgcttcattatataaattagttgatagcctaccgcctacctgggatgatcactatgcaatattcggctgaactttctttcttttggagtacgtactacagtaccgtatagtgataagctgaagcgacttgtgaactccattgatctatatgctcaccatttccgttgcagtacagttgcatcatattatatatcctttctcatgtgtgatcttcacaattttttgctaaggtttcagccctatttttgcacattaaggctgggaaattgcatgcttgcacagtacagcttgagaattgctgtatctgtatttctcccttcaaacgtgcaaataagctacttttacctactagtgatggtagcgtaccattcaacaatttcttcatacttgtaccatgttatattgcagatattggtgc

SEQ ID NO: 9816 - DNA, 834 bp, Oryza sativa
  Intron number 2 from transcript LOC_Os08g15060.1 (locus LO C_Os08g15060) derived from phytozome v7.0 (chr-ID Chr8; po s 9103054 to 9103887 reverse strand)
tcggggagtttgtggagacttgtgaggctaaacaggtgagatttgattgaaatcaaagcgaatgcagtttggtttggatttattgagttgtatgcactgaccagttcaacccaaaagcctacactgataaggaaagacagacaattcactttatattctaacaggattgtgttctcttttttatttgttcatgcataggcggtcagtttctggtgaattattttttggtgcattggctatgcaaagatggtactagtgttctgttctttcttttctcggtttatattaatcttgaatacttttctttctgttggcatttcaaaaagaaaatcttttcttcttcttttatgttgatcttggattccttttctttttggcgaacacattgcagtgggaacttgaaagcaaagtctgtgatcattagtgttagtttggtgcccctctctgtcaggtttgtcatgtctcttgtcagctgttagtgttaggtgaagttgtgactacagtctagtacaggtcatgattagcactgtgctctgagtctatctcttctctctctctctgattttgttttttgaaaaacaatctagtttcaattttctctgtctctgatttttcttcatgtagttgtcaagtcttatcagttggaattttgggaagatgtactatcatttgaacttgtaggattacttttgagtgaagctgaaactaagggttacagttatactgaatactgaatttttggtcgtactaattatctgaatccctatcattttggtttaccttttatttatgctgtcaggtaaatttggaggccaaggtggtttgcagcccaag

SEQ ID NO: 9817 - DNA, 447 bp, Oryza sativa
  Intron number 1 from transcript LOC_Os06g42270.1 (locus LO C_Os06g42270) derived from phytozome v7.0 (chr-ID Chr6; po s 25387661 to 25388107 reverse strand)
atacatactggtattctggtaaggtactacctaaaaaacttccacaagttctttttttttttgtcaaagactttcaaatttaattgtagtataattaaagtgtaattacattgtaaactttatagttacaatgtaactgatatataacgagtgtgtaagttgacaagaaaaaacatatgaggtgagttgctagctcagcaagcttacctgtttaacaggtcgtaggtttgactccaccttcgtacccatggctgtgattattttttactaacttagcatgaatcttagggcaaatcgatggttagaaatttgaaagttttgattgaagaaaaatgtcgcactttatgtagcaattccattctggtaaaggatgcgcttggacatctctacgcaaaaattaaatgtcgttcagtcctacagccttaccattaccattgagttctgcaa

SEQ ID NO: 9818 - DNA, 472 bp, Oryza sativa
  Intron number 4 from transcript LOC_Os04g12499.1 (locus LO C_Os04g12499) derived from phytozome v7.0 (chr-ID Chr4; po s 6910061 to 6910532 reverse strand)
tgctttttcttgcaggtgacaaatccaataactaaatatccttactgtgttattttgtcttttttacacctattttcccacgctactttgtcattattgaacaacatgttggcagttcattacaaactaatagatagctagttcaattatacggaataagaagattttcaatttattaggttgtaaaaaagcatatttaattcaagtttctcataatgttgtttcatactttgttccatgttgtaagccgtttttgcttttgtcataagtcaaacttctcatctataataacaaaaaagtcactataaaagatatatttcacagtggattaaatgaaacaaattaatttgatgttgtagatgttgataattttttttgtaaactcagtcaaagttagagaaatttgacataggacaaaagctaaatatgaattggaggaagcagtttggatatccttaactaataaccacat

SEQ ID NO: 9819 - DNA, 773 bp, Oryza sativa
  Intron number 1 from transcript LOC_Os04g28460.1 (locus LO C_Os04g28460) derived from phytozome v7.0 (chr-ID Chr4; po s 16683644 to 16684416 reverse strand)
ggagcaattcaggtttggacttgtttcctgtgctgacctataaatacactttctgatcttggcaaaatggacacactatagttttgctaccctgctgtaggctgtagccattttatttcacaaactgtatgcctacctgtgaggctgtcacattttgtctcaatttattgcaagttacagctgtatccttttcgggctaacctgttgtaacatccgttggttggtgccacgtgcttattgttagtagataaagtgaaatccaatggagtttaaagatgtgcttttgtgaagcctatgctgctagttatgactgttcagcctgcatactgcaattgctaaattgtatgcctgtgttattcaagatggagtcaaaccaggctcttctgtgttatactgcatgctatttgtttatctggaaatggccataacagcttatgtgtcttcaaataaacagtatgtcactaggtttaattccattagatttgcaagaatcgtactaaccataatagatcaaacctcctgggcaattcatttactggagttcatcccctttgtagtttgtactatagatctctgttctgcaccatgagacccagctgactagcacttctttaggattttgtcaaaatatctgcagggccttagtgcttatgttttgtttattaaccgtgaatccattggtatatctatgctaaaccacttttcttctttatgcgtgtcatagagatatcgattttaattataacccatttctttgaatattcaggcgtttc

SEQ ID NO: 9820 - DNA, 312 bp, Oryza sativa
  Intron number 3 from transcript LOC_Os07g39060.1 (locus LO C_Os07g39060) derived from phytozome v7.0 (chr-ID Chr7; po s 23414792 to 23415103 reverse strand)
cgattttctcactcaaatttacagtgcattttcttgtaagttacagtgtaatttatgaaacttacactgtaacttttgtaagttacactgtaatttttgaatcttcgcatgtaaattttaaattttgtattggatttggtctttttcttgaggatatggtaatttagtgtccattacggtgtttcttaattgctttttctttttattatatctatcggattttaatccaaagattaaaaatctgtgggatacgatcataaaaatctttcgaaagatgtataggtactcccattaccgatggtctgcagctag

SEQ ID NO: 9821 - DNA, 963 bp, Oryza sativa
  Intron number 1 from transcript LOC_Os05g40270.6 (locus LO C_Os05g40270) derived from phytozome v7.0 (chr-ID Chr5; po s 23591066 to 23592028)
gtttaatttggggtagtgttcttcttcgcaacaaggtatattctccccgcttgaatcatgggggcgcgtttgcctgtgtgtgagttttttttttttgtgaatttttcggtggttcggttggattattctcagccacattttaccacaggaatttgctggggttttggcgttccttcctcttttatataggagtagtagtcgacaggtcccatctcgagttttcatcctgatttgatgggattttcggcatttctcgcgatttttttgcacttgttgagttggtactagtacaaaagtaggagtactactactagctagtagctgccgctgcatgcatctgcggagtttagttgggacgtcgtggttgcgaattaggatggtgttactgtcaggtttcgttggcctgatgttgctgagtggcagatgtgttatttgtctctagtttgattgattttgatcgcacagagccattgcttgagcacaaaagcgactagctaggcaggttgttagaggcagaagaagtaggtacaagtaaacgatacaaatggggtgatcttcttttctgaagaactttcatgtcacttgcatactgttaccgtcaaatttggccatctgtttcagttttcattgatccaactttcattaagcaacggagtatagagaaccggagtgatttgttttcttgatattggggaattttctgaaccccatgtaccaaactgggcatgcatatgcaaacacccaaaacctcgtgcttcaaaaagaggaataaatgatatctaacatcataaacaatggtggtattcataaactcttcttttttcctagttaggatcctgaaattttggaattttgctgtcgtggatatgactagttgctgctgattatcttgaagacatgatcaatttcggaggagtactctgtgcagttacccttgtggtgttgctccccttcttagaggct

SEQ ID NO: 9822 - DNA, 679 bp, Oryza sativa
  Intron number 1 from transcript LOC_Os04g48710.1 (locus LO C_Os04g48710) derived from phytozome v7.0 (chr-ID Chr4; po s 28857929 to 28858607)
ttcctgcctccgccgactgtttcttcttctttgaggtaagccggaagggagtgggggagatggatcttgtagctatcgcctctcgctccttgcctctaaccctattcgcctcattcgctctctcgctctaatctcgcccccaacccgacgtcctcggcagcggcggagtgagtaatttgagtgggtttgccctagtttgggggatttgatttccctctcttctctttactttgtctgtttgatttcgttggacgtttgatgtgcaatcgatgcttctgttccagtccaaggaattttattccgttgaatattgaatcccctggtcaggtttcaaagaaaagaaaaatccccagttcttttcctgccaagacgcctttcctctggatttcgatttcatttgaactgatagtttgattttaccccagtgggtgactttgacggcaagcagccctgatttttttggcagagttacatatctcctgaattcccactttgatttcatctttactttttttttcgtgggatgctctctttggggatctcgatttcgagagtttagttttacttcatttcattacttcattcagtggatgattttggttttacatggattgcgtgtttgacatgggtattcctccttgcagagcaagctggtaaagcaaagtagtatacgatctcc

SEQ ID NO: 9823 - DNA, 785 bp, Oryza sativa
  Intron number 3 from transcript LOC_Os04g48710.1 (locus LO C_Os04g48710) derived from phytozome v7.0 (chr-ID Chr4; po s 28859933 to 28860717)
taaaattctctcccaaataagacgccaggaccgtatgtactataatattgaagaccatgattctgcttggtccttctttgtattataatgcaaaacgattttatattttacttaactgattcttcgcttaaaaagggcaaaattttctttagactaactttttgacatttcctataggatactcttagttttgtggttctttgagcaatatttattcaaactcagatcttgcaaggtggctaagggtaaaatcgtcttttgtaaagttttatctctccattagaagaggatatattaaaataatggttgggagtgtcttttggcaaaaaaaaaaagattgtcctaaggcaaaatgattttcacgacaacagagcgttgataaactaaagcaattaaagctatgaatcacttgtatttttctagtaccgagaaacccagttgcttgtagactagtctgaactgaagctagctacatagtgcatgctatgacttatacattatcgaaaagatcgaagcacgaactgcaagcacgttaccatatggtttctgaagaaagtacaaagctacataacctcatgttgtgcaaaatcaaactcaaaaagagcctatactgtaaatgtaaatctaatcacatcacaatcactgaccattgaaatctgaacatggtgcatcaaattttgcccttagaaaatgtaggttgcgtttttttttcattttgtaatgatgcattgctttaacttattgttgtattactcccaattgcagactgctgtaccttctctgct

SEQ ID NO: 9824 - DNA, 670 bp, Oryza sativa
  Intron number 4 from transcript LOC_Os06g11960.1 (locus LO C_Os06g11960) derived from phytozome v7.0 (chr-ID Chr6; po s 6368190 to 6368859 reverse strand)
gaccttctgaggcaagcgtttgtgcctataccagggtaagagtcttctccaatttataacttagagaatcttgagaaaatacattgtttttttttttgcgggggagaaaatacattgttgattcccaacttagtgatgcttgagaaaatgaattgttgatttccaacttagagattcttttgaaaataaatttttgatctgaagtacaagtcagatgtcaaaagaaaatgacaagtacagaggggtgtagagctgtcctgttagttggaatctgaattttctcatgttcatgaactcgtattagatgatttcattatttcaatcgtacaccaagttcatcataacattggctcaattattcacatatatataacactggttctaatataattgtatgagttgggattgtcattttggtccacattggttgtgagtttgaagaagcagactgcatgaaccacgcaacaacctgtacttatattagattcagctgataaagttggtactatacataatatgtttacaaagctatttttttaatgataacaaccttcgttttgaaatcactcgtggttaccttctgactatctgatggtctttgttattttctgggatgtgcattttcttgtttgcagaaattggctcagtacagacagaagctagatagcat

SEQ ID NO: 9825 - DNA, 244 bp, Oryza sativa
  Intron number 2 from transcript LOC_Os06g11960.1 (locus LO C_Os06g11960) derived from phytozome v7.0 (chr-ID Chr6; po s 6369121 to 6369364 reverse strand)
gtgcagagagagctgttgcttatttcaaggaacatgtaaggatatgtcgacactaacatgaacaattattaacctttattcttctatgtttatgtatgacgatgttacaaaaatatcaaaattttccatgtttttttttcaaaaatttgtcatagaatttgcaactgttcttgtagtttccatctgacctgtaagtagttgtttgttgccacataggttgttcctcaactcacagctggaaagc

SEQ ID NO: 9826 - DNA, 893 bp, Oryza sativa
  Intron number 1 from transcript LOC_Os04g57739.2 (locus LO C_Os04g57739) derived from phytozome v7.0 (chr-ID Chr4; po s 34208823 to 34209715)
atttcaggtgcgttctcggttgattaacattttcctagctttttgattacacggttagacatgattttgtctgtgtatgtgcatgtgggggtccgagggatatggatgggtgttttttttttttgcttgttgggggtattggtgtaaacttatcagatatctaaacatagtaaatttttttctcctgtaaagcatatctgattcagtttatctaagtgcttaagtcctatggctgccatagattggggttagttttgtccttaatataggattataggactacaaactctttgatgatcctgtttgtgtgtacctgtgtatgattacttagactttgtaggagctgttctgctattttcacatgcaaactttttatccatttttcgcatctagaattattggtcaaccattattgaactcatttaaactatatggatctgaagtttttatactgaatatacctcattagttgccacacaaggtcatatcttgttacaaagtcagtgattctaaaaattaatttgagcatatcatgtctgtggagtagttcatgttcacttttcttctttcggaatttgtgttctttgtttgtgagaccaacatcttcaggattgattaagctgttatacagatattttaatcttttagacatatattgcttgaagaattgaatttgggaaaaatgtgtagtatttcagcatccttgattaggtcacacatgttttgacaaaataatatgttttgtaatcattatactcaagcgtatgtgaaaatagtaaattctggaacatgttgatcagtccgaggttgggaacatgttagttaggtaacacactgtccatctgctctatgttgtaggggaggagcggattgttgagtggattcgaggcaga

SEQ ID NO: 9827 - DNA, 841 bp, Oryza sativa
  Intron number 2 from transcript LOC_Os07g43290.1 (locus LO C_Os07g43290) derived from phytozome v7.0 (chr-ID Chr7; po s 25920035 to 25920875 reverse strand)
ggcagagaaatttcccggtgcctctcctactggaggtaaagcaaaatcctgaatccctgtctgattgttcttgtcgatctgatttcaattttgatgtaaatgaatcaaataaaggatttcctgcctaattatcctcagttttgctccctataactgaaatttgtcccagagaatggtcatttttatttaaaaatgaaaaaagtaaaacaagataaaaaacaaaagaaactttaaattctaaatcatcagcagagtagatggctggtccttcctgatgacttcctctcctcattagtcactactcgctactagtactactagtagatctgatcatcttagtagaattttcccattattatgttctctatgcaagtggtgtacctgctacctggcgttgtggttgttgtggtgcctggcatagttggcagccaaattttgtaatccatcatgcacactaaaaaagaactgaacaaactttctgtggggtaaccaactcaccatctactgcacattgatgaggattcattatctaaagttatctgaaagttctgacttctgaaatcaatgtgaggtctgaaagtgaaagctctccgaagacctcatgactgataagaagatattttgcgttgataaacattttctgacttcttctactaattacaaacaaaaaatttggatcctggagttctgaacccaatgaaatattctgccctgctgacatgtattcaccaattcatcttttagaaattataattgcttggatatgtggtatctggccatctcacaattctgcatcaatgttgcagcacccgcaccatcttcttccggttctgggtcagga

SEQ ID NO: 9828 - DNA, 445 bp, Oryza sativa
  Intron number 1 from transcript LOC_Os05g03530.2 (locus LO C_Os05g03530) derived from phytozome v7.0 (chr-ID Chr5; po s 1494781 to 1495225)
atctcaccccaatccaggtaacaaaaactgatggatatttttttcttcatcaaagattattatactatacagctcaaagaactcaaaatgagatgattctgtttgcatttgcatataccttcatcccaaaacatcatcaacttttcttcatcaaagataatactacagctcatcaacaactcaaaatgagatgattttttttcacatatatatatcttcatcaaaccatcatcttttcttcatcagagattacactacagctcccaacaactcaaaatgagatgattgtttgcatacacacatatatataaccttcatcagaacatcatcaattcttcatctatcaaagattatgcatcatacagctcaagaactactcaagatgattaattgtattgtatccataatagtcggggtgctgcaagccgccgacggcgtgcgcgta

SEQ ID NO: 9829 - DNA, 526 bp, Oryza sativa
  Intron number 2 from transcript LOC_Os05g06970.1 (locus LO C_Os05g06970) derived from phytozome v7.0 (chr-ID Chr5; po s 3646565 to 3647090 reverse strand)
gagtaaaatcttctttaaccaacaactcatcaaagaaatgaaaaaactgaagaacatatgcagaagtggattttcgtccctttggtgacatcctctcattttgtgcatgtcgtttaaaaaattataaaaaaatttaaaaaatttgtgaagatagatcaatatgtgatatatctttttacaaatatacgagttaaaattcaatttatacaatttaaaataaaaataataaatttgaccatgaattacacgttcaattcatagtcaaatttgttatttttgtttctatttgtataaattgaatttgaatttgcatgtttatgaagtgacatatcacatattaatcaatcctactaaattttttaaatttttttgatgacttttaagtgacatgtaaaaaatgagagaggatatccccttacgggatgttttgagttttccagcatttgagttcatcattagtcgtctgacctgtgtgattatttcgtgcgcagattgatccgtcgttgagcaaggcgtacgcgttctt

SEQ ID NO: 9830 - DNA, 612 bp, Oryza sativa
  Intron number 4 from transcript LOC_Os05g15890.2 (locus LO C_Os05g15890) derived from phytozome v7.0 (chr-ID Chr5; po s 8969585 to 8970196 reverse strand)
ggtgacaaaattcttcttttcagctattcagtcaggtgagtggttatccccaatgtgtccaatgcttcagtaagcatgaagattaaagcaagaataacatatctcacaagtcagaaaatttctttgttttaaaccatatttgatgttgaacaaaaagctcttattgatgtaagaccttggaattgattgttactaaatgttcataaaatatcattacttactgtagtgggtataatttctcacaagcccatcatgctccagtttttgctgaagttgtggtttatatacctttgacagtatagagcgttaaatcattgaatagatgtaaacttccttctacttgcctttctttaaatacacttttagggaatgtgattagacaggttacactgaacacaaactaaacctatttatttagacctgaaagtaagttaaaacaaaacttgcttgtatcgaatagcttatttttctcttaagcatctatcttagttcttgttcactgcgtttgcttcttggaacgtttcttgacagtacttgcgatttagatatgctgcttgatgttatatcttctgcatgtgtaatcacttgttcatgcataaattgacaaccagg

SEQ ID NO: 9831 - DNA, 713 bp, Oryza sativa
  Intron number 1 from transcript LOC_Os03g37320.1 (locus LO C_Os03g37320) derived from phytozome v7.0 (chr-ID Chr3; po s 20686130 to 20686842 reverse strand)
tctccgcctggccagtctctgcacatcagattgcagtgaggctcagaaccgtggcctggataacaaccggagttggtgaagaggtggcagctgacgaggggaaacactaacccttatccatggctcatgatattgtgttgatgaattgaaccttgtattccaatgggtcatgggccaaagtataatacaataggtttacaagcacatgtgcacaagacacgctgtactagaatataagtgcacagctatacataaagatatagatatagcaaaaggggaaaaagatggcagccatctgtcatttggaaaaagatggcagccatctgtcatttgtccaatcatttacagtgcgcattggtgcatgcttagtgaatatatgtcgttctacatcacaaaacattctttggaagccctaggatgaactatttagggggcttaatctgcagtgtgatttttgtgaactgtgtttccagttgagaaacagtatgctgttgttcaaatgtgtgtcgtgtgaacacaaggtagatccttttgtagtcacaacctacaaggacactgtttcaattcagttttttctctcactgtagctgtatgcccagttttgatatatttaactgcaacatgcagtagctcctttagttattttccttttggtacttatctccatctatgaatcagatattgaaaagggagtcaacagaagacccttgtat

SEQ ID NO: 9832 - DNA, 588 bp, Oryza sativa
  Intron number 1 from transcript LOC_Os06g21580.1 (locus LO C_Os06g21580) derived from phytozome v7.0 (chr-ID Chr6; po s 12446133 to 12446720 reverse strand)
caataaggtaaacttcctcctttttttttctttttctcttctcacctctattggatggttcatctcttgaattagtttctctctgtctctctcttttattgatgaaatgaattagtttcttgtttttgttcctatcttttgtgggttagtatattggttgatgtattccaacctgagtttaatggggatatttgttgtctgaacttgtcaagttctatggatctcaatatgagacacttcatttatgcttaataaatcgattcccccagagatatctgataatctgaaatatactgttccaatagcttgttacagtaagagtaagttcttgtatgcttttcttgcagatttctatcttatttcttgctgcagtatcacaaatcaaactaggagaactgactgagaagtgaaatattctgcttccaagaatcaatcagataaactgattccaagaaaataacaagaagtaatcagataacagaagcagctgcagctgcagcagtagcatctttctgttcccagtaattgcccaatccaactccagctagatttaatcagatagagaagtaatctgctggattgaaatcc

SEQ ID NO: 9833 - DNA, 880 bp, Oryza sativa
  Intron number 1 from transcript LOC_Os05g09680.1 (locus LO C_Os05g09680) derived from phytozome v7.0 (chr-ID Chr5; po s 5467683 to 5468562 reverse strand)
agaaaaagatatcttcgcagatgttatggttgagcggatagggagagagaaaatataatggagaagataaatataaaccctagtcatatcctcgcagtactatccgtgatctttatttacatataaataattttaaaataaattcaaatgaatcctcattatatgtttataaaccacaaataatatgtaaaaacacattcagtatagagggaggttaaagtcaggcgaacgtgtgactatatacgctagttaatattgaaaacaaacacctcagatcgatcctacgaagcgtcctattttcgctgttcacaagcaaccatgagcttgcacagattattgttgaatactcctccgtttcgaaatgattgacgccgttgactttttatcatatgtttgatcattcgtcttatttaaaaaatttaattaattattaattcttttcctatcatttgattcgttgttaaatatatttttatgtaggcatataattttacatatctcacaaaagtttttgaataagacgaacagtcaaacatgtgctaaaaagttaacggtgtcaaacatttcgaaacggagggagtagtaaatttgttttctgtatgcatgggacactacaccttatagttggtccatatgttcttgatggtatcagtacgtaaaatgaactaacttgacactctaggtagggcattgcttgcatccattccttggtgcatatgcatccatggtggttggcctgaggtgtggcgggcccacgattttaagggagggtgttcaaaaattgcactataacatctataatatatacatgttaataatataagaaaattgccctcctcctccagccgcccaggcccgccggccgcgtctacgccgccta

SEQ ID NO: 9834 - DNA, 1018 bp, Oryza sativa
  Intron number 1 from transcript LOC_Os04g54200.1 (locus LO C_Os04g54200) derived from phytozome v7.0 (chr-ID Chr4; po s 32101809 to 32102826)
aactggaggcgcccccccaaatcttgagatcgcaggtaatgtccataggcgccgagcttcatgagtcctcctgcgagggatcttgtcttgaggtttcttgcatattggcctgtgcattttgagttttgatgtgcttgctgctgatccgaattccatctccgttgttgccgtaagattctgaatcgaattcatgcatttgtacggcagatttttttttcccccgctagatccgtatggtgtggttatttgggcgatgatagtatgggtccaagaaacgcggttttccctgtgaattgaggatctccaatttgcttctttggcttcggtccatggcagttgtgttctccaatcccatggttcatgctagacgcttcctgcagacaggactagacattttcagttttggtaactgtgaagattatggcattgttttaccaagagaaactgctgcattgtgatatgtaaaaaattaccctttttttccttctcttttagtagaattattacggaacatgcttcgcttggcgtctgtatcgatctacgttctttattctaaaaggctgtgcttttttgtgagcattgtcatccttttttttttcctttcaactccttctgttcatttaatgaacaattccgttctttctggtgttgatactgccacgttttactgattttccattattttattaattcctacttgacaagattcttatcgaacaattattgtgaatcttttagtaggaatctcgtaaagcgccagtgtcgcattttcctttgaggatctgatttttcccatcaagcaatggtgggatagccagtagtaaaatttaggctttcaggctcactccacatcagaaaattttctacttacatactatcgtttgtagaacaatcgtggaagtttatgcccttgctcaaaaaaaaaaaaagaacaatcgtggaagtggaaaaagggttccgtgaagcgcatagatcaataatgtctaatctcttttcactcataaaaatgttttgcagg

SEQ ID NO: 9835 - DNA, 455 bp, Oryza sativa
  Intron number 4 from transcript LOC_Os04g54200.1 (locus LO C_Os04g54200) derived from phytozome v7.0 (chr-ID Chr4; po s 32103496 to 32103950)
ggtatgtctatgactattgttttgttccaacacatatattctcttcagttgtgataatctcctccctttagataattcacgcttgttgtgaatttgtgatcatatacgagctgtttttgttgttgagctgtttgacaacataagaaggtttagcattaagaaacatgcatttttgaattaatagtgaaatagtgatcatacgcttgatacctaaattttatgtcttattgactgtgagctgtgaggggtgcatgatttttcattctaaagtagaagattactgaatctgagattttcttgttagtttgatctggattccttggccgtctttttacctagtctgcataatctgcagccatgatctctgaatcttccctggcatctagttttatacctctattaaatttaatttgactgcaggggaagaagaacccaaccactgaccaagaggcggt

SEQ ID NO: 9836 - DNA, 940 bp, Oryza sativa
  Intron number 2 from transcript LOC_Os03g19900.1 (locus LO C_Os03g19900) derived from phytozome v7.0 (chr-ID Chr3; po s 11186465 to 11187404 reverse strand)
ccggcgagaaggccagaagcgcaagggccgccaaggtaatttactaattaaaattaccgctaatcaccattagtccattaccctttctgtaccgtcatttttctgtcaccgatcgaggaggcctcgccggcggggaggggtatcgacggcggcgaggggacggtgatgagttcgccgtgatgggatgggatgggatggggtgccggcgccgtttcggggggagatcgagagacgggtcgcgtcggccatcgtgtgcatcaagttgaggtgacattagcatctccgttagactcgcaacagttcccggattctctgcggtgccgggccccggtgggtcacccctctttgaccgtgcaaccgtaggtagggggtattgtagccgctgcctagtatacctctgtgttctgtctactactagtagtatctcttttttttttaatctttcttgtggccatttctctgatgcaatagatcggctagagcctaaagcgatttagcaaggcgatttatgttggttaatcttgtaggcgtggagattaactggtcccgtggttggtagagtgacgtcgtgtatctgtatgacagctttgccatggcaggactgctgctgtggtgcatgcagcttttgcttttttcctggttttagtagtagttcatgggtgatgtactgcatgtttagatggttttatttgggtcagtttctttcttccttctattgcaagtctttcttttctccttttttgttttcttctgcattacacacggcgagagtttttgtttctgaaaaatttattacgagtcgcaactttgcaacgctaccagggttgtgtaggggacagctaaggtgtgaccaaaagtggttttggaacgcacgtttgaattttattttatttttgctttgccagttacgactccagtagagttgtttctactgtccgtc

SEQ ID NO: 9837 - DNA, 764 bp, Oryza sativa
  Intron number 2 from transcript LOC_Os05g20320.1 (locus LO C_Os05g20320) derived from phytozome v7.0 (chr-ID Chr5; po s 11915485 to 11916248 reverse strand)
ttcagaaggtacgggcgacattcttgactccacctcacgcttaaggtaccaattaaattgattttggtacagacactgactggttgaaaatttaaattaataaaccaaatgggcatccccttaaagtaagtagattactatcagattatagtgtattcatgtagtaattgaatttctaaaatttcttttaaaatcaaatagtgatcgttttactaccaatatcagtatgaaaggtacatatctcatgatttcatatccctgtcttatgtatgtaccgttaggatttcacgatattgtacaaaaaaaaacttctaatgttatgcagaattaaataaactgtgacgtttgggggtatcaagaatccggaagaggtgacgggtaaagtcacgttacagcattgctcacaaggtatggatgacattatcaaaaccccctctacacaccacatgcaatacatatgtacattttattttttctcttttccccaccttccgaattaaataatgtttttttccaaggcacaacttcgcacctatcaaaagacgggggtgacgacttagcttcattatctttgccatcagatgacaatttgtctgaatcacagatggcatcaaaaattgaccagatttgtttaagggagtgtgatcctggtctcttttcgctggttataatacatcacaaaatgacaaaattttcatcacagaacataattatcattttaggtcactacatttgaatgttattttccaccgcctttcagggaa

SEQ ID NO: 9838 - DNA, 544 bp, Oryza sativa
  Intron number 2 from transcript LOC_Os07g45050.1 (locus LO C_Os07g45050) derived from phytozome v7.0 (chr-ID Chr7; po s 26879890 to 26880433)
tgcatactttgacaatagatttccaaggagaaaaggtaattgaatatgtcattttgatgaatcattattatttttttatactataactgctacagtgagtacatgcttttcattactatgaatctgttaattcagttgtgttggacttttgcacaagtcatgaggatctagcagtagaatgctgtcatagtttcagttggttcagttctagtactacttaggtgcattcaccttcagtttttattttaataaagaaacaacctacttaggagcatgcattcttcattaagaagaagaaagacatctgaatttgagttaaaaggacaccaacctaggtggtgtgctgtgcatctacacctctcagttttggttttaattcctcttcactcaagacttgtaattgtccagaaggattttattattaggaacaaactgagactaacccttgtttgtgcaatcatttaaactcatcggtgtgctttgtttctgttttttttttctcttttcagctttgggtacaacctgaacaaaaacaattctgccc

SEQ ID NO: 9839 - DNA, 353 bp, Oryza sativa
  Intron number 1 from transcript LOC_Os07g42860.1 (locus LO C_Os07g42860) derived from phytozome v7.0 (chr-ID Chr7; po s 25663373 to 25663725 reverse strand)
ccattgattggatttgcaaggtgaatatgaatcaaaagtgtaggaaaaataaataaagctctaggatttttttttgctttatttgttactattgatggattaattgggtcttctaggtaggttgttgcatgcttgcgttacatctttgactctagcgtcgatcttgctttggctctgtgcatttgcctttgctgctaaacttgacaaagcaccagattgcagataacaatggggctttgccttttatatggacaaatttgtttttaagtagaaactgacgaaggtgctaatcttgtcttctctcatgtgcgcttgcaggtccattcctactacaactttggaccactcagcct

SEQ ID NO: 9840 - DNA, 683 bp, Oryza sativa
  Intron number 1 from transcript LOC_Os04g39130.1 (locus LO C_Os04g39130) derived from phytozome v7.0 (chr-ID Chr4; po s 23087641 to 23088323)
gccagcacacaactctcatcagacggccatcaacagtatgctctctcagtcttcatattttttttcggggggggaggggggggttaaaaaactgccattatagttacattttgtgtgccatttttctaccatcagttgattctttggaaagctattgttcatcaacatatggagtatttatgtgtcagattaaattttttttcctacactttccacctgtacatttggaacatgaacgaaagggcagcataataagatactagttcactctacaacatcaacttaaatttcagttctatgggaagttaaatagtactagtgttgtgaatcttgtggtttaaaatgcttaccaagcctagctgtctatgtagtttcgaattctttcttacctttcagataatctacatattatatttcagaagtgtatcagattaataattgggaaaagatgcaagcaccaaaataaatgaacaaaaggaaacataacttctaactctgcaaaatccacccccaaagagttatggcatatttccgatgtcgacaaataagatatgtattgatagcatatcagttcttttttctttttttttttgcggggagcatatcagttctaatataatcaaaagcagcaagcttgcctatccaagaaattcaagtgtgattttgtctttgtttaggtcctc

SEQ ID NO: 9841 - DNA, 794 bp, Oryza sativa
  Intron number 2 from transcript LOC_Os03g48090.1 (locus LO C_Os03g48090) derived from phytozome v7.0 (chr-ID Chr3; po s 27343084 to 27343877 reverse strand)
ggtatgttgcatgctaaggctcaatatgctttgtagaatataacattttcctctccaatactgttggaattctgtagaatatcatgagttcgactcttaagcagaattacaatcatgggcaatagattgggggctacataagctggaacacttattttggatgcatttctgtgttactattatgctgttatactgcctatataattgttggagttacatggggcgtagtttgacatttgctttgttgatgttggtgtcttggtggttctcttaagcaaagctacaatctggatcacttctcttgagtgcacttctgttttattagtatccggaaaacttattttgagtgcacttctgttttagtattatgctttttgcctgttttactgtttatcttatgctccatttggcattcaggtgcattatggtaatctcgtttggtgcaactgcatttagatgatttagcaatcggctaactgctttctttatctaacttgcaaatgaaaatattattgcgtcctaaaaaagatggaacaattgtgagaaatatgacagttggacatattttgtccagccttaatttgatttataaagaaaactgcaatggttgtgtatttatgtttctacagctgtcctgtcagatcctagaggaacattctcttttctagaattttagttgcaatctgttcttcagttgctcatttacatgctaagcatttaactattctgaactgtcttacttgtgatttgtgaaatttggtttgtaattatctatcctttcaatttcaggtgat

SEQ ID NO: 9842 - DNA, 696 bp, Oryza sativa
  Intron number 1 from transcript LOC_Os05g28480.1 (locus LO C_Os05g28480) derived from phytozome v7.0 (chr-ID Chr5; po s 16614247 to 16614942 reverse strand)
aggtaatagaaaatatattccgagttctcttttgtatccctgcttttctatcagaatccaatttacactagtttggacacattgtggagttactgccttgtttactaatgctagatgcacaaatgaggtccttctttggcaaggggaaacacaaaatttgaactaagtttatgttcattcagtagatgctagatactctctggcacaatatagttatattttaattgatggatgaatttagttttcttgaatttatgcttatacgttggtcagatttgttcatcttgaatttatgctttaacttgggtcagatttgttgatcatgacatcttcaaattttgtaatcttgaaagtacagttttattttggtaaagtttgggtaacttttaacctggattaatttgattcaacatagtttatttgcgagcctgaactttttgggcgatatctgagtatgcaaacttgataaagttcttatagcagactggaatcagtcatagaactgttcaggctactgatgaagaagtaaaactgaaaataataacagagagtgtaaaggtttattaggccattcacagagattatttttaaaatcaccttcctatctagatccaaatttagtggcattgcacttcatatttgtcattatgatgagatgtgttttgcagactgaacagaaaaagcaagccgctgcag

SEQ ID NO: 9843 - DNA, 855 bp, Oryza sativa
  Intron number 2 from transcript LOC_Os04g40420.1 (locus LO C_Os04g40420) derived from phytozome v7.0 (chr-ID Chr4; po s 23837177 to 23838031)
cccaaatattgaaggtactatcgagttataaagttcctttttgcattagctgggataaatgtgggatatcaaggaggaatgcggtatcaattattaagaaaatggaggtgatgagtggctacgtcatcgaacgcaggctggcgcaaagctcttggcagctatctggcaactgagctgtgcgccattctctctccgtttgcattaggttgtcttctttagcaaattttgggttagtaatcatgtcttgctagatttaggatgctaatggttacagcgctactgtgtggcaatcaaatgattggtttgaactttgtatcatgcatgcaaaaaatgtccaaaggtttaaattctaggctttaggaatgcaagtatttaacattttacaacctacagttttgaataaattacttgtcgtcttgtggagaaatagattcgtgaatatgttatgaaataacagttcttacaaaatattaaaggatatttggctctgaaataggtaaagcgtttagattatagattggatcgccatgtatgtgtctagcatgatgtccttctgcactaatggttttcatggaatacatactccgagatgccattattattattttttattatagtatttcttgcagcatcattactctatttatggcattctgtgagatgtatctattattgttttattataggatttcttgcagcatcgctactttatttatggcatcctgtttatgttgtcgtactccttgacatgatttttgttgcttatgcttcatagcacaccaagcttcgacgggaataatctgagaaaagtacatgttatatgtttgttaacatttggtatgcttgcttttcagg

SEQ ID NO: 9844 - DNA, 848 bp, Oryza sativa
  Intron number 1 from transcript LOC_Os04g35114.1 (locus LO C_Os04g35114) derived from phytozome v7.0 (chr-ID Chr4; po s 21169022 to 21169869)
cttttttagcgtccaggggcttagtgctcttcaaggtttgaattctgtacacaaattattttttatttgatgaccttgttaatacaaacaatatctttttctttaatagagagcttcacttcccatgttgactattcgtatctgttatagccttataggatataacctttttgacaatttgtagaggcaaaagcatttttcttctattatgtttctagtgcattccattgttccacgtgatctccagctcatgtgttctgttgacattgcttcggatcctgaggagcaatagtaataatgatatgccatttgacaacttgtagaagcatgggattttttttgtttcattagggctaatgaattacataagctccacatgatctccacaattgttctttgaaaagcttcatacatgcagcattgctgtgcatgtccatgctctcctaatatatgcaataataggtatattaatcagcacatgctactaaaattttcatttattagaatcaaccatcagcagaagctataatttcatatccttattgatgataatatgtgtggcgaaaatcttgtcatattaatgttaaatcttgtatttgttggtaagatgatacattccacctaaaatatgatatgttatcttctgttatcagttttttcatttacaatacaacataatatgtttgtgtagaaataagttaggtcattaggtctagtagaagtgaagtggaccatttgcttgttattcttcgattcatctttctcaaggtttgagtccacaatgttttaataagtgatgtatctatgatgcagtgaatatctccgtgccatccccagctggactaatt

SEQ ID NO: 9845 - DNA, 1063 bp, Oryza sativa
  Intron number 1 from transcript LOC_Os04g42930.2 (locus LO C_Os04g42930) derived from phytozome v7.0 (chr-ID Chr4; po s 25211993 to 25213055)
gagaccgtcgcctccgctcccgtcgtcgtctacaggtttccctccctctcgatttgctccctgccgtgcacggttgctagttcttgcatctttagaaaagagtgtagttgccgagggattcgtgaggagatggacaggggaaggggaaagagaagcggaagttttggataagaaggaataaatgcttctgcggactcttttcctcactcatcccttttcctcccttcctcatctccatttactgagcatattcctccgctgttctttgcttattgtttattgacgggagtattatatttgagtgggtgatgcaaagaaatcacatgaactagatttctagagagagtacttgattatttgctttctagagtagaaattgtttgaactaggtgtacaatttctagagagtagttgatctatttgctttctagagtggagaaattgtttgaactaggtgtacaacttttagagtgagtacttgatttatttgttttgatgttttctagagtagagaaattgtttgaactatgtagacatgtgaaacattgaaagcctatttggaagatctggcccaattttttgtttgtttggatggcataactgtgatttgttctgcaaccctgccatgcgtatgcgattttgggggaaagtacattgagaaatctctttctggatcactatgattttttgtctccaaaatgttttgatggagcttttgattgtctctaatgttctagtgttgacatcagaggtttgttttgttttgttaaaaaaaaatcggtaatgatgagttcagctcacccacctggtacagagttagtagtctgctcctgtgcttttataagctaacatgctaccatctgacgggcaatggtttcacttattctaaatttattatttttagttttgatctttgtaagtttttgttccctgtttttttatctgattctcttattgtttggtttatctgcagcaagtttttgttccctgtttttttatctgattcttattgttttgtttatctgcagcaagtcttactgtcctttttgcgtccgtgtgaaga

SEQ ID NO: 9846 - DNA, 1018 bp, Oryza sativa
  Intron number 3 from transcript LOC_Os08g28214.3 (locus LO C_Os08g28214) derived from phytozome v7.0 (chr-ID Chr8; po s 17215343 to 17216360 reverse strand)
caaaagttttgaatagcacagcccacaactgtgaggtagggcatgatgtatcttattgcaagatggcatgttttctctgttcagattctaattctctagtagctagcctataagccttagttatccatatcatttttgggttaattgtttgcctgttcagtttgttcatgagcaaaaggtataataaaggacgatttcacactaggttgtgaacagtataaacaccggcttttaaccaaacctggtgggtaccaccataccaaaataaatgtataatgtgtatataccctctctgttaagacccaaaccccccctcccccctcccccccccccccccccgccccatgaattattgtaaaataccactaggcttgccatttcatatctcttaagttaagcgtgcatgtcgtcactttacaatttggaagttcaaaatacctgagagcatgctacgttttttcaccaagaaactgaaatgaaactggcaccctcaagttttgagacttagttggtgtcctaaactctcacagttaacgatgcagatattattttccagggactgaaattcatacattgttatgtcattagacaaagtttcatgtctacaagtcagttagatgttgtttccttggattctatttttgaatattctttgaggttcagagcaacagcgacacaaaatgcattgtaatggtcatctagaacttacaggtcttttccattgctagaaattaatttattgtcatgatattattaccactttattttgtttttcttggtacttttcctatgattcaatcagattggctaagtttgagtgcagtcatattttagcagttaaccagtcattgggtgcaaaaagcccatgtcaagatttaaggcaaagtttctcatatgaagaaccaatgagatgttcagctgcgtacttgtataacatatgcttccatgatgtgtatgaaactcattctatctttcaattccagagcaaagcagcagagggtgatattgtgggtaaaca

SEQ ID NO: 9847 - DNA, 811 bp, Oryza sativa
  Intron number 4 from transcript LOC_Os02g57410.6 (locus LO C_Os02g57410) derived from phytozome v7.0 (chr-ID Chr2; po s 35175285 to 35176095 reverse strand)
gtgccagttcccgtaagtctattgaccctttgaagccaggttaataagtagtgttgttatgatttttgatctgcatcaggaaccaccagaagataggaagttttgcttcaaaggaaactaggaaggacctaacatctgttcaattcaccaaatgaaacatgggcagttgctttattattaagttattagtagctactaagcagggtcgatagtagctaatatatttacaaaacacctttatatgtttattaatccatggctaaaatctcattgagagggagtatcgctttatatcgttgtcaattggaccacttcctttaaatgccattggacttaaataacggatgtgacaccaaatgcttccatgagtctttaggtacattgaaagaacaattaaatttggatattctttggtctgtttttgtccaagttttgtggattgagttttgctttcaagccatgtatactgaattccttgtgtcattgtggttgccatatgttattgcttgcccatgttgtgtgtatcctgagaaaacataaatgcacaaagtgcatagtatcagcataatttcaaggcacaacagttatctgaagttcagaacttctcaaataactaaaaccatgctagttattgctttaaactagtattatcccacagtgttatactgttgcatagcagtagagctactgtccttttcttttccaataattgttcagaaatcagatggaaatgaacctactgtgaattagtttggcgtctctctctacattctcacatttggttaaagtacttgtttctgccttgtccagc

SEQ ID NO: 9848 - DNA, 719 bp, Oryza sativa
  Intron number 1 from transcript LOC_Os03g24170.1 (locus LO C_Os03g24170) derived from phytozome v7.0 (chr-ID Chr3; po s 13718812 to 13719530)
ctcaacctccagctcggcatcaggtgcgtgcgtctgtcccgtctcttactcttcttctccttcttcttgttctttttatttttgtccgttctttcgatccgggtgctccatccaaattttccctacatggatttcctctcctttttcaatgtatttatgctgattgcgcattttgaatttcgtatgatgtaatgccatcgccaattaatctaccgtgcagataaatttgcaaaaaaaaaaaaggttagaaggtgatgtttattacatgattttaattagattattctggtctcatggtaagcaaaacttttcaatggctagctacaaatgccgaatgattttacctccccctcctgacggggatgtggcaattttacaagaagtcattgtttgcacgtagaggaagcgacgcgttgaaaaattcaacaaaaaattctatgcctaacatgtgcatttgtttattgactcgaagctgaaatggtggcaaattgtgattaattggaattttacgacaagaagaggggattctttttattgaaaaatttaatatgaagtcaagcataataacagcagggcatactgtgggccaaaagcatacttgcatattttcatttaagcagatattatatcttcttacactagaatagtaaaatgcatgtatttgcaacatttcagaatgaatttgtctatgctctaataactttgtctgggcaatagac

SEQ ID NO: 9849 - DNA, 1006 bp, Oryza sativa
  Intron number 1 from transcript LOC_Os06g11480.1 (locus LO C_Os06g11480) derived from phytozome v7.0 (chr-ID Chr6; po s 6081250 to 6082255 reverse strand)
ggacaaggtatttccacactagaatagtaggaaactttcgatttttcaaccgtcggatttgttttgagatgcatactagggggaaaagaaaaaaattcacgtagaaatgggggcaaggggaatcaaactcacagcatgctgcttgcgactgcggaagctactgctaggggaaatgattaacactaccgctaggccagctcacagtttaatcatatacttcctcatccggtacttatattattatattatagggtagaggaagtatttataatttatatacaagttacacggtaagtaattgcactaatgatattatctaatgacactatagttgcatttgaaagtttttctccttaaaaaaatgtcaaatgttatatagctactccttttccacacaccacgacttgattgatatggcttgttcaattaatttgttgccaaaacaaactataccaaaatttggtaatataattttgttagtgcaacaaactcaacgagactttaccattgtaacattgtcaatttgtaccaaaatttaataaatccaataatttttattcacaaaactatatcaaaatttagtaaggtgtcaaagccaaacaacacctctacatcttgaccttgacaaaaatttggtagtgcaaaatcttggctttaccaaaaaaatttgaaaatgtttattttggcaataaactgaacatgcccatattgttttttaatgtcacaacatttgaaacctaaattcatctagcatggtaggcctgatgccaaattaaggatgactttttttctcccttttttatggtaggcatttgtacaccacaaattcttatgtgacaatttggtttcatagctaattttccttaaggttatatttttgttgaccaaatttttttaacctactcatcgcaaagttaatcatgaatcaagcatgtttaggttaggtttagggaacactaaccctctgtcatttaaggatcaggcatacattctcacaccactggag

SEQ ID NO: 9850 - DNA, 826 bp, Oryza sativa
  Intron number 4 from transcript LOC_Os03g29350.4 (locus LO C_Os03g29350) derived from phytozome v7.0 (chr-ID Chr3; po s 16700282 to 16701107 reverse strand)
actggtcaaacaaagattttacctttgcatatagtgtaagttcttctctagtggtactttttttttttggatcaattgcacctgctctgttatatgtttctgaattcttcatactttatagtgttctacggcaggttgaggcaaggtgagaaattccggaaaattcatagcatttattgcaactgcatgatcttaggatagcatattgaatcatatgcaaatgagatacattcttcaaattttgccaccctttagcaaattttgctgtgagattttagccttttcttttcttttgtgtcggtaatggtggtgctctgacgcaccgcgcaaccttgtacattccttttctctctcttcatatacatcggccggctattcgctggcccggcgaaaaaagagatacattcttcaaacattttctttttaatccagtgagtatgagctacaccatcattgctgactaattcaagttgagctgagatcttcgcgattactgttaccattctgaaaccaaagagaaatgaatgcttttctgttcaaaagggatgcacccaaatgtttttattatgttatgacagtttggatgaatttagctttatttgatatctcaaattctaaatactaaagtacgaaagctttcttcctcatcctgttcagacttatggcttgaatgtttcatccaacaagaaacatcttccgataaggaaacttttacgagttcactgcttgaatttagctgcacacttgcaatggagatgagtatgcactaacctgcctatattttttttcttgtctataggtatactcaggtgatttatctggtgga

SEQ ID NO: 9851 - DNA, 514 bp, Oryza sativa
  Intron number 4 from transcript LOC_Os07g40090.1 (locus LO C_Os07g40090) derived from phytozome v7.0 (chr-ID Chr7; po s 24059325 to 24059838 reverse strand)
ggcgtggcagcggtgcggtcacaagttccaccacggtgagtgcctttctgcgttcatatctctctgtactgaattgatcttgactagcataattatatgctatcatgtttgtacacactgcaattatttctcatatttttacctccaatcgtatggcagcaggttcatggtagcacatgggtttggtaaatctattccaacgaaaaatggtagtgtttgatcattcccttcgttttgtatagctttggttaaccttctgggtgaggtgcactacaattccttgtatgccattgaagttgagtgcttctgcttttttgtgatatatgggagtgaagaaaaggtttcctacaattcctctacttggcctcagatcaaatgatttgaggggcagaaaacgaaacatgatggtattcagtatcaaagctaagtttttttattctttttgcagtcataaaatttgatggaatactaatgcctgttgcagggtaatttgccctcaatctgaggtattgcc

SEQ ID NO: 9852 - DNA, 901 bp, Oryza sativa
  Intron number 2 from transcript LOC_Os03g39740.1 (locus LO C_Os03g39740) derived from phytozome v7.0 (chr-ID Chr3; po s 22113595 to 22114495 reverse strand)
aggaatcctttactttttgatagagaaggttatatgtaagtgcctgatttcaattcctacagatttagtatattaacattgcttatacctgatactgtatttttttaaaaaagcatgtcagatgtgatggcgcacactcattcaaattttctagggtgttttcagaaatttgctgattttccaaagaaattttgaattgtaccatacaatattttgaattttctgcaatgctatcgttaatccctatagactcatttcaaacctgatttttttattgcaatttgaattttttacaacacaatctttaaagtttgtaacttctatacttaaatgttactccagagtcatcccctaatccccacgttccaaacatgtgaaatgcaaatctcagggtgaaaggggattgggtggtgggaggggattaacccaatcccccccccttgggtgaatctccctggggaaatcccccccctccccccttgttgctgaacgaagccttattgattcactctagcactaagtttcccgtatgtttattagaagcattcctgtgtaatcacaaaattgattattgcaaaaccacttgctactttctatgtctttttttcctgttatttttataatatgtgcaccttatttttctgttctatgatgggaaataggagagctaatgataatgtcccagcatatattatgatttcgtaatgacacgatttgcctattatcctgctctagtgctttaattgaatatgaccctgtttcatctagaaaaagaatatgtttcatcttaaagataatatggcttctgttattcatctattgtgcatacatttggtcataacatctggttttcttcactcctgcaggaaactttttgacatttacaattgccaagttgatt

SEQ ID NO: 9853 - DNA, 895 bp, Oryza sativa
  Intron number 2 from transcript LOC_Os03g03530.1 (locus LO C_Os03g03530) derived from phytozome v7.0 (chr-ID Chr3; po s 1524437 to 1525331 reverse strand)
ggtactttctgttcgaggagccactgccttctaaggtaatatgagaattctcccttctgtgtagtgcgtgcacatcaagctagttattcatgcagatcaaatagctaaaaattttcaaatttatttgtgttagcttatgtcctctgttagattgggctttttcttccctttcaaacatgggaagagtatcctaggttgatctgtcacattgcttcttagtagtatgagtaggtttatttattataaataggattaaatctagttattaagctaggccactttatctggattcatattactcgcttgaaaagtcacatagcatacaaagattatcttataatttactgttgtatgaaaaaattcttgagagatgcatgcagttggttgataggaaagaaaacacactggatctttaggttgttatgctaaaatagatgccgtttttcagatagagaaatagatggtcttgtgctttatatcatgagcaatgacttgcccccttgtataccagttaaatacaagccaaaccctgtcataaatacaacaataataacatatcacttgcctactatatctgtacagctgaatttatgtacagtctgtaaaatataataataataaaaaaagacatttggagggagagatgtccctccaaacagtttcaagaagaaatgtgagcgtgttggggattgaacacgggacctcagggttgaaaccacacaccctttgccactgcattatcaggtgtatctcagactgtagaatactgatacatcactttccccacttttgagtttacatgtatacaaaattgtaactgaactgcactcagcttttgaatttgatgtatgttcatacagtggtttgtaggtgctagtcttatcattgttggtgt

SEQ ID NO: 9854 - DNA, 562 bp, Oryza sativa
  Intron number 2 from transcript LOC_Os07g34110.1 (locus LO C_Os07g34110) derived from phytozome v7.0 (chr-ID Chr7; po s 20393802 to 20394363 reverse strand)
ggtaagttaaatttcttctagctagtaaaaaagaaaaaactgaattgttcttgtgattctccttaatttgttcatggcaccatgcaagatttgtctctcaaatcaaagctcatgcaggagttgtggctcttctttctgttagtcttgtttgggcaaatgatatttcttgaagaatataggctttgctttaacatacaactgtggatatgaatagtgttcacatctcgcaagtcatctcttggtgtgccctgctgtgatctgaaatcttcttctgtgcatgtctcacactgcctttccaatcttccacagtttgtcgatttaattatgatattctctgcactaagttgcttcatgtcaggattgcttagacaacatagcacatggtcagatgttcatgcagaggatacaacaagcctttaacatacatgaaattcacagcatatatttattaataacttctcgattttacatgtattacattgtcttgtaaaagttatgtaattccttgtatattttttttatcacagggtgacagcttgtggcgacttatttaaccttggtc

SEQ ID NO: 9855 - DNA, 676 bp, Oryza sativa
  Intron number 2 from transcript LOC_Os07g43070.1 (locus LO C_Os07g43070) derived from phytozome v7.0 (chr-ID Chr7; po s 25805643 to 25806318 reverse strand)
gtgaccgaggaggagttcgagagcctcaacaagaggtgagattgtgaagggaagctcgtgtgtgtgtgtgtgtgttcgtggctgtgaatgggatgatgattccgtgttcttgttcttgttttcttcttctgagttttttttttgaccctggccattagatctctcaattttgaggctccaccctttgggaaagatcgaatttcctacggtgttttagctgatctgctactatgaaatgacgtcgagtgaaatccgctggatttgagtttcagttaggtcggtgagatgtgcacgattagttttttttggatttgaactactagattgtagtgtcacatatggatatggcacagcccttgatctcacccacaagaatgatacgagtaccttgcagtgttacagtttgaatctgactgcatcttgcaccatgctattgtgcttccatgttaggattttggaacgttcttgtcgaattactattgagctactgataatctcggtttgtgtatgttttcacaatggaaaagtttgtgaacatctcactatcttggtgttttgagcattagaaatgatttaatctaatggttttcttgctcccactgttattgccaatttacaagctgcagtgatgcgcaaactaagcagtcgggttattatttctttctttcaggaaacc

SEQ ID NO: 9856 - DNA, 340 bp, Oryza sativa
  Intron number 1 from transcript LOC_Os02g57580.1 (locus LO C_Os02g57580) derived from phytozome v7.0 (chr-ID Chr2; po s 35263558 to 35263897)
cagcacttcatcatatactacctccatttcgaaatgtttaacgcagttaactttttaagtacatgtttgaccgtttgttttattcaaaaaattttgttaaatatgtaaaattatatgcctacataaaaatatatttaacaatgaatcaaatgataggaaaagaattaataactatttaaaatttgttaataagacgaacgattaaacatgtgctaaaaagtcaatggtgtcaaacattttgaaacggaggaagtatataattgactaactaaattccgatgaactgatccttggaagaattcattgtctacttctttttaggtgtggcggtcggcggcgg

SEQ ID NO: 9857 - DNA, 423 bp, Oryza sativa
  Intron number 2 from transcript LOC_Os07g48420.3 (locus LO C_Os07g48420) derived from phytozome v7.0 (chr-ID Chr7; po s 28958479 to 28958901 reverse strand)
agcacgtgtacaaagaggaggaatctcagtatcaggtactaattaacttatcactgatcaagaagaatgaggtcaattagtcgtcagcctgagtatttagctcaattgcgtgcaatagtactgtaatttagttatgtttgattcatttttctgagaatatgctagctaatcttgtcagtggacatatttgacatgtaaaatgacagaaaatggaacgaaaaggattgtttattttgagggagtcgctttctgtgactagacagtttaatcaatgacacattagcgttcgcgaaaaaaatcaatgatacattactcttgtgtagcattcaacagatcctgcctgctatcttcgcttctaatccctgcttaatattaaatttgcgtgcaggaaatcttgtccagctcttgtgcagaaagtaagat

SEQ ID NO: 9858 - DNA, 706 bp, Oryza sativa
  Intron number 2 from transcript LOC_Os02g57040.3 (locus LO C_Os02g57040) derived from phytozome v7.0 (chr-ID Chr2; po s 34924821 to 34925526)
cgcgctctgccacaccgaccactacacctggagcggcaaggtttctctctctctgtcccaccgactcttactcgccgtgtttcttcgaaatctagatttctcgaactcgccatttacactggtagtagggtagtatactctttccaaccacgtatctggtgatggtagttggtgaccgcactggatggaacccgattcatttttttgtttaattagtggattagtatttaattgtcaagtaacatcgttatgttattgtttcaaggatttaggtgtttcttcagattattatgaatgggaagattaaacaattttgtactagaggactctgggtttcttctaggcttctagctagcgttgcatgagttcgtcctatatttttattttccttgactgcaaaatgggtgtagattgatggcaatcatctgtaggaaatcaaaattactggcagaaacctggaagtgttgagtatttctacagtggtctctactggcaagcagtagaccatcagtattctcgtcagtagtagcatctaaaccgttgacttgagttctactagtataatacaatattctaccgccagtagattactgtaccttgtggcaaatgttggcaacattattatataccaaccaaacaggcccttatcaagtgatttacgtgccatgcaggatcctgagggtctatttccttgcattcttggtca

SEQ ID NO: 9859 - DNA, 1035 bp, Oryza sativa
  Intron number 3 from transcript LOC_Os04g44210.2 (locus LO C_Os04g44210) derived from phytozome v7.0 (chr-ID Chr4; po s 25985689 to 25986723 reverse strand)
aagtgtcagtggctaggggtaagcaatctctaatatgtatatactctgtaagttgtagtcactcgaacataatatctgcattccctttcccgattacaaggatgccttctgtttgaggtttgctcgttacataattgacaatattcccttaggtacaaccgttcaggcagacaatattcccttttctccttgagcagtttttggatggggcttgctatgcctcattttttttctctgaatatgctaatatgaatgatagatacacttcttctcaatgattatgtacataaatgcgaaagttgcacattttggaccatagtcatattgagacatgagttggcaatcaatttctccttgtgggctgttattatattgatatacatttgtattgtccaaaaggaaaaaaggtagatcaaaagacagcacattcttataccatttttttttataaaaaacatgcatatatctttttgccagtgatatatcttttggacccaccatattattagttacgatagctgactaggcaattgcctgaattattgtctgatactgcagttcttagttttctttctattgtgttggcgttccagtttttttttttagtttgccgggctatggttcctgccacagtctaattcgacagcctcctgtcgttgcaagcgaaaactacttgtactttgattttattcctctcaatcttaatgaaatttggtcgccggttccttcggctgacccggcaaaaaaaaatattgtctgatactgtactgaaaactaaaggtgtggttcctctttggatcagtatattgtttgtgataaaatcaaaatgggctttatattcttcaaaagttttattaagaatatagctaactaaacaacagttatatatatttaagatgcgcgtgtgcgtttcctagctgacctagtactttattttcttttattagtagttcttttttttatttttaataataataataatgatttggttctcttgcagaaaagagaaaattcaaggcggcggaagtctgaaga

SEQ ID NO: 9860 - DNA, 915 bp, Oryza sativa
  Intron number 1 from transcript LOC_Os04g44210.2 (locus LO C_Os04g44210) derived from phytozome v7.0 (chr-ID Chr4; po s 25987506 to 25988420 reverse strand)
tctcgctccctgcagattagatcggtttcaacccggtaattttaagctggtttttcgttttacggtttacccgtgtgttcgttcattcgatgcttaggatcgggttcttgcctatactgctggtcgattgattgggctagctgtggattatggtagtgttgatttttgttttcttggtttgcttctctgattctctctctatcgtgccatatgaactgcagtgtgcaaagccaggttagttcatgggggcggcagtttcgggttttgcatgcatgtctgtgtggtttggctttacgcaatcattggtgggtttgggttttttttactaggtctttttctatgggcttatgaactgtatgcaggagcagattggccgggtccttgtccgcgagttactttctttgatttgattctttcatcgaattctgttgctttcttgttactgggggccatgcgacatgcggatagacactgactgcccgactgggttatatggctgtgtgctctgatccgcatgagacgatgagagaaaatcgtccaaattttgcctgttgatctggttctgtagcgaggatttcgtctgtggcgtgcttcacatgaaagagagtagaattggctgaattatgaggattacatggcaaaagggagaaaaataatctattgctttgaaaatattgatactctgatcttttacaagtgaagtaaacctgcgttgcagagtacaattgtgttccttaagcatatttctttttgccaagcaaagaaattcgacatttctatcttcatggaagattggctcgatactagtttcctctattgagttttatttctccaaattccaaggtttcagcttccttgacgtgcttagttccatctgcagggaacaatatattgtggaagtacacaaactttttg

SEQ ID NO: 9861 - DNA, 469 bp, Oryza sativa
  Intron number 3 from transcript LOC_Os03g07130.4 (locus LO C_Os03g07130) derived from phytozome v7.0 (chr-ID Chr3; po s 3648155 to 3648623)
aaaatagcggggttctgatttcaagtaatgtaccttatcactcccacttgttttttttttctgcaacatcttagttccactgtcagggttgggcatcatacgctccattcatggcataatagattataattatgtttcttttgtctttatattctcccttatgtccatatttgaggacctgtatatgtggcatgcattaagaagagatggggccatgtgagaggcacaagagaatgcttttcaaacttttccttgagaacggatgaaacaaaaatactgtctaggctgaaactttccaaaataagtaaaaaaatatgaaaaaaatagaaattgatacttttaaaagtcataccactttgatgcttttcactagttcatttagcattgtttagactttgggggcatatggttctgcattatctaactttgaagtttacagtggctggaagctcaggtggtattcacattt

SEQ ID NO: 9862 - DNA, 829 bp, Oryza sativa
  Intron number 1 from transcript LOC_Os03g57580.3 (locus LO C_Os03g57580) derived from phytozome v7.0 (chr-ID Chr3; po s 32823787 to 32824615 reverse strand)
gctactattgaaaccagaaataactgtatgttcctgtttccttttccttctcagattcccaccatggtgaatgctactttgttatgcaaaattgaaccagctgtagttttgggaatgtttgcctacgttatttcagcacaacttgagccattagacacaaatttgcattgaagcaacacttgaaaaggatcttcatcatctacaaatatttagtagtctattacacccatctggtgtacagtttgttttgtcattggagtgcttactagatagttagggtgatcaactgctctttccatcctagggagaaggaatttcacactattatagtctatacaacttctttgctgctgccttttgatgccagcattttgatcaattcttttctgaactcaccacagttgtcttaaccataatgcaatctgccatgtgttctccttaatactgtcacttaattgattttaacacttatatctatcactctttgtgttgatctgttaatcactctttgtgttgatctgttatctgcattctaatatgcatgccaactttgcttctacataccaagttctttctttgttttcccccttcctacgttggcatggcacacatttttttttagttgtacagctgatacctcagcttaattgtgaactaatcccttagtttcatactcaatcacccatttcttcgaaaacataatgatagggtggcttgagattcaatgcttgaactgcctttcaatgtttgccttttctttgtgggcatgtctagatgtgattccttcctgtttcttgcttcagccgtgattggtgtactgctttaacca

SEQ ID NO: 9863 - DNA, 974 bp, Oryza sativa
  Intron number 1 from transcript LOC_Os06g33780.1 (locus LO C_Os06g33780) derived from phytozome v7.0 (chr-ID Chr6; po s 19649830 to 19650803)
gcaacgatcacacagatacattaccacctaaccaggttcacacagaaccacccatcaccccggtcaaaaatgttttatctgcccgtttttttacacggtgcaacacatgctaccgaaaagatagcacacagccacacagttcatataaaagtgattataagtatatgattaatcaaaattatattttgcttgtaaaacaaccttgagcaggctaagcataactactctaccatgagttgagcccaatgttcaactcacaaagactagggtgacatggaatcatgggcaatcaataattatgaaaggtaggataataataacaattaggtcacgctacccatcgatagtttataaacaaaacaatgcatgtattcaaaacaaaacatttcacaaatgggttcaatatgttcaaagagtgcacttgccttgatcccagtattgtccttgcacagcgtcttctggagcaaactgctcttccgctccaacatctacacgattgcaaacgaaaaacaaataaacacaaagaaaaactaactaaataacatcaaatgaaataaccaattaaaccaggaggtagagctcgattttagaagaatttaggaagaagaatgggtcaaatcggagttcaaacggaaaagttatagcctccggaagtttgaattcaggaaaaatccgaggataaaagaaaaaggaatattccgagaatattctctggatatttaatttcggaaattgaattatttttagataaggaaaatatatgtgggcccactgtcagtggcatagagtgtatgggtgaactcggtgtatgtagactcgatgacgtggaacgacacgtggcgacataaggcgatgaggtggcactgacatggatggatctagggctgaggtggcataggttagggattatgtagatccaacggttgggatttgatctagggatttggacgactgtgattatttggagtttctag

SEQ ID NO: 9864 - DNA, 1049 bp, Oryza sativa
  Intron number 1 from transcript LOC_Os07g08890.1 (locus LO C_Os07g08890) derived from phytozome v7.0 (chr-ID Chr7; po s 4617761 to 4618809)
gtagcacgtacaggcaacggaagctgcagcgtcaggtatagagattttgttggttggttccccacctctccttggttgcatctgttgaacggttgtcaaattttgtggccgtacttgtcctcgagatgatctcaagaaccagatcagatcttgcggattgcctgttattagtgggataattggtagtgagtggctggtagagaaaagattgtttgggttttaatttcttggcttccacttggtggatcctagtgagtgaagggtttgattcagggatctcactggagatcctcctgttgcagggagagttgtatcggcttggcgatgttgattcttgtttctatgcaatttatggcatgctggggcttaaagaatcacctgtagatgagtaatttttattcctgtggagttgttattgatgctgaaacacaaattggaagagtccttttttttttttagagaagagtattttttacccggcctctatatccaaccggatatatgcagccttttttctaataggaacttagcctatcgaacaaggaactagccctcaaataacccaatctgaaattcactcctatagagatttgaactcaggaccttgaggtgctattcaggtcactgcaaccactaggctacatgaagagtcctttgttggtgcttcacatgcatttcagtggagatcggagtattgcggtgatgatcagtgttgtggatgatacacctgctgagactatctcgttcggtgtcgatgtcagttgtgtttatgtgatgagttaatggcagtgtttcactatctaggttatgtcaatctaatattagtcttaagaaaaaaaagccaacctagtattagttgtgttttctcagggtccaatcttaggtaaggaatacttgttcaagcaagcataagtccataagggtgctggcttttccataatccacaatgtccagctatggaatgcctcctattctcaacatttactcatgtaaattggttttctctggttgcaggattaaacccgcaaaaggatagccaaggttccaga

SEQ ID NO: 9865 - DNA, 358 bp, Oryza sativa
  Intron number 1 from transcript LOC_Os07g11150.1 (locus LO C_Os07g11150) derived from phytozome v7.0 (chr-ID Chr7; po s 6150603 to 6150960 reverse strand)
agcctggtctacgtacagctaggcttcacacaactgtaagcaataaatatgtgatctagttttaccttgcagccaattaaattttgttatttctacccattacttgtttcaaattgttggcctataaaatggacaaatgaattagtgagtatgacaaacagatccatattatagcattacttttgggacaacagtactctgttgttcttcaaaaacaaatccaaaatggctcagggtataatcaattctgaaattattctttttgaaactatgtacagcacagtcctacttctgaaatgagaatgatatactttcgatgccataaatgacagataggttttttttgggtgcaagagat

SEQ ID NO: 9866 - DNA, 679 bp, Oryza sativa
  Intron number 1 from transcript LOC_Os02g57380.1 (locus LO C_Os02g57380) derived from phytozome v7.0 (chr-ID Chr2; po s 35153487 to 35154165)
gcgcagcagctcggcctccccatcgtccttctctggtaatactaataccctcctctctttgattgtgatgagcagtaaattttgtttcatttgataaatgcatcgttgtagcaacaccaatcctggatcttggatgacatggttactgggtagtagtactactagtactatcctgcaagttcagtttgtttttttggatggaaattggtcagtttagagttgaatttggtagtgttctgaatgaaattcaggggctcgattaggtgattgttcattcggtgcatctgaccttattaggtgaagtgggctagatcatcatcttgcttgaaatgattgtttcgcctttcattcattaaagagttgcttttggttaactaaaatacatatggatatatgattttgtgtgcatgtgttctttatttgatcgacctttttcatgttggtggcgtctagttactttaaccttgaaggaaagcttcatcatcttttttttttccatattgtgttaaaagagttaaatgaatcttttttatccatttaaacaattggctgcttatgtatattaagatatctgagattgtggacaaaatgataaattaagtaccggtgtcacattgtttttcacatagcactcttcagtcttgcaccaggataatgcttagcttttgcaatttgtagg

SEQ ID NO: 9867 - DNA, 792 bp, Oryza sativa
  Intron number 2 from transcript LOC_Os08g06290.1 (locus LO C_Os08g06290) derived from phytozome v7.0 (chr-ID Chr8; po s 3464499 to 3465290)
gggaaggtaggtattagtaataagcaactaaatcatctagagaaaatattttttttaaaaaaaataaaataaacagttgcaaagtgaaaagaaattcttgtgtggcccacctgtcaggctagttgtagctcacgtttgagatgtgtgggaaatagtggctcaggagatgccacgcgcacaccagacaagtcacggggctcgtacaaaaaacgctgggtccacacacgttatcacacagtagtaaataaaagtgaggacaatggaccatacaaactgcccactattttgtgaggcacaggtacgaactttgttttatataaaaattggttacactatattgtaccttcacaatggttataattttttttgcaaggaatatggagtcaatgacttttatcatgatgaaatagactgtctttgtatgtatctatattcctttagaaagggtgtgaatctgtcacccccacctacttccattgtaattttcgcaagttaactctgaacttttttttaatgttcaaaaaaaactctgaactttttaatattaaaaagattagatctaaatggatagccacatgaaaaatttagagtaaaatgaatattccctataaaaaaagtgggaaacacattaatacattttcttttatctgtagtaaagtatgagcatttaactagttatatatatgtgcataacttcctaactttatttggtatccaagatagaaaaatattttttattttgacatgtgcttgattccacatgtagatagtgtggatcaacagaccgcctac

SEQ ID NO: 9868 - DNA, 1006 bp, Oryza sativa
  Intron number 1 from transcript LOC_Os05g02260.3 (locus LO C_Os05g02260) derived from phytozome v7.0 (chr-ID Chr5; po s 719903 to 720908 reverse strand)
agcgctccgtgtcactgcccgtgagtatctaatcttcataaacagcatatcatatataagaaattggttatatgttcggactaatagttatcttcttaaccttcattaagtgtatttgaactcaattctaggatgttgttcttatagtgatagttgctgcaaaatggtttccagctgctgtctgggagtagcttatgtctactttaacttaccaaatttatgtttgatttatattcattctgaacacatggtttgatcgaaacgcttcaatatcgttaatatccatacattattatcttttggttttattctcctgtcatctaaaagcaacaatatattgaaccacttgaaaaaattattggaaaaagctctggttgtttttgcactatccgtagagtgtctcaagtccaagacttggaattgcatagctggtctatattagcaaatgccttctttaaatgacaccaataacagtaggattgatgttaacactgatcaatttgttgcatgtcataataatataaatttggacttaattgcctgagttgatatttcttgtggtaatgtaaatttatcgcttattatttatgctatatttagaaagcgtgcatcagatatgaatgctatgatattcttccattctttcctgttgctcttattataggtaagagatcaaataagcataatgttattggtatattgctgagatgaataaattgctatgcttgtccttttgatgttaccacatccatagtactgctgaaggcatgcgtggtatacatctctatgcatatatatggttatagttgggatttgatggtgcaagcaaccaaaccaacatttcttttgcatttgaaattgattagtatattcttctcctcacgttggcctatttctatttgtctcgtggaaccttgtggctattaggaacgcttttgttgttattctgttattaacgttgcctcattttccttcgcaacagccaactttgaagatcatatctgct

SEQ ID NO: 9869 - DNA, 850 bp, Oryza sativa
  Intron number 1 from transcript LOC_Os05g28750.1 (locus LO C_Os05g28750) derived from phytozome v7.0 (chr-ID Chr5; po s 16801425 to 16802274 reverse strand)
agcccaagcgccaccgccagacctccaccaagggggtgcgtctctttgctccttccctctctctcactctcagatccagattccctgcaatcctgtagccttgccttggtttcttgcaaaaatgatgttttcttcatgtggacatagtaattcactgcaaaaaatttgttcatactgtgttgccttttgtttgaattacagttcgaataatgtgtatatgtggctagaggcttttggaaatgttcgaatgacagttctaggttttccatgttcgaatgacagtgtcggttagactgttattaaaatctccttactattgagttaggcattatatgcagttgtaatgtggttatatgaaaccgtacgagttgcatcgatattagacaggaatttgttaggtgcctatctgagttttcctgcgattaactgtgtcaatttcactgcttaagttctcaaaatggctttctactcctgtgtcacttagccttgtggaattggatattttgcttggttttagccctgccgtttgatgattattagccaaagattaagtccaacgttcattggacccagtgctcaggtagtttgggcaatcgtctgtgtatgtcaatatacttttctggacagtataaacaatttaatcacaagtcgaagcgactttgaatttgtctatatagtcttgtggtgtgtaggaatctattttgttgcttattcttgcatcctattttgttcttaggatttattttgttttcggaaatcaattcaaatgtcctcgctgttatgttgaaattgaatcctgttgccttgtttccgcgttcttacctgggttctttgtaaattgcttttatag

SEQ ID NO: 9870 - DNA, 765 bp, Oryza sativa
  Intron number 1 from transcript LOC_Os04g30200.1 (locus LO C_Os04g30200) derived from phytozome v7.0 (chr-ID Chr4; po s 17851819 to 17852583)
cttggttcttcttcaaggaacaatccctcgtcgaggtatatatattcatctctatgtctcgccgttgctcctctaccttgctctttcagttcttggctgagaactcgggattaccgaggaagaaaccagtgcgttctgtgatacaaaaaaaaaaaaaagaaattttgatctttggctcagttgcatgatgtctctacctgggcgcttcgaaacatgttaatccagcagattcgtgttgcagtttgtcttgtgattttgttaaacttaggctgcttgtttcatcaattgcctcgtaaattccaggttttagtttgtataaatgctgatgttttttttattaattgatttgtggaatattcgtttgttcttttggacaagcaattctaagattgtaattcgtttagtagtagatcacttgtttatcaattgttcctgtaaaccaagatactacatagtttgttacattaattcccttctaggtttgcaaagctgctctgtgttaactgatttcgagataaattaatatgtttctgcatttattaataattttatagatgaataaataggttacatacttgatctatttgtgaagataagcaaacgaaccgtgaagcccaaacatgtacatgaaaaagcgaaaagttttttgtttcgtcagtataaatatgcgacatgaattttccatcatatattcatgcggttcattatgatttcattaattttaatctagggctctggacaactgctacaccttgaaagacctaa

SEQ ID NO: 9871 - DNA, 791 bp, Oryza sativa
  Intron number 1 from transcript LOC_Os02g58210.2 (locus LO C_Os02g58210) derived from phytozome v7.0 (chr-ID Chr2; po s 35618560 to 35619350)
aggtagggaatctctctctctccccccctctgtcctgtcatatgtgttgatcaaacagcttgttcttgttgctaatcaagcagccattgcagacgcagtgtgttcaatcaatcaatatacattttgttttgtctgttcagtttccgctcgagtatcttccattccattccagcaaccgtgtatcctctgtatcgaatctgaatctgattaaaaaaatactagtactggtataggatatactagtacggaattattccttcgaatccgatccctttatatcccaaaacatcttgattttttcccctagattcttccaccattgctttctcatctcatttcgcccgattgctacaaatatctttaaatttatttacgtcaaagaaagttacggtttttcggttctttctccaaaatgctatccgttgctgtttcagtgtttgtgcttttatctactccatccgtttcatactataattagtttcacttttttccctagtcaaacttgattaagtttgatcaagtttatagtacaatttaacaacatctaaaatgtcaaattagtttcactaaatctacattgaatatattttaataatatgtttattttgtgttgaaatagtactctacatttttctataaacttagtcaaaaactcgaacaaacttaactaggaaaaaagtcaaacgacttgtaatatgaaacggatggagtatctatctagtatggattttggtactctttgagggagaacttataaagttatactgaccaattgctgttttgccaatagg

SEQ ID NO: 9872 - DNA, 744 bp, Oryza sativa
  Intron number 2 from transcript LOC_Os07g15670.3 (locus LO C_Os07g15670) derived from phytozome v7.0 (chr-ID Chr7; po s 9098541 to 9099284)
acttcgaaggcaaccccgcgctgctggtcagtgattggttctaggttgcttcgtgcttgaattcaattctgcatttatttattttttaggaaagaaaaaaaccaggttcagttaatttcactctaaactggagaactgaatagaaatgagtttatccatgctatatgcttaactacatttcgtcgattttgccactcccatttccccatgaaactcaatgaaatattgaaatgctaatatgctttctcattttcccattagctatacgcttacacttacaactgtttggattgtcccacacctggtcaatagtagtggctttgtgcttggattagttatgagccgtctatctagtcatttatgtggaaaaactgttaggtcttgtaggtattacagcctctttatgaatgaaacagatcaaaaattcaagatgtggcttatgactttgatggaagaacattaccagtttattatctccattttgtcaaattagtccttgagttccctctgaatttctttgccaaattgcaagtcttaataagtgctgaatgatatttatgtcagcatgtatctttatctcttcaagaagtagctatcagctcttgacatattgattttgttttgttgggaaactcgtagtctgtatttaagaagagaaaggaggggatgtaggcaattgagcaatcgatcagccactgcatagattatctacatcttatatgattattttcctcctttcaggtt

SEQ ID NO: 9873 - DNA, 800 bp, Oryza sativa
  Intron number 1 from transcript LOC_Os02g57420.1 (locus LO C_Os02g57420) derived from phytozome v7.0 (chr-ID Chr2; po s 35187485 to 35188284 reverse strand)
tctcggatcatcttcgcctctgcaagattggcaaggtatcatcttttcttttccatctcttttctttttttttttggttgagatgttgtgtatgtatgctaactagggtaggtgataactgtacttgttcttgttgcgttttgcgttcgagagtgttttgactttggaatcgtacatcttgccatgttttttccttcctgatttgttgtcaggaatagcggtagttttggtaggattaaggttggttgatgattcggtttaattaacgctagttgcggtatgtatgactgtatggtttcatcaggcctggtgctatttcgccctcgtcatgctgttttccccaatcttgagcttaggcatgtttgcatttacagaattctctcagcactcaatttctgtccctggggtgtaaaggcccagtttttgtcctacttcctgttgattgttgctgtaattggatcctggaacagtaaaaatgcttgtttttttagatttgatatacttgtcagttcatgataagatcttcccttcacacatgttagctggtgtcattttgcataattcaggctccaaagttttttctgtccttatttcagtactaaaattattgcttgaagcaagggaaagcatttcctagtcaggaaacttaagaaagtaattgatagttttatacctgttctaattcacagtagttagcagccattcctaatggatcttctcggtccaattctctatttgtgtttgtgttgcatggaggaagcatgaattagctcctaatttgttcccactgcattgcagca

SEQ ID NO: 9874 - DNA, 631 bp, Oryza sativa
  Intron number 2 from transcript LOC_Os08g04270.1 (locus LO C_Os08g04270) derived from phytozome v7.0 (chr-ID Chr8; po s 2078267 to 2078897)
actacgaggtcttcgccaccgtcggcggcaaccgcgtaagcatccccttcttgttttgtttttcttttcttttccccgtttagagttgttcttattagtgatgaataatgatatatatagagagagagaggaaatagggttttgatttagcaggctgtggattttgggggaacaacggattttggtttgaaatttggtggaaaccgcgctaagcatcccatcttgtttttagggtggtctttgccatttggagttgttcttgtgaatgaatgatagtaaatgataagtgtagtaaatgataagagagagagaaactagggttttgttttagaagattgtggatttggggaagattacgcagattttggttcgacatttgatggaaatcaaaagctagtaaaatttccttggaatttgaggtttctaccattttccttttgcatcgaacaatctgcgatttggcatacatttcggcagatttgatgaaaattgtggtttttctgggatcaatcatatactagacaaactcttttaatggcaaatatgatgaaagatggttgtctttagtgggctcgtgtgaccaattgtgttttcttgatcttgcaggtgacaacctacagctgcctcaagg

SEQ ID NO: 9875 - DNA, 590 bp, Oryza sativa
  Intron number 1 from transcript LOC_Os05g19630.2 (locus LO C_Os05g19630) derived from phytozome v7.0 (chr-ID Chr5; po s 11439576 to 11440165 reverse strand)
ttgtggtatttttgagtttctcttctatttacccttttggcaactggatgatgaattgtgatcttatgactagtgcttgttgctatgtttaatgtagacataatgggataatgttgcttttttttcccttcttgttctgttctaattctcacgctagttcatgtgccacacctattttttttttcggtcgtccaattatttcagtgtacttttgataaatttaagccttgtttgtatttgtctgcatgaagacatgtagaatttgctcttggtatctgtttgggctctggttgtgccactacttgatgctcttaggttctgtccatcttcacctctcctattccatatcatcaacttgttcttttgctagtagaatcactaattcagtattgttagtatcttctatgggcaatatatgtactgtcagaagaaataaatcctttaggatgaaatgtctgaatagattcaatgcagaaagtttatgttgttatgcttcaactgttattcattattatttaatttaattcaggaattttgttgaataatggatgctaggtctgaagcaaattacgtgatctgtggtgataaca

SEQ ID NO: 9876 - DNA, 345 bp, Oryza sativa
  Intron number 1 from transcript LOC_Os05g14930.1 (locus LO C_Os05g14930) derived from phytozome v7.0 (chr-ID Chr5; po s 8475334 to 8475678)
tccggcatttcaacatacgcaaagtatagcctaaacttgcacggtttgaaaaactcttttgtttcctttgtatttttatttcctgcattgaactaaatgcgtttttatgcttattaagatcaaattgtttattcatgccggtaaggatccaccaaaatacaatctttgaattttgagctatagcatgttttgttttgtaaaaaaaagaatggcatatgattcattagtttgttggatgtcgatcaaatataacagttgaagaaaaacgattgatagctaatgatgttcctcgctaaacccaatgcaacagggtcttgaccgtccacgattacagcatcgagagtg

SEQ ID NO: 9877 - DNA, 926 bp, Oryza sativa
  Intron number 1 from transcript LOC_Os08g06360.1 (locus LO C_Os08g06360) derived from phytozome v7.0 (chr-ID Chr8; po s 3521912 to 3522837 reverse strand)
cagcgcttcaaagcttgattacccaaatactacaagtcagtctcctctctaatctatccttattttgcatttgatagcaggtagtcaattactcaattaggaattggttttgatttcctagatgaaagacaagtacaactttaaaatcattcacccaagtccagcccaatggtagtgagttcactccaaccccacaaaccgatgaatccatcccaaccccacaaacagcaggaacaggggctattaagtaacaatgggcagcttgctctaaatgtgattgttgctgaccctaggctttgaggacgcgcaatcactaccatgacctacatacttagtatgattcttcctttttcagattcagcttcaggttctctccctacggtagatgaagagtgaaaattatgtcccattaagtattctagtgattttttagttcagtgttgtatttttactgtatgcttagaaattttggttgaagcttgctttttcttttccctgtaatttcactgtgctttagtgtatgaattatcatggagagttttagccttcaatttgagccctaggcgtccagcgatcctggccccgctccgctatcctggatggtgaaacgcaaaagtacttatgtgggcatatcgtgggtgtgatgcaactatatatatatgactgggtgtgtgggaatgggatcatgaagtttgtttcagtcttcacccatcatattcttttagtcttgtgtacactactgctgtctgatttgtgcttcactactgagttgctctatgcccattcatctccattttcctgtagatgaatttattaacctctatatttgaggtcagtcaaaacagataaatttgatcgacttccaaatgatacggtttctttttattatagcactgtgctgatttcagtaattggatccctcaaat

SEQ ID NO: 9878 - DNA, 958 bp, Oryza sativa
  Intron number 1 from transcript LOC_Os04g57640.1 (locus LO C_Os04g57640) derived from phytozome v7.0 (chr-ID Chr4; po s 34133781 to 34134738 reverse strand)
tcgcctcgccggtgtttcggaagaccgtcggcctggttggtatctctgattgcttgattactgctagggaatggatgggtggatgtcgtcgacggggtgggtttagctttagcggattagcgcgtatcacatcccctgattccagtcgagtagacaggataatagcaggtggagggtttgaattttttagttatataaaaggataccttacgttggtgctgtttgatggattggtagaggtggtgctattcttcccttcatcagaatgtcaagcggcttgcttcgtgtgtagattactactagtatttttagggtttgggtgcctgctaatgtcaccgaataggtttcgttagcttcttattaatgtttttaatgcactttgtcgcgatatggatagcgagaactgctatttgtgccgttttgagatggtgtgtgtaatttactatgtcgttatgggatgtttttttttttgtctattcctttggctcacgtgtccctcctgctgcaatactcatttttgtttgttggatgatcagttgtttgaaccgcttaccttttttataggcgcatataaaagtgatttggtggtcctggagtattcatttggtcatgtattctatattttggaaacttaagttttaatggattaatctagtggaggatgtagtcaagaattttcttttgttggttcctaagagatttcttggctcgcaagttgcaacgcgaattgggctctcatgtattttactattttagaaagcttttaattatcacagatatagtagccgaacagattggatatagctgtgtattcgagacatctgtttgttatcttatacagggcatgctccgccactgaagtcaaaatgtagggagatctgttaagttgtataccatattaggcttagtttattcttttatctttctccatttgttctgctaggaactgagctatccc

SEQ ID NO: 9879 - DNA, 831 bp, Oryza sativa
  Intron number 1 from transcript LOC_Os03g63680.1 (locus LO C_Os03g63680) derived from phytozome v7.0 (chr-ID Chr3; po s 35961514 to 35962344)
cacctcgccgccgcaagttttctcccgcgtctcaggttcgcctcatgcttcgaatctctccccccgtggttctctccatagttaaatctgatccgcgtggtagtgcccagctatgagctgcgaaattgttgtgagaacgggcatacgattccatggtgcacaagttcggttctagtttgattaggtcctgggctcctggaggtgctgtgccctctatgtagtgctaatgttatctgactgactagctatatgttcttctatgttgtgagtaatctcggaatttccaagttagattgtagttggtggttagacttcggtgagagtgcatgtgtcaatgaaaaggtagtttaaatgacagtcctccacatctatttcagggatgattttttctaactccacccacaatccaacataatctgtggattcaagcttctaccttgaatttcatgatttattatctgctattctctacatattactctcgtgagcccccaatacctctttcggtttcacatgatttagttttgccagttacatgtgtctaattgtactgtattgaggtgcatttgttaggaagatgtgttatagtaattcaacagggcgcatggttgaagtccaatttaccactgtatgttacctcaaaatgcttaatagcgtaatgatcttcctttctgaaagcaacatgctcctttgctaacttaatggtttctgaaccattatcttggatagccgaagtatatagatttgcattcttattttttttataggtgtcaaaaatccgattaaagtcagctaactgtcctttacattatcagatcttcaggctcctgg

SEQ ID NO: 9880 - DNA, 662 bp, Oryza sativa
  Intron number 2 from transcript LOC_Os07g34030.2 (locus LO C_Os07g34030) derived from phytozome v7.0 (chr-ID Chr7; po s 20340696 to 20341357)
gtgtttttgtttggagtcagttttcgttggattagcgattgcactgttatttttagatttcattttttcactctggttccagtctttagggaaacaaacaaaaaatggttggactgttcttctgttccatttggtgattgtagactgaaatttggtacagagccatactaaaatgatagagcatttatttatttatatgcagattagttgtcttctaccattccaactgctgtagtgtagctaatcgctatcgccggatcaatgtagagtctcgatttgcttgtttcatttgatgattgagaatagctcgtttttcctgatatctgtttcaattgactattagagcttcatgataggctagattcttaactgaacctattttggttgaatatttttgaccgaattatcaattggtccatccaaccttgaaagtggcagttaagtaatgtatatgcccaagtatattgtaattactccggaacatatgcataattttggctgttgcttgttaaggcttgcaatgtgctatacttttcactatgctgagctgattccttaatcaagctttagactagtttaaaggttcatttcaactgaaaagctaaatctgttcaattgttattgcaggaactgagtaattacttagcagtcaatactagcac

SEQ ID NO: 9881 - DNA, 501 bp, Oryza sativa
  Intron number 1 from transcript LOC_Os08g35930.1 (locus LO C_Os08g35930) derived from phytozome v7.0 (chr-ID Chr8; po s 22655455 to 22655955 reverse strand)
ttggtaaaccctctggctcacttcatcattgcatcaattcgattcgtgttcattatgcttacagatctttttgttttaccccaaatggctgagtagtgattgaaggaaaggcagtgtagttgtttatgcaatttgtttatttgaactcttctggcctgattgggggaacccaatcaagcccttagtaattaatgatgtccttagaatctgtaaagactttatttgttacaactgttgcagaagcagaactttaccaatttcaaggactttgagattttgtacagaagttttgtcagaagatattctgtgtggtgcttaagattactttttatgaagtgttcaattggttaacctgacagtaatcagaaaagagatgagtgaaatagacaatattatatagaaactgactacttattgtcacttttttacgtcgatatcatgtttaacactgtaaatttttttccagtcaactgaagttgacgtgctggagcgattgccgtt

SEQ ID NO: 9882 - DNA, 1000 bp, Oryza sativa
  Intron number 1 from transcript LOC_Os03g13030.1 (locus LO C_Os03g13030) derived from phytozome v7.0 (chr-ID Chr3; po s 7043778 to 7044777 reverse strand)
gtcccctccttcgcctccacccgcgccttggttgggtgagtatcactgtgtcacgctgtcactgtgtcagagtatgtcttacgtcgtactaacaatcgtacgcacgtgtatcaatgcccgtgcatcaccaggtagatactcctagatagatgggcagccaaaatttatcggaattgctagaaaacttgcgacagttttctccaaagaaaacagtcgaatttgcagcccttagatccgctccgtgattcatgcgggcaagaaggaagaaaacagctaaaaatattgtcatagacaggagtcgaaccaaggccctccccttaaaaaggacagcataacaaccactaagctagctcaagtatacgttgaatgtgaaattacattttggttacattttacttacgctttaattaactacacaattagtcccctgttttcatctaatttttggataatcttgttatatttcactctcttacgggcttgctagcaatgacgtcgctgttggatgcaaaggctaaaaaagtttgaatgtttggtacctagtttctgtcgaacgtcctatacgtattcacgtgttttaatctacttacatagcacttacactctagttacatagtagttacgtagcacttacatcctagttatatagtagttacatagcacttatatcccagttatatagtagttatatgatagttatagggtaattacattatataaaattaggatttacaatttttttaagatcatgcatattacttttgaattatttttcccttatatatgttgaacaaattcttaccgttgaatcaacctaggcataagattagtggtttgtacttgtgtggacccgtttcaacagatcctatggttgaaaaatttgaaagttttgagtctcaaaaactgtcaacaactcactagctacttccaaatttatttactatttatttattcttgtctgactggcaggtgggacccactggtgcggcagctggaggcg

SEQ ID NO: 9883 - DNA, 606 bp, Oryza sativa
  Intron number 1 from transcript LOC_Os07g34880.1 (locus LO C_Os07g34880) derived from phytozome v7.0 (chr-ID Chr7; po s 20903382 to 20903987)
gtcggccacagggccctggctgccggagtctctaagtgagtcttaagtgacagtgtgagtgaggcagtgagctatactgtttttttacttcttcattgttatttgttacttgttaccatttacatttcctagtattttgatttgttggtagatttgtaatggagaagaaaacgacattgcttaattactatacaagccatttaagtgatacacctataactgatgagagcacaaacagaccaaagaggcacctagtggaatttgatcctaataaaatttttgccgatccagcaaaaacgaataccaatatatgattattgtaaaattatctaccctacagtttaacaaatggttttacttattactcattattttatttctcatggaacggtccagattatctcgctaagatccaacgtctcagatttatcccacctccccacgcatatctccgccaactgattcctcccacctgcgcgtgcatgcctctcccacccacctgcaccgctgcacgcatgccgcggatctctcctaaaatcacgcactcgcggcgatttcagaaaagaaaaaaaaatcatgcactcgctatatattctgccaaaaaga

SEQ ID NO: 9884 - DNA, 435 bp, Oryza sativa
  Intron number 1 from transcript LOC_Os04g32510.1 (locus LO C_Os04g32510) derived from phytozome v7.0 (chr-ID Chr4; po s 19392985 to 19393419)
ggcgtctggttcgtgctccaggccgcgccgctccagtgagtaccacgcctagcacctcctactcctacgtaggagcatttcatgtgttcttttcttttttttaccacttcacctctctctcctctcttttaatcctctcacaaattaccgcaatccgattcggtaacttgtcggattaattcctgcagaatgctgcagcgtcctcctcgtcatcttctgatgattaatattatttgctttgcttaatttgatcgatcgatcgatgcttgcttgattgattgctttattaattaatccttccttgaacaaaaatataaaaattcttcggcgtcgatttatttgactacttttttggtttcttctttgattgtttaaaaaaaatttttgatttgtgctgcagagggagggagccattcttgcctcagattccaagga

SEQ ID NO: 9885 - DNA, 1046 bp, Oryza sativa
  Intron number 4 from transcript LOC_Os08g35000.5 (locus LO C_Os08g35000) derived from phytozome v7.0 (chr-ID Chr8; po s 22042318 to 22043363 reverse strand)
ttagttcactcattagtccaccttttccgaccatagtaagcaccaaactcttagctagcaacaatgttggtcagcgctcttagctttcaattaaatgataactgatactaccataagcttccgtttcattgtgctgttcgattttatttatgtgacagacatttatactccctccgtagaaaatgttgggcaattttcttagggcttctataagaatttgtgggacacacatatttcccgaaacactttttatgggttcttttcctctaataccttgcattaactgttgagatgcatgtcaatactggtgctggcatgcttaagaggcaaaagcaatgcttggtcacgtacttaagaggcaaaaaaatgaacaaatgtggatgaatcagaagttgtataatactctctttggactgataatacttgtcgctttggacaagggcacggtctttaaaaacaactttgaccactattttttattactatatatatatatatatagaaatatcaataaatatatgattttattgaagtactttttaagatcagtctatatatatggtcaccatacttctaagacaaatattttagatgttatttatagtcaaagtttttaaagtttgacaatagccttgtccaaaacgacaagtattatcaacctggagggagtaggatttatctaacctcagtttgattcctcaaacactccacaattaatttaacaatcgtattccgtcaacagcttaaacatgtaatcacaacacaaacgcaacacaacagctccaacttggttcttaaaactgatattccaatattttgtttttttaatgcccataacttgatttacatattccacttatatttgtctgacttgtagctactaacattttattttttaaaaccttatgctccttgtttttctgttttgtttcataaacggttttcttttccaatttttccatggtcgtcttccttctatctatttatcttactgtctaagcttttatacaggtttatttggaagttcctgctggggaaaagcttgc

SEQ ID NO: 9886 - DNA, 501 bp, Oryza sativa
  Intron number 1 from transcript LOC_Os07g12110.1 (locus LO C_Os07g12110) derived from phytozome v7.0 (chr-ID Chr7; po s 6765359 to 6765859 reverse strand)
ctccaggaccgcttccaggtcgatctacttctccccccacctttgccccgctcgttagatctgttcttcgtcgccgctagcctctgtgttatgttaggtttgttttctctgtgcagaaatgtttttgtgatttgcaggtggcgatgcgatgttgtgagattggtttagttttattcacttgttggtttgggtaaaattggcacagttggtgattcttagcttgagattgtgcttgatcttaatatggttagaataattttaaatcgccgtcaagtataggagggtttgcttgtaattgtaggtattgggcttgtttatggaagcatcaactctgtatgttcctcattgcttcagttgttgaattttgttgttaccatgattttgttaagtcggttagcatgctgtatacttattgcatgtttttgtgcgacccaactaaataatcaaactcctgttaatgatgcagattggtcctgagcagattgagactctgtatcagtt

SEQ ID NO: 9887 - DNA, 993 bp, Oryza sativa
  Intron number 1 from transcript LOC_Os03g07790.1 (locus LO C_Os03g07790) derived from phytozome v7.0 (chr-ID Chr3; po s 3960109 to 3961101)
ctccggctggggcgggatcgacgacgactgattcggtgcgcgctcgcggtccccttttggatgagtggtgttgtgtgcgtgtgtcagtgtgtgtgtgtgtgtggcagtgttgagtgagcgtgggtggagtcgtcgcggatgaggtgatctgccgctgcattggctgttcggtcgatttttctttttggggtgttgtttttttcctttctcttctgctgcgccatttgggggcgtgggaatgggtgtctcgaggtaatttcaggtgccgagtttgcgaatgtgggtgatccggtgatgcatttgcgattccgtagagttcctctgggttttgctctagttgcttgttgagagtctgagtggcggcctaaatttctagaggtttttctatttggattggaactggaaaagaaaaattataatcgttgcttcgcagcgattctccttgttttgggcgtttgaagtagagacttcgattctcaacattgttttggactggatcgcgcattgattcgtgcaacgggttggtagttttgcgatgtgatgaaatattcgtcagtggcagttggggcgaaaggacttcttctgctagatcattttacggtaattttgattgtttggttgttatgatatcaatgcgaatttcacctctgcaagttgtgctgccaaagtaaccgtgcaataatgactgatctatgtcatttcacatttttggtaatgtgaaacgagaagatccgtagacttctagtactgttcaacatcttattgttcagtactttttgattcaatcggaataataaaatgcaaatataatcttatacaagaagacaaatccatgaatatatcattcatttcatcatgagctgacagcactagcctggggtgtttgagttgagttaacaaaagaaaaatgcaatgatttgtggattgccgacatttggggtaaacatttcttgtttctgattttctttttgtggcttgatttcttttaggttc

SEQ ID NO: 9888 - DNA, 1050 bp, Oryza sativa
  Intron number 3 from transcript LOC_Os03g07790.1 (locus LO C_Os03g07790) derived from phytozome v7.0 (chr-ID Chr3; po s 3961820 to 3962869)
caaatacaagctctactactgaggaatgtaagtgcaagttcacaatccattatcacttctagtcattttaagtcataaaaaaggaacactggtaggcgtatcattttttttaatattcattaccaacacgaaatcagctacaggaccatctctggttagggtgctgagaatcaattacgacgtatttcaaatgagcaccttcaacttcttgtggtctacagtggaaaattattttggggtctgaaataattctacatgtttctccttttaatttccaataaactcaagtctgctcttgtcaagctgattcctctgatttcactggtttaattcatttggatatcttttagttgtaaagttgttcttctttgcaagtcgaaacacattcagttaatgcggctattcatgagttccagacttccagtgttttatagtatggttcgttacatctaaatcaaatcataaaatattactcttgttagcatttccttactaagaggacaacaaacacatacacatactcatggttctacaataatgaagaaaaggcgacctttctgttgatggaagcaatggcatcatttctacctttgctcacttactgtcatatggcaagaaatatttatttgtgtatgattgtgttcagcattgtataactgaaaattttgttttaacatggtaacacctaagtagatgctcactaaaaaggataagtgatgagtttcttaatgcttttgccatcgttttttttttttgctcctcaagtgttattgacttgtttcattgtacacccatgagttgttctaacagcttggttatgataccgaaagattattttggcaagcatacacgtgaaataagtcctaagaactgtctatgttatgtgttaaaactgtatgcatttacctggaacttgaattgtaactgaacctttatagaatttgcaccttgtctttcaagtcaagtaactgaattgaactttattttggctcactgattttgctttcacttgcaggtatccaacaacaagtacaccagaattcgagcagt

SEQ ID NO: 9889 - DNA, 584 bp, Oryza sativa
  Intron number 1 from transcript LOC_Os08g27240.1 (locus LO C_Os08g27240) derived from phytozome v7.0 (chr-ID Chr8; po s 16625364 to 16625947)
cattcccggagttgatctcgtccgggaggttggaggtaagtatccttttgctgtttatttttgttaaggagcaagtttaattgtaggctataatccatctagtataaacctatgtggaggagagataacctggagaataaaaagtgttaagctcttgtgtataaaaagttagctatacacatgctctaagatcaggggcggatccagtgtatggttactgatgacaccaattatttttgctaattatattattaaatatgcttggaactaataaattactcttagaattggcatttgcaccatggtatgtgaagagtgacctcaatgatatttttgatagctccacccctgtctacgataaatgcattaattatataaatgagaaaaagagagagaagaaaattagagacaaccttataactaatctgttacacatgtgagccctaatgctactttttgattagcttatatctagtagttagatctactattaaacttgctcttaagtacatatattttgtttgtcagttctgaacttggaaagctgggcatgcaggtgcacacgctgattaaccctacagttg

SEQ ID NO: 9890 - DNA, 933 bp, Oryza sativa
  Intron number 1 from transcript LOC_Os03g54100.2 (locus LO C_Os03g54100) derived from phytozome v7.0 (chr-ID Chr3; po s 31009094 to 31010026 reverse strand)
gatcgacgcgcggcgtcccctcagccggaggaaaggtaagagaagctctctctgtctcccgttgcctcccttgctttcttcgcacgaagagcagtggcatactggcatatggccgtgggactgtatcgagagcagctgttcttgatgtgtgctagtaccttatttgctgtttcgaccaccctagtcaatccctgcatcgtctcgcaaatttcttctacggtttgatgccctttttatggagaagaagagagaactggagaaatattatctaaacgaatgaggatagagataggtggggggacttggtcgacaaagaaatggacagatcgaggggagatccgatcagggtagtagagatcctcaatagtcaatacctgcacccttcccgtgaccaaagggcaactggtcaaaaaggtcaggctgccttgctttgattttggccttaaccagatcatcttgcctgctgctgctagcgtataataatgctcaagtcaaataacacattagctgattagggtttaggatgatggtaactcacctggggaaatggagcagaatggtttcacgtcctgctgctcaattagagttgctcatgaccagccgtgcacctctttccgatagaattcagtttataggaggcatatgcaggtgactggaattttctggcgtagcacacctgcaattggagcaatcagatattgtaggattctagcatgtaataattcacaaaaaaataatgcttagaagaatgcagcccctcggttctctgtgcaatcctgtgatatccagcaaatattgccttagttttacataacttttgagcttacaaatcctttctttccatcccacttatttgtcaaattgcacaacgttcatgccattttctgaattttaggtttttggctgtgaccgtaacagatccaggctaatcca

SEQ ID NO: 9891 - DNA, 963 bp, Oryza sativa
  Intron number 1 from transcript LOC_Os03g19660.1 (locus LO C_Os03g19660) derived from phytozome v7.0 (chr-ID Chr3; po s 11055167 to 11056129)
gaacggctcgccaggctcaagctccgcggccttcggtagctctccgacgatgggtttgcgtcgcttgctggggtcacgccggtgatccgtaaactgtccgtcgcatccatcagttttgggccgaaggccttcgtcgccgtcctccggtcgtgccccctcctcgaggacctctccgtcaagcacctttgcggcctcctgtaacctcacggcgtccggctgggagcatcagccagagaccacgaggagcacctaggcgttggcagtggcgaggaagaggcccgcggggccgtggacgcagccggaaccggagacgacgaggagcagaccgggggagccggtgaggaagccataggggcaaacttgtctttaacggatatttctctctccattttctctgaaaataataaaataatactgcgagtgtccaacaactaattaccagttttttatggtgtcctccagcaaatacgggttcttacggtgtctcctagctaattacaagttttttggatgtcctgtagcaaattttgcctagattttctgggaggcacaggcggcgaaacggcgagtaaggcgagtaaggccaaagtgccccactgtacaggccatgctcttctactccctccgggttgataatacttgtcgttttggacaagggcacggtcttaaaaaacaactttgaccattattttcaatcataatatgtaaaatggtattaacaaatatatgatcttattaaagtactttttaagactaatctatacatgtagtcaccatatttgaaagacaaatattttgaaaatgattcataatcaaagattctaaagtttgacctcacccttatccaaaacgataagtattatcagcccggagggagtatatagaaaggactcggcaaatttactacccatgcaactgatatgtgcaggggccggcagaccttacgatttcgaacactgcgaa

SEQ ID NO: 9892 - DNA, 1005 bp, Oryza sativa
  Intron number 1 from transcript LOC_Os03g21664.2 (locus LO C_Os03g21664) derived from phytozome v7.0 (chr-ID Chr3; po s 12364991 to 12365995 reverse strand)
catagtttgattgctcggttttggtttttattgcggtaattaatcatggtcactagattctggtttgattgctcagttttggttttcatgtgattaggtagtaagcctagcatatatcattgcagcttgatagtgttaattagtactagtttgagacaatcggtttttgttttgcataaacaaaacagacattctgtattggcaactcgctcggtgcctggccgaccaatcatcatatcagtaaaattgttggacattttgcaaagtggggtagtaggctcacatcaaaattgactaggaataggtcaccagaaaacaggcaaaaatctgaaacttgagtatcacactgaataatttgcatagtggaggagtaagatatgttgcatgttgtatattcagctgtgatacttccactgaaaatagttgaaacaactagagaaacataaggctttggcttccccctgacaaatctgaactgaaccacctggtggcttctctttttctgtcactacaagacagagccaaatctgaactgaaccacatttggtttctctcttttttttcttttatatgcactacatgacaacacaatcagttgcaaaaatcagatatctgttcttggcacacttggcagctggcaacttccgcttttgtgcaggaggccaatgcagaattgcaggtgagatatatggggtgcggcatgaatggcaattgaagattggaagagcatgaacgagaggatgctgaagaagtggcatagaacaattaatgacaagataatgaatgtagcctttctttgtaattcctactatgtagtatatacactattaggagtttgtaaagattcagaacaccttgtatcctgagaactagttttgccagatgtcaagttatcctgagaactattgtaaccttgtgcaaaatacaaaagaggaaaattgattgcctaaaaggatggtaaatgcagcaggcagaagtggatggtgctaaaaggattgtagtttg

SEQ ID NO: 9893 - DNA, 724 bp, Oryza sativa
  Intron number 1 from transcript LOC_Os08g06280.3 (locus LO C_Os08g06280) derived from phytozome v7.0 (chr-ID Chr8; po s 3461976 to 3462699 reverse strand)
taccataaagattgggtcataagcactgttgttaggtgctgcttctgctcctaattatttttttctctctggatgtttttttgttgaatggttgataattcctccatctttgagtttctatcttctctttggcttgctctggtcttgttcatgattctttacctgtttcttgattgctgatggcaagcatttccttgttgtttttggactcaagatttagctggtaattttatatccacctaccttatcatgtacttgttcttgctcatcttttatcaggttatcaatgggaaatagttttcatggacgttattggccgtgaatcccaagtggtgtggctaatctctccaaactaataaaagttcatgtgagttttgttggtattttagcacaaaaaaagtactcaaatagctctttgcctggatgccatacccaccaatgaattttcaattatcgggtggttcttatttttttgggtatatgtaaacagaatctgaacacaagatttgatgagagattcaaccaagaagctgaaattttttgcacctgatgtgcattgctgaaccaattttctgttgcataaagagtcctgaaacttcatgttgcaaactgaagcgtgatgttctaacatttttccattggagctttcactggtttcttcagaactgaaatctttcttgctttctcatcagcttctcatgcatctttctgcagggtttctttc

SEQ ID NO: 9894 - DNA, 759 bp, Oryza sativa
  Intron number 5 from transcript LOC_Os03g14980.1 (locus LO C_Os03g14980) derived from phytozome v7.0 (chr-ID Chr3; po s 8171775 to 8172533 reverse strand)
aagagctccagattgcggacacttataaaccagaggtagcacatgatggagaaacacggcttccccttacattcaatcatctggaattttgtttcttgcaatacagctggttacataagtacatctcatgagaggactttaactcatgtcagctcctgacagttccagtgataatgttatagtttataagccaactactttgttccacaggacccacaatttttttctcaagtttatttaaatcactgcttcttgtttagcaaagataacctgctatatttagcttgaactaaatgagcaatacggctcatttatgacactcatcctaatgaagatttctttttatgacatatgtggtataaataccaagttttaaatcttctgttgcattattcattttctgggatattggatagacatatagagcttgaagttgaaaacggaaaattatctaatgatttactcacgtcacacaccattgtgtggtttatctgtactgttttctttatatgttgcgaattacttatcactatttattatctgtaagatttggctgtctacttggtaggttgtcagaactcagaattagtgcttgctgattctaagttctagggataacttcacagcaccatgctgtatacttttgatttatcatatgtttaaaatttttaatgtggaggagggataatgcatggacctttgacttttttataatatgttgcagcttaaactggcagcaccagctttgcaaaaatccta

SEQ ID NO: 9895 - DNA, 821 bp, Oryza sativa
  Intron number 2 from transcript LOC_Os03g03470.1 (locus LO C_Os03g03470) derived from phytozome v7.0 (chr-ID Chr3; po s 1501957 to 1502777 reverse strand)
tccccaagaccggagtctggaccaactcatattgggtatagaactgtaatcctttgcttctaatctttatagcgtagtttagattgcatgtgaggtgtttgctgttttgtttcgcctgcttttgctgaatccgttgagccggcgagcgcgtcgtgccgtcgtgcgccgtgacccggggcgtatgggatagcattcaccactaaccggtcacggagcgcaccatgggatcgtggccctaaccttgttgtaattgtcgttcaaaacggagggaagaaaaccgaaaagctgcagattaactagcaaagcacgaaaacctttgtctaccaaggttcatgcctacaagctgttcgtccagtgttcccaaattgatccagttgaaagtttgagttgagtgtgagatttgagagcgatttcaatcgggagtgctgacagggtatgcatttatcgtatgagtaatctgaactgatcgagttgaatttagattactaatgtgccattttgacatacaagcataatattgttgagcgccttgtatgcattaggaatttgacgctctatcccgtcaactatccatgataaacaagtttttgagaaggacagtaataggctcctggtagttggatagcagtttagtaccaaaaaaaaaaaaagactataatatgctcatataggtacttgttatctatgtgatgggttggtttctttgcaaaacgcatcctatttctacgccaactattctgtttgaaatgatgtttttcatcctttaaaaatggctgctcaatgtaaatgcttaatacggtgtgcttttcctattgtacagg

SEQ ID NO: 9896 - DNA, 894 bp, Oryza sativa
  Intron number 1 from transcript LOC_Os03g10350.1 (locus LO C_Os03g10350) derived from phytozome v7.0 (chr-ID Chr3; po s 5279881 to 5280774 reverse strand)
cataacatctgcgataccctagacgggtccaaaaggtttgttgtcgatacaatcactagttgtgtttgttaatttctttctatacatgggttaccggttatcgtataggaatatccaatagttctgaagtagtaaaatattgggataaaagttggagattcgagtatcttccccttccattccttgcgtataaaagaaagaaaatctccgtctcggatgcttcgctccttgcgccatctcgcggctgaacaggggaggtggcgagcagagcaggggaggggaggggatcctgcaggtgagcacccacgtatcctcctcagagttcttctctctctcccgccgggactacttctgtctggaatttgcttgcgttcgttaatcctagcttctcttctagatctggattctggaagaagttcttcagctcttctcttaatttcagagccttaacgttaatacaagtaacaaacagtttgttgtttgttcccccaaacccccatgtcccaagttggatccgcccctgcaaattggccgctggagctcgggattgccgtcagcgccgccgcgtgctctgttttggccacctccgactcgcctctccaagccaccatagcccaatcaaattagtgaagccgacaagttcaacaagttttagagtcctaaatatgcatttcagagtttagtgaccaggatgacatcagactagcaagttcaagaatcaaggaccacagctgtattctttttttaagataatggaataaaacatcccggcctttactcatcatagcaccacagctctattctttaattaattattagggtatgattacttaaaatgtgcactaagcaccttccatttttacttgtcaggttctatagtatattatatacttg

SEQ ID NO: 9897 - DNA, 1001 bp, Oryza sativa
  Intron number 2 from transcript LOC_Os03g21110.1 (locus LO C_Os03g21110) derived from phytozome v7.0 (chr-ID Chr3; po s 12018746 to 12019746)
cacacgcttctgtaagttgaaagtcaaaattaggtgaacaatggtagcatgtagtgcctctgtctcaaaatataacagcatagaataagataggatatatccgtactacgaatatgtactggctttatcgagatttgtagtagaggtgtctaatctgattttaggttactataatttagtctgttttttaatagctgacgttcaaagattagaaatgtgcctattcattgtgttgagctcagtaggatgtaatttaatctcaagggagaattaaatttgaaaatatactattcattcgattttttctcacgaatattcgggatgcaaaattttttacagaaataaaccgtcggtctcgcacaaccgttgcacgaaaacgacgtgggaatgacgtcgcaggcggtatcgcacgcagaaagcgcgagccgcgcgggcatcagcgcgagaccgcgcgatctcgtggattagaatatcaatactgagcagattgaaagggatgtctcgcggtctcgctcattgcatgagcgatagcggttcaatgccgatgtaattagcggttaattctaattagtgattaattatcctaattagtgatttgattaatcactgattaggataattaaccgctaattattattagctaattgtatattaaataattaatccctaatcaaatcgagccgttggatactatagttgtttgattttgcgagaccgtttggtctcgctcttccattccacgagaccgtgcggtctcgcgctttccctgcgcgataccgtccgcgatgtcattttcgcgcaatggttgagcgagaccgacggtatatttttataaaaaaaatttgcatgtcgaataatactgagaaaaaattgtatgaacagtgtatttttaaatttaattctctcatgggaggtctaaaagcagtattataagaattttcattttcgaatcagtcctgtacgatatttttttttcattttcgaatgtcctttcctagtcg

SEQ ID NO: 9898 - DNA, 872 bp, Oryza sativa
  Intron number 1 from transcript LOC_Os06g50970.1 (locus LO C_Os06g50970) derived from phytozome v7.0 (chr-ID Chr6; po s 30847503 to 30848374)
tggttcgtacaattcctccctctccccaatcccctcgcccatcccatttccccccaaatctgactgcgaccttcccgacctgcctcctcgtctccgctcctctcctctcccagatgagatccctctcctccccgcggagacttctcctcctagattcaactgtttgtgcgctatttattcaagaggcaggcagttctagatttttggatgcccgacttggggatctctcgaatagggaccagtttactcatcagttatcgtttgggccatgggactcatcgctgtatcagctagatttcctcatgaataatcgatcttttctttaactgaaaaacatgatgagtaagcattaggcacaaaaagcaaacattgtggaaactgtttcgccagattcttgtttaacaaacattgagctttagacaaacagcaaattagggtaaaaacctggtctgtgaagaaatggcttatactatcaaactgatcaccaaataagcactgacaactgaacactcaaccactgataattaagcaattttgatgtcagcaccaccgccactgaaaggatctactgggtaccagcctacctgaatgtcacaacttcacatcgcaatctttgaagatgcatgactgtatagtccttagttcttccgtccaatctctattattcagtcacatattttcttatctttttctcgatgaagtcatttgcagcctacttttaagcttctgctccaacagcttactgtggcaacatgattatagcaattcattgttgaacttttttttaacaatgtgggttttcaatattttttacatttataacctaatgtggtgtctgtacaggttttgggttttctacagggctaagcagg

SEQ ID NO: 9899 - DNA, 783 bp, Oryza sativa
  Intron number 1 from transcript LOC_Os04g30180.1 (locus LO C_Os04g30180) derived from phytozome v7.0 (chr-ID Chr4; po s 17840427 to 17841209)
aagccgccggcaaatcgccggccgtttcctttgaggtatatacgtcgcctccacatcctcttcttggttgagatgaccgagtaagaaggccgcgtattagttagagagatcctgttgggaatagtcccacattgctaatctagggggagttgaaccaacttaaaagtggggggagcccctcacctcttagagctagcttttggggtgtaacaaggctttctcctggttttgggccaacagatccaagaaaaatcgctcaaccatatgatgggtttactaaggtgcctgtgcatccaaatatgtcattccaacagatcctgttaaagttagttcgctttgtttgtacacttgtttgcaccggcaatttcagattttaattcatatataattgcagacatttgtggaacattggtttatttaaccagcattagaattgagatatgtagattgttacattacttcaaattttctgcctacagagtacagattcaaaagtttgtctatgctaactgatttggaggcaagtaattaaataagttactatgttcattaatgttttgtagatgaataaataaataaataggttattttcttgcttgttcttatttgtttatctcattatctgcgaagataagtaggcaaactggaaacacattcagcaaaaggtttagcatttcattactgtctgtatgcttcgcagacattttgccatgatgtggttcattataatttccttaattttgaccagggatctggatacctgctgaaccttgagattaccta

SEQ ID NO: 9900 - DNA, 1033 bp, Oryza sativa
  Intron number 2 from transcript LOC_Os04g36620.3 (locus LO C_Os04g36620) derived from phytozome v7.0 (chr-ID Chr4; po s 21934838 to 21935870)
gtggcggctactccgggtacgtctgctccacgggctaacatgccgaattgtccgtttcgctggtgaattgcgtggatgttcatggcatttcagttaacaacttgctggaaatgattagcatggaaccaaaaatgattttctgaattgggtgtaaaaaaaatgctggatatgaaaggtgggactttcatatcaatgatattaagcagggagtgagtctcgaacccaggccggctagccgaccaatttgcggtgctagccagtaagactctggacccaggccggattgggtgtaggtatgtggtttacatggtaatagtcttattgaggatggtcctgtgggccaaaaaaaaactcgcagacagattgaagttatcagcacttaaagtgccgagggctgtgctgcaataatccttcttgtgttattttactttttaaggataaaggattaaatggtaatactgtaaaatgcagaagtgtcttatctttttggatatctatagaaggccttccatagagccttctttgcactacggaaaatgaaccaaaccctacttgtgttgcagcgtactccctccgtcccaaaaaaagtgaatctaggactggatgtgacacattatagtacaacgaatctggagaggggtatgtccagattcgttggattaggatgtgtcacatccagtactagttttttttttgtgggacggagggagtagaatttgttggtaaattttagttttgataatgatttgacaaaagaatcgagataaatgcagaaagcctggaattaaattggttttatcgtgaaaatcgaaagcgttgctgtttaatcttgattctattttgggtagggagcataagaaactatcatttccttttttattcaaattaatcatgcataagttactttatttgacttgattattactccttatgaaatgatgcaataagtcttaaattaatatatgtgttcttacattgtgttgattattccccaatctaccttaggctttcgtttgctctagcagcaagtcgt

SEQ ID NO: 9901 - DNA, 917 bp, Oryza sativa
  Intron number 5 from transcript LOC_Os05g41810.1 (locus LO C_Os05g41810) derived from phytozome v7.0 (chr-ID Chr5; po s 24424606 to 24425522 reverse strand)
ctccacggtggctttcagctcgattacttgccatagtaagtagttctgctggttataacttgaaagtatatactctttaccatggattttagctttacttctctcagcaagattctactgttggactgttagtagtaagtgtgtaaacatctaccgggccctcacaccacaatagggtagattatttgttctagagctcatggatttgaaggatgttttttggtttcagaaagaatgatgataaacgagtatagttcacagtttaaaattctaaatgctctctcgtgcatttagtcccatttgaaaggaatggatattacaacagacagtggcggatccaaaaattttcttgaccttgggcaagcgtgacgataaataacaagtactcctacaataacatacatataaactgtgagagagattagattgataggattatgtttatttgtattgtcaatggactaggctagtattgactcaccattttggccttaattactttgctattttgcattgttaatctggcctccagtagaagcagcaaagcaggatcgtactggttcatttggctgagcccaggcaccggcccaaggtggccgggtctgggctccgccattgacagcagagttgtcttgtatataccagtgatttatgtgttatgagttgtgactgaacattcctagcactgccctatgaaaaatgataagaactttggcaagtttggactgttcgttaggaatgttgtaagagcagtaaacaggattttgtttattggataataataagtgttacaagtgatatacaattgtgttttatcagaagaaatgtgtttcatgtcttcatcgacctataatagaattctgtaaaagctataaatgttaatgattgatcatcaggcccttttgttttttaggttg

SEQ ID NO: 9902 - DNA, 805 bp, Oryza sativa
  Intron number 3 from transcript LOC_Os03g47730.1 (locus LO C_Os03g47730) derived from phytozome v7.0 (chr-ID Chr3; po s 27044728 to 27045532 reverse strand)
gctcttcgaccatttcctccacccgtaagccgtccaaataatctcactttcactgtttcacactgcgatcatatagtgtcttgcaaataaaactatgtctaatcaaatagtttttcctaaaagttatttgaaaatgggtcatgtgaagattaaggaaacagttactccctccatttcatatttccgtttcatattgtaagtcacttagattttttttttccttagctaaacttaaattatttaagtttaatcaagcttatataaaaacataggaatatttttaacacagaataaaaatactataataatatatttaatgttcgatttagtaaaattgatttagtgttgtaaatgttactacttttttatccatgtttaaagaagtttgatcagagaaaaaaacaattgagtgtgaaattccattaacaaagttcatttttagctctaaccaaactcttttgaggctagtattttatttgtcatgtgatttatattttcctatctatgatcatctttttcaaaaccagtaatacattttctaacaaacaatacttcaacttaaaattgagaaaaaaaaactcctactttagtacggatccttaccagtatgaagaaaaataatatattaaagctgcagttatttttaatattgggcacgtctaatgtatacaatggtgaaatgttaggtaaacaagatgatcaatgaatagcgaaactaaactccttgatcaagaggagatcaaaatgctaaaccaagctactacactcacagttcaaatttaaataaatttctgcaggtatccga

SEQ ID NO: 9903 - DNA, 827 bp, Oryza sativa
  Intron number 1 from transcript LOC_Os05g43040.1 (locus LO C_Os05g43040) derived from phytozome v7.0 (chr-ID Chr5; po s 24934921 to 24935747)
gggacagcccgtacgtcagagccaagcacctgcaggtgattgcacttgttcttcttcttctctgttcttgccgattctctattgagctttttcctcttcttgatgagtaggagtagtatagtagacgattcatgattgtaccagctaattaaccagcattgaattggtaggtatagggtatagcttagcttgattatgattatgcacgagtgttccgtttgtcagttgtgataacttgtattcaatccgagtgagtttttttttattaattcggtatgtttaatttaggaattttttcatgccaattggcggttttcttggcactgaaaggagggtatctctcgcgttgattattagatctcctttttttttcttttcctaattcttgccgtaaatattttcctgtccatgaaattatagccgcaaactgactcgttttcctttcaatagtaacggctaactgtcgtcgtatgtttatccccaaggttgttgtttagtttgatattaattggagttattcagttatttgctttgtctctttgcagtttgcaccatagtagtagtactgttcattgaatcgttgactgtattatgatccaaacacagggatgatttgattgcctaattttgaggtccacgagattaatattgaactacttatcatgctttaaaaaaaatccagtcacacactttaattcaggattagtagagacacaagaatttactgaagttctcacagaattcagtagtagttgctaacctcggcaaaacaacttcgtttcgatgaatcagcttgtcgataaggatccggagacagccatcgtgtg

SEQ ID NO: 9904 - DNA, 702 bp, Oryza sativa
  Intron number 1 from transcript LOC_Os03g50780.1 (locus LO C_Os03g50780) derived from phytozome v7.0 (chr-ID Chr3; po s 28983765 to 28984466 reverse strand)
gcccaagccgctctgcgattactgccgctgggcgggtgagtttccctcctcctccatatggctcctcgcgtgcttggccgtgcgcgccgcgccttcccctttcgaaatgggtgggagttgacgggtgcggagattaggttttccccccaatccttttcttgttgattagagttgatttgggcgaattgatgagtagtactccgtattgttcttgcaaatgatattttcatcgtggtttgaggaaatgcgcgggtttgtgatcctagagatttctttggacgactttgagacggtcatcttcttccaaattgcaaatttcttggtgaataacgttccagaatcgcgccctcgattgagcacttactagttagcaacttttgattccgttgatgaaatggatcgtaataactgaattctgttactgtacttgaatcgatgatcattggaactttttttttctgtactcctttacctggatttggtgtgtctatttcaattattttttgaatccgtttcctaaaacagcaatgctagttgtaatgatggcctctggcctcttaaagtttattgcttctattggaaaattggtagtttgggcattgatttgggttggttcctggttctttgaaccagtactaacaaatacgtgctatactaatggtgtcaggttggagccaccattgggtgtcaaagcggaagtac

SEQ ID NO: 9905 - DNA, 888 bp, Oryza sativa
  Intron number 2 from transcript LOC_Os04g35210.1 (locus LO C_Os04g35210) derived from phytozome v7.0 (chr-ID Chr4; po s 21225413 to 21226300)
attaaagctgtacaccttctaattgcactttcacattctcgaattatatagcatgtctatttctgtgtttatttccttttatttgatcaattgatttgagacgttgatggcttaacgtgcgcacataacatcaatattagtcgtccatatatatatatattcgcgattataattaagtatataagtgccggaatatatcttggcttggggagggggcttattaattagcgccaaggtgtgaaatggtttagctagcatattaaaacaaaataatatgcatgcatgatgttgtttcaatggcctaaaggaactggcatgcatcgatgtttgccaatttttatctctagtaaagaaaagcaaagtagatccccacatgctcagaacttgtttattatttttatttgaacagaacaaaattcactagcagctggtgataaaaaccagttgattacatatgcactatacctatagcatatgtatgtatgtgcaagttaaccatgtatcatcgacctatcgagcacgctgacgttaaccaagcaagatggtccgtgaatagaaaagcacagacactttattctctttttccttcaaaaataaaattcttcaaaaatgacacatagtttgttaaattcggactccactaagaccccgaatgccagaaatatttttcctacatccgaaggcatcatgattctccggtaaatgatttacaaaaaaactagatgagtgcatatctctcattagctttgttttgtaccgtgttagctagtacgcctgcttcagcaactcctgttgagtgcaggggacattgtagagcaagatagttgttggtgtcctctgtaatataaagtcaatcttacacagtctaatttctattattatggcaga

SEQ ID NO: 9906 - DNA, 1019 bp, Oryza sativa
  Intron number 1 from transcript LOC_Os07g03130.1 (locus LO C_Os07g03130) derived from phytozome v7.0 (chr-ID Chr7; po s 1199038 to 1200056 reverse strand)
tcgagtcgctcgagcggcagctcgcctctctgcaggtcattctcatctcatatctattcttggtgtttcgttccatgtgtaaatatgctaatcctcattttctagtagagattgaggcttgcattgaagattgtgggttagtaattttgtactgcattattacttttcattatataatatactccgaatgatgcaaatctataataatcgcatagtagaaggtttatgagaggggaaaagatagataggtatcaatgccatacttgcaaataagggcattttgaagtttgaaatgattaaaaacaaatgatattatcataggaacagggtatgactggagtgactgtgcaaggtgtgcagagcgaacgaagttgctgtccattagttaagctcatataccaaacctgccatttcttagctaggaatttctctgctttcgggggagaagggtgcttctggtaagaggtgtgatgagttgttgggatgcagattttcacttttagttataaccaaatggccaaatttaactgtaaaacttgtgaatcctgtttacttgctttgctgcactaggttggtatttaactatttaagatgcatcccttactattgcttgtgttagtgaatttcctaagaactaggattggcttccattgcattatccccatgagtttgtttagttctgttatttatttccatctgagtttaagtttaaataagtcttcttctatcacattgaattgttaggacttgaatgtgttctattacaatctagattgccatttttcattgctaaatattttgctttctacttcctctgtttcacaatgtaagtcattctagcatttcccatattcatattgatgttaatgaatctagatagatatatatgtctagattcattaacatcaatatgaatgtgggaaatgctagaatgacttatattgtgaaacggagggagtacatactaaatgcctgaacaacttgctgccactcccaggacctccaacaccaacaaagat

SEQ ID NO: 9907 - DNA, 1047 bp, Oryza sativa
  Intron number 1 from transcript LOC_Os03g50290.2 (locus LO C_Os03g50290) derived from phytozome v7.0 (chr-ID Chr3; po s 28657454 to 28658500)
tttcccgcagttgcacttcgatttgagattgctcggtacggatctgcagctgttgtttttgtttggaatcgtgttagatctagggttggagggtatggctgtgtggggttcgaggtcagatctgatgcgaaagtttagggttcttggtgactgtgagatgtggctgtgtttagttcacgccgaagttgtaagtttggttgaaaattggaacgatgtgattgaaagtttgtgtgtgtatgacaggttgatgtgatgggaaaagttagaagtttggaaaaaaactttggaactaaacacacctcgttttattttcttgccatgtttactggagatcgtgttggggactgtagtgaagactcgagatctgcgtggaggaagcctgtatttgattattcacacgaaatatgcacgcatagctgttcccctttcgagctaattcggttcatcgatctatcgtttttttacctattagatgcagtatgcctccgttgaactgcagatctagtcatttcgctgctgttcatgttgttttgaactgttagtctgtctgcttgctcttctgtggaagaagcagcagtggcgctgtcgttttcttagcttgaggtctggtggtattggactagatcactggtttggcagccactttcttgttgatttgtctgacggaatcactcgaaaagtaagaaaataaaatggagaaagtactctagtgaaagggggatggactagaatatttagttgcctgagaatgattcctttcgttcatggaaaaggcttgcgcttgttgtctaattgggaaaatgatgtgccatccacttggttggaatctggcaaagtcgtgtgatttgtatgatcttcttgggtttcatccattgttccttgggtggatggtgtctattatgcttatctccacttgggctagttttccgagaaccgtatatgttcttgtaaatggtccacaagtgatatagtaggttgtatctgtgtaagtgctgatatgcattatttgcaggtgcacaaggtcagactaagtttgcgttgaagaac

SEQ ID NO: 9908 - DNA, 1047 bp, Oryza sativa
  Intron number 1 from transcript LOC_Os03g37830.1 (locus LO C_Os03g37830) derived from phytozome v7.0 (chr-ID Chr3; po s 20982974 to 20984020 reverse strand)
cgagagccggcggagcaaaccaccgtggaggccaggtttgtttattaatttggccaaactgctgtccaattcattgatcatgtactaccattgtttggccaaactgctgtgcaaatgcttatgatcgatcgatcgatcggtcccatgcattccattatatatgttgttaaagacttggtgttttttttcttaagatgaagatgaagataaaaattaagtgttttacgcaaaacgaggtggtattaacgtatgattaattgagttttaattattacaaacttgaaaagaatagattaatctgacattttagagcaaattttatatagaaagttatcacaggaaatgcgccgtttagcagtttgaaaagcgtgccacaaatatctaaaaattgtatccacgtttttttattgctgttgtgtattcatctaataattctgtgctgaacattgaaaggttgttaatttggatccatggattttattgaagtttttagaattaaaaaaaattaaaactagttttatttggactcctggatagtgacagagatttcatgttttgttatctgtatgtatatatgtcagaaagccagaaactcatttcaacaaaaacgagtggcaccaactttttaaggaataaaaagcaaatttcaggatttttctacccactagttatttagttgcaccactcaaacatgttcgctatcagttcgaccataatattcagtctgccaaattgatcagcattaactaacctgaaaacgaaaagtttggccaagttctcatatgcacctttattttttttctgaaaattaatcccagctagatcaacctggtacatatatatatatatatatatatatatatatatatatatatatatatatatatatatatatatatatatatatatatatatatatatatatatatatatagtttaacatgcatgcatggattaaccgttcgatcgagctaattaattaattattatatgttgtactgtaataatgcaggaggagagctgggcgaggacgttgaagctagcgtt

SEQ ID NO: 9909 - DNA, 861 bp, Oryza sativa
  Intron number 1 from transcript LOC_Os06g46880.1 (locus LO C_Os06g46880) derived from phytozome v7.0 (chr-ID Chr6; po s 28453852 to 28454712 reverse strand)
attatcttcctggttaacgatattcttttcgaaaggtatagcttcgatcggcatctgcttttggtatagaattgctatcctctgctgatgtgaaatgaaggcacgctgtctgatctgattgactgaataaatcacatgatacgatgaagaaagcaagaaaacattcctgctgcaaagatatctatttgcctaatatttagcaactcctttcatggtactagttaggacttaggactacttgtttaatcctttgtccaacatggagatgaatgtctttaggtgtttgttggtccttcaaaaactttgcgatgaactgaggtttattcctagtagatctgttatgtcatatgttcttttcctgaaagtcaattctgttttagcttgtgcttatatccatttgtcaggagggtccataatcagatcttagcttctacataatgtaaattaacattagaataatttgattcatcaagatgttagcaatagcaaaatcagctcattgcagacaacaatgttgaagctagcatctgaggataaaattcaaatgcaatgcatgttttatcaataatagcatgaatgcttgatgatgatatttctgctatatgttgtcaatgtttgatgataggtcatatggatcagtagatcgctttggtttgtatcactcattgtactgttttattgataccttttgtgcatttgatctggagaagctgattgtggcatgaaatctttattaattaaattaatatgtcacgactacatgacctttaatcgtttgtttttacatattcctggtcctttgctgaccatgttcgatctgctgcagcttacaaagacgaactaattctcgggaccttgaca

SEQ ID NO: 9910 - DNA, 455 bp, Oryza sativa
  Intron number 1 from transcript LOC_Os07g46960.1 (locus LO C_Os07g46960) derived from phytozome v7.0 (chr-ID Chr7; po s 28065577 to 28066031 reverse strand)
cgataccggcgcaaacatttgtagagctatcaaaggtatggaaacatcaacctatgtaatataagtgcgactactaggttggtccgtcggacgtataaacaatccgacgcctaacatgttaatcgtgtgaactaagcaatgcacttttcaaacaacatatctttgcaaatataggggcaatgtgatcaaagaggcttgccttgcacagggttggggtcttctccttcgaaagcggcgtccggggcttcttcgaactcgggctcttaacgtgaaaacaaagctaaaaaaaacaaaaggcaataaaacaagctcaaaccagagaaacaatagtgccactgtgtagatctcaattttagaaaaatttaggaacttgaatggggtcaatcggagttacggttgattttctatgaattttcaaaggtaaagggatttttctggaatttcatttattggac

SEQ ID NO: 9911 - DNA, 793 bp, Oryza sativa
  Intron number 2 from transcript LOC_Os03g51890.1 (locus LO C_Os03g51890) derived from phytozome v7.0 (chr-ID Chr3; po s 29747523 to 29748315 reverse strand)
ttggcagcacgagcttgagtcgcctgacagttgttgtaagtaactgatttaccaaggctttgaaattttttcaggtcttcacatcccttgccaactcctatgcggttgctcctaccgtctgctaaaaaaaatgagttcaatgctcttgctttgcttggtagggacgatttgctgttccgctgcagcaccaaaaaccactaatgcgttcctcctcttccttgttctctttgtatccttgttgttgttgttgctgctgctattatgttactgcctccgcattgctctttttgatttgttgttgatttgcttctgctctgtgctgacctcatgatgtatgtgatgccgtgtactgctgccatggctagagaatagaaggatacaaagagaacaaggaagaggaggaacgcattagaggtttttggtgctcaagaactgctcgatgaaatgtttcttgaggtactactaaagtttgaatacatattgaattatctttttagtacttttacatgcggaaaccttcttccttgtttttgttattatattttaatggaaagtaatttatatttaacaaatatttcaatggctcatccatgtcaatcaactaaatcaataagaacatgcttagtttattcccattagggggttgtataaaaaatacaaaacaaaatagatgtttggtgattgtatttacttgatctggcttttggtgtgctcctaagcaagtctgtcaactttttttgcctgtggacatattgtaggggctcatccaagtatttgtctcttctatcgattg

SEQ ID NO: 9912 - DNA, 517 bp, Oryza sativa
  Intron number 4 from transcript LOC_Os07g42750.2 (locus LO C_Os07g42750) derived from phytozome v7.0 (chr-ID Chr7; po s 25602295 to 25602811)
tccccttccccatagtgcacctggccatctcagaggtatatctccagtaatatctgaaggtccttgaaaagttactacccattacccatcataaacacacatctaattttctatgtatgttcactgggtcaaataaaaatacctagcttggaggttcaatttaccactcagtcctatcaacaactctgtagcaacaacttgtgcttgattatgttcttcactgttcactttgtgttacattgtgattgcttgtgttctggtgcaaagcttctactaaacttcttggtgaacaagggaagcaaaatgatcagcaagaacttttaaagctcattttatgcttacttttgtagttctgatctatgtctaatgtttctaatgctaatgctgctgacatatttccaaactttgcattttgcagatgtgtttttaatactcaaataatagtgttcaactgatctgattgtttttattaatattcgcagatactacagacgaccatttctaccagaaccaaaga

SEQ ID NO: 9913 - DNA, 853 bp, Oryza sativa
  Intron number 1 from transcript LOC_Os03g47480.1 (locus LO C_Os03g47480) derived from phytozome v7.0 (chr-ID Chr3; po s 26850800 to 26851652)
ctgttccacgtcggcgacattgacaaaacaagcaagtaaggaaacgaaactccaatttgcatctgcatactctccttcaccttcacgcatgaagcccaaatttctttttgcaaatcaaattaacgtgcaatctccaatattacccgatctgaactgatgggctgcacaagtcctacatttgcacatcgtgctccatgtggctggttgcaaaggatagggtggagtctgcctgtgatgaaggttgttagctatttttctttttctcgtcgtctgtatgacatgaacaagaatgtttttacatttttttcgtgcttgctagatgatagatggctgctactgcataacgtcgagctcatgtctataccatgccgctacatccttccatgattccatcgtcgactaccgctcgccactcggttgccctctccaatctccagtaccagtcacaagacacacaccagcatttacatccttatagcaagatcaagcaaagccaccaggatcccaacttcaccatggatttttggctgaatcatttttcttcttttctagtttgattcacctgtgagtaattttatcactcgtgtgtaattgagcctgtaatttttttcattcgtacgaccattttgtgaacagattaacaatactcttagtatcagtttttgctcttatactatatattgaacacatcaataaacatattactacacggtggctacgagatcatgggctatatcgagaggaaagtggtaattgttttactcacagaccacgaagtctaaatatttataatactggtaaaagaattactagtattgtaagctggtagtaattcttttactgtcgtctagga

SEQ ID NO: 9914 - DNA, 242 bp, Oryza sativa
  Intron number 1 from transcript LOC_Os02g56500.2 (locus LO C_Os02g56500) derived from phytozome v7.0 (chr-ID Chr2; po s 34590840 to 34591081)
gggtttagcgcgtaatctgtttaatgtgcatgcatgccgatgatctttcatgtagactgtatattcctgtgcttagaagccatctgtggatcaaatccatgttgtcttccaagcaattagctcatctgtgatttgatttgtactttactctttgggaagaatttttttgtctttatagcttttcttgcatgaattccattccatgatgcatttggtgtttcttgattggaggcagtgtttga

SEQ ID NO: 9915 - DNA, 668 bp, Oryza sativa
  Intron number 1 from transcript LOC_Os06g06160.3 (locus LO C_Os06g06160) derived from phytozome v7.0 (chr-ID Chr6; po s 2854603 to 2855270)
tcagattgccaacactgcaaccttctgaagctcaggtacttagtcactgctcagctgcatcatgtttatctgtgtgtttcttcagagttcttggcttggctcctctggtgttcttgtgctctgggttttggagggagaagataatacttgttcatctgccatggatgatgagcagagggatggatgagccatggggttgactctctgggtgttcttggtttcttggctaaggttataggaaggaagtctgaagcttgagccctgtcagttctgtaagatttgagctgattcttggcttccggtttattgccttttgttgtttgattttagtcgaattgttttggggaatcattcatatttgattcgagaagacttcaggatagaaacaaaaacaagggttcatttctcatgcttgcttctcatgtttctgtcaattgacagaaatattaggatttgcttcttttctccatgtaaattttgatttggttaatgaacactcagagagattcagaatgagccaataaacttggttcatcaggtgtaattttttatttcggcatgttgcaccatcttatacttaaaaacaaaattaaccctgtttttttaatgatttttttctgtgatctaagcaagggggttggacaaggattaatctgtgaggctcactc

SEQ ID NO: 9916 - DNA, 447 bp, Oryza sativa
  Intron number 2 from transcript LOC_Os04g19160.1 (locus LO C_Os04g19160) derived from phytozome v7.0 (chr-ID Chr4; po s 10635737 to 10636183)
atatcgaacgagtacgcagcaaggtaattggtagagtggttttttaaattgatctactaatttcgtagatacatccggcatgtatctacaaagataagcaatattttatatgcaatttactgtacctatttagatcatacagcattgtcatatcaataatttattatgtttacctagagcatgttttttataccatatctattgtacaaatgtccccgatgttaaatcgactacggtttaacgctaggggctcgctttgttttttttttctgtataaatcatgcttgttttcggtttacataatgcctgatatttatatctgcttgttatatcctgattatgctagaagatccatgcagttttttgagtacatactcgatattatctgctatatgtcttgccttctagaaaatatttttcaggaacaattgagcactcgagtaggct

SEQ ID NO: 9917 - DNA, 729 bp, Oryza sativa
  Intron number 2 from transcript LOC_Os06g03780.1 (locus LO C_Os06g03780) derived from phytozome v7.0 (chr-ID Chr6; po s 1503697 to 1504425)
tgatcgcctcaggtatgcgagctcgctgaatccaccattttctgcaccggcgttgctttgatcaggttaaactccacagtgcatactcagaaaggcatataactaacatataccctggaataaaaggcagtgcgtcaatataacgtaatggtggttcaggagtcagttcgcataagttgctgaaggaataggtgtccaacaatatctttagtctgtagtgtctttctgcgtccatgtccacacctataattgagctttcatccttgcctcactcagatgagttcgcatagtctagcgaagttaagatgaaagctcatgttctgggtgcgagttggcattggagcatcacacaattatcgtggaatgctgccgtccccctactatgtcattggcttgcgcttcatcgtccccctactatgtccttggcttgtgcttcatttgaagtcagagtcaaaacatttaaaccactaaggcgtttcttggagaagcttgcgtttatgtttgcttattgtgagtccaactttgaataatcccatgccttcagaaacaatccatgtaattcatgctctacaccttttttctttagtttgtaatatcacttgttagtttaatcttcacctttaatgtgtttcagtattgtcactttcatcagattgtttacacctctgtatgtaagtggaattcttctgtctatgatgtcaggtatttaccccccacaagttaaagtct

SEQ ID NO: 9918 - DNA, 412 bp, Oryza sativa
  Intron number 1 from transcript LOC_Os06g13750.1 (locus LO C_Os06g13750) derived from phytozome v7.0 (chr-ID Chr6; po s 7622198 to 7622609 reverse strand)
tctcctgtatgtaacaatgctcgcctttttttattcgatcactgtcccaatgtaacttttatgttttttagaagtaagttaagttgtccaggaagtaactaacatgttcctaggaagtaacttctttctgttaaattgttataaataattttctgtcaagtaaattctctctgtgcattaagttacttctcactgtgtattaagctacttcttactgtgcattaagttacttcttcatatatgccctgccacatctttttttccaatttatttttaaatttaaattacatctggaagttaacatattttgtaggttttaaatcaaacaagttatgtactttttttaattaatctaaatgctctaatttcttttgtagattctttatttggactcgctttcgtttaaaaatct

SEQ ID NO: 9919 - DNA, 663 bp, Oryza sativa
  Intron number 5 from transcript LOC_Os05g45890.2 (locus LO C_Os05g45890) derived from phytozome v7.0 (chr-ID Chr5; po s 26531177 to 26531839)
tattccgaaaagggtcttgcgtttaccgagacaaggtaatgctgccaagaaagcaaaacggcatcattattaatagctttgataatactcaacaaagtatttacatagtctctactctctagtaatgcccatggtagtttttttccatacttgccatcagagatatttcaaagaagatttgggaccttgtagtgagacttatttgctagttctcttggtaggaacttggcgagatttgcagttttcagttgtttggtcatgcgtaattatatggaagtggaatggcaaaaaaaaaaaaaagagggggggacagattaaaacttgtctggattttgtaaaaaaggtacttgtcttatagtgataatcagagcaccctttatgcaatccggtgccagttctttttaagttattgatcaaagattatgattcttataacatgattgtaaactgcatactacctttcttttatgggtttgattgtggaacaatcgtagttcttggaaaattttatcttcatcctttttcctttttgtgaactattattctcatccctttgctgagattgactaaccaggaatgaaataacatgctttctgaaatgttaatagttgttaaatgcacttttgtatgctaagagcttttgtatcactgtaggtagaaaca

SEQ ID NO: 9920 - DNA, 784 bp, Oryza sativa
  Intron number 3 from transcript LOC_Os07g27460.2 (locus LO C_Os07g27460) derived from phytozome v7.0 (chr-ID Chr7; po s 15998157 to 15998940)
cgcacacaattcccaaagctagagaaggtttgcacgcactttgaaggttaaatttcatattcagttcttgtcaaaacttgattaatctgtccagtttaaactatttggttcaatatgttttgattgcctagatagttgttttctgtaattcacccgaattgcatccagtatccacataactgctgtatgatttgtcatttttcaccaagtgaatatcatctcttgtttcatatgttctgaacttgatatctaattgaggtactggtaagcaactaaacacagtttatttatacctctcaatgcacatatatgaatgatagatttgagaaacaaccaagttaagttggctcaagtgagtcacttgagagttgagactctagatccctcagttgtgccaatatgctgtaggtcaggtgtaaaaaagcaccttcccaagagatatcaggcgcaaaagaaacaaaagttgttatgagctatatacaagatttaatggaaccaaaatgaaagttgggttgttatactctttgttactacaaataactaagacagtcagagattacagatttttgcattttctttcaatttttattattaatatctctctctagctttgtattgctaggataatcagtgtccaattgggctttatattgagcttttatctctctctggactaacatttttttcttaagagtcattgattgccatttgtgtgtaaacattacatcctgttttatattcacttgcaggttgtgacagaaccattcattttgcagtcacagtt

SEQ ID NO: 9921 - DNA, 764 bp, Oryza sativa
  Intron number 1 from transcript LOC_Os05g44020.4 (locus LO C_Os05g44020) derived from phytozome v7.0 (chr-ID Chr5; po s 25546207 to 25546970)
acgtcgggctcaccgcgtccgtccacgacgtcgtggtataattttttcctttcttgtgatctcaaatgggcgatgaggtaattgttcctgatggaattctgggatgcagcaattagtttgatccgtatggatacctatgagtatgagcatgggtggtagtgtagtagatcgatttcaatattgattccatctagcaaccaaacactgactaaaaattcaaagtttgttgcaagaaactagagcactctcacagtgtacttctgagagagcaattttatctgcagtaggaatgctgagtgaaaaacaaaccacagaaggcaacatttcaacattggcggtgcagccgtgtgtatttcttgcgaccctaatacgtgaattgtctgttatgttatccaaaatagaaaagaaaaactcaaagaacattgtgcatgtgaaaaagaaatgcaataactgaaagtaaaattttttgtgcactaatatagttgatgtacgttcaaacattttcttcacagcactaggtgcaactgaaatgattgggagggtacttgggccatcaaaatgatgtgcatacctgaactgagtacagtctgttagtctatctacaatctactgataacttactttgatgtgtcctacttatattattttcctgaatcctgaacattgaacaaaaggttgtcgacctattgaattgcatctgttcatatgactttcttcagtgactaacaggtacatccgtcactacagaggagaggtataggccg

SEQ ID NO: 9922 - DNA, 791 bp, Oryza sativa
  Intron number 2 from transcript LOC_Os07g14160.3 (locus LO C_Os07g14160) derived from phytozome v7.0 (chr-ID Chr7; po s 8080486 to 8081276 reverse strand)
agccgatccgcatctgtaagtggacgatttcttgttttgggtcccgtttcggttgctctgattgattaccttgtagtagcatgtcctgccttggccaagaactctaatgtggtggtagaattgagctatagatttggataggaatcaactgatccaagaattatttgggtagaatttggcagttcgcttagaattcagttcttttaagatcgggcactgtgatggacagcctaatgggtgcatcacgggataagtgcactgctgctgtctttgtctttttttgatggagacatctgtcttcttgcatggggattcaagtgggacttttataattcccatttggccacttttcttttgggaaaattctccgaggatgatgtgtgagacctttgctcctagtggaggagctccatgctttgcttttacctgtgattccttcccctataccatggattccgacattgcagaaggcggcgtggccttgttagaacttagaagtcagcattggcaacactacggaaatcaaagtcagttgatgctgacattttatccaacccattgtaaggacaaagactgatggataacttgaattaatctttgtggcaaactaaacaagttcacccccccccccccaaatagtgtttactctgtgtttgaactatgtttcatttgctttgtatttccttaaaaatgcactattcagattcagctcatgaacaacattttttgacgttcatcttctggaatttgttgtaggcacttcaagtccttttggtttttgcaactgtttt

SEQ ID NO: 9923 - DNA, 789 bp, Oryza sativa
  Intron number 1 from transcript LOC_Os03g07430.2 (locus LO C_Os03g07430) derived from phytozome v7.0 (chr-ID Chr3; po s 3768899 to 3769687 reverse strand)
gcgcctgtaagtttccttgatactctcttcgtcgaaattccaaatttgtcttgtatgtatttgtcactttcctatcatagctgtaaagctgatattggttgcttgggatgttgggttgtttgtcctactagatcgtggatttattgtgtgttgaattgggtttagtactttggtttgactatgttgaagataaaattttaagatcagagcatgtgttctgcaactagttatacctgttggcctagttttttttttttttttgcatgataattttttttagcctagcttgttagttgctgcttttgtgcagcttcacttttgtttttgttcctctttcttacttctatagagtaaacaaacaatagcatggatgcatggataaaatcatgttttctctagtccttgggaggcagaggtaatttttcgtgttgatcagactggattaacactatgaggtacatgtaactctcaatacctcccaaggaccaaaggaagactctgatagaacatagaaatagggttcattgaaatatcataagcttctattgttgtaaaaagggagtcggatattttctttaaatgaatggcaggaaaatctgacttggtagtcctgacgacctgaccatacatatgcagagttctgattgaatttgaacagaagcggtgcttttggatacattttgaatttcacattgctttgttaataacaagttgttcttatgcacatttcattaatttcttgttgagatagcagacccatcaaaagtgaccagcaaaacaagtttatca

SEQ ID NO: 9924 - DNA, 777 bp, Oryza sativa
  Intron number 3 from transcript LOC_Os06g10520.1 (locus LO C_Os06g10520) derived from phytozome v7.0 (chr-ID Chr6; po s 5420905 to 5421681)
ggttcaagcaaagaaaatatagcattgaaggtatgatttttcttgtgctatgtattagtggtccggaaaatcaagatatcaatgcaagtggagaccattccagcaatctgctgtttcctctacatttatttgcatgttcatatgaatgttttacctattatcatacccaaagaaaaatcaagagctttgaatggcttcattattgctcactagtgatagcggatgtatgatgggctttgtatggcattcaatagtttactatcatatgattggatgttgctgctacaatccattgaaatcatatttattcggtggaattcaaaaaatacaaacatagaaattagttgcttacattttgtatatcatattagttgcatttaattgacacaactaattctcgaatttaattcatggagttgcattgccaaccgatgcagagttacagaaacaatgttgcagtatccccaagcagcggagtataactttttatcattattatttgaatattattttatttagcaaatcagggctttctcctccttggtatggtatcactacatcattatagatgttggcaagtatgcttttcgagcatttaatgcacagctttgtgtgaagacgtgaaacattgttgaatatatgatttagcagccttagttattgatctaacatatatgatattatcatcatctttttctttgttgacctgaatagaatttaatgtgatcaacactgtctgcaggcctcaggtggtggagcatataaatatactgaaga

SEQ ID NO: 9925 - DNA, 886 bp, Oryza sativa
  Intron number 1 from transcript LOC_Os08g38170.5 (locus LO C_Os08g38170) derived from phytozome v7.0 (chr-ID Chr8; po s 24184585 to 24185470)
aacaatcatctcagcctacttaacaacagtaggcagttaaaaagaatatgtacttgtcacctaaggcaagcatcagtttattgttaggaaaagtgaaggatgtcggataagtgaacatgcaagataaaaaaaacaaattagttaattagtgttggaccaacttatgagtgcaattagtaattaagtatgattcttcttttaaaaaaaagtaggtaacattaccctcagcagaacacaagtttgggactttggatatagcaaaagtcgacatcgacatcactggctgatgaagctctgattttgactaagtttcagtcatcacttgatgatgccttcacgaaaaatattcagttgacaatttcatcagaaagggacttctctccatattcttgtagtagcttttctttttggcacctgcttgcagtttgttgagcaaacataaatccaaaaggggagaaaagaagtacaagagctgaaaactgatcactaactgaaagtctgaaacccgtcaattgtgcagatgaggcgtacgttcagtttcacgacgagtgctggggtgtcccagtgtacaacgacaagtatgtactgcgtataaaataccattatttactgtccatttctacttaatttctgtatcttgatctatctttattgcaatttgcagccgtctgttcgagctgcttgcgttgtcaggcatgctcatcgaccacaactggactgagatactcaagagaagagacatgtacaggtatctgaatttctgaacattcctgtacgtgatttcttcatggttttgttctgtccaaactgggcgatggctgatgcatggctgttgggtgatctcgattcagggaagcgttcgcggacttcgatcccagcacggtgg

SEQ ID NO: 9926 - DNA, 921 bp, Oryza sativa
  Intron number 1 from transcript LOC_Os03g02200.2 (locus LO C_Os03g02200) derived from phytozome v7.0 (chr-ID Chr3; po s 735708 to 736628)
ctccgacgcgtgcaggtcgaggccggcactggcaggtattccttcttcgctgtttcctcacaaatggtagggctacttactggctagtgacatccctcacccaaaatcttacatctaacaactctattacatgttcttatgttaaaggtgctcgttatctagtgatgtcctgatccatggtatcaatgtaaagagtacagaaaatactttaacatatagggtctgttcagattgatgccaaaattttggtaaattgacaacactgtcaagttttggtagaatagactcaatataatgttgctaaaattccatagacattaccaatatttggtaacaaactaaatgcagccacatgattgccaattttactaaactaaataatggtatgatttaaaatgacatcaatctgaacaggctcataaacaagagtctctgtgaatgttttgatgccttgttgcagatggatgtgctttgaattttgattagggtgtctgctttgtggtacaaagttttatgttaaatggagctctaacacggcatgcgtgaagaattgagggtctgtttggttgttgcctaacattgccataactcaatttgccatagatgtggcatggcaaacaaagtgtggccaacaatttgttggtcacaagtgtggcaatgtttagctagaaaatgagtatatgacatgtaggcccatgaaacaagaaagtgtggcttgccacaactgaaacaagcaaccaaacgctaagctaacaatctgtggcatgcctaacatgtggtgtggcaatgtgtggcaccaaaccaaacagccccttgaatgcctaaggaactttgtttcttgagtgggttatgcacattttgacatttttcatcccttgaaaagcaggaacgtggcactcatcaagtctgacaaggacaata

SEQ ID NO: 9927 - DNA, 1024 bp, Oryza sativa
  Intron number 1 from transcript LOC_Os07g32460.1 (locus LO C_Os07g32460) derived from phytozome v7.0 (chr-ID Chr7; po s 19313138 to 19314161 reverse strand)
gcaagttcaaggagcaggtcgccaagcagcagcaggttcggatcccagatctggggcccttcagtctcagtgtttgttagggggaaggaatggttaattttgtagcgggtgcgatttctccgtttccgttttggacttagtcggagggttctgcgccatgagaaaaccaaatagaaatggcgacgagatggctcgctgttgcaggaattttttgtccctgggatatcagatttaagctgtgaattactattcttgtatcgcctgatctgttctctgggtggtggttgaaatgtgaaactaagagctattttttatcctttttagatatagtttccccttctgtttgccagctgttagattgttactgattttagattaaatatattttccaccagagtgtaaccattaagataaagtatcacaaactacagatttaatagcaacattgtcacaaaactacaagtttagcaccagtataatcacaaaactacaacattttatagcttgaagataacattagtgttaagggtttaaactctaaaatctgtagttatgtgaaaaatttggtgttaaatctgtatttttgcgatgttttggtcaaagtatatgtagttttgtggaatttactcttaatacaggagtaattttgtaatgaggggcaacatatgcttgtaaacattaacattatgtgtaattttagtttttatccaagttactcagtctgtcggtcgggtatgttcgcaattcttacaaatggaagacatcacgtacgttaaccttcctttattaggctcggtcgcccaattgacaatttgatacaattgtcatagtgcaattatatccatgggaagctttaatttggcttagttgtcacttataaaaccatgccgctctctgtaaatgactaaatattttcttcttggaagtgtctgctagtgcttcatgtgctatattcatggtcaagtcttctttgcttacatgtttacatttcaggctgtgataaagcagttcagtactacgggct

SEQ ID NO: 9928 - DNA, 932 bp, Oryza sativa
  Intron number 1 from transcript LOC_Os03g11600.1 (locus LO C_Os03g11600) derived from phytozome v7.0 (chr-ID Chr3; po s 6040380 to 6041311)
acgtgcgctgcacctactgcaacaccgtgctcgcggtaaactcctcgagaaaccggagcagcggcttagcttcgcatgcagagaacgatcgatatatgctgctgctagctgcagctgcaccatggccttcgttctttggttatcttttgaattggacaagagagcaaagaacaaagtgttggttctgtctcgtgatctcctgctgctgcagattgcagagagggctctcactttggtttggtccaatcctttggcttgcttaatgtgcatcatggcatatgcttactctcacacaggacacagtgagagagagctagctagatagctgggaccaaatccagcttcttgcttgctctctctgtgtcctgaggagctagctgctaagctagtggaaacttccactggggattgttcatgacacgtgattgatgtgcccttgctgtcttcctgcatggtgttttattggctagctctctttttctttcttagataaaattcattggccatagctcttgatatgatgctttgtggtagaatgttctactcagctggttctctcgcagtgtcatgttccatctttcgcttccattatatccccttctttcattgttaccagctgcaggctgcatttttaaactggacaagaatccaatttagtagtacctgcatcttctgttcttccattaaaaaacaagtactactgaatcttctcttcttccttttctttttccctctctgttttgcatatcccactttatttgcttgctccatctagattccttccacacagatatgctgttctcctctactttttctccttaaggacagtgccatgcaacaaagagatgaaattaacgaagaaagtattggcttaattgcatgatgtgattaattaatttttcgtcttttgggtagctgcaggttggagtccc

SEQ ID NO: 9929 - DNA, 802 bp, Oryza sativa
  Intron number 3 from transcript LOC_Os08g06520.1 (locus LO C_Os08g06520) derived from phytozome v7.0 (chr-ID Chr8; po s 3690346 to 3691147)
tgcaggtgatcaagtctctgcacagcaacatagaggtttagtattgtattaagctggttactacttaatgcacggaataaccttgactgtaacaggcactttattttaggctagattaaattcatgcggttgcttgactcatcaagtttgtttttgttgcacaaagcagaattttatttaggcattcaggatatgtgtatggcactggtcgtgctggatgtggttttatagccttacatgcagacataggcatatcccacaaacttttcttgcctttttcttttcctgttatattctgttatcacctaggagtcttcccatgctaattagttgggggcaaggctgggttggatatgttggcttaccatttagctggttctaggtatatattagttactgatttgttgttgtttctccatctttgttaaatgtctaccctttgccttaaatgtgagaaaactttctcaaagatccatggttctgaaactaatttcatagtcaaaaacaaaatgatgagctgttaactgtgttatgttaacagctgctcgagctcacaaacttttccatgtgcctgaccatgatagatttatgttttgaggtgactttcactgcttaaatacattccttattgttggtatgcatggaccataaaattgaaatttcttatgttatgtttgttgaacctgatgttgttctgtttttttgttctagtatgccgtagagtcatacactgtgctgtattaatgtggtacattttcatactgtaggaggaatttgacataccctgccaagaactacaagt

SEQ ID NO: 9930 - DNA, 636 bp, Oryza sativa
  Intron number 1 from transcript LOC_Os03g19690.1 (locus LO C_Os03g19690) derived from phytozome v7.0 (chr-ID Chr3; po s 11070886 to 11071521)
ctccacacgcgcgcagaggtaacttactcatcgtcactctcatccccccctcgtcgctcgtcggctccccccgttaaatctctctcgcccgcacacgagtggcgcacgtcgacagaggtgatccggtggttttgagctcggatgaattcgagcttggtagtagcttgcgatgcggtgaattttactctcgatgtacgggatctgcaggtggatttcgttcctctcccctcgtgagatcgaccgccgttttgatgttgtgggacgtgcaaagtttgtagattttagaatttgtatgcttataagttggaattcttcctccgagcatgtgtgagactgtttagatgtgctagcattatgagtgcctgcaagatggcataaggaaagaaaagaccttgtgagaagttttttgttgtagttgactggctgttgtaacttttgtccacactggtgctcatacaacaagaatagcataacaaactgtagtaatcttaactttctgtaatcatttgttgctgctctactttatgtttcttctgaaacattcattgtgtgcatcttttacgtttgcaatgtctgttgacacactgggagaatttcgcaggttccatttcaggtgcctctcgaggttaacgttgt

SEQ ID NO: 9931 - DNA, 173 bp, Oryza sativa
  Intron number 1 from transcript LOC_Os04g41990.1 (locus LO C_Os04g41990) derived from phytozome v7.0 (chr-ID Chr4; po s 24692207 to 24692379 reverse strand)
ggagttccatctgaggttgtgctatgcgatgatgaccgaatttgattactgtttttttcttttcagattatacatggcgatcgttgatcatcttgttcttgtttcttttttctttctttcttttttttttttttgcaggaagagggctatctggctcttgaaggagtataccg

SEQ ID NO: 9932 - DNA, 527 bp, Oryza sativa
  Intron number 2 from transcript LOC_Os07g20270.1 (locus LO C_Os07g20270) derived from phytozome v7.0 (chr-ID Chr7; po s 11685357 to 11685883 reverse strand)
tggtaatccttgctcttaaacaaatggctgacataattcataaaccaatcaagcctgtaaaatactgtataatacctcttatttttatgtaattatttggcattgcctcattcgattttttttttagaaagttgttctcgtgacataattgagatgcagagatttttcctttgggacaaacaaattcaatttcctgacaggtgtcaatttcatgtatattagagcagttttattccagaaagtggaaattcaccatgctttttgaagctacataagtacatagtttcaaaaggtgtggcgaatttctacacaacagaataaaactacagtaccaattgaaaatcatggaggtcggagatgctctccataataatccaatacttgaagatcgactgtaataataagccatgtggaacatatagataactcaaattttgttgtgttcggctatgtattctatgttatcctaataaatatttctgaactccctttgataaaggtgaagaccggctgagttcaagcaattc

SEQ ID NO: 9933 - DNA, 713 bp, Oryza sativa
  Intron number 3 from transcript LOC_Os06g22919.3 (locus LO C_Os06g22919) derived from phytozome v7.0 (chr-ID Chr6; po s 13385671 to 13386383)
ccacctcacgctctcccttgtcagcaactcctctggtaattaattgtcatatctgatccatttacagttttatgttactgatcaatagcatgcatgtctgatcaatcatcaatagtgtgtacatttatcttgtgggtacttttctttttcacattcaacacctcttgggagcaatataatttatggtactgattgtgcattaacacactttgtttccatcagaagaattttgttttacttttgaccagtacagttaggcctaattcattgcatatatatgattgtacgtcgcatgctagtcatgtttataatgtgcactaccacataaatttggttttagctcacatcatcaattagttaattcctcaatttgtttgttctagttaaccttggtttgggtagccatgtttcagcccaatcagttgagtcaaacaaatgggctcaatagcaaactgtcccatccattaagcccatttccccattttccttatatctgaatgattcttacataattggctgtattagagagggtggaggatggaaaaaagaggtggtaaaagccacacggccgtgacgattaaatgcattctgaaatgatcgatcagctgttttcttccctgaatcagaaatgaactagtggtcgatcaccacaaactaaatttaattaatgtatcgatcgtgcgtggcatgatatgcactgggctgcaggttgt

SEQ ID NO: 9934 - DNA, 1017 bp, Oryza sativa
  Intron number 1 from transcript LOC_Os03g04980.1 (locus LO C_Os03g04980) derived from phytozome v7.0 (chr-ID Chr3; po s 2409043 to 2410059)
gggttcctcgaggactttcaagccagtgagtctttcttcctccgccacgaaccctagggcactcgcctgcgtcatctgctttcttgtatcttcacacgcggaaatggatggttcgagatttctgggcatgtcgccgattaggcgtcccaggctcttcaagaaattgctccttgataaatttcgttgttaggttccgttgtgcagtgggccttgttacatgataaaatcttaaaataatataatgacagaataggactaagtggtatgtaggagtaggattttgcgtgcagttatacaacttcaaatgaagtgcttgctttctcgtttctgtctgattgtacttgaaaaactagtactacaatcactagggttgtcttcattgaaattattgtatgtgcctcaacacaataaattttgtttttgtgccataggctaacgtgataaagcagcattaaacgcaagtttgctgcttgctgcttttggcaatgttcgaaaaagtggtaagcattgacgtgtggtcgcccactttgtagcgcttatacgggctatgtgactgcttaatgcttatgtggtacaaggtttggcacccattccttgtatgtggccttgtagaccttttcttagaaactatcttccagtatgcaatgacatgacacaaatttagatgatgtatatgaacttggtagttttggtcgaggatatatgacatgggcaggtacccttgttttcttaccatattatctttcttctgatttcctattgtttcctcttttacttttatacatttatgtatccttgcacttgtcgataaactgggatttacacattatagctggagcattggagataggaaagtgtttgttatgcaagtgaaaaaatatgctagatttcttgcattaaaatgttcaaatcattgtcatgttattctgattcaacctgtttcatgctcaattttatgcaccatatgttcatacattgcctctttggttactcttaggtgttgaagcattgccagct

SEQ ID NO: 9935 - DNA, 868 bp, Oryza sativa
  Intron number 2 from transcript LOC_Os05g34290.1 (locus LO C_Os05g34290) derived from phytozome v7.0 (chr-ID Chr5; po s 20240326 to 20241193)
aagcaactgggcttctcagggggtatatattctctagtatatcttcctgtctcttgtggacattaaggccccccttgatctgaacgaaaaacattagaactttgtagaatttcaaatcctgtaggaattaaaaagacgcgaatattaggcaatgaactaatatcaaataattagaaggggtgaggcttcgaacccaggtcgtctagcccaccaccttgtggagctagtcggaagacccttgggtgtttctcaaatcctgtaggaattttccctaaatagtcctttgaaataaaggatccgacactatagaatcctatggaattcctcaatccattcctatcaaaatccttcatttttgttaaaactcgttcctatcgaaatcctgtgtttttaaaatcctacgtttcaaagggccctaatgtgttttagaggttcttgtatgcagcgttgggattagtgtcttgtaacaatgcagctcttggattaagcgactgtattaatttgggttatctagtgttcatcgactgtcaggaatcaggaatcaggaaacactgctctgcaattatcagtttattactgttaatgaagaaaatttggacaatgctgtagggtgtatgctcagtccgtttagcgttaatgaagaaaatttggacaatgctgtagggtgtatgctcagtccgtctagcacttaaacgtggtcattggggctcttgagaagttgagatatgcaatatgttggccttaatatcacgctacctacgtgttttgtcctgaaactatgcaatgatgtgtcagtttagactaaatgggcaaattagtttgtagttggcgagtttaacatgtcggcatcttcatatttggtaggttc

SEQ ID NO: 9936 - DNA, 738 bp, Oryza sativa
  Intron number 1 from transcript LOC_Os04g52140.1 (locus LO C_Os04g52140) derived from phytozome v7.0 (chr-ID Chr4; po s 30789653 to 30790390)
ccgccgctgtctcctaccggctctgggtgggtagtgtacacagctcgcctttggtcttaccgacctgacacgacatgccatgccatagcttagctcgagaaagagagacacaaatccattttgaactttctcttttttatgcaaatttcaaatttcaaacttctttctctccctgccaaagaaaacagtttttttcagcttcaagttttgctggagatttcgtctaaattctttttagtcttcaattcattttgcagttagtttgtagcctctagattgatgttttttttactagtgggttgcttaattaatcaaagatttcgcactaattgcgaactgtgtagtatgttgactctaatctattcccattgaagtctccattctgatgcatgctcagtggctgcacattgtacatatattatacaattcaataagggcttgtatattgcaagttgcagggagtcgtgtaaccttctagcacctccctaatcatgccccctaaccacactagtagtatttctgtttaattaatcaatctcttacttagctttaaccaatccatcctgcagcaattaactaccactctctgtagctaactgcactgcactgatagctataaacagcttgctaattaaactgttgctgaattgataggtgatccaatgatcttgttgatcttgtgttgttgtgtgtgtatgttcaggtgaacgggtgcttgtcgtggggggacaagatcgc

SEQ ID NO: 9937 - DNA, 651 bp, Oryza sativa
  Intron number 1 from transcript LOC_Os04g11970.1 (locus LO C_Os04g11970) derived from phytozome v7.0 (chr-ID Chr4; po s 6560892 to 6561542)
cggttttactcaaggtatacattacactggaaaacttaatttatctatccccttatttttcatgtcacttaaaaagtcataaaaaatttgaaaaaaatattagtttagatcaatatgtgatatgtcactttacaaacatgcaaattcaaattcaacttatacaagtagaaacaaaaataacaaatttgactatgaagaggacgtttaattcgcggttaaatttgttatttttttcgaattgtataagttgaattttaacttgcatgtttgcgaaaagataaatcatatattgttatatcttgacaattttttttgaatttttttgataactttttaaacggcatacgcaaaatgaggggatagatatcccctcgaaagataaaaatccatttcccattacattatgttctccgtgttttctccattttatatggtactccctacgtcctaaaatatagtaaccttatattggttgggatacattctagtacaacgaatttagacatactgctgttcagattcgttgtactaggatattttccatctagtactaggacgtttcccatccagtacaaggttattatattttgggatggagggagtagcatatatatattgatggataattagtttgtatgtacggctttcagc

SEQ ID NO: 9938 - DNA, 608 bp, Oryza sativa
  Intron number 2 from transcript LOC_Os06g12240.1 (locus LO C_Os06g12240) derived from phytozome v7.0 (chr-ID Chr6; po s 6584228 to 6584835)
aggtatttcacgtaaaacgaagtggtaataacatgtgtttaattgagttttaattattacaaacttgaaaaataaattaatctgatattttagaacaactttcatattaaaagttttcgcacgaatcacaccgtttagcagtttgaagagcgtgccacgaaaatccaaaactttatccagtgttagcgatggaaacaaacagagcctagaatagagggactaatagattagtcctatgaaccaaacagggtctaagattataaatctggacaagcttcctatagccctatatatacaatacaatatgttacatcccatatactttatccgtttcacaatgtaagtcattctagcatttcccacatttatattgatggtaatgaatctagacataatgttagaataacttacattgtggaacggaggaagtaaaattattttatttgaacggaagtagtacttaccaaaactgaaactgagcaaattaatcaaagttggtggttatgcctggtggttgacagaaaaatccaggagctagcttacctgtatatatcatcccaaccctatcagctggcgcatgtgtgtgtgtgtccttgcagcagaaacaa

SEQ ID NO: 9939 - DNA, 1022 bp, Oryza sativa
  Intron number 2 from transcript LOC_Os05g45240.1 (locus LO C_Os05g45240) derived from phytozome v7.0 (chr-ID Chr5; po s 26199150 to 26200171 reverse strand)
gttaccctcgtattgtagtaagagatgcagtatgtgatttttcctctatgcctgttagttttatacttgttttatagtttatgccattctgtgtaatatatagttgtttatactttatattcattctttgcccaataaaactcacatgtagattatagtatgtgggatgtttacttgttggtttcctttagttagttctttgacctaatgcctgtgtttgttagaaagtgcaccaggagcaacacttgccctatacttccatggtgtttgtgcatctttaatatttgagcaattcatggcattcatccaaattattttggtctattgattacttctctcttaaaatgttttctgcccaaagtcgaacctcctatgttgtttatgtgtcaagcttagtaacgatgccctatgtcgggctccgtcagtggtttcaattgttagtgaggttgttctaagttatggcgagtgttgtgtggttgttcagccagccggtggttctgtattcttttcttgcaacccacctagggtttttatttccacttgttgaaatataattagcagttttactgtctgttttagttttttttaaaaaaacttggttgtaaagtctaattttttatttagagtttttttttcaaaaaaaatgaaagcactaagtggtgcatggcaccttgtcactgcaatgagaacacatcgttacgaaacactagtacaatagattgagaacctagttttcttgacaaaggcagtcctttctgatggctctaaaattttgaaatggcatgggtttggttacaaattgctaaatcagcttatattgttagatatagtatactgtgttgggtacgaggaaataaggatgaaacccatactttcacaggcatattactcactgtaaaattagttctgattaacatttgttccaatcaccaagccaaaaaaaaacaaaagctttaacctcgttagcgtgccttaagaaattttggatcatgggtttgcaggtgcacatcttgcccagggag

SEQ ID NO: 9940 - DNA, 864 bp, Oryza sativa
  Intron number 2 from transcript LOC_Os04g27540.1 (locus LO C_Os04g27540) derived from phytozome v7.0 (chr-ID Chr4; po s 16113756 to 16114619 reverse strand)
caggtggctgcacgtttgagccgcatctgaaaaaggtttgttcagatgcaacaaaatatcagatatgtagtattgcattgaatatcgttattaaatgattcgaggtaataatctatgatgcaacatatgttgttaactgatttcataattttgtatgataatttggatgaattgcaaagtgtggagtgtggtccctaaatttattgaagtctgtagataaattattttttatagttttaaattgattcatggttgaaattatatattttggtttcaatagtaaaaatctaatttagctaataatgttttttggatgatttgggaaggcataatacatgtccaatttttaaaactatttcattcatatttggttggtatgttaaggatgtggtctacatccaagtgatgtattataatttttatatagaatacgggtatcttaaattacgtactatttcattgtaaataaaataacagttcaaactaattgagaaaaagatatgtaactagagagttgtgatcattgaattatctaattgttgttttcaatatattaaatgtaagctcaaaaaatggatatgttagctagaaaataggagaggaagagagagttggagctggaaggagtatgtacctttgcactgtactttctgagggtcatccataggttttttttcctcttttcagtgagatataatggttaaaattatgatctatgttcgttgctgtaatttcgtactgcttttgacaaattatgactgctattcaagcagattgtggaaacacattttatatctacacacagacattttatggtttgttctaacgaatccaaactatatgcatgctgcagaggtcagacga

SEQ ID NO: 9941 - DNA, 176 bp, Oryza sativa
  Intron number 1 from transcript LOC_Os06g03520.1 (locus LO C_Os06g03520) derived from phytozome v7.0 (chr-ID Chr6; po s 1360720 to 1360895)
tacaagtacgtaccacgaccaccatcttgattttttttttctctcgttcaatctcatgcatatttgattgattgattggttcttcgattattcagtgattcatttattgattgattgcgtatatatgtgttgtttgtgcagggggaacgcggcgttctgcagcgacgactgcaggc

SEQ ID NO: 9942 - DNA, 1019 bp, Oryza sativa
  Intron number 1 from transcript LOC_Os07g08290.1 (locus LO C_Os07g08290) derived from phytozome v7.0 (chr-ID Chr7; po s 4227998 to 4229016 reverse strand)
tggggttcctggcgggagacgccggtcgtgcagaggtcggtctcctccttcctttccatggcagcaaagccggccgacataggagagagagagaaatgagtttagaatagtattctcttagttgcaaaatatagtaaatctaggattagatgggaatacaatcatggtaccaatatatctgttcagattcgtagtattaggttgtatctctttcgattgctatatttttaaatagatgtatttttctctttttcacattataggacgttttgggattttatagattcatatatggatccatatatatgtttatagatgtgtataaattcatatgtatgctagtatatttagataaaaaacgtcttatatcgtggaacggaacgaaacggagggaattgtagataggatatattataggtataactaattaattacactgggcaaaaactgtcacaaacaaccggggtatttactattttcttgttgtacatacatgcatcgagctttaatattgtgaatcgatttgttgctgtttgcaaaaaaaaatggaattttagcacggagcatatgattattcttggtgctatggttttatagtttcataaaatcatgctgttaataaattgttatttgattgaccatatttgtgggttctaaattaattctgaaatatatgaagaattatttgatctattgtataaaaagtttgatagccattaagttaagcattttttttttgtttttgttttgacacaatagtagcaagtaaaattaataaacagtgcggttatatgaaactgtaggactataatatatccagtgttatatgccacgtgccaaaacttctggatttatgcaatttagatcataatatatacctagaattttaaagaatttactctgacttctttttctttacgtttctgggttgtagtacgtcgaaaatgtaatcttctttttaaaacttgtactaaatgattactggaatatccaacacaggtgctcttaaatttataata

SEQ ID NO: 9943 - DNA, 807 bp, Oryza sativa
  Intron number 1 from transcript LOC_Os03g11130.1 (locus LO C_Os03g11130) derived from phytozome v7.0 (chr-ID Chr3; po s 5728717 to 5729523)
ccctgactccgtctgctacggcctccacggcacacgtatccatctccctctctctttccatattcctgcacttgctggtggcgatcatggggttggttccatccaactgtctattgcttgaatcgtctgcgctctcaccaaaacccccctttgctcatcgcactaatgaaatgcaactaatcaagtgatgtacaaggaaatttgattgcaaatattaagtgtttacaaaatggcatgacccttttgcacgagatgtcggagtctttttatgctatctgaaacatgtaagattgaccaagcagataaatcgtacttcctccgtttcacaatgtaagactttctagcatttcccacattcatttagatgttgatgaatctagacatatgtatgtgtttagattcattaacatctatatgtatgtaagcaatgctagaaagtcttacattgtgaaacggagggagtatcaaacaatgcccttacctatgttgtgtttttcaaaagaaaatgtgtataaaattgtatgacctgttattatctaggaattggggtttcttttgtgccttatgaaaaaagaatcaagattaacagctgatgcccttattgacatgtaatagaagcttaagtgatacatagtgagataatatgttctgagtagcataagggaattggtgtcggtggaattgcgccccatctgtatctgtgctagatagaaagatatataaatttcagaaacttacattactcttccccatttcttgtctatcatgtaagcgatatcttgtgagagggagtgcagccgaggagaa

SEQ ID NO: 9944 - DNA, 658 bp, Oryza sativa
  Intron number 1 from transcript LOC_Os06g01700.1 (locus LO C_Os06g01700) derived from phytozome v7.0 (chr-ID Chr6; po s 414189 to 414846 reverse strand)
cgcgacctcgccgcccacaccaccctcaagcccaggtactctttccccctcttcaatccatccacatcaattcgattcgatttttagctatgtgcgtgcttcgtgtcgtggagatctggatcggatattcttctgcttctcggttccactagtgatttggggaaagggttaggattaagctctatacctggaacccttgttttgagatgatttttcgatagtaattgcttccccgaacgtagctcggtggaattgcagggcatagacggcgaacactagcttttagaccctccctgcttcggtttggttttgcttctttcgggggcccaaattggctaagaagaaaccattttacttgctaatagtctgtaaatgtctttatcacttgctttgtgttcaggctgggcaggattagacgcacgcctgtgccattagctgagcttgtgttatgcgattcagcaaatgaagatagtatatgtttatgaactgcctttcctgtaaggggtatgcagtcaaatgccaaaaaagttacgattctctctcaaatgatgtgatcattgtagaaatatgcatctttgtccaacatatgtccaggaaatttaacccttccctcctatgtccaggaaagaaggacaacatacccaagaagagttacaga

SEQ ID NO: 9945 - DNA, 776 bp, Oryza sativa
  Intron number 3 from transcript LOC_Os03g30130.1 (locus LO C_Os03g30130) derived from phytozome v7.0 (chr-ID Chr3; po s 17208140 to 17208915 reverse strand)
tccgctccgccgccaccaatcccttccaactcactgtgagagaccacgcttcagcttgcttgtttcttttcttctcttttttttttccttgttacgtcaagaaacggatgaggtgttgtagctagcgaggcatcaggcatatgcatctggtttgggaatttttttttcggttttgggtgtctcctgcttgtggtttcatcgcctgctagatcgatctactactactctgaagacgaacagattgggaggttgtttcactgaccggcaaaaattcggttggccttctgtcagtgtcagggtgttcgtcgtcctgagaaaaacgatgattgatacggttaggtatcaacattattccgttcgtgagatgcttttgcgagcatattcgtcagatgcttttcatcacaggatgaattgttctaatctggcaagaaatgttcaacagataaaaaggcagtgtggaactagtatggattaatttatttcccgaatcctcagcctagttaatggcttaattcaattgtccattagattggattagtattttattaaaatgcagcttccgtgtaataggttgggttagtggtttattgaaatgcagcttccgtgtaataggttgggttagtggtttattgaaatgcagcttccgtgtaaggccgatttgtgttctgtagtcatggacatcatgtctgaactttaaacagcttctgtttgctgcatcctgactggagtttgcttttgatttgttcttcagaacaactcgttgccattcaacaagt

SEQ ID NO: 9946 - DNA, 588 bp, Oryza sativa
  Intron number 1 from transcript LOC_Os04g41460.1 (locus LO C_Os04g41460) derived from phytozome v7.0 (chr-ID Chr4; po s 24385176 to 24385763 reverse strand)
aggaatcggcgggttcctctttggctacgacacaggtatatggttgcatgtgtgccatttaccttccaacttttgcctgaacgtttcatcaagtgtagctgttctcgatgaatttcccctcgcagtaataagcgacatgtttttggttgctttggacttgttgggttacttcattttcatatgatgaaacattcagatggtgtttggtccaatttgatatttgacagtatgttcaggaagcctatggttagatatcattgatacaaacaaacaaagtttgaagtggaagtctgaaatgagatttatgaatagtggacttattttgttgagttcgtgctatgatctctacagtactgcataaagatagatattaattttagcagcgggatgaaatcaatgcttgcatcattcttattaatttctagcaaaatcttcgagtgtgtgtaacttcacagaattactgtactgtatacttttgccaaaaaaaaaaaagaaaagaagagaagacagtatgataaatttgtgctcttagctaagaaatttattctatcaggtgtcatatctggagcccttttgtatattcgggat

SEQ ID NO: 9947 - DNA, 646 bp, Oryza sativa
  Intron number 2 from transcript LOC_Os03g21240.1 (locus LO C_Os03g21240) derived from phytozome v7.0 (chr-ID Chr3; po s 12126925 to 12127570)
caacagctactgattctcagtcaaaggtatgtaactgcaataccataaagagtaaagttgtatccctttcttgtgttctggaagtttagaaatacacctatttattttaacatgttgacgaaagtttctaacactataatctattgagagtattttgacatcatcctactggtaatagtggtaccatctgcctacactctaacccggttactaatttatatgatcgtgattaattttagagaaattttgcctttccagcaacatacttctgtaaccatggcggtatttttttcccttattacacaagggcattttgttagtttatctattcatttattgaatgctcgaaacttgtgtgagatgtcatttgttaaagtgattacctgtacaagagcaatgattacttgttccttggcttgaagagattgtggctgttggtagattaaatatttgattcaatgtgttaaaaatcctgtaacgaattgttcatgttcttgacataggctgctcctggaaattctaagcaatgtatactgcatcttacctttaacgcattttttttgtccctgatgctatagatagcgctccttatgtttctaccctggtcagaatgctaaatatttatggatctcttttgttacagtcc

SEQ ID NO: 9948 - DNA, 429 bp, Oryza sativa
  Intron number 1 from transcript LOC_Os06g50250.1 (locus LO C_Os06g50250) derived from phytozome v7.0 (chr-ID Chr6; po s 30421951 to 30422379 reverse strand)
gcatgtgagtattgatccattttacccagtcatattaagtgcgctataattcctttgccttcactcattttcatttgagattatgtacacctgttaaaatttttagcgcggtttcaattgcattcaatctatctatgatatactaaatgttttttaaacctataataatcaatgtttgaagaaaaacaaaattgaattgtgtttttctgtcgttcttttccttcattgcactagaaccagtgggaattagatcaagctttcattgtttgttagagggataaaaacaagaatccaactaaatggaaattcttttggtaaatgtgtggcttttgatgcgttagatactgttaggtagtatttttcgtgtgatgcatagattaaacagctagagctttcatgtttttgtgcttagagtttacaattatgcag

SEQ ID NO: 9949 - DNA, 759 bp, Oryza sativa
  Intron number 1 from transcript LOC_Os03g13850.1 (locus LO C_Os03g13850) derived from phytozome v7.0 (chr-ID Chr3; po s 7505147 to 7505905)
gcgctacgggcgccgcaccgtccggctccctgaaggtaccgatgtcgagctagagttcagttggacggtttgctgtatgaatgctgtatgttgcgcttagttaataatactgggactatctcgctcttaattggtgggatatacattttgtctgtggaattgtatactagcactagatatttgttttttgttttttttgggatgtcataattcgttttggagtctcataatccctggtttctgatatatacttgtttaggctatgtccagacgatatgagttgtgaaatatgtataacagtttagttggcacttggttggaaagctatcaacttaacacctaaagttctacttgcataggagataatttccctggttatatgtccatttcagtcgaaatgaaaagttggttatgtattatttttacaagctaatgctctctttgagattcaagaataaggactgaataatatttttattttctgctcggtgataggatggaccattcctttttccctgattgagttttgaactatgaactcgtaatgcaggaaagacctattaatgctactatctactagagatttggacttggctactcttttacgactactaatcttaactgagatgattccatcttcgctactagtagcattgcaaactgctgaattgttccaaataaagtaatttgctgtcagtactcagcaactcaatgcttactgatgttttatctccttaccttttaaaggctgaatttgac

SEQ ID NO: 9950 - DNA, 591 bp, Oryza sativa
  Intron number 2 from transcript LOC_Os05g19980.1 (locus LO C_Os05g19980) derived from phytozome v7.0 (chr-ID Chr5; po s 11683497 to 11684087)
gaggttgtttgctatttttcttttgctcgtcatctctattgacacgaacgagaatgttttttgcattttttttcatgcttgcttgatgatggatggctgctactgtgcaacgtcgagttcatctctataccacaccactacatccttccatgattccatcgtcgactattgctcgccacccggttgccctctccactatcagtcacaagacacataccgtgctcttcatccttatagcaagatccaggaaagccacctgatggatttttggctaaatctttgttttttcttttctagtttgattcacctgtgagtaattttatcatttgtgtgtgattgagcctgtaattttgcatgcatacgagtattttgtgatacagatcaataatactcttagtatcagtttttcctcttatattgtatattgaacacatcagtaaatatattactacacggtggctacgagatcatggctatattgagaggaatgtggtaattgtttactcgcagaccacgaaatctcagtttttactcttatactgtgtattgaatatgtcagtaaacatattactacacggtggctacgagatc

SEQ ID NO: 9951 - DNA, 960 bp, Oryza sativa
  Intron number 2 from transcript LOC_Os07g22720.2 (locus LO C_Os07g22720) derived from phytozome v7.0 (chr-ID Chr7; po s 12816710 to 12817669 reverse strand)
cactgcttctggttcgttccccaccaagggaagtatgtgctacccatcttttatcattttattttgattgtgtgtatttgtcaactaattgaccacggtacgcaagcaacctgtttgtccaactcaactggagatgtccttccacatgactaattgctgtgatagttagcaaatacctttatttctttcataagtgtctgctgcttttaatcatgcagttctgttctgttccaataactttttatttctgtattatgggtttgtttgtttcctaccataccaaaatattagcaataccaaaacctaggtgaattttagccttttttttcttggcaacctatgtgtgttattggcatattttggtagcaaaccaaacactagccaaagtactattcgaagggtcaacaatttggtagggcacattttggcgtcaaaccaaaatggtcctgccatcataactgaaaccaatatagagccttacataggcaatttagttataaaacgtttggtttcacaggtgttggtaatcctggatcctccagaggcattcattgattgtgtgttggtggtctgtagtctaatatagacagattgtcaattgattacaaacatctgtacaaaaaaaatatgttgcaacagaagtacaatccaatatgttcattttttcatttcttgacacattacctctccactaatttttgtacctttggctaagcatgggttggcttcctgagctgatactataatttttaattaaggcgtgatttctcattgacatagtataggcacactcattttgtcttgagatagtagttatttggttcctttgggaatttatttgtacagtgagaattcaccttcttgattgaatgtcctcattaagcaattttcaccattgaagttttagtgcttttggtttccacaggtgctgagaaaagaattggaggtgccagatttcct

SEQ ID NO: 9952 - DNA, 972 bp, Oryza sativa
  Intron number 1 from transcript LOC_Os04g56230.1 (locus LO C_Os04g56230) derived from phytozome v7.0 (chr-ID Chr4; po s 33341969 to 33342940 reverse strand)
acttcactgaggagaccaggcagtgggtcgccaaggtacgtcttactctctctatacctaatgaacacgattaattgcaagtttattactgtacaacatacatgtggtttggattaaatcatgcttgatccatggatcgttaaggtttagatgcagatttaactcggttttcatttgcatttttttttcaaactgttaaacagtgtgtttttttaaaactttttatataaaaattgctttaaaatatcaaataaatttattttaagtttaaaataactaaagctcaattaattgattttttttcgttttgtgtgctctgactttatctccatcttaatttctcccaaacactgtgcatacatagttctgtcacggacaaatgtcaaaatttcaaacctaactttaaactccatgatggggtttttcaccccaagtatattttttagcattagttttttaactataaataatacatactttgaccaataacatctataaaagtaagatgctttaaataaaaagagttgtatattatgatagtttgtttaatgataaatctagtaacatcaattttatattattgatcttttttattttttttgctattaaatagtcaaagttaaaaatgattgacttagcactattatgaacatgcttatactttgagacggggacattataaaatatttttggttgcttaattcatatggcttctctatacgcatcaaattcacattgatggttatgcctgtcaagatgagttctttaactgttcttggtactagtaccactgaaaaaatggttcttttgtttgtaacttctatgttcaatacttcaatctaatcaaacctgcagaaatattttaaccttgatggtttgtttggtaaaatacttttatatggtgttatctccgttgtttctgacgaaaatggaaatgtaatgcgtcctctgttgttttctttgctgttgcag

SEQ ID NO: 9953 - DNA, 730 bp, Oryza sativa
  Intron number 1 from transcript LOC_Os06g48690.1 (locus LO C_Os06g48690) derived from phytozome v7.0 (chr-ID Chr6; po s 29459129 to 29459858 reverse strand)
caccaccagcaaggaatagtggtacaccttatttcccttatcccctctcaatcgatgtgttcttttacaaagatagtatataacttctactctttcttagactctgtaccaacttaaaaaatacttgtaacccgaaaataatataaattgaaattggtggatgaaattatgcacccgtaactctatcatcacacacgtgtgtctttgcagtgttgttaatctgcatatgtctactattataaaaattaaagatgtttttaccagtattttggtatatcatccatgtttgagtcggtttttaagtttattcgtttatagaaatacaaatccgtatttgagttaaattttaagttcgtttgcttttggaaatacaaaatgagttgtataagcaatctcttaaaaaaaactcgcatgctaacttgagataaaagtcggactcctaactacatctcatgattttctaaaataaaatatccaagcgaacttccatggtgaatttcaccctagctaaaccgtataacaattacaagattagctaaaccgtataacaattacaagattaaaataatcttcacccgttgcaacgtacgtgtatttttttctagtgcatagaaaatatttgtatgtcttaataacatttttgtgtttctcttaaataaaatctttacgagactaatgtgcttcattatgtgcaggaactatttgcatctattatccagcttgcacgatc

SEQ ID NO: 9954 - DNA, 427 bp, Oryza sativa
  Intron number 2 from transcript LOC_Os03g38950.2 (locus LO C_Os03g38950) derived from phytozome v7.0 (chr-ID Chr3; po s 21633905 to 21634331)
aacggtcttcctccatcggctgtaagtttaatttcttcacaaaaagaaatactttcactcatcatacatgtaacaactactccttctgatttatattataaatcattttgatttttttttcctaatcatttttttaaaaaaatttgactatgtttttttaaaataattaccaacatgtacaccgaattagtttcattaaaattaacatttgatatattttgataatatgtttgttttgggttaagaattttgttatattttcaaactttaaaaaataataagaaaaagaaagtcaaaagcaacttataatatggaacagcggtagtactagcaacctggcagattcatcatggaaatagtagctaattaagctgccgctgtgttcttaccagggagagggcctgatccttttctacaacccggcagc

SEQ ID NO: 9955 - DNA, 965 bp, Oryza sativa
  Intron number 2 from transcript LOC_Os03g04169.1 (locus LO C_Os03g04169) derived from phytozome v7.0 (chr-ID Chr3; po s 1908730 to 1909694)
tcaacccgcggcagtacaccgcagatatcccgcaggtgaggtttccatctccattcattgtcttctatcagttcgtcatttctgtactggaaattggcctactatcgaattagtaggccacttaggctctctgattcattgataagtatacgtatgggctagtccattttcaaagcattgcagtttaccatttcctgtatatgcactattgttagtatgaatgcccttttgatggttgaataaatacgcaatagcaattccaaactaaggcccggtttagttccaaagtttgaaccccaaaaacgtcacattgaacttttctacacacacaaatttccaacttttccgtcacatcgttccaatttcaatcaaacctccaattttagcgtggaactatacacaccctaaagttactttatcccttcgacagtatgagtgaaatactgccatcttatacaatattatatttttagtttatttcttcccttcaacaattcgaattttgtctgaacttctggtgcactgatggatgaagcaacagaaaatttgtcccttaaaatgattcaagcatccttgtcaatttaataccccatcgatcacattgtgtgttcacaatacaaggagatgtccttttagaaacagtagtcatttttaatgaaacctagcatagttattgtaccttttccacacttgcatatggttttaaagtttggagagattttagttaatttatttcatttaatatgggtagcattagcagctttaccttcctatgactttgtccctgcatgatctgcagctatttgtggaaatgtggctgcctgtttagaaaattagtattggaatataacggtgtaggagatagctaaggtaaaaagtcgcagtgctatttaaatcacatgttttgatttttttctttcctttatgcaggtcccaaacttggaggtttggtttcagaggcccaa

SEQ ID NO: 9956 - DNA, 672 bp, Oryza sativa
  Intron number 2 from transcript LOC_Os05g03330.1 (locus LO C_Os05g03330) derived from phytozome v7.0 (chr-ID Chr5; po s 1359411 to 1360082 reverse strand)
agctggtgcgtcccgttttagttgcaagctgtctgattcttgaacatcacattgtcagtcctgaaaccaaagcgctagatcagaaattcaaagacaagttcgggaaacccccaatctatctctcagctcttgatataatgaagaccttgattgctatggagccgtcgagatggagttaccttatggatttcttaagagagaaacgtatataattttttagtttaaaatatttaatacttaattaacctcccatgctaaagttggtcatcggcagatctacgtattgacaaaaaatacatatgtttacaattaatgtgcacacacatctagaattgtgcaaaaaaaatgtgacaatcattttccaagataagaaattcaaaaatattggttttccagttccatttctaggcatcaaaaaatatataggccaacagacaacaatagccagtgaccatccaccaatggactctttgatattattgttgaaggaaactatgaactcttcgattaattaaaagcaataggctggactgaaaaatccactcatgtctctaaccagcacactaatcttctgtcgagttccctgagtctgtaaaaacttcagcacaaaaggatttacttaatcatggcactgtcttcatatgtggcctctgctgacggcaatgcattcag

SEQ ID NO: 9957 - DNA, 782 bp, Oryza sativa
  Intron number 1 from transcript LOC_Os04g11440.1 (locus LO C_Os04g11440) derived from phytozome v7.0 (chr-ID Chr4; po s 6251796 to 6252577 reverse strand)
aggtggttcctctttttaagacttctttctattgcccttgcctgcttctgaattatatatggtgcaatctctatgtattggatgaggtttaagcttacaaacttcttaattgcagtatgcattatgtatgcaattaaacttcttgcctgaaaactgatggtacatgaatttgtattcaggaagctacaagtgttattttgctgcatgaattgtttcttcatagtgtcctatggtcttataatgcatactctcctacatctcgatgaaattaccacttcaggacatgttgatagcctcttttttttttctttttcttttgctgatgtgactgatctgaggttgaaggatatttgatcagctcctttctccatgaaaatgaaacattttctctggttggcttataaagatagaatccaatctgcagtccagttgagaaaaggaactgcaatggctctgaattttattagttgtgttgggaatttgaaactgctaatcatatccttttcaaattcccaattgctgttggcctgttgctttgtggtgcatttgcagagatgctctgaactggagcagaattccttcaaattttgacttttttcttttggttattggtttgggtccaaaagtgctagagttgactttatgctatttattgttgtttgctggcaactcttgttgaccagaaatggtacaatcttcagaaataaacttgcctcatcccctctgattatctccttttgaattgtctttacatttgcagtgtaagacccatctgttatctg

SEQ ID NO: 9958 - DNA, 478 bp, Oryza sativa
  Intron number 1 from transcript LOC_Os04g51166.1 (locus LO C_Os04g51166) derived from phytozome v7.0 (chr-ID Chr4; po s 30111512 to 30111989 reverse strand)
ccttccacctgccggatcctttccaccggtcagtggccgttcctgtctcttcagtcctttcctgatttagttctatcgttacagttctagagctaactgattggtgcacggacagcacagttcttgaattatgacgaggataagctatctaggctgtatgagagaagagtttaatgcgaatctaagctccattccgttctgtgatgtacattttagcatgcttcttacaaatgtaatagttattgtgacatgttgctgacttactattctagaaacttagttgtactattgtagagtgttcattggctattggtttctagtatactggagttagtgttcttgaatactaatgtttatggattatctttttttctgtctagaccaacttgagttgaatatgtgtggactgatctagctttgatgtgattgtcggcacatttcaggtgttgatcttaggtcatcaaaagtttgtgagctc

SEQ ID NO: 9959 - DNA, 423 bp, Oryza sativa
  Intron number 2 from transcript LOC_Os06g12990.1 (locus LO C_Os06g12990) derived from phytozome v7.0 (chr-ID Chr6; po s 7118381 to 7118803)
gagctcagggacaaggtttgttagaatttccccctaaactttgattgggcagtagagatacattcatgtgtgaatggataacagcacaaggtgacactgaagaattcagtgttacattactcatagagaccatttgagctttcctttgtagaatgattagatcgcgcatggcttttacttcatgaatgtttagtgtaccaaatattgggaatttgggttgccttccaatttagattctatagtaaatatggatttctactagacaaaagttgcatagtttagtttgtgatggtattatattatgcaatagacatgtatttctacttaacaaaagaactggaagttttttcttttcaaagctagtacgtatttacttttgattcatttttttcttcgttgtctatatttttcaggtgactgagt

SEQ ID NO: 9960 - DNA, 865 bp, Oryza sativa
  Intron number 1 from transcript LOC_Os03g46290.1 (locus LO C_Os03g46290) derived from phytozome v7.0 (chr-ID Chr3; po s 26183672 to 26184536)
ggggctaaccctaagccccgtatcgcagaataaacctagtagctaggtgcaacatgcatggatgatcattgagatgcggtgtgggttactgggttattccctgatttgtttgagatttttgagctgtgaaataattaaggcagggaaaaaaattaccgtagtttccaacagaagctcaatttccgttgagcttgagaagacaagggatcaccggtttcttgtgaatctgtgaccacattattcattagatagctcacataaaagtgtactgagcagcagcttcatcacttcttttttttttccctgaagagcatgacgatcttgtgacatgtgtgtcagtctctataatagcagcagcaactgatcaatggaaaaagatccatggtttcagagataagatgttcacaaatatcatgacaaattatctccatatctttccagacagacagcatactataccacccagcccacggtttcagagaaaaacctgattggtactgaacatcctgcaggttttatcatttcatttcagcctcttgattcagccgccaagggggggtcacctcgtcggctcacatggaggcaatgcatgacacaaacagccagcaatcaggcagtgtcaaatcgtgccagtgtcctcatgtgttcctgaaatggagatatggcaagaggtgagagaccgatcccattacacatgcagtggtgtatacaatacaaaacatcggcagtagcgatcacagaggagtacatggcatcaggatgcagccatggctacgtgtctggtcttgtttctgcagctggcacattggttgcctggaaggcatttctcatccttttgtgtgtctttttttttcttgtgcagaga

SEQ ID NO: 9961 - DNA, 377 bp, Oryza sativa
  Intron number 8 from transcript LOC_Os04g43360.2 (locus LO C_Os04g43360) derived from phytozome v7.0 (chr-ID Chr4; po s 25457213 to 25457589 reverse strand)
gcggttaagagggctctatctttcggtgcttcgtattatgcattcctttaatatgcaattgtcaacatggtgctaccttgttttctactaatatgttctgatgtccaaaagtgtttgccatgagaagtagtatctgatgtgttttggtgcaagtcattcacataaatagctcattcagatttcatcacaataagaaactcaaaggactaccattatgttgatagttgtacttgaagatttcctctgctatatttttgacaatttaacaagagaataatacaaacattcaattgacatgtactccgtatgtttttgcaccgttgcctgactttttttttctaggtttttagaccctatacttcttggtgattatccca

SEQ ID NO: 9962 - DNA, 899 bp, Oryza sativa
  Intron number 1 from transcript LOC_Os08g23470.1 (locus LO C_Os08g23470) derived from phytozome v7.0 (chr-ID Chr8; po s 14209053 to 14209951 reverse strand)
aggtaagccaaatatttttttttatgaaatgcaatgctgcttcttttcttttcccttgccgtttgtattttttttttgtttctttgcttcttacaagttctgtttggtacaagcatgatcttccttgcaaatttcaataattcggtgactagattgtaccctcttaaaagaaacaagtattgatgcccggatttaagccaataatatgataccacattaggtttgttggttagcaccagatgtaatattttaaaaagcaagaaattaggcttttcaatttcgtcagtttgttctgtagtcacatacagaaatcagggcctaccctgagatttttgtggcccagagtggaactaaaaagagaggccccacattgaacataaacatgaaaacattaatataaatatatcaattgcaaagatcgaattatgtgcatgtactgaacgactgatatacatttaaactaacaccaaaattatgtgaacaaactgtagcaatgaaagaaatagcctgcaaacaacaaacgagttcataacactgaactgacatatatttaactacttgtcatttgggaaaaaaatcacagcggaattagcgctagtgactcatcaataacatgccgcaaaaaatcataattacttgttatcccatgcatttcaactttgatgttcatacatcacccagatctcatcagaactacacagctccacgctggtagcatcaaggtgaagcatgcgttatattgtagcattctggtttgggctatctattgccttcatagtgaggaggagaggaaaacatagtagagcagctagtatatcataaaactatattcaaactaacaccctcaaaaatatgtttctgcagatcattccaaaagaatttgtgcagcgtttaaaggg

SEQ ID NO: 9963 - DNA, 427 bp, Oryza sativa
  Intron number 2 from transcript LOC_Os08g02904.1 (locus LO C_Os08g02904) derived from phytozome v7.0 (chr-ID Chr8; po s 1240854 to 1241280)
ttaattgttgcagcagagtgaagttataatttcaggtctctattaattgatgccttagtcagaaatctgttactgcagtgctctttctggaagtgcaaaaataatatgattaatagcataatgtaagctggctagattttatggttgggtgatatgggaagagtcaattgcgttttctgtccagctcggtttctatcggtgaatggttgttcgtttttttcctgtgcttttctattgttggaggatggcagggttcaaggttttgtttagtgcgttgtatcatttttatattcattttttaatggttatgtggcgatgtttgggatagggtaatttatggtttatctggtttttaaagactaaaaaggtatttctcggtttgattgcaacaggcttcgttccaaacagctagcgtgtataccacagc

SEQ ID NO: 9964 - DNA, 1032 bp, Oryza sativa
  Intron number 2 from transcript LOC_Os08g08820.1 (locus LO C_Os08g08820) derived from phytozome v7.0 (chr-ID Chr8; po s 5108847 to 5109878)
acgaatcgccgtcggcgcagctgcccctcacccaggtacggtagttcttcagagatgaacaagaacccaccgtatatatatatatatatatatatatatatatatatatatatatatatatatatatatatatatatatatatatatatatatatatatatatatatatttgcagctttctttttttgaagtaaattttgaaaaaaagttggtgtactttttgtttgcagctagttactttattaatttgcttttcgttttcttttttcttgttgcgtttgactcttgtactataatttaattggctgtgcatctgtttttcattttgttttggaaacggttgctagctgtgaatacgtgcatgcattaattggcgtgccattcgaggatactgagtttactggccaattgatgagctcttttattggaaatcagaagtactggttggagatatcatacacagtacagagaaagagaagttgatcttttgttcatacaacttcatacatgaacatgagtcaagcaagaactgaagaaaccatacatgaatacataaacaaagtctcttcccttaggtctctctaggtcttgatctcttaatgttctaatgatctatgtttttttaaaaagaaaaaatttaaaggcagacaggcacaacaggttaagggaaggattagttcatttttagcatcatactaaaaagaaaaatagctagctatatccatttttgacaatcacgtctcgaaaatacactatactgagcagaagcaagtcagcaatttccaactttgcggccgaagtaactactctatcctatcccttttagaaagaaaaagaaatggaagcatgcaaaatttccccttttttatgagcgtttcgtataagtttttctttggtacatcttaattgctttctcattcgattattccaaattaatcctgagctagctatatatggaacacatatatctgatgagttggtctcctctcacaaaatactcttaattaatctctcctgaaattgcaggctgat

SEQ ID NO: 9965 - DNA, 539 bp, Oryza sativa
  Intron number 1 from transcript LOC_Os04g42470.1 (locus LO C_Os04g42470) derived from phytozome v7.0 (chr-ID Chr4; po s 24948552 to 24949090 reverse strand)
tttgcgtccctgtgagaatttccatatccaatcgggtaattctccaccaccgtattctgtgtaattctgttgcgattttattgggtgggtgggttggttggttgtcgtgttgatctgcccaactcgtactctctcgatgcttatgtgttattctgggttggaattttgggcattttttttaattttacggtttcttctcccttgatggagtgatttgcagaacagggtgtggaacaatcgaaagtagggtacagtgactgaactattaggggtttgggggatttgataatacgtagatagggttgatgctttgattcgtaagacatggttcatttttcttgagctagtgtcatctgttagttttcctggattgcacttaggattggcagcaatccgtaattattgtaagagcctaggttgcgtgaaagatgaacacacccaccaaaaactgaggactcgtggggtttagtattgtttggcagtatctgtatataatctgataattttaagtcaatttacacgattgtttgatgtgcaga

SEQ ID NO: 9966 - DNA, 878 bp, Oryza sativa
  Intron number 2 from transcript LOC_Os03g46410.1 (locus LO C_Os03g46410) derived from phytozome v7.0 (chr-ID Chr3; po s 26240869 to 26241746 reverse strand)
cctcggtgctcgtaggcattgccctgtgcaaggtaatttcgcctgttcttgtagtttctaccttgtgcttgatgatttgcattgcggaatcagcgcaatgcttgtcaccgattgcatgtttgtgctgtgttgattgatgagaagaatagttacatttgagagttttggtagtacgaaatgaccatggacttctaccaaggaatggcgccagaagatccagcatgctgtacaaggataatgatactacataggactacattctatcatattgattgattcgaaaatatcaaatgtagactgcagcttcggaaaaaatataatgttatctagtactactgtttttcagcaagctctgacctctggtcattgcattgtacatattgattttccccttcattcataacttttagggatagtttcaatttaatcgttggaccaaatttttaacaaggtttctgttaaatttagcatgcttgggatggtttctattaagtaacattgatccattatactgttttcatttttagttgaatgagcttgttttaactgaagaaggtaaaacaagacataaaaggtatctggtatttgagttatgacataaaactaacaaccgccaactagatttttgccatctttcgtcaacgacaaaataatcttctgaagaaactttttgaatgcgacataatattatgtcatattattgctgcaactgaccgtagcatttttggacttgtttcaattgcttaccagcttttaattgttcaacaacatgtttctaatttcacagtagcatctttggacttgtttcaattgcttaccagcttgtaattattcaacagcatgtttctaatttcgcaattcacgatccctgtaggcat

SEQ ID NO: 9967 - DNA, 1061 bp, Oryza sativa
  Intron number 1 from transcript LOC_Os03g17030.1 (locus LO C_Os03g17030) derived from phytozome v7.0 (chr-ID Chr3; po s 9460489 to 9461549)
gatacgtgaattacctctcccaggctgacggtatacaaaaaacctgtgcatgatctgtgtcttattaatttatctcatgtgctattagcattattttgatcgggttaagtgcataattgagttttgcatagaggtggtctcagtactcgtgcaaatcaaaacacttggtatatttacaaatctgcatgacattttgtatgaacaatgtgtcactgaacaagttaaataacccagatcatcgcacttattttattgacagtgtgggggttgatgcatgcatgctatcatattaaccgttatactattatccatagaagtagttggatgtattttaggatgtatagcttgtgttccgctagctgctgccacatgatagaattcttagttttaagaatgtgtgcgggcatcgcttgttcctttctttcaactaaaaaggtgcgaaaatctgatcatatgcccttcgcctagattaaaagtatttacccttttggcccacatgcaagccaatctcccaaaacaatgtgttgttcactaattatgttaaacaaagaagttacagaggaattgaagttgatgtggtcatgtcaaataaggtttagtacaatgtatcctgtatcaacatgatgaggtcgattatattgtttaacatatatcttcttgttacatttgtcactttgatttttaagagttgtatttgtaatgagatgtataatgatttatcttattcttgaaaaataactctttatttttttaatctacttttattagtttgtatgcaagtcattaaattgaccatcgctatcttgttgtgactttttattttgtaacatttgcttatattttgtattattgatttattttgtattgaaatcctagaagcaacttatccaaccatgtgtgcctttcaattcatgccatgttttatactaatgatttagcacttactttaatgttcttgttatctaaccaacttttcttgctaatggatattgataaaattctcattactttttaaacatttgatagctgcaattgctttggagaaactaaatcatagtctt

SEQ ID NO: 9968 - DNA, 844 bp, Oryza sativa
  Intron number 1 from transcript LOC_Os04g56070.1 (locus LO C_Os04g56070) derived from phytozome v7.0 (chr-ID Chr4; po s 33209859 to 33210702)
gtcgagtactccaccatcaacaagcaggtcaggccccccaatccttccctcctcgctgtttattttggacctcatgatctgaccacgctttagtgttgctccaatctaggtcgttatctgctttccctgcctgaaattgtatagctaggaacactaaatcataataataattagtagtgccacggcgccgtctgctcaaaagttgtgcgggaggaagtatttgtggttaaatattgttagtgccacggtgctgtctgctcaaatgttgtacgcgagaaagtatttgtggtaaaattttgcagtgctgctaatttggtgttcattgtgtcacccttagattggttcgcaccatgctattgatcataatgtttctgaggtctcagtttttgctaacacattgatgactgatttggtatgtttgttgtgatatttgatcctagggataaaaactacagggtataatatttggaagttttagttgatattttagcactttgaactggtggtatttactgtttgtgcacatactgcattgtataatctgtttcatagcatttgttgtaggatttggtagtccccatactgtgtatcacagccatcttcttctaggatttagtcatcttagaattgttttgtgtccatctgatcatacataatctttggggtggctgaaatgctaagggggatcttgattttttttccttattctatactttcatgttctattcaaaattcattacctcgtgatcattgagctccgaaaatgagaataaatcgatgcaatttgctatataaagttacctaacatgcatatattcatttggataggctggaaggttggaga

SEQ ID NO: 9969 - DNA, 591 bp, Oryza sativa
  Intron number 2 from transcript LOC_Os04g39560.2 (locus LO C_Os04g39560) derived from phytozome v7.0 (chr-ID Chr4; po s 23373241 to 23373831 reverse strand)
gatctggtgcaaccgtgcgccaaattctctataaggtgagaaagaggaaccttaatttgattgatatgatttagtcgcttgggggataaggattagcctcgggtgcttaagttcttgattgtggattaattattggatgcggctttgagggatcggattgggtgtgtgtgtgacttgttgctttcagaggttaatccgtgttattttgggggagattaattagtttagtttttttttgttgattaatgaaaaggtgtcccttttcaccccaagaatctgaaaataaaagggtgtctctcgtgccttcgtctgatgaatctttgtccactgtgtgttaatggttttcttatttccatacttagtggtcttctgtaattaacagacggtttagaggttttcagttttgatatgacagcatcttcagtaggtccatgaagatgtttttatctattttcttttcaacaacattatggaggggttctcagtttaatacagtcttgcgtactatgcaaattaatggttttcttcagctatctactacatatctatgagcatgtgctaatggagatccatgtcttttctccagagatt

SEQ ID NO: 9970 - DNA, 963 bp, Oryza sativa
  Intron number 1 from transcript LOC_Os04g39560.2 (locus LO C_Os04g39560) derived from phytozome v7.0 (chr-ID Chr4; po s 23374124 to 23375086 reverse strand)
cttgcgccgcggcggcgcgggtcggggatcgaaaggtgaggacttctttttttttttcctttttctggtgttcttggtgcgtttctttcttgctgtgatttcttggtggttcttgctgggattctccttctctctgcttcggggtgggggatttcttgtggggagaacggccatggcgtagatcttctcgtgctggttgtgctggatggatggatcttggctgtttttttttcttcttcttcttcctcttgatgagtagaggggggtatgttggccttggctacatgcacaaaaaaaaagaggctttgatttcgtgccatatgcttttgttcagatttggtgcaggttatgctgccctgtcatccactcttgggtgcctcacccatggctgctgctgctgctgcttcttccaggtccagggccaaagaaatccccctccattagaccagattaagcaggagaaaaaaaatcatctcttttcttggtttccccatcgtgtttctgggtgattaagccccccgtctttacgttcttccttcttttgctatttatttccccatcaagaaagcactaccatacaagctactaggtgcttagcaactgttcatgcctgcctagttctttcttgcttgctgtttctttttttttctttttttttgcgcaaatcgtcgccatagccgcgtgatctgcataagctcccactaataatcctcctctcgattcggtccctcgtcgcctttgcctgtcgtggtcatgatatttcatgtgctttggactaacctgacagcaaccgctagctcttgctcctcctatccctcttcctcttccttccaatctctcttgcgcagcttctgttctacatgaaatgacaccacgtgatcctctcggggggagctcgcccgatggggttcgtggccgtgacatgaaataatatgggtcttggtttgtgtctgcaggtggtgg

SEQ ID NO: 9971 - DNA, 293 bp, Oryza sativa
  Intron number 4 from transcript LOC_Os05g01010.2 (locus LO C_Os05g01010) derived from phytozome v7.0 (chr-ID Chr5; po s 35476 to 35768)
ccggttataccaactaccattttcgccatagataggtaagcctttgtgtgtttcttcttagatctgttggtcttcaatcttcacttcttagaatcaaatcgaatggatggatggagggatgaactgggtggcggttcttgggcatggcttctgctttcgattgaattgttttttggattagggcctgcggattttaggatgtttatgtatatgatgaattatttgatttgagtgatataaaacactatgaattttaggataaagggtcctgtgttttcaatttgctcagcagt

SEQ ID NO: 9972 - DNA, 804 bp, Oryza sativa
  Intron number 1 from transcript LOC_Os05g11090.1 (locus LO C_Os05g11090) derived from phytozome v7.0 (chr-ID Chr5; po s 6236734 to 6237537 reverse strand)
ccgccccctcgcccccgcgccaccgccgcctcaaggtacgtgtgctgtccccctttctcctctcttctgttcgtcgcgctaattgtgtagggtttttcggaggtcaatttgttgattctacgcgaccctgtagatcgctatagcaccacaaacggctttgcgtttggtgtggattggggaaggaaaggcttactactactactagcttttatgtcttttgaggggttcaaaacttgaaattgagccaaacaagtctctcgaaatcatgcatgcttcatcacctagcataccataagtgccattgctgggtctttgtacagtatctctgttgcttgatgtcaattgaaatggtacatgttatgatggaaaatgcatggcaacttggtattttgaagaccgcagtttttcacctcgaaatgggttcttacatcattcttttgtggattttagattagactttgctccacgattactttattcacgacaaaacatgcataagctttgcatttatgtttatacgttattgttatatattgtattgtgcttgttttatttagccgataggaatcacattaacaattaacatctttctccttttctgccaggattttatatatgttttggcaactgtgagtggtatgaactaactattgaactttcaaaacgtgtcaatttgtccttgcttgagatttttgtggatgtcctactagtttatcttgagtttacgtgctttggagttcgtatggtattggacaagtttgccgctgatgttttgatcgttttggttgatcttgctctaggccc

SEQ ID NO: 9973 - DNA, 804 bp, Oryza sativa
  Intron number 1 from transcript LOC_Os03g44670.1 (locus LO C_Os03g44670) derived from phytozome v7.0 (chr-ID Chr3; po s 25148016 to 25148819 reverse strand)
ggagctcgccttctccgtgttcactgtgagcattttcttcttcttcctactagtagtagaccgtctatgttcttcacatgaatttagagacaagactataattattatttatgtggatttttttggcatcatagtttttttttctttttgtctttttcttgtctcactttctcagaatagatttgtttgttgaaattcttttttgttgttttctttttttccctctattattgtgctccaaaaattgcactgttacctatctatgttatcaattttacttaatttaatttgtctggtctatggatagggtattggctactttttttttttttttgcttctccttgctgatatgatttgtgtgttttagattcgtcttacatgggaaaaagatttcattttggttctgaagaatgaatggatatataatataatagtagttgatggctatgaatcgcgtaataatcaaaatattttgtataatggaaaattttacatttcttacctctgcactgagatattctcgttaataagaaccagttagaacttcttgataataaccttgtacctatatgagaatgcgaacaaggtgtgaacaaatgtggacaagatggttcttgtcaaggccatcggaaacgtgtcatttaatagtatgcatttttttttgttctacacatttttttcttgagcgatttctgctgatgagtttgttttcagttacttctgctagcgagtctgactgtgactttcatttgttctctctcgatttaggctgccaacagaggaccaaagatcaagccatcaat

SEQ ID NO: 9974 - DNA, 863 bp, Oryza sativa
  Intron number 2 from transcript LOC_Os03g45440.1 (locus LO C_Os03g45440) derived from phytozome v7.0 (chr-ID Chr3; po s 25647266 to 25648128)
ggtaagaaggtgggtagaggatgacacgtgagttcaccatattttctgaaatattattttcttaatttaatgactgaattgtcacatggctaaaccgttgtcacgtgtttgccatgtaggaccaataccatcttaaaattggtttagagaatttaggggtgtaggatgtctagtattgaagtgtagggggtaaatcggactaactaaaaaaaaattcatggggtgttttgaactttttcgtttgattaatagatagaaatttcgcctctatattcacacatctaaatgttaatgggaatatttggattgtaagtcttgtaactgagaaataacaagataaacaaaacaaaatagacttgataatttttgggtcttttctacaccatcaacagttgataattttgctattaactagaatgaatacaccacttgcctatttgtaggaatccggaagaagtcacggagcccggaagaaaagatacgaataaggttgccatgtgggctctggccgagcaccgcgcgtgctgtcgagctagcccaagccgaacctgcagcatggccggcccgagcgctaacgcggcaggatgcatgggccgcacaagccaacggcggctttgtttctgaaggccgcattgctgggtcgccttgcaactgagctcttgtgccacactgccacatgattataccagtaggtcggttattctaaacagcttcctgtatggtattgatactcaaaccttatgaagtatttggtgaaaatggttgcaacgataatattctttttaggaatagcatatgctaatattactactactttcatgtatgctctaattagtttggaaaagccgctcagttgcagctga

SEQ ID NO: 9975 - DNA, 588 bp, Oryza sativa
  Intron number 4 from transcript LOC_Os03g18830.2 (locus LO C_Os03g18830) derived from phytozome v7.0 (chr-ID Chr3; po s 10553572 to 10554159 reverse strand)
tccaggaggtagttttcttttcttctttggatggcagcttggcattcctttccatgtttggtctttttcttaatgattctaagtatcaaaatgatgtgtttcctgcattatgtgtatggatcatcggtcctcacttatctagctgttgtataaatatctgattgataatgacttgtgacttgatcgaatcttccatgtgataaattcttaaagcttcatcctcattattttttctactgttgcaaaaacttttctcagcatgtcaggtactgcctacattatgttctaaagttaataagcatttcttctgtttttcccagcttttttttggtctagataatcattctgttcatttgcagagaccctgtgtaagatttatgtgttatgctagttgctgaattttcttgtgtgacatgctttcataggcaacatttttctttttcagccttgttaaactgttttaacttttattaataggtggccatttttcatggttgaactctttgttttaattgatagtcaaataatatagatttctttcaattattcaactatgctgtcagctcctgtctgccattggtgcggtac

SEQ ID NO: 9976 - DNA, 272 bp, Oryza sativa
  Intron number 1 from transcript LOC_Os06g08220.1 (locus LO C_Os06g08220) derived from phytozome v7.0 (chr-ID Chr6; po s 3981172 to 3981443 reverse strand)
cgcggtcgtctcagtcgattcctcgcgtcccatcggtacgcatatactatttcagtttcaaaataaaccaacctaatacgaaatgtgatatattttagtactacaaataaaaatatcagtactaggtaatttattttagaacagaaaaaaaatacacttaatgtatttgattgtgttcttcatgatttggcaaacgagcaagctattgatgatttgagagctgtgttctgcacgcagagggtggcgtggagacgatctggaccgcggcggca

SEQ ID NO: 9977 - DNA, 605 bp, Oryza sativa
  Intron number 2 from transcript LOC_Os06g44430.1 (locus LO C_Os06g44430) derived from phytozome v7.0 (chr-ID Chr6; po s 26833119 to 26833723)
gcgtctactggggcaagacctccgacggcctccaggttattacacttgatagccaatcggggaaaactattttttgatccctcgagatgagcatgtccctcgtttctttgaagaatatccaaacggttataaaaacttcttaaacattcgacaatactcatacaacacacatatatattattctacaaaattttaggtccaaactcaactgacacatttgtgatatgaaaaaataaataaattgggcttatgaatagtaacactttttttttatttttttaatatgcataagtcgaatttgaacttggttttaagtcgaatttgaacttggttttcggtgtactgataggtgtcaatatactctgcattatcaaatttttcaaaaaatattttatcactatttacattggatttgtaagaaaaaaaaaggtgaacgagggatatctctcgagagattagaatcaattcccgctaatcagtcccgctaatcagtgacagcttgatgagcttcaccgccgagttgtttttctaatggcgatcgggttttttttttgtgtgtgtgtgttgcagatcgcggtgaagaagctgaaggcgacgaacacctc

SEQ ID NO: 9978 - DNA, 541 bp, Oryza sativa
  Intron number 3 from transcript LOC_Os05g35170.3 (locus LO C_Os05g35170) derived from phytozome v7.0 (chr-ID Chr5; po s 20819326 to 20819866 reverse strand)
aagacaatcaattggtctctgctggtttctcaaaggtaatgctatttagtatgcgtattgcttgtcgagtaagctctcacaactacacttagctttatgtgatcaagatttagtaattccttattttatgttcatcgttctgttattatctcctttttattatctttggaagtaaaattgtattctaaaccattagtaacagaagtggaatatggctgggctaataatgctctttatgtgcggtagttatcattgaagaaattttagaactccagaaacagataaaaaacaatagaatattgatccttgtgctgatttataggggctaaagtgcaaattgtgctaggcaccctttgttttgtttttatttttctcactcttatgatagccaatattttgcttttttgaaaagcagttatcaacgatgaagtacttttttggattttgatttagttaaaacaaagctattattggttttataactcttatgtatcctatttgggatattgtactcaatagttcttttaattaaacattcagg

SEQ ID NO: 9979 - DNA, 820 bp, Oryza sativa
  Intron number 2 from transcript LOC_Os05g48416.1 (locus LO C_Os05g48416) derived from phytozome v7.0 (chr-ID Chr5; po s 27699246 to 27700065 reverse strand)
ttggcagttacgacatcaactgacacgattaataggtaccaagcatatagtgcccttgttgattataataaagcagaatatagcctgctaatgtttcattctatattgctgtattttctctgcggaaaggctaaaaaactgtcgacacatttttctttagaaatatatcgatttctgatccattagatcaactgtaagattcgtgctattttggttgacgaaaataaaattgtactgcaaagaatcgaacctaggatttccggtggcttgtccagcggccttgaccaactgatcgagcaaagattttggcttgaattgaaattacatactaattacacttaaattacatactatttacatatataatttagagacttacattgtaaatacactaaaattacatatgtaatttagagacttacatatgtaattttaggacttacattgtaaatacactaaaattacatatgtaatttatgggcttacaatgtaaatacatgccaactattttttggtgaaaaatatggtgccataaatatagctactcccttttctctgtgctaattccgaattaccagctccctgtaaataatggacactttcctttttagtttacacatagagaatttgttggaaatttgattagttcgttagctactagatatggatttaggatgggcaaccagttatgatgaacttgattggctctataagaaacacactctcaatatgaaatttgcatatacttattcggttattcctcttgagttttctttatattttttttacatgctgatactttttttttccatgccagaac

SEQ ID NO: 9980 - DNA, 950 bp, Oryza sativa
  Intron number 1 from transcript LOC_Os08g35650.1 (locus LO C_Os08g35650) derived from phytozome v7.0 (chr-ID Chr8; po s 22475430 to 22476379 reverse strand)
tgcaaccaaaacgctttctaccttgcactactcatgtacatttgattttctagcttgtttggatgatttctgttggtctctgtgcactacagatccgatatttcgcttgtgtgattcttttttcttatcggattcttgtgttgtgtaatccgtggattcttgtggggattcttgagaaaatattggtgtttgttatatgtgttttctataggatttgtttacaagatgaacttttttgttcactcggcatctctttgatatatcttgcttctagcaaatgttttgatcctgggtgggtataaagaggcagtgagtaaactcatcattggtcacttccataaaattgaccaacctgtttgatgttcttgctgtgttgattctgcatatggttttgttcaaaataactacttgaaacactgatcttatagcctttctccatggatgcatgttcttccttgtttcaactgaaattcaaattagtcggttgcgcgctcttgctttgtgccaaattaaatattcttttaagaaaacatgttatttctatgaaggattttttatactgtagtgcaattgcacttatacttcactcatttctcattttactcagttatatatagacactcctattgtctattgagatctctccctctccccttcttaaaaaaaattcctcttttgggatgcatgtctccctaacttttgtgttacaaacttatagtcataaaattttctaaaaatatttaacagtgtgtataatatatggttatatataataatatatgattttacttaaagtcatttatatcatatataataagtagtaacatagtaatttaaaactgtaaaactgacttctcccacataagacaaaacaaaacaaaactcttaactgcatttactccttgtcttttctagtggtggcaacgcacaccaccgcaagcgctggcctg

SEQ ID NO: 9981 - DNA, 845 bp, Oryza sativa
  Intron number 1 from transcript LOC_Os06g11790.2 (locus LO C_Os06g11790) derived from phytozome v7.0 (chr-ID Chr6; po s 6245542 to 6246386 reverse strand)
agcgggagagccagcgccacccctcccacctccccgtgagcgcctaaccctcccccctccctcccttccttctcggtagatttgctcgtccccaaattctagctcagtttctgcgggtctgcccttgctgctcttagtccgtgcgataggccgattggcgagcagagctgggtactccggttagagatgagatcatggtgcagaggggcctgcatcttggtggaattgctgtttgtcgtccatgggttctactagggtttgaggggcttgcagtctcctatttgtcgtgaactgtgatgctaacaagtagccgagacattgggtatgatacggggttctattgttgatctagttcgtcaagggtaataaagtagtggatgttaatttaaagtagagcaatggtatgcgccgtgttgcacctgagtggaattagaccaagatggcactatagcagtgtgcctttagacaacacagtcatggattatcgctagttaatagctatgtgcctatgttcgatcgggtgcttgaaaatggagggcactgaccctgagaacagaaattgtttcaccttaatgtctttttttcagttttatgtgatgttttggtttgtgagttgtttgtttcacacgagttgcccttctgagacgagctgcattgtcataagtttaaagtggcagtctattcaaaagaaaagaaactgaagctacaaactgtgatgaattggtttgtttgtgagcaattgacaactagaatgccagtttcatttcgttggccatagcatggttagaaagcttaaaattgtctttatctcttgtaggaggccactgaagtgcaagaaaatatct

SEQ ID NO: 9982 - DNA, 811 bp, Oryza sativa
  Intron number 3 from transcript LOC_Os04g14450.2 (locus LO C_Os04g14450) derived from phytozome v7.0 (chr-ID Chr4; po s 8082680 to 8083490 reverse strand)
cttgactggtaacgcactgtgaacagctccatttcttcacgcaatcctatggaatcctagttgtttgatctatctcgtaagtatcatgttctgtgtatgcctggctgcctgcaaaatggtttattcagttgcttgtgcttagttgagagttcaatgcatggtacatcggagaacgttttgcatggctgtatgtcagagtgagtccaactagtatgtcctaaggccatcggaaccatatactcaatcttatcatcaccgagcaggagtgaaatttccaaatcctgattggaacagaatcagtcttggcatagtcagaaataatgtggaacttaaaatatatactgatttattttgtggggaaaaatatataaactgaaatcacctcgacctatgaaattactcagcttgcagcaatgcaacttgtaaattttgagtagacatggggaaccagtagaagcctagaaggttggaacttctcgtttttaaaacatcactgttcatgttctacttgagatttttgacatacatttatatgtgggttcctctagatctctgtgttacgtgctgaaattcaaggggcacgtggagaaacatttctttctaatccagctcaactctgaagtattttgcaaaccattttacatatatacatttgttttgtgctaatattttttctactgttattttttatacttctgtataatatgttaattggacttttcactatagttatgataaacctctctaacattaccctgtcagttattgtcaggcccgaaactatgaagaagccctgttgctttttcatagc

SEQ ID NO: 9983 - DNA, 909 bp, Oryza sativa
  Intron number 2 from transcript LOC_Os06g06780.1 (locus LO C_Os06g06780) derived from phytozome v7.0 (chr-ID Chr6; po s 3195391 to 3196299)
ccgctcgcccctacgagcccgacgtcgtcgtcaaggtatactactgcattttttatttttttgcattaatttacttcttgaactgatgtaatgtctctacttaatttggtttgcttcccccaattcacatcgtggattgaaatgccaagtatacttaattgtgatgtttgtgtcgcagttgcagtttgggtggaaacgggtaaagctattgaattgattggtggtttggtttgacactaatttggaagtgatgaggaataagaaaataatgtagtttgtttactggttttacatttgtttgattacagtttacaggttgctctaactagatggtaaaaattgggaataaatttggttggtagataggctttgggaagaatagcttcattgaatatacaacagttcgagttgttgcttgttttgattgaacctagcacatcagcatatgtgctttactctctttgtggttgtgaaaccaagttataattgtttctgtataattagaattctatagccgtaaagtatagaaaagtgaaaacaacagaagcagctttagtctcattttatattagtaataaaataaatatattaatagaaacaaaaaaaaatgacccaagagcaaactggtttcttattgttccctgtctgatagagatgtcgttggctgcaggcctgcacctgcattcagtatgtctgactgtttgtttcatttcctgaccgttgcccactccttcaataaaaatgaaatcgccatagagtacttaacatacatttgtattgtccagtagtttggcatggtaaattcttcatgttgctcaaaagattttcagaaatctgaacctgctggattcctcaaatgtgttctagccaggaacttactgtactttttgtttttcacagagcttgacg

SEQ ID NO: 9984 - DNA, 654 bp, Oryza sativa
  Intron number 1 from transcript LOC_Os05g27510.1 (locus LO C_Os05g27510) derived from phytozome v7.0 (chr-ID Chr5; po s 15944392 to 15945045)
gaggcctaggtaccaatacatgatctttttcccctgttttggttttctattagggtttagatcaagtgttggaagcgagtaagtttgggatccaccgatttattcctcagccaggtttttgctgatatgccccctgcgcagttctgttttggatgccttttcggccaacataatgggatttcctgcaaaaagtctctatacaaaagttgtagataacgtgtatatctatcttctgaccaaatggaatgattttatatcaagtggtttaggaggtatcaatttctgaagttggctgtctgaatgtcgatgcatttatctgtagtcgaggttcagagggattttagaggatcttaatgatggaatccgagaatcttgtatttacagaagttgtagcatatgttgtgatctacctcatacataaaaattgttagcttttatcttgtagtttgttgtcagtgctcttttgaatggttgctgcacagttttctgggcagatgcacttctctgttttgtgccatgttttaggcccgctaaatggaagaattcagttttgttatctaaataaaagttgtaactcttgttctgtagatgtcagaaatgatatattttgctattttatgtgatgtagaattggaggtatcgagttgttaatat

SEQ ID NO: 9985 - DNA, 682 bp, Oryza sativa
  Intron number 1 from transcript LOC_Os05g03574.1 (locus LO C_Os05g03574) derived from phytozome v7.0 (chr-ID Chr5; po s 1516437 to 1517118)
ggtagtacttgtctagtgtccagaagcccaggtaaaggacaacattttttcttgatcatggaaaagacactctcattagctttgttttcttcatggatgggggaaaaaatatatttgagcttatcattatcctttttgttttcgttatacagttatgtttcgctgctaaaccatttcaaaacgtttttagtggaatcttaagtggtgtcatgattacttatctcaaactgcccagacaatatagattctaaagctactatagcttgagagcactataactttcctatgccgtttcatgtctttcttgaagcttcagaatcgatgactagacaaatactttttccattacctatgctgatgcggacttatagtaattagtaactgcatttaccgtgtacttcgatagtactcaatttttcaatttactgagagtcaccatttattcgattatttgtttagactcatgttgtgtttctttgtaggattgttcaaacatgtcatttctgagttttctttttgtacctcgcgtggtatagtttatacagtacctcccatgggcctcagaaaggcttattagttttgcttccttagaagtatctgatagcaaaatccctttttcttaaaatctttagaacttgaagataatgaccccctctgtttttgttcaggcaaagtgttataa

SEQ ID NO: 9986 - DNA, 527 bp, Oryza sativa
  Intron number 2 from transcript LOC_Os05g46200.3 (locus LO C_Os05g46200) derived from phytozome v7.0 (chr-ID Chr5; po s 26737631 to 26738157 reverse strand)
gcggcgacgttcactacttccgcattgtccctgaggtgaggttttcccgaccaaatgtgcaatcttgacgtgatacttcattgctcgctctactggaggggtgcagctgagtgtaggatttggtaatgttgtcatcgaacaatttatctcagttcagttgaggcttgggagttgggattaatttagaacattttggggttctatatctaggtaaacgacttgtggatgattgtattgttgtttgtatctaatccgcatatacattggatatttggatgaccttgagcttgcagatggaactcatagattgacaaaattgtgattctgtaatgttttgggttaacgaatttgatatattcataaaagaacagtatttgcatatttatttgattgaggtatacatcacatatcatggcccattagtttatgccagcatattcttctaattatccttattgtgaacttacttctacattgcattttgtgctgcagtactggaaagatcgccttttaagggcaaaggcgct

SEQ ID NO: 9987 - DNA, 544 bp, Oryza sativa
  Intron number 1 from transcript LOC_Os06g29594.2 (locus LO C_Os06g29594) derived from phytozome v7.0 (chr-ID Chr6; po s 16968404 to 16968947 reverse strand)
cgagaggaagaacaggaaggagaaggcattgacaagtaggccccactgaataataactccctttttcttttatttgttttttaatctttaagagctcatatctcttcaaccacaaatccaattccaagaattctttgatctaaattcatccaatttcaaatcctttattttgataccaaatttcctatttttaaaattttatttaaaattctttatttaaaaaccttttccttatttatttatttatttactttctaattctaaatttattttaattaacctttaaaaaaatatatatattaaatttatttgatttattttatatccctttaattttaaatttcttgtttgaaaaacctttttaaaatttaattttcctttaatttctttaaatgccatttcctttcaaaattcaaatatcttttgaccttttgtatttgcctctcttcatactccaattttgttattttcttttaccatttatttgtagtactttttttttcttataggttttatttgctatcttttacgtatacgtacgtta

SEQ ID NO: 9988 - DNA, 738 bp, Oryza sativa
  Intron number 1 from transcript LOC_Os08g28690.1 (locus LO C_Os08g28690) derived from phytozome v7.0 (chr-ID Chr8; po s 17519506 to 17520243 reverse strand)
cgtcgctgtcgtcctgctgctcccgccacatcccggtgagcatctgaatctctgtctttctcgttcatctctctcccacccacttttgtctcgaaatttgctcgcgttaaccctagcttctcttctagatctgggagcagcttatttttcgcttaataattttccttaacctagttaatacaagtaatctgtttgattcgggggctcccaagttggattcgcccctgtttgggtgcacgcgttctagtagtcagttgttgattcatctaatatgttccgtattctgccttttcctaactaggctcccctagagagggtatttttttttttggtgtgttcgactcatttgatttcattctttgaggttatgtttgccctcagatcaggtatgatgttgcagggctttggtccaaagctgtaatgatgtggtatatatatcatagtcttctgttatctacaaaaacatggctttagttttatctaggcaacagagctgtaaatatcatagtctctgttatctagaaaacaatgagggggtggagttcataatagtaactgattttgctcatgagaattcattggaatgttccatgatctacacttgaatttctttgtttaatgctgccattttagctatttgacagttcttgtgtagctgaattgtgctgttagaattacttgctggaataatgtttgttcttagttcttacggtcactgtttattgactttttacagag

SEQ ID NO: 9989 - DNA, 644 bp, Oryza sativa
  Intron number 3 from transcript LOC_Os06g41360.1 (locus LO C_Os06g41360) derived from phytozome v7.0 (chr-ID Chr6; po s 24790495 to 24791138 reverse strand)
ccagagctgacagaaaggtatgtataaactcttaattgatggctgttgcggtatgccaagtgtgtttgtactgatcatcatgcaatttcatttttactggatatcttcttcccttatcgtggtagctaatttgttactgtcccatttctagtggatgtaacccttttccttgtctaagatttttgctattgtggtgtacttaaatttattacacactgacactgctggtactaaagggggtcaaaattaacgttcagatgatactacagaagccattaagcacgcagattggtggtgatagtgtttattatgctttttacaaatcctgacaagaaaagcataattacagaaatcagaatatgaccatatcttctacctgtttacttgctacaagcaccttttctctgccattttctgttatctctgcttcagcaatgtgctcgctggaccccttatggattttcccttccaaacattagcaattccttttgctttattatgttggctgaatctgttgaacactatttgcaatgtttcatgaccactgtttctccctcatgtgaatgcacttttgttttcatgaactaagttgattcttttgtagtgtaggctcaaggacgtgaggccattactgccaaactttc

SEQ ID NO: 9990 - DNA, 980 bp, Oryza sativa
  Intron number 2 from transcript LOC_Os05g15180.1 (locus LO C_Os05g15180) derived from phytozome v7.0 (chr-ID Chr5; po s 8617167 to 8618146 reverse strand)
gacccgacggggccgtctcgcctcctccccgtcgtgtgagtctccgatcccccatccatccccaaatcacgggcggtgtttggctacttcttggtcgtagggtagcaaccgtgtttgtccgtctccttcgcctcgatgtcactaggttgtgggactgggggcaccgtgaaattgttgtttctgttgaggagtatttagggggaaattgtttggtttattttgttggagttctatatgacttcagcattgttcgtttcctgcctccggtagcaactgagtaatttacagggccttctagtttgattgaaggaggatagggattttgatggttaatcatgaacttagtgatactcatcggtttataacctacaactcgatgacacagttgaaatgccaatttgataaacaacaacggcagttccaagaatggttttcagcttgcttgttggtaactttggttcggtctcatgtacttttgaatgtttgatgattgacaaaacacatatgtccagattcgtagctagaaatgcttatatttttggatggaaagagtagtttatttgttcatgcatataatgacaggaaccaagtataagctgatatttttttcttatctttctaacattccactatgtttacgtcattcagtttgctctcaaaatttgtaatgaagagctggtagggccatatattttctatataaatgtacttacttagttattatatacataatttacgggaagcttgttcatacaaaattttatcagatctcgcagaactaaatcaaggaatactttactagatacggagttttgtaactgaacagcagatgtgaatatattagatagatttcagtgtcaaagaaatgaacttatttgttgtgatacatgaatgatgaagatcctaaggtcgaaaattttcaaatattcttttttaactgcccagagcagagcaagaaggaactgaactgaaagctgttg

SEQ ID NO: 9991 - DNA, 954 bp, Oryza sativa
  Intron number 2 from transcript LOC_Os06g51084.7 (locus LO C_Os06g51084) derived from phytozome v7.0 (chr-ID Chr6; po s 30902190 to 30903143 reverse strand)
ttctgaagtttctcagatagattagattggaaaaggtatagagttaattttatctattgattatagttcttatttaattgaactacgtagtgtcttgaatacttgccggtaggatttcactcccatgtttgagaattttgaatttgaattatggtatttaaaattatggatttgaatacaattgaattctatacattagaaatattcgtatttgaattattactatgttaaactaggtgtaagcatagagtataatcagaaatacaagagaaaaagaaatgggggctaagaaatagggtctgctggtagagttggaggtaatttttgaattcttagaaaatagggacagccctcattcaacctttgaggactctaaaatagggactactgctggagatgctctaacaccctgttcccccttgctgctgggtgaaaaccctttccagtctcctgtttatgcgatggtggcgtcctttccgacgtcgtcaccttcttcaaggcatcgtttttggagaaaccctgcaaccagtccccctgctttcccatccttctcccctattccatcccctcctcctccccttttcttctgtcaagggctcctatgcttggaaactctcatgtatctcttctctgtaatatattcaggtggggaaatgttggatttttattgattggaatactgtattgggtcatctcggtgacaccaaagctgtactttggtggagtagcaatctttgcccttattgaccggataggattttggttaaatttatctacgtttttgtttgcggttcatcttttttcctaccagtcttatacaagatggtacagtttagcaactgattgttacattgcaatatataaatcgaagtgatagaagccacctcaagtaaatctaactattgttcataattcaaaggtcaagaccaatttctcagttcctgcgactgcgcg

SEQ ID NO: 9992 - DNA, 911 bp, Oryza sativa
  Intron number 1 from transcript LOC_Os02g55590.1 (locus LO C_Os02g55590) derived from phytozome v7.0 (chr-ID Chr2; po s 34035989 to 34036899)
tgctcctcgcgagtttcacaaggcactcgtcccaggttctttcatttcccccctctgttacatgcaggaaaaatggttggtttttttatttgtttgattcagtaggattttgtggtgccctttaacctctctgaaagtctgaatcacataatggagtcgagttcttgatgtggaaatgctccccaatcccaaaatttttagtgggctgtgtggtcctcaggttattggtcatctgttccttgtctctttcttcacaatttttctttgagaaaacattgatgtgttaatgttctattttttgggggtctgggttttatgtttgctgagaaacctgtgcctgtctcagtttcttatcagcaaaaaaggggaattcctacatttggtgaaagttactgtcttgcgtttctctacgaatattgtttgttttaagtagatggtttagcatcttgtctaagcaattcatgacggaattatgtttttcaatccgctcgtatgacagtgcatcgatttttttttcactggttttctttagcaagacatatcaagcattcccctttttcagttgctgggtgccaacagtgctattcccaaattatttcagtatcacaagtgggatttgttttaaattgcctttccctgtcaagtatgtggtgcctctcgttatcccttgctccatccacaaatgatattttcagtaggttgctccttttgattcggtaggtacccgaatggtagttttgtccataattttgatttggttgccgacagttttctagttttgattagtgagtgtcaaatatcttctgtaattatctttatcttaaattgcaaatataactctactttctgttcgatgatcgtttttatcaatgtcaaataactgtaactgtaactgaaaaaagcagatagat

SEQ ID NO: 9993 - DNA, 908 bp, Oryza sativa
  Intron number 1 from transcript LOC_Os04g57930.1 (locus LO C_Os04g57930) derived from phytozome v7.0 (chr-ID Chr4; po s 34328833 to 34329740)
gcctcatcgcgcccgtcgtcgactgggccgccgaggtctgctacttccttcatcattctggtgttacatcttgtctgaatagcttagaattgagaattaataaaccaccatggactcaaaacgattgaatttttggtgtgctaaataattactagagatatcaattccatggagacatcagacatggactatagactaagactagacagcagtgacgatgccaatgttaccagctaccaaccgctgtctgtgggttttaggtgttcatctgagaacaacaaaaagctttcagatcagtctattaagtcttactattagagagtaaaaagatcagtctataacaagtatacttctgttgtgatgtacactcttcaagttaagtgcaaacgcatacctcctttatactacctacatcccaaaatataacatcttttggctacgaatctggacatgtgcatgtctaaattcatagtcataagtggttgctatgttttggaatggaggtagcagttcaaaaaatggcatataggctacaccatttcagggcaggtttggtgaattggtgggatgatttcagcaaattctaaaattggcagttgccaggacttgctatcatggccaattaatgggaggacttagtttgcaaattctaactttgatatcttgatgatggaaaagggtctaatgaatcaaccaatgtgcagatacattcatatataaagaattaagttctactcaagcgaaataacagtccaaaacaagcagtgcaaccttggtcagtcatgcaaaactgcacatggttggtcgtatgggagtttgttctctatgtttcaacagaaataggttctcaagttatgttagttggactttgcatctctaattgtttaattttggttgaaaataggaat

SEQ ID NO: 9994 - DNA, 829 bp, Oryza sativa
  Intron number 1 from transcript LOC_Os03g19340.1 (locus LO C_Os03g19340) derived from phytozome v7.0 (chr-ID Chr3; po s 10880614 to 10881442 reverse strand)
tcactccctttgggatacctaaagttagttgagaggtaactatttatccgttcattccaatgttggttctgaaagatcatcaggatgttgaggtctggaattcaaagtgaaaatttccagaccagttttgtgctattatattaattattgttaattaaggatttttatgacgcaagaaactagaggttcattctgctcggagcacataaaaataatattatgcctgtagtgaactggagatgcttctcagtttcttagagtaaaattgggaaacaattgaaaaatatctggtattgtatccatttgtcttctcctgtggagttcatacttcatcactcttccctggtgtgctagtctagattctagagctgatgaatcatactatttctgaaacgtcagattttttgtaatggtattacatatataacatttcacaatgggagtgaacagaaagaatactagtatgtttttcagtgtttgtgtaacttacctagagttgattaaactttatgttctcaaacctgtattctgcaaaggttgcattgtataacatagaaggtgaacatacaacgttttcgtatttttgggacaaatattgaactgatgaagctttatgtttcttaaactgctgctagtttgttaatgtgttaggatataatttgagcataacagatgaacaaacacatacaactgtcccttgccgtggcagaccagttattatctgctttattttctcaatgatcacatgacactgagcatttcacatacttttgtttatgctgctcattttgtagatacccccacattggtaaagaccacttggtaaagc

SEQ ID NO: 9995 - DNA, 1024 bp, Oryza sativa
  Intron number 1 from transcript LOC_Os06g24890.1 (locus LO C_Os06g24890) derived from phytozome v7.0 (chr-ID Chr6; po s 14597694 to 14598717 reverse strand)
aagaaaaataaggtacgcaaaataattcaaatcatcatgatcaaaggttcgcttgcctgaatcctcgtagttcaaatcgaaactagctggcactccccactaacccgactccgcccctagttcccttcctgcattctgtcaaacgcgtcaagatttaattaaactatacgaatataaatacaataatttacaattacaaatgtgcttacaaatttgtaacctttttattataccaaaactccaattgcgatgtgctagataatttatctaaagtatacttggactgcagattattgggtccctatgctcaagttggtgttctgtgtagcctactaatgtgtatctagcaattagtccacctttccttttctcctctgttctcacctgtactgtacagacctctccccttctctccccttttatgactcgtacaggtaaaagcatcagctagctaatccccttcttccttcctgcatttgctgctagcagtggctatcttctccctcaaatccccactctagtactgttgctgctgccaccatgttgctctcggcgccctcaatgcccaggctaccaacaagacctgccctcctaatcctcctccttgagctctccaacccacagctcaaagaagtggactcccatggctagaatggagtcacgcatggaactctaagcccagatgccctgaccagtgccccatagtgctcgacatcaccgtgcaaccatcccctaggtaagtgctcctattctttactcctccattttatctgctgatgctgctgctccttctttcctattaaaaactgaactaaggtgctagggaaaactacacactggtgatagattgttttaagtttaatttactagggaatgtggttgtggtaatatggggaaaatcacctgctccctttctgttggtgggtgatgttttcttgattgatcccccacaagtttgcagctaatgagcttcactcctccccctgcaggtccagttcttccccaaaccggcagtcctccttcc

SEQ ID NO: 9996 - DNA, 338 bp, Oryza sativa
  Intron number 1 from transcript LOC_Os06g34530.1 (locus LO C_Os06g34530) derived from phytozome v7.0 (chr-ID Chr6; po s 20087270 to 20087607 reverse strand)
aacaagttgatccaactgatcagttgccggtttaagtaagcttgttaactctgaactctgaagtagggatcagggatgatcgatgtatatgtgaaactaactacttccatctcatattataagtcattttgaattttttcttagcaaaattttttttaagttatcaaatttatagaaaaatttagcagcattttaatacaaaagaaatatattatcaaaatatatttaatgtttcatttaatgaaactaatttgatattgaaaacttcgtgtgttgacgtgcatcatgtattgggaatttcagtcggaaatatcacacaaagaagctggcaaagaaag

SEQ ID NO: 9997 - DNA, 1007 bp, Oryza sativa
  Intron number 2 from transcript LOC_Os04g39880.1 (locus LO C_Os04g39880) derived from phytozome v7.0 (chr-ID Chr4; po s 23566082 to 23567088 reverse strand)
aagcatctgggacaccttcacacatcagcacccaggcatgttaattgcatctctgcctgcaagctgtgctacgtacagatttgttttcttttcttttttaggataacaagtgcacattccctaattaaaaaaaattgcattccctaaaagataacaagtgcagacttgtgttaatcaactttaattatgtgcattctatatactccatccgttttttaatagatgacgccgttgactttttctcacatggaccattcgtcttattcaaaaattttatacaaatgtataagatataaatcacatttaaagtactataagtgataaaataactcataataaaataaattataattacgtaaatttttttaataagacaaatggtcaaatatgtgagaaaaaatcaacggtgtcatctattaaaaaacggagggagtatatctcaacaataatgaaatctgaccatatttagcaatcccagccagtagaagttgcatgcatacactacacatatggtaccatagcaatatctgaaaaacaaattacgcgcgattatgttctgagtatattttttcctgtttggtggattatctatgcaactagaccatcctatctttgcgaatggtccaatattttgctgtgagcaagatttttgctcttcctacgatagctcagcgggtatcttcaatcttgacctagtaatccaatcacgtcgcttttcaaaaaatcatcatcacaattcagacgattggtctaaacagtcaccatcttctcgaattgcttttcgtccaaatattatttcctgcgcgtggtttacaaaagaggccgttgatattcttgtcctacctgggatgtaatgtactgaatagtctaaagggaaatgtagaaatcaggggtaacttaagcacatgattgatgtgaaatgataagaaatcaatggacaaggacaacatttttggattgacgattatctgatttggcagagaaaatcgccgacagaagcaacgggg

SEQ ID NO: 9998 - DNA, 880 bp, Oryza sativa
  Intron number 2 from transcript LOC_Os04g36730.1 (locus LO C_Os04g36730) derived from phytozome v7.0 (chr-ID Chr4; po s 22004363 to 22005242)
agaggtggagaagttctacaagcagtgcgaccctggtgagtctcctccgttgcttctaatgttgatttttatctgtttagtacagcgagacggtatttgattgctctcgcggtgattccatgtagttgctagccatccaatatttttacagtattggttgatcagattagaggcgacattagtaaattgttgatgtaaagctccttatgccttgtccggaattaaaaaaaaaatctacctattagatcaattcacgtcatgagattgaaaagctggaagagatgcatgttaggtgacttataggatgcaacagaagtgcaggaagcaaattggacttgtgcttatgtttatgtttgacctcgctgcgatctatagaaaatgtagtggctggtgacaaggtgtggtgaaagagattgaggtctggagcattagtcaatagttggggattaggagctgcacaggatcctgtttgccttgaattgctgccctgggatttgtggcaaagtgcatatagtaatgttgtgctccttgtcagcatccactttttagtgcttgttggttctatttaattaatgcttagttggaaaaagaaaggaaccttcaaatcctactttgtgcattgtatgtgttagagcaagtccttgatcttgctgagtaagccagattgtccttttctatagtaaccatagggcttgggtgtggacccagggcccaggcttggattgggactgggactaaaagcccatgggcctcaatcaattttcaccatacttttattatgcgacaaaacagggcggggcggcagggatggttccacccctgatagtgctgatataaacatgttcctttattttgccagagaaggagaacttgtgcctct

SEQ ID NO: 9999 - DNA, 720 bp, Oryza sativa
  Intron number 1 from transcript LOC_Os08g14640.2 (locus LO C_Os08g14640) derived from phytozome v7.0 (chr-ID Chr8; po s 8804662 to 8805381 reverse strand)
caggccgccgaggaggtgcaggagtcggcggacttgtcagtgcttcttctcttccttccttccttttcttgtcctgtcatgtgtgttcatctggggttgaaccgagattggattttcatgttcgttcgtcgtagagagatttgattgatttttgtgtgtgtgtgtgtgtgtgtgtgttatttactttgggaagatttgattgatttcagcgcgtgactgctggtgtattcggtgatgcgtttcttcttgctcgtgtgttttggtgttatatgtgtttgttaggggattatgggtggttgtggctgcaaataagatgaggttttgatgaatgtttgttggtaaattttcttggatggagtctttcctggtttggttggtgaactactgttaacattgtgcagtactctgtcttctttgttgacgtcagtgtgcgatatcaatatattagagttatttaatggggattttatttctctacttatgagatgctatgaatttttggtgatttatccattctggttttgatttatctcttctatatttatatggtttggtggcgggtgtgttccccagtcaaattgttatatattgttcaactagacaatttgtgcttgatatattaccatatggagaatgattatttattagctgttaaggatgtggaggtttttcctagtttgccatgccaagttcttaactttggtgaattcttctttcagg

SEQ ID NO: 10000 - DNA, 534 bp, Oryza sativa
  Intron number 1 from transcript LOC_Os07g33370.1 (locus LO C_Os07g33370) derived from phytozome v7.0 (chr-ID Chr7; po s 19948899 to 19949432 reverse strand)
tgccaaatctgcaaagtgaggatcacttcgttaattcatctctaggattcatattctgcagcgtgttaacatggttgtagttaattttgaaattgtagtgttattaagaagctgaaatagatagaattatttcttgtgcccacttactctaaatcaacttttgatagctttgcagtttggtttacttttgtatcaactctagttaggataggtcattgtaggttgtagcatagatatgatgattatattatcctcttggatatgatgggtattattggtagcatggtgtatgttaggttgctgtgcattttattgtttttgagactgtttgtttgtgaatgatatttagtggtgaactcaacttcgttatctccatttttcttcggtacagcatctttcgctgtaattttgtacttttctaaaatgaacctagactagaaatactagagtaccttaaacacaaaccttttgactgacattgcacataccaccgtggatgctctaagtggtgattgtttttgcagaacattgata

SEQ ID NO: 10001 - DNA, 650 bp, Oryza sativa; identical to SEQ ID NO: 9745
  Intron number 1 from transcript LOC_Os03g57220.2 (locus LO C_Os03g57220) derived from phytozome v7.0 (chr-ID Chr3; po s 32621731 to 32622380)

SEQ ID NO: 10002 - DNA, 588 bp, Oryza sativa
  Intron number 3 from transcript LOC_Os03g22870.4 (locus LO C_Os03g22870) derived from phytozome v7.0 (chr-ID Chr3; po s 13218653 to 13219240)
tggtacactcatatcatccatgtttttatcttattgtatagacctctgaattttagggtacttatttgtctggtttagattgttgtgtctggaatctaacttttaacattatagaattgagcatccttatactctatcacagaactactactcaacaactttctctttgttttccttgtaaggttatgttccatcctttttaagtagttgaggccagaaaattcactcatccaaactcttgttagatagagtaatactcgatatgcataaaatgttgttgaggttctcgccttttctctctaattggtttgggagaaagtatgtttcttttccgattatgcatgaattagttctttcaggcattttctacttggcatctgtgttagccactaagtggtcctttttgttcgttagatgctgttatcttttgatgttatgctgccggatgtcattttgttaaggtggaggaacatatttgcttcaagtgcaagcatatagggtagattattcctctttcacagctttatctgatgcatgcccctgccttctgcagataaagtttcatattctatcccatcagaagctttc

SEQ ID NO: 10003 - DNA, 702 bp, Oryza sativa
  Intron number 3 from transcript LOC_Os07g46330.1 (locus LO C_Os07g46330) derived from phytozome v7.0 (chr-ID Chr7; po s 27630561 to 27631262)
gtcctcaaagttgtcgaagccattggtgagatgcccattctgcttgctgtttgatccaaagtggtttaagtataaatatgtcactacctaaactctttgagaattctgtcttgtaagagctactgaaaaaggtttattcagtcagctggcacaaagaaaggtagtatctgtcacaactcacaatgattcgaatttaactctatggtgccgttcttttctccaagaagagttagatgaagattaaaattttcatgtcacgcttttcaaactattaaacggtgtgttttgcgcgaaaactttttatatgaaagttactctaaaatatcatattaatctatttttcaagtttgtaataattaaaactcaatcaataccacctcgttattttaaaaaccttaatcttcatcgatcatgcttcgtgacgtctcaaccaatgaaagttcgttcgttataaaagcttttggtgaccaactgtaaccatcacaccttaaatttctgatattcctaggtggttggtagtagaatggtaagttactcatttgtttaaaaaaacaaaaagaatggtaggttactctctaggcttcataatatacgataaagtctttatcaactctagaggctgcaagcatgcaaggtgcagtaaattggtgtgtagaatgattgaaccttacattaactgctgtgttttactgctctctgcag

SEQ ID NO: 10004 - DNA, 830 bp, Oryza sativa
  Intron number 3 from transcript LOC_Os05g32720.1 (locus LO C_Os05g32720) derived from phytozome v7.0 (chr-ID Chr5; po s 19098864 to 19099693)
ctttcaatatctaaccttggaaaaggatcgaaaaggtataattctctgtgcttcatgtgtgtgtcctaatgcttgccgcaccaccatggatcgtgcctttgtttctttgaataattacctgtgtcgcgtataatgttaccgctagtctttacttctcattcacggtataatgcataccatcatatccttcgaacaagataatgacattgaaggtttcctttcctatctgtactttgaaaaattggcggtcagacattttggaattttgtgaatatgtttgaagtttttcaatatcggtgcactattagatactttcaataaatttagtacaaaaatatttatgcagtgataacctatgcttaacctaaaattgtaacaattaatggagactggtgtgactaataatccaaactggacctcttcgaaattgatgcatgttctaactttttcacataaatctgctctattaatacagaagtggcaaaccttctgccctttcttcaaaaagaaaaaaaagcttttcacataaatgaatgcaaaggctttgcctccaaataatttcccaattatcgatgattattctagcatttagtcatcatcacttttatcaaatcagtttttatgatgctctagcactagaatttgatcaggctcttgcggtatttttctaaccaacacaaatgcctactaattagttttttttcgttgtcaatttcactagtgagagtttagccgaatttatatcttgtgttcgatatcctgataggctgataatttctctaatgaatttatgttttttccctgtcaatagattttgggcacacatagtg

SEQ ID NO: 10005 - DNA, 715 bp, Oryza sativa
  Intron number 1 from transcript LOC_Os04g52614.1 (locus LO C_Os04g52614) derived from phytozome v7.0 (chr-ID Chr4; po s 31121767 to 31122481 reverse strand)
tcagcgggcggcgacgaggactgatccgactgaaggtgagccttgcttcggttctgatttgatttctgaatgaaatggaagttttttttttgttttcagaactacttgttcgtcctgatgaaattaggggctaggggtgtgaaattccgtggggaactggcttgacatttggccggaaaatgccttagaattctgtttttttttttttttttttgggggggggggggagtttttgctgttggaatgaataatttactggatgatcacccatctctgctttgctctgtacctctgttttgatttcggctgaaatttccccattcctgccttcttgaacttgaattgctgagactcacaaaatctgcatcattttacaagactcagagcatgatgatctgttctttgcgttctactgttccagtcaactctgcatgcttcacgatctaccatccatgcctatctgttccaagaagctatctgtcttcttcgaaaagttttcagttcacatgccgtcatctcgtactagtattttttttccaaaaaaaaatggcttttagcttttagcgcagtcacctattcctggccgtccgatcatctcggcctgggccatcggacggtcgagaagacatatgcccccatcacttactacttgggatgtggtggtgtatttgcatttgcagcggcggcgctgaacgcggtgttcgcgaagctaggg

SEQ ID NO: 10006 - DNA, 852 bp, Oryza sativa
  Intron number 5 from transcript LOC_Os03g11520.2 (locus LO C_Os03g11520) derived from phytozome v7.0 (chr-ID Chr3; po s 5967241 to 5968092)
agccactctacttgcatatatctgctgggtctcaggtaaatcttgttcatatcatcaaattgagcctccatgttatttcctgtcgtacctgggagctgttaattatttgaaatctgaattactaattttatctgaatttcttgcattgcaactattacataatcacataaactcatgtaaatggatgtttcgatgggctatccacattcattaactatctctgcaagtcttcattgaattgttttctctatgatggtggtgtcaatttatatgttcgtattttataagtaacagtgacaagtaccatgatttgataactaaattttgtatctgttactaccagattggctattacttctttagctccaagcctccaactaacatcaagtgttgggagttaggactgaattggtcctaggtttctgatttctgttcaactaggaagcttatatagtaatggagtatgcacctttgatgttataaatgttatagaacagtgattgcaacagtgtttttctttagaaaatcagatgctagttttctgaacctatgctgatgtttgatacagccaataattcagtatgcctgtctgtttggcacaacactctctagttgtgcaatggtgttctgctattctttcacagtgatatcatccatcattattgctgttgtaatttcaacaaaaaactacatggtccatgccatttatgttgcagcatgtttcagtgattgcttttagtatagtacaatacctgtagtacaaaagatcctttttatagcaagataatggtatgctaatattttcccccaactttagctaaaagatactgctgagcgtatcaaagcagttga

SEQ ID NO: 10007 - DNA, 562 bp, Oryza sativa
  Intron number 1 from transcript LOC_Os03g26080.1 (locus LO C_Os03g26080) derived from phytozome v7.0 (chr-ID Chr3; po s 14937716 to 14938277)
ccggttcgaggactcttgggccgaggtgatcccaggtagtgtcgatttcttcccagttcgtaatgctcaagtgatatagctggttgccttatagatgggggactgggaattcgatttaggtgagacgttagaatttgaatctggtgatgaatctgacatattccatggaaatgctaaggtgtcatgctgagacagccgcggttgtcaattcagtcgttgttgtgatggttgcacattggtgattcctgaaatgaatgattttctgaaaaatgtgtagtggatattaccgttgtttcttctctaggctgtatcgttgcgggttgaagtgtagtactcctgagaaatacggcctcaattcggtttatattctggtttagtgagaggcatcaagaaactgaatccggctattcgaaagggaaagcggtgtataaagtaatttgggtagtgaatcagtaaagggaaaatccattggatggtggatacagatggtttttcatcattagctgaaatattgtcagtatggatgctcattttttggctggttcatttcttataggctctg

SEQ ID NO: 10008 - DNA, 960 bp, Oryza sativa
  Intron number 2 from transcript LOC_Os07g12830.1 (locus LO C_Os07g12830) derived from phytozome v7.0 (chr-ID Chr7; po s 7347191 to 7348150)
aagagtcgtctgacttcaccttttgcaaggttttatttataacttgcctccctattgcttctatgttcagctacttgttatttctacaatcaatcagtcatatttttttttgacttatgtattactttcaattgtgtaataaatctgccgatcttctttgactgatttaatcacctgcttttaagcgcaatcttggttctggagatattttcttgtacaaagttctaccaccacaaattcttggaagaagcaatatgttagggatatattccactaacattatcttcatttttggcgctaatataaacaaataggtagtatctgactaacatgggatggtacaaacaagtgaaaaaaatagatatgaggaaaaggaaaaagggtaagatgtaacataagaaatcagggagactgaatggaagaggaaagaaagattcatctccgctgtatagaaatctcatatagtttgtccttgttgctgctgtaccaagaaatccaccttttgttgttgatatacatgagctttagaatttcctatttcataaaaaaaaagctatgctgatgtagtgagcttaagctaactaggtaagcacagggtacccacttgtgtatatagctccattttcatgaattatttgctactcccattttatctgcttttcttcatggtacttacattttaaatctggaatcatgagtacaagggacatatatctagattgtttgccatcttgaatctaccggatttattaaattttcatggatacttactgtccaaatggtctaaatttaaacttcctatgttgattatataatgaccatattcttttacaaacaattgaaacaaatcttcagtgacttgatatggtaacttgctgatgttattctacttatgtttttgttgtgtagatgtaacaaattctatattcaattttgttttctagatcgattttgagggag

SEQ ID NO: 10009 - DNA, 985 bp, Oryza sativa
  Intron number 1 from transcript LOC_Os03g43990.2 (locus LO C_Os03g43990) derived from phytozome v7.0 (chr-ID Chr3; po s 24701463 to 24702447 reverse strand)
tctttccaccttcataaggtaattatgcctttccctatgtttgctcataaaagtagtagtcagcactgctaatggtaggaatgatagcttaacagtgtcccatgaggaaatctgtaattatctcccccttttttgctccaaccgaagatttttttggagaactagcgtagtgctcacaccttataaacttataatggatagcaaataagtgcactatatcctaaataataactaaatgaatgattagcatcagatccaaaaataataatatattaacataggatcaattagtcacctacagatgcacatgggcagatagtgttggttaaaaaaaattgcaagtaatacatatagtaagtatgcatgtagaagcaaatttaaatacatatatgtcgacaatacaaggaaaacatatattttaactagtagaacacgcacacacacacgtaaaaatattggtagtagcttgcatgccttgcactcgtagaagaaaaatttaaatgcaaataatgtatgtgaagattacaagcaacacatatatgctttccactgatagtttgcttgcatgcactttaaatacatactccctccgtcccataatataagggattttgagtttttgcttgcaacgtttgaccactcgtcttattcaatttttttaaaaattattatttattttatttgtgacttactttattatctacagtactttaagcacaactttttgttttttatatttgcaaaaaaaatttgaataagacgagtggtcaaacattgtaatcaaaaactcaaaatcccttatattgtgggacggagggagtatatggcagtgtgcagaagatattttttaaaaaagtgcatctgttctcaacagccagttgcttgcattttttaacttgcatacatttgactttctctggctgttcttaacatgtacaattttcttgcagttccctttactttcaaaaagtgcctttcttgagcg

SEQ ID NO: 10010 - DNA, 605 bp, Oryza sativa
  Intron number 1 from transcript LOC_Os04g40760.1 (locus LO C_Os04g40760) derived from phytozome v7.0 (chr-ID Chr4; po s 24005167 to 24005771)
cgaaaaagtaagtcaatacaagcatagctaatactggtatcgaatctttgaagggaggtcacaacaattcgtatttatccttggttcttgtttctttttatcttttgcagatatggattcagccagagaccccgacacatttagctcctattttaaggaattttgacgtttatggatgtcaaccgcattcatccaaatagtggcatcatttggacactttttcttttggaagcggcacctctcttgaagattcttagtattatggtactattttcattattcattatcacgtaattgaaaatacaacttttcaaaaagaacattcaaataatttgtcaccaatatcttctcaaatgcttagtttaaaagggagaaaaatggtgtgtagatttggcatagaagtattatcatactaccataaacttatgctaacataaaatcaatagacaaagtttcaaaaaaaataatcttatgattgacatcaagtatttataattggagggagtgtatatattcactttggtccttctttttttatgttaaacactaaaatgtgctatctttatgtaggtaacggaccatcactgtgtgccccttgaggaaga

SEQ ID NO: 10011 - DNA, 532 bp, Oryza sativa
  Intron number 2 from transcript LOC_Os04g35570.3 (locus LO C_Os04g35570) derived from phytozome v7.0 (chr-ID Chr4; po s 21511553 to 21512084)
gcaggtgaagtgcaaaggtgagtgaagatcgctgtaaacagccatctgcccatactatttactgtatataactccaggattgtatagtatggttgtcatgtgatcttgtttaaagctgcttatcagcaaccaaaacataatttatgggtaaagcttttatagttattatgtccttagtgatttaaaagtcaatgctaaaaaataaggcatgatgagaaaaaaaaatcccaaaatctacttcaaaattaaattttaaaattcaaatttagaagccgcagggcaagtgatgggatgcagctgctggcaacttttataaatgatgtttttgtttttctatattaccagaaggatgatctgggaattcgaagggttgtgcatatttttttttggatgaatattgaatagtggcaaattcttacattattctgttgtgttgcgatttctgagttttgggtgactgctgtttgcactgatcttctcatgactttttgttttagttgggggcgcaaccaaaacggacagcttggtcttg

SEQ ID NO: 10012 - DNA, 1037 bp, Oryza sativa
  Intron number 1 from transcript LOC_Os06g16280.1 (locus LO C_Os06g16280) derived from phytozome v7.0 (chr-ID Chr6; po s 9278862 to 9279898 reverse strand)
cgaggagtcgctccgccaggcctccctgctccccggttcgccacctctccctccactcccctctccgtgtgtgtctgggcgtttgattatcgggctgaagatgaattttgtttcgagttgtttcggccatctccttctcttgaactgtgtgcgcctaatgggcgccggttgcgtggttgacgccactattgctccaaaaattctgttagcagattgacatgaagggagctgagctcaattttaactgagaccgttgtagatgtttgcagtccttaattgctttagaggatgtcaaaatgttgtttctttgtggcaacgtgaaggaatacatccgcctttctttttaaacctgaaatgatcagtggtgttcttgttgctctgttgtcctggataggcttcactctctttagtgaaagaactatagagaactactgttttccttgctggataaacagaaaacagttttttagcataaacattgtaaacttgttggcttgctgtacatgttaaaagattcatgcaacttatttgcactaaacatcaatctcattgtagcctttaactatttagtacccaatgccagattttttttttgctggcccggcgaatatgccagctgaacttttactaagaaggaagagatagtttacaacaggttaccatacacacgccagccagggtaaaggagcccctggcgcccactactgctacaggggccgagttacagggacagaaacgtcgatactcacaatgaacttagcaactctgccgacttccatgaacttagccaccattcttcttcgatggctgcgcacaagcacacgaagtgattgatgctattttagttttggcgaaattggttctagagcattgaaagttcacgtttttgtttctatagtaccaaaagttaccggttcactttaatagtaccgtaagttttcgccgtttccgtttttagcacttccgtcaattttgtgctgttctgctgttcactttgaccaggattgattctgcaaactgcgccaattgaactcctt

SEQ ID NO: 10013 - DNA, 861 bp, Oryza sativa
  Intron number 1 from transcript LOC_Os03g33650.1 (locus LO C_Os03g33650) derived from phytozome v7.0 (chr-ID Chr3; po s 19243284 to 19244144)
tgccattaccgccgcgctgctgccgctcccgcggggtaaggaaggcgctcctttttcttggttacttcccgccgcattgcgctgcggccacccatttaacacctcacaaagcagcgtgcaaacacaataactactagtactagttcatctctcctactagcatctactccatggtccatgctacactagctgctgttgcttttgttggattcttgatccatttacccttgccttgtagctcattttttattctcttcttccgattatgtctttatagggtgtgtttagttgctgaaaaaagttggaagtttaaagaaagtttggagtttggaaaaaaagttggaactaaacacgcccatatatatcaagaagtggttaatgtatagtagcaaacagttattataatggtaatagaaggatgatttgcaacagtattttgtgatcaatgcttcagtgccagcaagttttcttaggaagctgtggttttatggattcctgctgagattattatgtttcatcttgtgccgtcgctatcatactgtacttgcctgaggcagccaatgttgtgtgattattgatgataccttttcttttgaaagttagtaccccttcccctctcaaggaagggtctgaccatcttttaggaaggcactccctttttttaaccaatgatgtaccactatcttggtgtttgtgcatgccatagaaaatattattctacttattgatttattattgaatgatatttccctctaaccctgtcttttgatttataattttctctagatttaatcatcggtaaaactgtttaaatttcttcttcttctggctccttacatgaaggtattgatttgctaacag

SEQ ID NO: 10014 - DNA, 770 bp, Oryza sativa
  Intron number 3 from transcript LOC_Os04g27860.1 (locus LO C_Os04g27860) derived from phytozome v7.0 (chr-ID Chr4; po s 16286425 to 16287194)
tcaagtgccagggctgcttcaacatgtacgagcttcttcttgatccgctcactctctctccattgttaatttttctgttgttatgttacttgttaccgccctttgatgcttgatgtgtgaagattgagataaactgtttttaattttagttatgattaaggatggtttgtagagtaggtttagatatgaattagaactggtttgcagagtagtcttagatatgaaattgattctagcaagtgaaaccatcgctcttttattgttggtatgcattgttaatgcgttgtgttgtaagtaagtcggatagcctagataagaaatggaaattagcgtggtgatgatactgctcttgttatcgcttcaacagtcaagtgcttttggcatgttttggccccaaaacgaccagtccccgtgaacccctgataatctggacttaaatcagatgtacatgaaaaaaaaaatcacaccataggtcgcccaatcgttgaggtgatcatgaattcatcattcgcacttgtaatattgtacataattttgtagaatggcaaatctgaaatgtccaattctgctttgtgatgtatccggcttgtttgtataattgtattgatgatcaaccaattcaaagaaaccagaaattggtgccatctctaagcaatataatttgcctaactttgctttagacatcttgatctaatgttggcatcttctaacctgtatgtcttgcggtgattgcagaacgactgtattcagccactcccagaccgtggttg

SEQ ID NO: 10015 - DNA, 721 bp, Oryza sativa
  Intron number 1 from transcript LOC_Os05g11170.1 (locus LO C_Os05g11170) derived from phytozome v7.0 (chr-ID Chr5; po s 6305588 to 6306308)
cctcgcgtggtaagtctgggcctttaacacatacaacctacattcacacatacattgcttataataattctcgaacaaactgtgaaaaatgatacactattttgtcacgttattttttgcctgcaaaatagtctgcagcccaggaagaagagatctaaacattagtagagagaaaaaaaaaaacttttagatggtgagtgattgatggatagcccaggagtgatcggtcgactaaccttctctactagtcttttagttaccttttctcagctgagtcagctgggatagtatggctaagcccaaatatgtccttatgtcgagttgatcgattgatcaatataagtttatcagtattaaaagtgtaaatatgtttgggataattaagataccacacgtacaaaagagcacatccgtaccatgcaatgtcactgatcgggcagagtacgaagaaaatggtccatttgatcagtgcttgtcagcttacgatggatggtgcatgcatttgaatatgggtgacacttggctgttgatcttgtgattggaccattgttatcctgcacttttagtactatttagtttttttttcttctcacttaccttattgtattttctgtggaattcagatataaatatgttctcaaatattttatagaagtacttgacatggcatattttaattttgaaaggtaaattctgtcaatttcaaaaagttgagcggtgg

SEQ ID NO: 10016 - DNA, 717 bp, Oryza sativa
  Intron number 1 from transcript LOC_Os05g11990.1 (locus LO C_Os05g11990) derived from phytozome v7.0 (chr-ID Chr5; po s 6859270 to 6859986)
cgcgcgcaccagcgcctcgcgtcgctgcaaataaggtgatcactgtaccgtgaaagttgctttcatgttgcgtgctggcaattcttcgtgttgcattgtcggtggaaacagtttatctcctgtgccaacgcataactgcctaaatcgattagttctaatcgaagttgaatcgcttaatattatatttttattgggtaatcaaagttaactgatcaatatggggagggaaattgtaatctaatctcacatttagtgtgtgaggacatttcttctgagtaatatatttcccccttcccaaaaaaaaaaaaaaactgatcaatatggatattgtgctgctgaaatttggttgtacttggtggcacgatttcgtggagtggagatctctgcttcttatagcttaatttggaacatttcgcatcggaatgattgaatgtttcgtggaatgtagtttcggattgcaaagaatgagaagaaagggaaatttaccttttatagtagtgactataaaagctaacctggtgacatacccgttgctattgtatttgctgatgcctatcactccatttttgtttttccagtgatagtgggtgttgggggtgggcaggatgtcatggtcattctattgctttagtccctacatttgtgatatttgcttcttatccatgtgcatttttggatattgtcttactaaatatttcaggcttgggcgcactgctg

SEQ ID NO: 10017 - DNA, 1041 bp, Oryza sativa
  Intron number 2 from transcript LOC_Os03g63930.2 (locus LO C_Os03g63930) derived from phytozome v7.0 (chr-ID Chr3; po s 36113519 to 36114559 reverse strand)
cggtcccaagtcgcttccaggccttgtcttgttcggtatgtatgtaatatcactgtcatgttctttgctacctccaccattggaatttgcactctactgtacagtcatgcctaacttctaagctcaatgcaagtgcgtgatgcctccaacagagttggaatgcacatttctgccatgtggataatcaactgaactgcaattactttctgatgctaaatgtagttttgatttccactccagatgttaatatacatgttagttcagtcaaccaatgaaattattgcttcactgcaatctttcttcttctcttatacgttcaccaacaaagtagtttgccgaaaccaccataagaaattctcacacacaccatacaatgccaagaactttcactatgttttgatgtatcatgccatcacctactgcatcttacattccttttacttggtgcaaggggataaagaaaattattggtgatggtaatatagtgttcctcattagttttcctacactgctgccctggtacattactgactatgatgccaatgttttatgttgtatgagtttttttttttagaaaaagaactatgttaccggttaaagatttacagtgacagcatagcaaacaatttatggcaggaggaatggttttgaaaaaaaattcacaatcagttttaagaactagaaagatgcattcgacagtgaaattatcctagcttgcaagagaactgcccactcacgatggctatagaatcggttactcctgatgaattttccaaactgcttggctgcttgcagattttcagtgtgttaccctgctaccttgattgcttagtcctgttcatatttacttaaagcatgcagtatttccactttattgagcctaattttggtcccatgctgtaattgctgtgggtagcagtttatattattacaatatgttcatgaaaatttatgcaggatattttcaaagactctgcttgatgatttattttacattattgaacaggccaaacaagacactattgataaggtttgcgaaat

SEQ ID NO: 10018 - DNA, 908 bp, Oryza sativa
  Intron number 2 from transcript LOC_Os08g06420.1 (locus LO C_Os08g06420) derived from phytozome v7.0 (chr-ID Chr8; po s 3598124 to 3599031 reverse strand)
gagcatctactggcaaggtaacttatttatcatgtgtgaactgtgttaaatcatgccatgtacatgctacagctgagttgatattcaagtttggccagtgattgcttattatactagctgtaaaatttactagtagcgttcctggactaatgcaggcataattaggattttagcagcctaattagaaagttgccgtaataaatctgaaaggatctatacatgctagatacctcgacaactgtggttcagtttcacttttcaagaatatgctgcatgtatctctaccagaagagagtttggcccatacctgactggtccatttcaggcatagcatggccagtgcatcttaaactgcttctccatgatagcaatcatcactatgtttttaacttattgttatatccttatagcttttgtttttagccatgcttgctgtcgaaatatgtcagcccattagatatttgggcgctatatttttataatatatgtcgtgcactggatatcaccacatacatgttctctatttaagtggagttgtttactgttatttaattgtttgattcattcttgaagtttcaaaaaagtgaatgccatcctatcttgattattttcggtcatcaatgctgagaaacctgctttcagtacagggagaattcccaccttagtaatgttaggcatggtgtgtttgaatctcttttttgcctataggatattaatggctgcttggatggtatatgtccatttgagctaaatcagatgtcacgtaaacttttaaatactgccccttattggcgtttgtactgaattactactatcaagtgtttctgatttattcctgaagaaacacacttttgaggcgccaatcttatgcttgttatttgaagtgcagccaagtgaagagaatacat

SEQ ID NO: 10019 - DNA, 700 bp, Oryza sativa
  Intron number 1 from transcript LOC_Os06g49380.6 (locus LO C_Os06g49380) derived from phytozome v7.0 (chr-ID Chr6; po s 29922708 to 29923407 reverse strand)
ctccacacgatcgccgccgctgcgccggccacgatgtacgtgaggctactcttcttgtgtgcctgcacccccagagcgcaaatcgctttgaagcgtatgttccttaagctctctgcatctacactacagttacttccatttggttgcttgcaggtttctgttcatgcctactttgatcactgatacagcacaggctgttgcttatcagatctgttcttcctctgtgccacatcccacatgcaggcaaattgctctatcccggtagtttactgaatgaacagtggcgaatctggcattatgcacctttgcaatcgcaacagatttaagtaaatccattggctgtaccgcctgtacctttactattgcgttctaattatggttttgggggctgattagacgtttagtttttttcttatcttccaaatggcacggaatggcatcagattcaagaagagcaggacgactttggtttttttaaatccatttttgagaacaccatttggtaaagttcgaacagagggttcagaaaacaaacaatacttctgccgtggtttggtagtccttcacttcactgtctgctcgctattcaccattcccttctctactactcctggactgctttgttctctcgcagtccacagctcttccatccctcccactctcctcagcttagctagcggagtagagaccagacagatca

SEQ ID NO: 10020 - DNA, 930 bp, Oryza sativa
  Intron number 2 from transcript LOC_Os06g43880.1 (locus LO C_Os06g43880) derived from phytozome v7.0 (chr-ID Chr6; po s 26436952 to 26437881 reverse strand)
ggctcggtttggaacgaggaaactgtcctggggaggtatacagagattcgtgttttcgttctatatttagtatgttttttcaataaaaatcaacattccaggcatccgggttgggttgttcgtagatcaaatccagctagcctagatgcaccacaaatagaagaagatgggggataaagcataaaaccttaaaacatttgaactgcatgcgcatgataattgcaggatcaaacatgtattcaagtttttcactatgaagaaaaagattgtacatttgggttcctagttctccggaagagtttcaggatcttgcgatccttttaattgtatagggcggatctagcatgaaggcggtagagtctcgagcctccactacttacgtgaggaccatgggagcccctgcgaagcccccactaaaattattgggtttgttggaaccatgacaccctatatttgcaaaatttgagatatgccacccgtatctcaatgacatgtaagacccacatgagtcaatgacatgtgggtcagggtggcatatcacaaattttgtaaaatttgtgtggcatggttcaaattgtcccaaaatttgcaaatatagggcattactgattaatatgtcctcaatttttcagccactaagttttagaagaattcgaaggtgcatatttctgaaatgaagtttatcctaattaacaaattcatagttgtgtccttttcagtaactgtattttttttcctcttcttttaggagaaataaaataccttgttgataaaatggatgaataatttagagatgttagtgtgcactttcccccatgaaacataagttgttaaaatataattttgtccaaagtgactaatgtactaaacacttgtcctcaattacacattacaggtaaattgtcggtggaaaattctgctctacaccag

SEQ ID NO: 10021 - DNA, 717 bp, Oryza sativa
  Intron number 1 from transcript LOC_Os08g16010.1 (locus LO C_Os08g16010) derived from phytozome v7.0 (chr-ID Chr8; po s 9756843 to 9757559)
tctacgagtacgccaccgactcctacggggccgaggtgattgatttgatttgatcccctttcctgcgcgatcatctgctaggtggggaatgtgatggccgacacgaccacgaatttgtgctaaaacttttcaaccttcaatcccctgcgtaacattgggtgtggattagtttgtgattgtctgattgacgaaatgcatgtttgcaatcgttcagactttctttgagttttagtttgctaattaactaaattccgtagcaaggaatttcttgcctgttgcgaataagttctaaatttgaggttcccagtgatgaatttattaggtaatggagccacttttcttatctggtaggccattcaaaacttatcttttgcaaagatgcaaatgtagcgatgattgttacaaatatatttctaaatacaaatataaatttagttttctgtgtgctgaaattatccttctggtcaagtcttaaacagttagcataaaggacttcttttagttgcaaaatgatgccacattgtacgaatcataatgttttctttaacctttttaataaatcttcattctatatcgactatactcccagtgcatgcctatctttttctgttttacctgggtctgcctgcgaaccatcaaaacggttaaataataattttagttttacttatttaaagttctattaggatctcagaaaatctctggcggaccgggagt

SEQ ID NO: 10022 - DNA, 348 bp, Oryza sativa
  Intron number 2 from transcript LOC_Os03g03660.1 (locus LO C_Os03g03660) derived from phytozome v7.0 (chr-ID Chr3; po s 1625683 to 1626030)
aatagattttggtctatccgtgttcttcaaaccaggtatatgtcgcattttaatgcacttgtagtggtttatttttatttttagagagtaacatatcaacacataacgtgtatatgtctgctttgctgtatattctgtggatattatttgcatgccaccagaatcaagaccatcctaactatattctgttgtttatccatcttattcatcttccttaatagttcttgcaatttacatgtgtgaagtgttgtggatttacaaaatagtttttgacttctatctttacttaaatttggtgttttaaaatttgcaggtcaggttttcactgagctggttgggagtccatat

SEQ ID NO: 10023 - DNA, 661 bp, Oryza sativa
  Intron number 2 from transcript LOC_Os03g19560.3 (locus LO C_Os03g19560) derived from phytozome v7.0 (chr-ID Chr3; po s 10994830 to 10995490 reverse strand)
aagcggcacaaggtgaaaacccgtatatttggcaggtttgcaccggatcacttctcagcctccatttggtaaattgactggaaaaaactgtacagcaccaaaaaaaaaagtagcgcgtgaggtttcttctttaacattccctaagatatgttaatattccttagctgtgtttggagttcaactttcaaagttctccaaatggatgaccatgcccattagcaattcacaatgaagagttattttaggcatttgagcttcagttgcatacattgctttcctctcaaatatggatgcaagatgaatagatctagtccattgcactttgttcacaggaacatcaatgtgattgatggctgatcatgagatatgaatacactgctcctatcatggccatttgccctcttcttttcaagtacttaactcatatgtcaaacataatctcttggattttctgaataagtctaaagacttttggtttgatacaccgggctgggatcatctttcacgatccacaatttcacactgaacaaaccagtccactgttttcttatgatcatatcttgttcatgttatagaaattaagcatataattaagttcctgttgtccttttgctttgagtatgcagtgttgggcagtcctagaacgcaaaggtgggaatat

SEQ ID NO: 10024 - DNA, 983 bp, Oryza sativa
  Intron number 1 from transcript LOC_Os06g08510.1 (locus LO C_Os06g08510) derived from phytozome v7.0 (chr-ID Chr6; po s 4200662 to 4201644 reverse strand)
gtctgcttgtcggattcaccgattgtagcccgcaggtagttagctagatcttgcctcattgtgaatttgtcaatttgtgcatgtaagtttaatttgtggtgccggttgtatgtagtctgtagaatcgattctagtgtggtaatactcggtagtttaatgaatagcttggctacttcagcgctgaatctagtgagaataagttgagaaacaaatccgtgcggtaaattgttggaaaaatgtttagccacatgattgagtgcgatgtcttcttcagagttatgtgagcatggtgtaatgaagatttacttgggtggctatgagaaagcttagagttgagtagcagaaagcttagagttgagtagcattgcattcttctatttatgattaagatccatatttgtaccaaagtacttatgttttttttgtttagtttttttggcaaattttgaacttcataattggttttagtcaattctaccaatgtaccgtgttgattattgattgtttgcttagtaccctacagtactattttacaagggaaataacattcaattttgataagggggtctattgatgcacagggaaattactactgtgatgtttctagaggtgcaaatattttacttacaagttacaaccatgctaatagagatgagcttatggttgtcagatgtggtaacctaatcttttgaataatatagtgtttagcttcatgaaatttctttttgcagctgttgattttgaattccataaagctttctttttatttcttgtattggagcatcgtctgtgaaattattagatcgctttcaatgaatttttatttcgtttaattttgttgcaaaccattgatagttttatacatttagccatgtcataagtcagcattgggtgcactccaattcttgatctgccactcactttctcagatagtgtttggagcttagttctgattaacatttatgcacataggcattttcagg

SEQ ID NO: 10025 - DNA, 743 bp, Oryza sativa
  Intron number 2 from transcript LOC_Os08g07830.2 (locus LO C_Os08g07830) derived from phytozome v7.0 (chr-ID Chr8; po s 4386583 to 4387325 reverse strand)
atcgccgtccgcttgcccatcatcgagacgcaaaagttcgtcatgttcttcttcacatcattccattgcagtagaattcactagtttatgtgatggtcatagtatggactgttatctgcataatctcatctagataaggccgattttccgacgacatatggcagagtttatggctgcacgaagatattcacttgcacatttctggttcagaaactcaaaagatgttgattaactgcataatgttagttcaccgctaaaacagattatggatgcttttgttattatttcctagctcattcatttggtatgatgatgcatatttggtacagactactcctaagcatcactttgtttacatccaatttcctaatacaagagagagaattttgattattacaccctctgcatgctggtatatggtagttgtctatctctgcacttgttttggtctgaattccctggatagcactaagtacttcttttaataggcattattgatttttttctagtttttttttttaaaaatcaaattcgttcttaaactgtccttctgaacgattgtgtaagacacatcagttacggcttttaggtaacaaaactgttgcaatatttcatcaattggtgggctcaaatgtagtagtgatatcattaatatgtgcatgctacaagatgaatggggctgacttgtgtttcttttcactcctccagggagtgccctatagatctcaaagaagctatatcca

SEQ ID NO: 10026 - DNA, 465 bp, Oryza sativa
  Intron number 1 from transcript LOC_Os08g26340.1 (locus LO C_Os08g26340) derived from phytozome v7.0 (chr-ID Chr8; po s 16059263 to 16059727)
tgttttcccgccattttccaaccgaacagacggtaagttaagtttgaatcgtggacagcttccacatgtacgtgttatttgacataattttttttgtaataagcaaatatcctggagatttctcatttctcatggcacctagaactaaattagctcatgtaatcaatgaagaaaggactacgaacttgcatgtatatttcgcatcagtttctactgaaattagatcgagctcaaatctcatctagggggaaacagaaaaaggaacccggacacaactccagctgtttagtgcggatggttttgacaaaatttcattcaaattaattaatggtcaaaacttgtcgcggttatgttcaagcaaacatcctggacatttcgccttccatccacagaatactctgaacaaacaaaataactaaatctgaattctaaattattaatgcagtgttaggttattgcagctaa

SEQ ID NO: 10027 - DNA, 709 bp, Oryza sativa
  Intron number 1 from transcript LOC_Os05g48590.1 (locus LO C_Os05g48590) derived from phytozome v7.0 (chr-ID Chr5; po s 27786577 to 27787285 reverse strand)
ggggaagctgctgctggagctccgcgagctgccaagtaagcatgcgtgctcctgtttggttttgagttggtttgatttagagctctctgggctaatttatagcttgttaaatataggaatatttgatttgctggtttgatggcgcttcattagttctagatgttaaaataggagcagtagtgaccaattaaattgatactagttctcatggttattttctctggaatgtagaaatgatcaaatacatagtaatagtatattttgctgtgctaattgttagtcaacagttataaagtttgaatcttgagacacacgtgcgctttatgttcatcattggagggggtacttgctaaactgaacacggaagaaaaagattcctggtaaaaccgccacctgactggaaaaagctcgagctttgttgaaaaattgtcacataaccaggtgttgtgaccaaatggtgctgcctctcttgattttccacctgcactggtactgttgctcaggtgatataactaaactgcttaggagttaggatagagatatgtaataaactacttgtaaccaggtcttgaagggttcaagggacctgagttcaattttttcatgaagttggtggttagttgaagatcatatgtcactagatatatgttttgttctgaaacatttagtctgatagtatgtgtttatgcgctagggcacaagttgttgg

SEQ ID NO: 10028 - DNA, 743 bp, Oryza sativa
  Intron number 1 from transcript LOC_Os06g28170.1 (locus LO C_Os06g28170) derived from phytozome v7.0 (chr-ID Chr6; po s 16004197 to 16004939 reverse strand)
aggatagagccgtgaagcacgctgcgcttgttgaggtgagccacactctattctttgtcacaaaccctaaccctttatcccatatttttggttgctgtccatttatttctgcatgtgtggttgtcgtcttgtatgattgggattgatgtagggaccatggtacttccaaatctttcagtttttgtccttttcataaatccgacaggagctttgtgttctgtgacccactatatttttcccccacttgatctgaatcatggtaatgcttttcatacaattaagggttaggattaaaggtaagagggagaatgcatgcttacaatttagagctgtcctttggtgtgtgggaattcatttacccaacccactagccaaacagggcaatagtgtaagaacatactcagtgttagtaaatgcctccctctcatcagaaatgtatcctttattacaataattgcttaccagatgtgagatctgaatactagtacatctagaatttgaaatcaaatcagggtacttacacatgttcccaacaagctagtagtgagacgcaaaactatagcaaaaaatgattacagatgatcccattgttgatgctatagaggctcttccattcgcttagttatcatgtgaaagaaaattcatcattataaccactttagttattcaattttatgtcctaaatgctaaaccaaatttgcattgcagccgccagcgacaaagcaatccgtctttacacgctg

SEQ ID NO: 10029 - DNA, 723 bp, Oryza sativa
  Intron number 1 from transcript LOC_Os04g29020.1 (locus LO C_Os04g29020) derived from phytozome v7.0 (chr-ID Chr4; po s 17019012 to 17019734)
gttactacctcggtcagaccgacgacttccaggcggtcagaccagcgtatcgctttcgatcagaccgcgatccgtcaaatttgagggtaacttttaattccgctaaaagttttggtttttgggtacaccaaccattcaccccctctggttggcttagttcttgaatttcgatcctacatccttttcttctcttattaagtcatatctcctcaattatttttagctattagatgattaatctatgatccaaactatctcccgccttttcttctctcagaaagccacatcaatttacttttatgttttgcgaaaaaaactcacttttatgtttgaatcatcattctatatactatttaaatttaaattatcgtaaacctcaattagaaaccacatcaacttacgtaagtttatattgtgtagctatcttacactttacttttacttagtgctatcatactaaactcccgcaacaacacgcacggggtttaacctagttacaggaaatttcactgccatttcattgaagaccatcattgtccactgttcatctcttttctcttatttaaaataatattagtcatttagttatgggtcaattggatctatgcaattataacttttatggttatgatatatgacattactattcacctatttgaagctataccaattttgttattatttgattcataggagtagtatactagttacccatcctgtcgc

SEQ ID NO: 10030 - DNA, 988 bp, Oryza sativa
  Intron number 1 from transcript LOC_Os03g07360.1 (locus LO C_Os03g07360) derived from phytozome v7.0 (chr-ID Chr3; po s 3738160 to 3739147)
ttgataaggttggtgtgttttctggcgatcctttttgtgttttgtagtatcgttttgagggcttgagaattcaagcgatgtagtactatgttgtgatctggtgatgtggcgatcggaattagcggtcagttcgggataattcgattggtttgttttgcttggataatggggagtgatttgattgattgattaattttggccatttctttggtttgaacatgataatggtgatcaaccgggagtccatatattggtcgtgacttataaggttgtatattaaattgttaattggtaattaaaacggtataatcttgagtgtacatacatgccttataagtctgaggttggtgtgtttctttgactttcttattatttttcttttcatttttggggatatcaatgtgagtaggcgtgtttagtttccattagcgaaagaatccttcaaaagtatcttgtttttgcttcgtttccatgctttccttagatagtatcagttaataatacaggaattagctatctgaaagatggaaccttcttgatgagtttctagactgtgcagactgtttcaattaggccttttcctcggccttccatgttttttttttcttttttggatgaaagcagagctgcttcttttcttagcctacagtactacaaaagtttagaggcatatgtaactagatttaaccaacacaaattgcacaactttattttcatttcctaagctagagatcagaacatgtggccttacaagctatcagttacataatcatatcctccagtgttttactagatcaactgaacaaactgaaacaatgaacaaactctgtcacagatcttcctggtacaataacctgaacacaaaactgtccatgtgggcttatagtttccaactgaacaaaattgcaaatttaacacccaaaaactcatcaagtttcttcacatgcttgcaggaccttcaacacagtggcagcagcacgactgaacc

SEQ ID NO: 10031 - DNA, 784 bp, Oryza sativa
  Intron number 1 from transcript LOC_Os06g10640.1 (locus LO C_Os06g10640) derived from phytozome v7.0 (chr-ID Chr6; po s 5539887 to 5540670)
gctgccgtgttcgtcgagacagggagagagagagagtgagagagaggggaagaggggagaaagaaattatatatttatatggcaggtgggccccactatgttttaaaaaataaaaatgctgactggactgccacgcgtacgccacgtatatcaaaaccacctcggattgagtcgaggggggtaatttgtccggtttgtatagttgggggtgaagaatgtccggttttgtggtttagaagggtaattcggacgaccatgatagttcgaggggttattcgtactttttcctaaatataaacgggagtacctatacatctttcgaaagatttttatgattgtatcacacatatttttaatctttggattaaaatccgatagatataataaaaagcaaaaagcaattaagaaacaccataatggacactaaattaccatatcctcaagaaaaagaccaaatccaatacaaaatttaaaatttacatgcgaagattcaaaaattacagtgtaacttacaaaagttacagtgtaagtttcataaattacactgtaatttacaagaaaatgcactgtaaatttgagtgagaaaatcgagtgagagataagaaaaaatctttcgagtgagatatagcaaaatcgaatataaacacctacaccaattcaacaactaaaacttacatgcatagtctttttttaaaagaaaaaaatctgaccagttaaacgaagctcactttgccttgtatgttttttcatcgtctctatgaattcctgtattgttttccagtga

SEQ ID NO: 10032 - DNA, 628 bp, Oryza sativa
  Intron number 4 from transcript LOC_Os07g14830.1 (locus LO C_Os07g14830) derived from phytozome v7.0 (chr-ID Chr7; po s 8477576 to 8478203)
cactgtgtacagacattaactgaagctaataactggtaactagccttggtatccctgtggcctttttttcatcccatgtttcatagagctggtactaggttgtggtataatctgtttgacttatttagcatgtaacatgcatcactgtataatgttaccaaatcatcaaatttcagctggcatgatgctctttattataattaaaataatgtaacttctgctccatggccattagttatttgactttccctactttcctttctccattagacattagttatttgatattttgtgctgtttctactttgctacagcaatattttggcttctatgtcacaataatgtgtttgtgttatcttacaatagacaattagggatcttcttcaactttcctcgataataactaataagatcactttgctgccatcctgctttgtaattagttaaacatacgtttttttttctccttttcaatgttcacttcaattgttgatgaactcatttttctctgtttggcatgttaatacttatatgttcttcctactttcagtgctcgactaattgttgtatcttttccttgtctaattgatctcgttctttttaattccagtggtcactcgtcaacagt

SEQ ID NO: 10033 - DNA, 840 bp, Oryza sativa
  Intron number 2 from transcript LOC_Os02g57070.1 (locus LO C_Os02g57070) derived from phytozome v7.0 (chr-ID Chr2; po s 34936998 to 34937837 reverse strand)
ctgtgccgcagccgggaagcgtcgtcattgcgcgtgtaagatctatctctgagcaaaccgttggtttgactcgtgtgacctgtgaaattgttagcttattgttgtataccctgttgattttgtgtggatgtgacgatgcgtgtagccatcaaatgccatgatttttgaaaccgagccagcaaatagctagtcaaatgccatgattgcaataatgtggattctggcatccttgtggcataggtggtatgcggttcacttgattttttcaaaacccagcacgctgcatgtcacagccatcctttgtgtaagtgtaccaacacccagatggaccacacaccttgtggtgatgtatatatttggggtcacagtgtaggtttcataatgtcatttcagtgtaggtttcataatgtcatcttgaacttgagacgccatattgacttcaaattgtgttacaggtttgtgatgtccagcttatcctcaagatgtattgagcactttccttcattttataagttgagctagacaacatctagtattgtttcatggattggtcataacattctgcttgtaacatctctttattgaccttttctacaaactaaatgcgtgagagatcttacagaagcacgcttcaagcacctccacttttttcttgttgagttgaggatctatgatgatgttagtgtcacattttccctatcattgttttcttggcgtatacactgttttggttagtggcactggtcaattgtctgctgtttagggattatctgagatacttttgcatgtaactgctcataattttgcatgtgctggctgacattgcaggtgacgaaggtt

SEQ ID NO: 10034 - DNA, 910 bp, Oryza sativa
  Intron number 2 from transcript LOC_Os04g02820.1 (locus LO C_Os04g02820) derived from phytozome v7.0 (chr-ID Chr4; po s 1090616 to 1091525)
tcgaccgtatgtgctacaagatttgatctattaagactaacgatgttttacagtagtacttcttagttctagcagttagtgttgtatttcgcttttcctattgtatcttgtttgcatttgtcctctaatgatgtatattttcatccgtgcatccataattccacctgttaccttctatatgtattgatttctgttaccttctatatgtatgactgatgcttacttttatatagtaccaattgtttacttgttcattttaacatgcctataattgtattagtcaattatttacttgttcatttgaacatgtgtaattgtattagatttgacatgaaatctcaaaatttacactgctttacttgtgtgcttgacatcgatgcctccatgcatgtcctattaatacaaatttgtttgaggttatctatgcttactaagccttaggattttttttggccaaatctctagtttctgtttttgtattgcaaatagtcaattatctttcaagttgtgatgctatttgtgtttttgttgtatataggctaatatgttcaatgctcatgctctaagcgtcattcatttcttatgctgagtatttgtttaattctaatgttttttgctttaatggcatgcctaatatgtgaaattttgttgattctaacaaggttttactgcttggtctgattcataattgtaacatgactatctttggactatttctaaatttctaaatattatgctgctgaagtgtgaattcatatgctatatactcctttaattggctatgcaagcatttcaactcttctgtaaatttgctgctgaccattccattttctgttagaaatacactatgctaatatgttatgtgttccttgcaggcaagtccacgcttacagattcccttgtggcagct

SEQ ID NO: 10035 - DNA, 284 bp, Oryza sativa
  Intron number 2 from transcript LOC_Os08g35640.1 (locus LO C_Os08g35640) derived from phytozome v7.0 (chr-ID Chr8; po s 22466046 to 22466329 reverse strand)
cgcaaccgcgacgttgtccaccctacactacctaggtatatttgcttttgctagctttttttctatgtgtcttttgattcagcaagtttagtttttgtgcactatatgtctgtagattatgtgtgtacaatatgcaaacatgttgtgaggttatatgtgttatgtgtaggattggtttttctcatttttcttcttgatttgacaatgttttgggaaacaaagttttgccgtttgtgcatatatttgtgctcttgattattatgtttgcagctctcggcgtctga

SEQ ID NO: 10036 - DNA, 1030 bp, Oryza sativa
  Intron number 1 from transcript LOC_Os03g04690.2 (locus LO C_Os03g04690) derived from phytozome v7.0 (chr-ID Chr3; po s 2225676 to 2226705 reverse strand)
gcggcggcatcggaggtcagtttctttgctcgcctagtttactcgacgaatctgtgcccgtgcctgcaatctgatgcttagttgcttacatcaatgattcaattgcttgttgatcggatcggtagtgatgactaatctaattattccccacaaaataaagatgactgatctaatttagtcacggatatattgttcaggtttaggaatttgggcaaacttattcctttctgtatatcaagtagtgaactttttaaagatttgcctggctggctagcttatgcatgtgaaacattcgatggtggatttgtctgtatgtatgcgttggtgagatcttgctagggttctttgtttagttgtccttagaattgattgatagggatggtggggatgccttttggttgtttgtttggttgattctgattgttttggcaaaattgtgcacattagtgccctctcaggtgctgattgtctagttagattataagctttacatggtccagcactggtagtggaaggtttgatttatgtggagtatcttgcccttgttaaagtagaactctggtggagatagtggcatgatcttgttcctttgtttggttagtttctgaattggcagacaaagataatcagctgtttccgttgtgacttgtgaggttctcctgtactggttagctcaatttaggggtgcgcattactgaaacctctctttattacttgtctgaaaaaaactctctttattgtttagtttcatgcattttgcttgggaactatatgccactatggcagcagattagtgcaacttctgttcttcctagttgtttatgccatctgtctagttgtatattcaggctttcagaaaagttggtgtccactgccttttccctttctttctggatttactggagatatgcatctatgattgcccccatgattagacgtggcatccctagtttgatcaatcgatttgcctcttctccttgtgtttatcagggcagcagacagcaaagactgtagccattgttctcggtgg

SEQ ID NO: 10037 - DNA, 676 bp, Oryza sativa
  Intron number 1 from transcript LOC_Os05g03574.2 (locus LO C_Os05g03574) derived from phytozome v7.0 (chr-ID Chr5; po s 1515710 to 1516385)
gctccaaactccaaggcgcaaaggttggtgcgtgcggtgcgacgatctccccccctcgccttcgccctctccccgattccggccattttttccggtgttgttacctccctcgattcgcggcggattcgtccaagttcgaaacgcactgttcgtctctgggtttcgctttggctgttggtttgatccgttggctccatctcgatctcgtgctgtgtttttctttttcgtcgtctaaatccgtaataatattccgtggatcttcgtctccgcccaactgccgtaacagcaacatcacgaacggcttgtaagactctctgtggttttgatgattcaagcggtttgatttgacgggacaatcttggaaaaaacgatggagcaggagtgtggatgttgcaaactatggttaaaggccacgtattttggctctatatgttggtctagctggtactaggtgactactacttcctccatttcacaatataagtcattctagtatttcccgtattcatattgatgttaatgaatttagataaatatatatatctagattcgttaacatcgaatatggaaaatgctagaataacttacattgtgaaacggagagagtactgtttagtgaggaaaacacaccagtctaatcttcaattcttcatttaggaacaaaaactcttgaagg

SEQ ID NO: 10038 - DNA, 658 bp, Oryza sativa
  Intron number 2 from transcript LOC_Os07g40460.3 (locus LO C_Os07g40460) derived from phytozome v7.0 (chr-ID Chr7; po s 24243591 to 24244248)
aatcttggctctgaggtgtacgcccaggcagaagtgtaaaccctcgtcctccctttacatcttcagttctggataagactcaacgagttttgatataacttcactgatgaattgagtcaccatgtgttaacaatatacactgacgcggtatatcggaacagctggatactacattattcaagttaaattttctggaagtgcacatgcagttgatagaccattggcaatgggataatgtggtgtttctacatgactgtgtcgtttccatctaaatagtggaaatagggtgacaatcctggttggaaaaatagtattagcatatggaacatagtataacaaacttattgatttttatttttactggttattctgataaaaaaaatattcttggttattgacacactacataacaagtagacttggagtttgttcatgttgatatttcaaggtctttagcctagctctggagagtttggatagttacagaaaatcagtatgaagtgcagaaaaacttacccttctgtaacatgagtgatatatccgtgatatatcctctttattgttcttgatctttccagatttacctttggttccttactgtgtacctgtggtgacttctgcaggccagatacaagacacatttttgtggatattggtc

SEQ ID NO: 10039 - DNA, 919 bp, Oryza sativa
  Intron number 1 from transcript LOC_Os06g45350.1 (locus LO C_Os06g45350) derived from phytozome v7.0 (chr-ID Chr6; po s 27412411 to 27413329)
ggaggcaggaggatctgcttgttaaggaaggttagctgtggtgattttgattattttttttactgcttaatttcctcatctctttgctgcatgtgtggcacaattagtgcttgtctgtatcttctctttctttcttgctttagtctaagtgctccattagtcctggaaaaatcatggcttttttttccaggcatgctcacagctttgaagctctaacatgtcattttctaagagggcaacaagagattaaaaaaaagagagatgtcagctgctggattctggtcttctttgtaacttttaaatatgctattaggttgggcaggcttccattccctatcatcatatagaagatgggtagattgtcaagttcttccaatttttctcaccaaaccaaaatctttgaaatcgacatttatgttgatttaagcaccctcttgatgatctttcgcaaattgcaagcaaatcacagagatgcacaggttattttcagacttagttgtgtgtctgtctgtgtgtgatagatagaaagaaagcatcaattttggaagggtgcagagggtggtgcgcatgtcaattcttggtgcaaatctctgaattatagaaatgcctcagatactgtcgactggcagcatgtggttttcatgggaaacgagacaaacacaagcctctccccccttatcatccactgtcaagggatctgagagcctgtgtttgtgtgtgtgatgatgatgtgtttcttgccttgacttgctttgcactttgtttgtcttgatgtttgtagtagtaggtagttaatttgtcttcttgataaaattcagttttgtagcataacaaacctatgataatagcccatgctatgtctacatctcctttgctgtgttcagggccaggggagcaccaagaaaacaccatcagagat

SEQ ID NO: 10040 - DNA, 810 bp, Oryza sativa
  Intron number 1 from transcript LOC_Os07g31840.1 (locus LO C_Os07g31840) derived from phytozome v7.0 (chr-ID Chr7; po s 18918474 to 18919283 reverse strand)
atcaaccgctgttcttgcggcggatcctagcaaaggtgagctttcttgcttgattcttgtttgccttttttagctttgaaaagctcagtttcctgggtcttcctgctgaaatgtttgctaaatgcagcccaaaccagcgaccgtttttagtctgtggaatgaaacaatttcgtctacagaatgagaaattcctggctattttaccccttctttccttccctttttggatcttgaaatgcgaatcgtgtcttgggaggatgtaagcggcgaggtgggttcccccagtttgagtttttgggtccaatgctgcatttcttgagtcttggccaaaattaggcgctgttgtttggtttcaatcaagcaaatttgtgggaatatccttctatttttaagcatttcttgtattttgggggcactgcattgttcacggaaaaaaaagattgattttgaccccttctgagatactactacttatgatatttctgttcccttatcgagttcatccattttggagttcatccattttgggagtactactcccaaggagtccagttttctttgcgagttcgcatgtgctatttgatagtttccattttgctaggacaaatcttgctcaagctatgactgaataggaagtaggaactactcccatttctgtatatttgtactttcacggtttaatgaactcagataatatttgctgtagttgcttgattgattgttcttgtctagcatgacatagctgtgtgccgtaattcaagtatcttgttttcagagccattcaccatccgcataagctgtgggagtttt

SEQ ID NO: 10041 - DNA, 769 bp, Oryza sativa
  Intron number 1 from transcript LOC_Os07g04990.1 (locus LO C_Os07g04990) derived from phytozome v7.0 (chr-ID Chr7; po s 2193071 to 2193839)
ggacaccacctactggaacgactccgagtgggacggtacgcactgcctcattaatcaatccatcgaattgttcaagcttgttttgtttgtgctggaaaagattagttcttgttgctaattgttgcagtcaaatttagctccaggtgattctcagttgtttaggtgttacctgtagtaggtctggttctaagcagctcaaagcagcaggggcagaaagtgtgtgatcaggtcatgcttcccatgcgcacaaggtgcttgttgcattgcctccccgggtgacttgcacttgcacgcatgtcacttcaatcctctccggtgtgaaatattttgtcatgtgatttcgacaaccaaaaagtcccttttgttgagacatatcgtctacaaaccaacggtcatccgattgttcttgttccggactacaaccatcaggcaggtcactggttttggtttggtgtttccctttcaagagggcccggtgtaaatctcttcctgattagttaattagcaacttaacatgtccctatcattggttagttaattatcaactctgtccttttcctgcccctcttccccctctttctgggagagtttttcttttgtaaggtttccacttcaggtgtatgttatggtctttgtatttgtgatacaatcgttgctgctgttttgggaagaaaagtcttccaaaaacagaacaaagaaatgataagaaaacgtgcttcctttgatttcatcagacaggagactgcaggaggctaaagcagcatttgac

SEQ ID NO: 10042 - DNA, 548 bp, Oryza sativa
  Intron number 1 from transcript LOC_Os08g16780.1 (locus LO C_Os08g16780) derived from phytozome v7.0 (chr-ID Chr8; po s 10257174 to 10257721)
actttacgcccaagcccttcgacgaggacaccgtaatggctgctcgcagactcccttccgtaattgtgctgtaggggtggcaaatttgctaagttgttacttgttagtagtagtaaggaattgagctaatttaaccagttccaacctattgacccttttcctcttcacatgtacatgtccttgtagccaataattcagattatttggcctggcctgcacaaactgttctgctcatttttttttgtttaaagtgttctctatgctttttttgtttggttaatggaaaataaaaacttctctagtaaagttgtgttttgcatatagaaaattgactgattaaattaacatatataaaacgttaatagctccactacataagggcttttttccatgtttcaatctgataaaaaattgaacaggaaaatattttgtttttccttctggttgaattgagatacactgcaagtttgttggagtcttttggcagatgctatttttatcatatttattgacactaaactttatcatataattcacagctttacgta

SEQ ID NO: 10043 - DNA, 696 bp, Oryza sativa
  Intron number 2 from transcript LOC_Os05g49380.1 (locus LO C_Os05g49380) derived from phytozome v7.0 (chr-ID Chr5; po s 28254676 to 28255371 reverse strand)
tcatccgtggcgcgtcagatctcaggtttgttaaaatgacatgctgctgtcgcccacttagagctgaattcgaatcatacttcacaattctgatagatttttttgggtgcatgaagatttgtataggagtgtaaattgctctagacttctagaacttgaaatggatggagtaatgcaaatagatgttggttagctgcagtaatgtggttacagtgacaactgacaacggttcagtgaactgtaaacacttcctactagtgactcattattcaatggcttcctttttcttagtttaatatgttcaaaggtgctatgatatagattagtcatagttgctgacaggattgtgtgtttgaagctttaaaacgattatattttgcatatcattttcattatgtacttaaatgctacacttgagtatttggtgcacaataattcattcccgagcccaacaataacttgcgttttggtttcttctaagccgcatatactagtatgctgtgtacactgttctgctaatgctacatggtgccaacttattgacaatgcattattgcatatagagctaaaacatccatccatctaagatactgttttgatgaattcttatgacataataacctccaacggtatcatggcgaagtgaagttaccacgctagttttatgcagggtcacacttgctgatcagacagtgt

SEQ ID NO: 10044 - DNA, 751 bp, Oryza sativa
  Intron number 4 from transcript LOC_Os07g44330.3 (locus LO C_Os07g44330) derived from phytozome v7.0 (chr-ID Chr7; po s 26481358 to 26482108 reverse strand)
taactatcaaggtattcatctattacatcaccaaacatctgttattaatagcatcctagctccctgggtatgagcagtcattaaatgagttgtacctttacaagtttttagactcaaatgactgtaatggaagttccactggcaccaatttatcatacgattttaacattcttggcataaatagcaaatatgaataactctgacttatatagttatatcgaattagttgagttggatggtgactggcagaaggatcaggtaagaattagcgctggctgctgaacaggacatgtctcaactttaaaccaatctggcagtaagaaagatgctatattttatctttgaagtggatgcaaattgaatggtatatttgtttctagtaatattgacgaacagaaaatttaattagctgaagaacattatttgatatactgttattatgtgatgcaagtcaagctgcctttctgtacagctgccatgttatttgtggggcatatcattactatcattactagaaactggtcagtgtcaagaatgataggtgctactgtctttttacgtggcagatgctttccgtcgttagaagttacatcttgctcaatcttttggtgcaatatataatgtattctagttggaataaatttgagaaatattccatgtgaggaaacatcagggagttggaattttcataaaataagggaagtgatatttaagtgtttcaacatcaatgttatgctgatgcaggttagtg

SEQ ID NO: 10045 - DNA, 606 bp, Oryza sativa
  Intron number 2 from transcript LOC_Os07g30940.1 (locus LO C_Os07g30940) derived from phytozome v7.0 (chr-ID Chr7; po s 18321250 to 18321855)
gggaccattttactgttgaggtgaggaactcggttgtcagtattggttcatcttgcttgaaatccactttccccaacaaactactgttgactggatgtatttgggattttaaatcatatagcactactaaacttcaactggaaatatggtactttgtatggtggcttttctttgtggatgagtatatgatctgctctccaaaatattattacttcttttcagacaatcattcctgttatatccatagatggatggtttaaattctctagaactggttgttctccttattttcatataaactggttgttcccaactaagggtcaatttgtggtgggtttgaatcaaaattaagcaaaataaaagcacaaatgtgcgcctagatcaaaataatcaaacatcagaagttacagatttaacgtaaaagcttgaccatatgagaactaggcacgggttttgtgaccagcactgccatggaaatgaattccagcttccttacattttacaatgggaacatatcacttttttttatgaaaccataagatgatgttgtagagatactgaaatgatgtttctactgttccttattcttcaaacaggggatctggg

SEQ ID NO: 10046 - DNA, 390 bp, Oryza sativa
  Intron number 3 from transcript LOC_Os04g59590.2 (locus LO C_Os04g59590) derived from phytozome v7.0 (chr-ID Chr4; po s 35251128 to 35251517)
gcgcattgcactacattgatttcattcaggaggtaatgttcctcagttttttgtgtgtgtcaacaggcgttattgttgtgcaatacaaccattcgttacaacatttctaacaagttgacaaattataaccgtaaaccttttacattgttagaacgaatattacaaattgctaatgattgttgagtaggtgcctcaaccaaattcctttggaatcaaactacatatcagcaacgttgcttctagttaagcagaatgtagctcttttcttctttcctgcaaaaataataatccaatagatttcgttattcaaatgtggtggttacataagtacgatcgagcttgttcaactaacatgtctgattcttctatgcaggcaaagaaggatatagc

SEQ ID NO: 10047 - DNA, 1046 bp, Oryza sativa
  Intron number 1 from transcript LOC_Os06g07770.1 (locus LO C_Os06g07770) derived from phytozome v7.0 (chr-ID Chr6; po s 3762302 to 3763347)
ggaggaggaggaggggggtttcaccactgcccttggtatggcgcccagtaatagtagccctaggcgccatctaatcctagttctttcttgattcagcgcgttgttggatgcatcctgtttatagtttactagtttatgcttcgtaggtgatatcgatgctttgcttcaattagatgcttcttgacttcttgtggtggagaaaagtggctagcaactcactatgttttagtatcggttttggttagtgctgcatccaggcaaatatatgtgggcaacacaatgcaccaccacattgggttgtggaatcacgggtgtctgcccctagggggatcaaaattgatggagattgcgcggattctataattagttggtgtccactttacgatttcttcgtttgtgatgcatccatgcaagtatatggtggcttgtggaaattttatcatagatcatacaggtcgcattaatgtgtttagttggatcatgcagcgaatttggagacttagggtctgacagtagcctgtacccgtagaagaggctggacaccaggatctagggaggttttggttccattttgatgatttttctgtaattaatatgaggtgaatagtttccatcttaattactggataaattgtaacacatcgttcttcatttttgtatttttccttttcagtttgtatgcctgctttcagctttcttgcaacatctaattttggagactgagaagcactagtatagtagtagctgtacctgattaatgtttgttgtataatttctgaggtacttcttagaaccttctatgctttttattttgttaatttggccactgttggcttccggtcccgatcattgttgatttgttttaaattgccaagtctaaatgtgagtgatttgctcgtcgttactgccatattttttggacaatagcaactgtaagtgttctttgaatataccaggtctccattagtgatgctttgcattgcctcaatatcttctctttcatttttaaaggaatctgcaaccggacaatctgaacagatttaaca

SEQ ID NO: 10048 - DNA, 678 bp, Oryza sativa
  Intron number 1 from transcript LOC_Os07g07860.1 (locus LO C_Os07g07860) derived from phytozome v7.0 (chr-ID Chr7; po s 3947299 to 3947976 reverse strand)
cggcgtcaagaccccgcctcccagcgagtgcagcagtgagtctctctctctctctctaagatggttgccggagtttggtcaaattcaaactgctttaaatttgtaaaaaaacatagtaacattttcaatctaagacaaatttattgtgaaaatatatttaattattgatttgatgaaactaatttagtactccctctatcccataatataagacgtgcacacattacaatattcaaatttaaaaacgtttgaccaataattattataataaaaattaaaatttattgtttaaattatatcattggattgacaattaaatttactttaagatggttataaatttgttgcaataaacctttataatatatgaggaattttaaatcaaagattagttttgaagactgtgtcaagtttaaccatgcgttatattataggattgagagagtattataaatgttattatatttgtctataaacttagctaaatttaaaataatttaattttgatcaaagtcaaaacgtcttttataactgaaggagtattactatcttcttccatttctctggcgagcctccgccgccgtgggccgtagagtgggtgactgaccgtcgacggacgactacgttgtgttgtgttttgcagaagtcggtgctccgattccgtctccggcgccgggg

SEQ ID NO: 10049 - DNA, 743 bp, Oryza sativa
  Intron number 5 from transcript LOC_Os07g46820.3 (locus LO C_Os07g46820) derived from phytozome v7.0 (chr-ID Chr7; po s 27983956 to 27984698 reverse strand)
tattggattacaaggtgatctttcatctgaattattttatcaattgcaactgctcaaacgaatacagaaccaccaaaattctgacatagaaatgatgggaactggagatataggaatgcttgggctccctcaatttcaaaatatagggtgtattttgttttcgttaggacaaggctttgactaacatactctattataatataacaaaataaaatacaccctatattttgaaatgtagggagtacatttctggtactgaaatccctgcattatagataactcatagaattaagacatgaggagctagcttcaaacatatttcctttgttctcaacttctcatttattattatctgaactatgctagctatcgaatcacattttttttttatagataaactaagccagggcttggatagtatcccattagagtatgatagtatatgagcagacaaaagattcacctcatggtgcaaaagtgtgcctttagaaaatcgtcagattaatattgagctggatgcatatgaagatctctagctacatttcatttatctagtgttcaagtcaatactagaaattcaacaaactagagctatatgttccttttaaaaaaaatatgtactctacaaaacaagctttacccctccccgctatttctgtagcaatcatcctctttctaatactatcaattatacatggtcactatcagactgaaggaacaacggatccagaattgaaagatct

SEQ ID NO: 10050 - DNA, 476 bp, Oryza sativa
  Intron number 1 from transcript LOC_Os04g23890.3 (locus LO C_Os04g23890) derived from phytozome v7.0 (chr-ID Chr4; po s 13644818 to 13645293 reverse strand)
aatcgatcgatcactcgctcgctgcctgaagagaggttgctgattaatttgtctctctctcgtcttacttccctttttatgtggcttctcgttgagttggaagaagtggtagaccagtagcccagataaggaagtggatagggtaatggaacagtgaagagagagagagagagagagagagagaggggtgttttgattggtgtaccattcttctgtcaggttgctgttctttacatttctgaacttgaacagtgaaaaaaatggatgggttttttttatagtactccctagataagcaaaagaatccttctgtttaggtatctttgcctttctcgtggtgtcctagatttgttggagcaagggttggttgcatggttttgtgatgattaatttgttcctttttgggtggatgtgagtgtaatgtatgaattttctgattattattatttttttggtgttgtttgcagcaagaatcg

SEQ ID NO: 10051 - DNA, 715 bp, Oryza sativa
  Intron number 3 from transcript LOC_Os04g47520.3 (locus LO C_Os04g47520) derived from phytozome v7.0 (chr-ID Chr4; po s 27998538 to 27999252 reverse strand)
caacgagcggcggcctgaaccagcagcgaacaggggtaagatcatactgtacgaagttacgaactggtaatcgagaaatgttcagtttttgattggctgaacaacgcgacaagtaaaatcatcttgttatttcagtggaaacgtaaaacgtctgaatttttatgttgcttggggagcattttagtggcagaattgtgaccttatgtatagcagtgtgagactcgggaacttgtagtgatgctgatactgttgtagctagctccaaatccgtttcttcagttgcacgcgtccagcaagtactaatcagtaattcaccccaactgctctttgatatgatcggctggcagttggttacactcccaacaacttgttgatacgctgcgtgactgcatccgtgtgtctcttgtcttttcttagtatactcttaaacttcttttgaatgccctgcgtgacttaagttgtttcatattttactatttactgctccgagtttccatggttaattagtgctagactgcattcggagaaattaatttggctgtgttcgagtgcttatgttggtccttagtaaatagagaaatgaagttggaagaaattcgcctgttggtgcatcatgttttttttttccacaataattgcctttttttgggtcaaatattcttcaacccataaatgactctcaaagaatgctacttatgtggttttcagatcatag

SEQ ID NO: 10052 - DNA, 673 bp, Oryza sativa
  Intron number 2 from transcript LOC_Os04g09430.1 (locus LO C_Os04g09430) derived from phytozome v7.0 (chr-ID Chr4; po s 5037273 to 5037945 reverse strand)
agatcaaggcagaaacgctggtaataagctctattaatttttttttcaaacttggactatatagatatgtcctcggaagaaaaatagtatgcttgaagtacttatgttttggtccaaatttctaatgctagaagtgatcgattatattttagaaataattagtgaggcctttggttcgttataggtaaagatatactatggtgggtttcattcattttgaagttaaaattaaccgttacgatgatttgatagtgaacgtgcaaaatatctatggtttctttttgaaaaatagctatgaaaatgtttgaaaagaattgtaagtctagtataatgcatatctattatctcattctaaactcaacccacgcatcaagaaacaaaagggacagatcaaaactatatatgaacattaacattgtagtgttcatctctggatttcttctgttttctatatatttgtccagtctagatttgactgttgtgacctcagtagatgtcagtacatacttaatattgttgtcaattttccaaaagttctcatgaaaattttgattgtataaagagttaaaggcatattagaggttgccccttgaaggatgaaaatccaacactgttttaatttgatcttatggccgcaggaaataatccttgctaccgtggacaacccatcaaa

SEQ ID NO: 10053 - DNA, 530 bp, Oryza sativa
  Intron number 1 from transcript LOC_Os02g57010.1 (locus LO C_Os02g57010) derived from phytozome v7.0 (chr-ID Chr2; po s 34917195 to 34917724)
gtggaggtatcgtacaccgtcaccgtcttctgcttgattaaatgcttaagtgaacttatatgcagtagacacatgcttgcttgtgcttaattcgttcctcagttggtgaacgaaaaaaaatggtgtttatttatttgtttgtttttgtttttgttaccgacatgaactcaatagtaattcccaatgttggggttcagagaaattgaaattttgttgcagcaacaagccaacaatccaactcaatgctaattaacaaacacaagcaccgttctatgtctgttcctagcgtaagagtaagatacatacccgagcacctgacacgtaagtaaatgatcatggctcatcagactaattgcttatttttgagacatgcaccagaacctacatcggcagattaaattttatctcttttattttcacgaacatgcaaaagctttgcatatcaatatattagacaaattaaactttatctcaacatctgcaatttgacttcaggtgttgtacgatcgggcgacagggaggagccgagg

SEQ ID NO: 10054 - DNA, 867 bp, Oryza sativa
  Intron number 2 from transcript LOC_Os06g45940.1 (locus LO C_Os06g45940) derived from phytozome v7.0 (chr-ID Chr6; po s 27819363 to 27820229)
gtggtggcgcgccgcccagggggaggaattcttgggtaatcaattaagctttggttcttggtttggttctttggtctttcagttttgtgtttgatttggttggtttggtgcattttgtttgcaagtaattttgcagtgttactgcggattctgggatgagttactttgggtgcgggcgctatctcaagttcctcagggttaaattttgtagattttctgcattttgttctgaaaaaaactgaactttttcgaagtctatggcgctacaatttcgcttgaatctacttctgtctgactaggtgtttctgtgtatgcatgagacagagaatgctctgaagctaaggttgtagcggcgcacttcttttcagttctgaatttaggtggtaaagttggttgttttcagttaattaattttgcatcagtccagctcattagttgcagtcttgcagagtgatatgttatgctttctgaatctgataaggggaatccatgagttcaggaatcaatagattccatagacgagatggtatcacgaaatctttgtaatgcactgtaattttcctctttggtaaacgggtccattttcttacatatacacgatttttaaacgtagccatcaggtcacttttgatggtcagattggacatttcctttcaacttagtactagttactactacttcagagtttgagattttttctgtttactttgaatactatcttgttgcctatttcaagttactctttctagatcatcaattttggccagcagtaaaattcaaagtagtcaagtcgatactactgattagtaattacgtcatcaaatggtcacggacacgaaagcatgacacggtctgtgtttgctaggg

SEQ ID NO: 10055 - DNA, 437 bp, Oryza sativa
  Intron number 8 from transcript LOC_Os04g15820.1 (locus LO C_Os04g15820) derived from phytozome v7.0 (chr-ID Chr4; po s 8587026 to 8587462)
tacccaaacctattcaggaaccgtgatactgaaaggtaacatgtttgttcctaaaatttctggatatatacattaaaatagacatcatgtttatttagaacaaagagagttatgcctcctatgatgctgcccaaaagaaatcatgttgacaaaccatgaaatggccatagatcactacttatgctaaatgatgcattttcagattggttggaggcttggagctgtttatttcccttaatttcagccttcctgataaaaatgcatgctgcctactgtgcagtgccaaagctttgattcgagacactgttgtaggtagcaaattacgtgatgcattgcattaaattttttttgactgatgaaacctggactcactgaattgaaggaaaaacacatagctctattgtgcttatattcttctctgttggagcaggtcttct

SEQ ID NO: 10056 - DNA, 777 bp, Oryza sativa
  Intron number 9 from transcript LOC_Os04g15820.1 (locus LO C_Os04g15820) derived from phytozome v7.0 (chr-ID Chr4; po s 8587523 to 8588299)
gagttagaacaagacataaaggtaatgatcaagttaatcagcgttttccttgcattttcaatatacacaacttcattccgtgtaattatattcacgttttaagattggttttctcatttactcctaatcattgaactttttgtggttttgtgctgcacattttctgttttttgcaatccacgaagctgttacatgttcaaaacaaaattatagatggtcctgtacaaatatgaatgcttggaattagtgaatatagtactgtgaaaattatgccacccagctaaatttagtgccaattgcaatttcttttgcatgtataatctatttgattgatttattcggtatatgaattgtgttctaggagcctatataaatgtgtggtgtcaaatatgaatttcatactgttcaacatgtactatgatagtccaaactttagctgttcattaatgattttattacaaatgcaggccggtttaacagaccactctgtttttcttaacatttcaatgtatgggcagtatttgctatgaattgagcacttgtgttggttgcttgcaatgcatttgtagtttcctgccaaccaatgcatattgtcatcctcagtaactgccatgctgctacacactggataagcaactgaaaatcaatatttttcttttcttatatttaagatcaatctgatatttcttcacataagggctactggccgtagataacaaatttcgcacaggaaatattccaatattatgtcaattgctattttgcaggcaagcatct

SEQ ID NO: 10057 - DNA, 739 bp, Oryza sativa
  Intron number 1 from transcript LOC_Os08g28960.3 (locus LO C_Os08g28960) derived from phytozome v7.0 (chr-ID Chr8; po s 17718149 to 17718887)
atatgtaagcactccccctcatctctctctctctctctcatgttcttactttttttcccatgagaaattgattatagagtcttcaattgatgatgatttatcaagattggaaaccatcatccatgctatacttgttaatgatctaattaattcatcataccggaagtcagatccaatctgacattttctagctccaagtaacagatagatctgtttggtagagctccaaattttacatggagctggagttgtggatctgaaaaaaggtagctccaccttttctacctctttttttggagcagatccacgcacttcacttttaaaaaaccgaggatctattagtgtttggttcggctctggctataatggacaaggatctagccctaccacaggcccagatcgcccaaaaagcattgttcttggcaaaattttgttggttggattcaaaccttttatattttgattgtactcaaatataaaaggtaaattgtttcatatttagaaaatgacccaagttaatgattcgtcgccaaaataaaatgaactaaggttgcatgtcgataattcaatactaaattttgtggccagctccttgcatgggtctaagcttaatggactagtgttttagtgctgcacatagtctatatattatgtctttcaaattttttgggctagcttattaaattaggtgttaaaactcttagggaagaggaagaacaggggaagaactggagaagtc

SEQ ID NO: 10058 - DNA, 773 bp, Oryza sativa
  Intron number 1 from transcript LOC_Os02g55950.2 (locus LO C_Os02g55950) derived from phytozome v7.0 (chr-ID Chr2; po s 34237018 to 34237790)
tgacgcctcgccgctcctcgacgccgcgtgccgtggtatgcttcaagctctaggctaagctatatgggattgttctgtggcgtgctgggatcatacatgtagatttcggtatgtttggatgctggagtgggctacttcacgcattgtgctcccagtgcgatttgcattattccaagctgtgaaattgaaccttaaggagcagaaaaacaatgaattattccaagtctcttctgagtcagaatgccggcccagctgttcaagccttctatacgctctattgcaacaccattttggtatatcgcttgtggagctcacatacatgatgatttttgggtatattgcagattagtcgaggtcctagcgtcttctataattttttgatatattttaaaaaggtttattaaactagcccgaagagttccgatgagaggtatattggcatcaatggcattacaaactgcatacctggaaaaggtcattgtattaaagatgatagtggttctctaattgtttttcattgcatatggtttcttaggcatgcattgctgcacacagttttttttccttgtccaaagccaatatataaagtttatactttatagttgcttgttacaaactgtgcagtgctgataatgcaagatgtcgctgttggaacatggatgtaaatgtatctaaggttgtcatgtttttaggaggacatatagctaatgtaggttttttttttcactttgacttttctccttctaactctttcatgcttgtagatctccagg

SEQ ID NO: 10059 - DNA, 712 bp, Oryza sativa
  Intron number 2 from transcript LOC_Os02g55950.2 (locus LO C_Os02g55950) derived from phytozome v7.0 (chr-ID Chr2; po s 34237838 to 34238549)
tctgcattggaggtaagcgccacattatttctcttgttattttgattttgtttatcctctcttctatctagtgtatatagtgagtgtcgaggcccattatatacttgtttcttttaaattattgttttgtgcaacgaattgttattgtgatctatgcttggaaatctagttatgcactttttatgagaagcagtctctggacagtttcttcttgatgtggttgcatactaagtacttggagattgggtaatatatttagacaaagaagatcttctgactcatcttagttttcttggaaactacaacacttgtggcagtcatgacgaactctatgaagctatgctagcgaacacacttgccaatttaaaaaacctgaagcatgcttcttacataactccacaacaatcacaagtacaatcatattcatgataacactagagaaattaaaggaccagatgacagtttctgtcttcattctacaatttacagactgtccatttcagagttacccctggacctcactataactgtccactgttctaaaagaactttgcaagtttgtttatagaattataggattttctgtttattctcattttctccagtgcatatttggctgagcatttaacgagttaattgaaggatcagttatttttttttaatatgttgcttacttttagttctcagtgtctattccatcctaatatagata

SEQ ID NO: 10060 - DNA, 847 bp, Oryza sativa
  Intron number 1 from transcript LOC_Os07g48760.1 (locus LO C_Os07g48760) derived from phytozome v7.0 (chr-ID Chr7; po s 29189393 to 29190239)
tccggactccatagatcacccttcttctcccaaaggtatgtccagttcttcagcattagttcctgttccttctacctctattagttacgccactcgccggaggagaggaatgctgtttctcattccagatgcaagggaattccatttggctcctgactgcgattaactatgtctccagctgcttgcatgtgcagcattctttcggtatttcgttccattctgtcaaggaatacatggaaagataaaaggactcgattttgacctatttcaagggttcgaatatggcttgttttgattgaacatggctctgtgttttcttcctaatacatgaacaatgaacatgatgttttattatttgttagctagtgccttcagattttggtttctttttttaaaccggcgtctacatcctgaaatggatgtacacagccaatactttggtttcttgttttgctggttatattaggtcgattccatcagcgtttaatttctgcacttctgcaaatttttaggagattctagggactaaaagcttgcaccttgcagattagcttacagttagatttttctttcatactatttgatacaatctcagttggaattttcatttgcaatgaaatttcgtatttctactgcaatggattattgttttctccttttgattaatagctttccattcagattcaacataatgcaatatcttctgtttttctatgtgctgaccatcaaatggtcaagctttatgaaaataaatcttgtaatattccctgtcagattcagttgaagtctagtttgaaggaaggattttttttttttgactgaggaaagaattttttttttctggaag

SEQ ID NO: 10061 - DNA, 730 bp, Oryza sativa
  Intron number 2 from transcript LOC_Os04g40700.1 (locus LO C_Os04g40700) derived from phytozome v7.0 (chr-ID Chr4; po s 23972279 to 23973008)
cttctgcggcctcctcatcctgggggtcatcaaaggtggcttgctggtcttctgtctctgtccattttggtaatttttgaactgattccatgtgtgttaagtctcatttgggaataattgtgtgtgtgtgttttgggggggggggggggggggagggccatgagtgcaaccattgtgcattttcttggccttatgaggttgctttatgttggtctctgttctgcttttatggatcagatgcttgattctgctctttcttggagcatctagttagagatcagcaacaataatcattttacaatttaccaaccatcgacaggaagctgttctgactttagttgtgatagaatcaaattaatttgacttggcttggagtagtatttgtaaaatgagcagttatttgatcaaattgctgaatggcgtggtttcaattaatcatgtcaatttaaccgtaactatagatattctattgttcgaaaattttggctggatttgctacaattggtagctttgcatgcattatgattgctagaaggaaaaaatagaaaaaaacaaatttacattagtttttgctgttacctagttacatgataaaaaaaatacaatgctgctctgttgttacctacttacatatcgtcagctattggcgtgttcatctttgttttgattatcttaaaatttgatgtactatcctcatttcacattatttttgtctgcaaggtattttgat

SEQ ID NO: 10062 - DNA, 618 bp, Oryza sativa
  Intron number 2 from transcript LOC_Os04g40850.1 (locus LO C_Os04g40850) derived from phytozome v7.0 (chr-ID Chr4; po s 24056335 to 24056952)
aggatcgaggaggagatccggaagcttgacgagaagtgagtagatctcgcttgctcaccttttcctgttcgatttgaagtctaggttctagggtttcatagaaatcgtggagttgacgcatctaataccgtgactagatcgctactttcatactcgtatctctagtctgtaattgtccattgttcaatgttagtgcgcttaatttgctttagcacatctgaccatcaattggttagtcctgttttctgtaacagaattatcaattgagatttgtttttctgcattaagggcatgccgagttctgctcatctgaattagagtaatctaatctagccatccagattagaacaaaatgtttagtgatgataaatataaatttgatgatcgcatggacaaaataaatgctgttgaggaagcactttagtttatgccatcataaattttatcaacacttgctgaaaggctcacaatttgtgcttgttatggatagctttccgttcttcttctagcatacatgagttatcattttgcttgagagtactattctgaaatataatcaaagttgttcagttatattcttgttgttaaaaatcgtcctttatccctgaaggatcgctg

SEQ ID NO: 10063 - DNA, 762 bp, Oryza sativa
  Intron number 1 from transcript LOC_Os03g18140.1 (locus LO C_Os03g18140) derived from phytozome v7.0 (chr-ID Chr3; po s 10148355 to 10149116)
tggcgctggcagccgaccgactgcgacctgccccggtacgccatttcttcccccacaattttttcacgccatttcttgcccaatttcgtgccgtttcacgcaattccgggtaaccggcattgactcacgccggcgatcatcgtcggtttcccaaattgatgccggtttctacccttttctttttcttttttcatcagcatcggtcggtcacctcgaaacgctaagtcagaaataaccgtaggaatacttacgggccaaaattaagacgaacgtgtcagggaaattaaaatagaacgttcgagatttttgaaacggaacagagagtagtagtaccaccatgccacaccagtacaccactctggtagtgagctgtgacgtcggactgtactgtgcagccgcgctaccccctgttggattaagctttgcttaatctaatcactcagcatctggctgctgttgaagcagccactacttaaatcaaacacaggcacgccaaattattctcttttccaaccggggaacagctgcacgcagcgacgcccagtcagtcacacagtgggtgagtgacgcgagtagaatatactactacaacttgctctgtatctgtgtctcggcacagtctgatgatagtggcaaatatagttggcgatccaacaacgctggttgctaaataacgcaggaaaagtctaacgaaagctgatgtggtgtggggaaaaaaaaactgcaggttcgacgcgaggctgctgctggagcggctgcgca

SEQ ID NO: 10064 - DNA, 891 bp, Oryza sativa
  Intron number 4 from transcript LOC_Os04g15550.2 (locus LO C_Os04g15550) derived from phytozome v7.0 (chr-ID Chr4; po s 8450670 to 8451560)
gtttacctcaaagcgtggtatggttcagctctgtatgcagatatcttatcttaagtttgcagcttgagtaccttcttccatcgtcttttaaatggacattaattttattttattttgtactgcttgattattttttgtgtgaaccataatctttgttagtatattcaaccttgctagaaaaaagtttgattatgaaagacattgcaccatacaactacatggaagtcaaaatacaaaaaaaggctaaactgatataaataccagtattgcattgcaaataattgagattcgagacaataatggatattaacaagaaattcaaaatgatgcattgtcatttgtgaatgtcatgtcagaataacatgaaacgtattttacttgtctgaattctgaaacggctacaggtttcttgagatcacttcattagaataaccttgataattcttctccatcaagctaatgcatactgtacacagtacagcccttttttgttttgtatatatccttttttaacttggaatagtgaccaatccatatcatcgaatttgtgttggccacaggtgacgcttgtgaaaatggttaatgaaaaggttttgataaaatggcactttcaatctatcgctacatgctataatactatccaggacattttagcgaaactcggatttgataatgacacaatgtccaacttctcgatgtgatgtgggcacaggcacagatcaatgtttttcttagccatgtccacctgagcatttgtttcaattgatttaaagggaaattgaagtattaaattggtggttagcaatattttgtatgccaacaacagctggtttacctgatttaatagatactgttgcaagctgttccatttcatgtttttgcagctcagct

SEQ ID NO: 10065 - DNA, 657 bp, Oryza sativa
  Intron number 1 from transcript LOC_Os05g05790.1 (locus LO C_Os05g05790) derived from phytozome v7.0 (chr-ID Chr5; po s 2888626 to 2889282 reverse strand)
cgaggaggaagaagacgaatcaagaagcaagcaaggttggttttgctaacctctcgctgtgcttggggtttgttttcttgattggcttcttcgatctgggtgacggggggtttcgtcgatcttgttggtggtggtggtgagggtttcttggtctcttctccggcggcggcggcggccatggcgatggctgggctggcttcgtggagggtccggctgctgcctccgccgtcgcgggattttgggtgttaccccagcgcctgaatttgattagtgtgtgggtttaacttcaattaatcatacgcgaatttggtttctggattttgctcttcgtccgggctgtgttcttgattttattttatttttactgcggcgttgcattgattgggtggagctgaatcagccgttcttgctgtcctccggttgttccattgactccgctgctccggtaccgatgagctaagctgtgagccacaattgttctggataattgcattgatctcgttcccgtacgattgttaccgcgaacgctagcattcggtttattgcgtctcttaaatccgagaattatgtcatcatctgcagcattgcgagtacaaacagatgacacttttcctctttatttatgtagtactgtgttgcagcaagaagaggatagca

SEQ ID NO: 10066 - DNA, 546 bp, Oryza sativa
  Intron number 2 from transcript LOC_Os03g49970.1 (locus LO C_Os03g49970) derived from phytozome v7.0 (chr-ID Chr3; po s 28485593 to 28486138 reverse strand)
caggtaacattttctttaaggctgtgttcgggaggtacgtgtgatcaattaagtattagcctaaaaaactttgttatgtatatttgattaattgttttttttcaaactttctttgattgcacactggctacggctatgattgtttttggatgaacaacacccttctcctccactgggtagtgttattgtttagcccgtgaatatttctttttgcaagagaagattcactatttaaatggagtactagcatactactccttgaaacattttcctgttatgttagatcattcgatcagacattggtacaaccataaactacaaagaagttggtccctcaataatactaacactaattttcttttgaccccatgtacgtactacgccacttcttgtgatcaaaacaattgcccatacatcaacagaatcctctagggtagacagcccaaccttaggtaggagtacaaacgaaagctgctttgttcagggatcactcattacccgtctttcctagggtaccaaaaatcacatctcaggagctctcagcca

SEQ ID NO: 10067 - DNA, 503 bp, Oryza sativa
  Intron number 2 from transcript LOC_Os04g40740.1 (locus LO C_Os04g40740) derived from phytozome v7.0 (chr-ID Chr4; po s 24001077 to 24001579 reverse strand)
tccctgcaccatctccccggtccaattgctcggtaagacattttagagcaagtgccagctaaagaagttaatctttcggtattcttgtgattatgtacttgaagtggactaggtatcatttttatgcttgtggtggtcatgtttgcatgcttagaatttatatactccagtaggattaataaatttcttcaggcaagatggatttttttatgaagtaatttgatcaaatatgatgatcttttggtgatactgaaccgattggtttttcagttccggataggtgatgtcaaattacaattcaggggcaaaatgtgttaaaagatagatgttcgttttgtttttttttttgttaactgttggaaaaagtttttgatgttgtacagagatcctccctctaaatgttaactataacaaataaacctgcatatgatcttccagctgaccaagttaattccttcttaaatgcagcttacaataaatcccctgaaagatacagaattggt

SEQ ID NO: 10068 - DNA, 613 bp, Oryza sativa
  Intron number 2 from transcript LOC_Os04g33220.1 (locus LO C_Os04g33220) derived from phytozome v7.0 (chr-ID Chr4; po s 19929407 to 19930019 reverse strand)
tccagggcaggtgagggttcacaagttctattttactgtcatgtaaatactcgttagtagcagcaaagccagtacacttattgcacgaatgcatcttattctgttcatatatactatattccctttctttctttcccacatgtgagttgcttaccagttgtcgatataactactagtttgagtttctaagattttttcttttgtcaaattaatattggtgtaagccactcatgactgactaatattagatgtaagaaacctgaaagccacgtgtctgtgtttttatgaaaaatctacctaagaaattatactgcttaaatcaaaatgagcaagacttgactcactggtgcgagtacattttgtaatcttcaacaaactcaagatagaaacataacaaaagcatctacgggtcttatgataaactttaaatgctttactagttaagaaactaatttataaattagtgctgaaaaccgaaaaagaaatgccgactctatcaccagaagggtatattacaagtttggaaggctgattattgactatctatataaatcgtgttgattacttgatttttttttcacctgcgtgattgacaagtgctcatttcgatagc

SEQ ID NO: 10069 - DNA, 758 bp, Oryza sativa
  Intron number 2 from transcript LOC_Os05g22894.1 (locus LO C_Os05g22894) derived from phytozome v7.0 (chr-ID Chr5; po s 12950857 to 12951614)
tgcaagtggatatcaacacttctgtactgtcaaaggtataaagatgaaaccatttttctctacaaatttcaaaatatagcacaggatgtccatggatacctccaaatgcgatcatcaaaatgctgccatcttctttgtaaagttttaaaggaaatcaaaagctgaatcgtctgaaatttacattgttaatgtcccttcttgtgttgtatgccctggtgctgttgattgctaaatttcttcttatcccggtgcttaagtgaatttattacaaaaatagtacatttaattttaaaatattcattataattctataattttattggcttttcttttctaacaacaaaatctcatttgatgacaaggggtgaagctcatgttttttttttcactctaggattaacttatctgtgctcattgtttgttgtacataccatttacaccagtgagttaacatatttgtaaaactgcagaatctgagaaaggctttcttcctcttttctgttctttttttttatgattattgtcaaacctttatccaatgtgttgtacggaaatattggcacatgtttttcatagtcaattttcatttctgtatatgacaagattcagacaatattctagaaaattattgttttgtggaaatgtgcctcaacaatattgtggattactgcaagttgctgtcagcaagttctaatccctttcctctgtctcctattcattcagttccactcggatagctgcataatagaagcggcatc

SEQ ID NO: 10070 - DNA, 776 bp, Oryza sativa
  Intron number 3 from transcript LOC_Os05g22894.1 (locus LO C_Os05g22894) derived from phytozome v7.0 (chr-ID Chr5; po s 12951622 to 12952397)
agccaacttgctgaccattgcggcttttattttaggtatgaatgctcttttgttgtcttctcccagtgatgtatgtgtcatccgattgctcaatttatttttaggtttagttacatggtagcagatgctatgagcaagtacctcttagacaaaaggctcaaaggcacagttttaatagaaagctgacacgttatgggcaagtacttaaatttctctagaatctccccttgcttccttccctatcaaagaagtcatattatctttgctaatttgttccccactatttttgttggtacatggttagattggcaatgttgatgctttgtctaaaggggaataagtcaaacaagaaaacatatgttggctgaggtttaaaagagttaattgaattgctatgtatcggcatggatacagctaagcctcttgatcaattcagagttgctggagttgtttactacctctagagattctgaattatgcaattcaatttcccagagtaatgataaatatttcatcttttgattagtgaccaagtgaatgccactttttgtctcctgaaaaatatatttggcttgtgcttttccttacaagtctagagtggaaatactcttagcaaaataggatgggtgcaaatgcacttcactggtcagtaattctataatatatcattccatttctgcatcgttggcatgggcattaaactttcaatccggatgctgttttcttttcttgtttgtttcttacatttttttaattttatttgttttactccaaag

SEQ ID NO: 10071 - DNA, 970 bp, Oryza sativa
  Intron number 1 from transcript LOC_Os08g23930.1 (locus LO C_Os08g23930) derived from phytozome v7.0 (chr-ID Chr8; po s 14473568 to 14474537)
gattacaaccccgtggacagcagcggtgagcgcattagatttgggtggctagggtttttttttttttttgctactttcttagcttggaataggctacgcttctgggaagaattagtgtcaggattggcattattagggcattttctcctgttatcttgttttactgtattgttttttcttccatttcttgcagattgttagtgcttgttcactagcttgctggaatttgtttatcctagtaggttattatgggcaaatctcgatgataggttattgttttcagctgcttgtttgctgcagaggtcgtaactttggggttgttagtgaatgctgagttgaatgcttcgttaggattagttttggagcttcttttacaggtttctgccaagagaaggttaccattgttgttctaagaaaatgttcgacgcgacactgcaggctttatctaatagtagtaatatgagtgtaatggttgctccctgatttgatctgcggtgtttctagcagctgatgtgttgatggttccattgctacttgttattgaatttaacatgagcatagctcgtgatcagcacaaatgttctatagcttgcacaaacaagtcaacatgatattcttaacataatttacagttcagtaacacgtgtgtgtatattagagctctttttctttcagtataattttagtaccatatgccattgtgtctgggtttcagttcagctaaatggttgtacaatcattaataaatagctaaacccttaacttgtgagcatattatctttcatttccaatttgatttgtgttgctcaattgactagcatgtgaaatggttgtacaatcattaagaaatagctaaacccttaacttgtgagcatataatcttatcagtaactggcttaaatcagtctaaatgtataataaaaaaatcgagattgtgtgctaagcaatttattatttgttgcaggaactg

SEQ ID NO: 10072 - DNA, 982 bp, Oryza sativa
  Intron number 1 from transcript LOC_Os03g20630.3 (locus LO C_Os03g20630) derived from phytozome v7.0 (chr-ID Chr3; po s 11671667 to 11672648)
gcgctcgccgccgtgcccaacgacaaccccaccatgtgagcacctctctctctcctgccgcaaaacccgctctgatttgtaggcagtgtagtactcgtgtgtgcttcttgatctcatggattggcagattgcggcatcactagtttatcatggcctagtacgctgggagatcattgattcgaacacctccctgtctctttaaaccgaacttgagcgagcgtttgcagaagtaattcgtgtagatggaattgctggattcatgtgattagggtcctttactaattattactactggaaatgaggcacaccacaaataagagcttggcgcaaatacgaaatggggctattgagctgtacaatagtgcaagcatgattgttaattaaatttttcactagcttgcgtaccaatctgtactgtagcctgctttggtttttactccataagttatggcccagtttttttttttccttctaagtaagtggcatctgtctctgcttaccccagtcaggtttatgacatcattttgaggaatttatttgaccatttctctaatagccaaataccaatcctacttgtgtcactgaaacactcgtttaacggattaatattatgaagtgagccctgaatgcctgaacattaaagcagtaggcaaatcgtctgatacccttttcattaaatttaaaatgtctgacaaacaactataatacatctccacagcgcattggaactcaatagtcaagttaagcattgatcagtggttcatttgttgccaaaagagcatgctgtttgcagtttgcttgatggtagtcaagtgtaagtttttccttgtaatcaagattaagtttctgaagatgtcaaattattgatttagaatgtggtgaagttttacattctgcacagaaaagtgtgcaattgaattgatttctgaaatttgttgcatctgcagatttgacaagatcatcaagaaggaaataccttcca

SEQ ID NO: 10073 - DNA, 993 bp, Oryza sativa
  Intron number 2 from transcript LOC_Os06g34440.1 (locus LO C_Os06g34440) derived from phytozome v7.0 (chr-ID Chr6; po s 20038778 to 20039770 reverse strand)
tatcatttgcatttggttgaactcgaaaccaaaaggtactgtgaattgcaagaattgcaaacacttgttattctcttaatatgcaatgttagaagaatatggattggagttatattactgttgttttatttctgctgtttgccactgtatgacctaacacctatgcatgattagttacttgcctattctgttaatctacactctttttagtaatgtctaattgtgtactctctttcggacatatggagagtttagacctttgtctcctgtttgtgggtacttgttgttactaaatatgacatgacatcctggcatattagcaatgatatttggatagtttaagtatatgtggtttgggttggtttttatcctctcgtacagcctcaccctgttgttctccggatacacaaactcagagcttgttttcaggacatgtatttggagaataatagggtgatgctgccagaattttcttttgaactgtacagaggcataaaaccaacctgaaccacatatcctcgaattggatttggtatgtatctttgattaactgggatacttttccatgagccatgtcattttatggagttaatttgctagcgttgagtgatgcataagtatgcaagcatgtaaatttttcagaatgctttggaaccactgtcctgtgaatgagccttccttgcaagtatttagtagcaggaggtcaattgtgtgggaacactttgaacatgacttggtatcattgataatgtcccaaaggctgtggcaactactatgcactcagcttttttactagaagagtgatttgttgtataatctgtatattttgaactgtggtcatgctgattttactgtattgtaaccattgtctaatttgaaaatgtcacaagatatgcagtctataaagcttccccacttattctttctgattcttaattgtgctcttgatctctttcaggtgcaatactgttggccacataacactattcagat

SEQ ID NO: 10074 - DNA, 642 bp, Oryza sativa
  Intron number 2 from transcript LOC_Os06g03760.2 (locus LO C_Os06g03760) derived from phytozome v7.0 (chr-ID Chr6; po s 1488114 to 1488755 reverse strand)
ggtggtttgcggcctcatcctcggcatcctatacggtgcggatcactgctctcctttgcctatcatgctaaaatttctagactagtagtaatattggagtgggatttttgaatctgttcgaatttgctatgtgacctgttctacctgaatcttgagttggttggttactagtgttaattcttctggcttcacttggagtgactagctcaagctttgagcttttcaattagtacttattttcgagcaatcaatgctgtacaaaccaggaaggcagctgccagatctgaattgtcctgtttgagctttgcacttgttgtgtagtatatctccccggtccacattatacccgcaaattgttttcttatcgaccagtagtctgtagcttcacaattggtagttttgtttttgcgctgtttcttatataatccttgtttctttcttccacccgatgtattaaaatgaactcctgctaggtcccttgaatgccctctgcaaaaaaaagggttttttttcaaggaaaaaaaaagtggtcttgtgaacaccgtggcttctaagggtttgggatgctttcactttacatgacctcactttcattgttctgctgcaggacttgttggcaaagtggacttcactgtcaggcat

SEQ ID NO: 10075 - DNA, 652 bp, Oryza sativa
  Intron number 1 from transcript LOC_Os04g01470.1 (locus LO C_Os04g01470) derived from phytozome v7.0 (chr-ID Chr4; po s 316243 to 316894)
tcattgctcaggctccatctcttccgggtattgaaattaatatttttatcatctcttttctcactttaatttttcagtagcccgaggttttatctagtttaaaaacaaaaagacactataccgttccaacataatagcttatgtgtattaacatcggcacggtattacttgtgctaccagacatgatatctatatatatcaaactcttatatatattataatcaatgttaacatcatcatgacgtcggttattttattatagtactctctccgtattttaatgtatgacgccgttgactttttaacaaacgtttgacctttcgtcttatttaaaaaatttatgtaattatcatttattttattgtgacttgatttatcatcaaatgttctttaagcatgacataagtatttttgtatttgtataaaaaatttaaataagatgaatggtcaaacgttggttaaaaagtcaacggcgtcatacattaaaatacggagggagtataatggtatactatttcgtatttccggtaaaaatatgagctcatttagatgagaaatacaaataaaagcacggacaaccctgcgatacaaattctgtactctatgtttgactttttcttttcatgtaggtgtcaaacatatagctggaaat

SEQ ID NO: 10076 - DNA, 470 bp, Oryza sativa
  Intron number 1 from transcript LOC_Os03g31706.1 (locus LO C_Os03g31706) derived from phytozome v7.0 (chr-ID Chr3; po s 18110569 to 18111038 reverse strand)
ggttacggccctacgcagcacatactccaggttaagttgatgtcctctcttcctataaatcctcaaacaataaagattttgtgcttttattattttgggttcagaaaattgtttacctagggtttgggcagatctgtgcaatttgtggcatggggattgatttggcttttcatgcaagaagagaaagctccccgcaaaaaaaaaaaatgcaagaagaaaaagcactaaaaacattttatatagagatgttttagtttaatctatgatgggaagccttgcaaccattaatttcatattttgctgaaactgagtgacaattgattattttgagaatttgccagtatatcagttccattttagaaagcatagaaataaaagagctggatttgggacttcatttgatttggggttgatatacggttatgtttcttagatttgagtgggaatttttgtttttgttcaatcagagg

SEQ ID NO: 10077 - DNA, 363 bp, Oryza sativa
  Intron number 2 from transcript LOC_Os07g29770.2 (locus LO C_Os07g29770) derived from phytozome v7.0 (chr-ID Chr7; po s 17499066 to 17499428)
gcggcgccgtcgcctactgctcgcgcgcccaccaggtagcgcccggtgaaaactttctaccttttctgcccccccgttaaatccgtccagctgttgccgttctagggagggtttcgaatggcgggcgtatgcgtatgcctcgaccaaatctgtgtttcgtaagtaaggatttctgttgggatttcctggaatcccggtaggtgagagtatcctaacgttgtgggtgaagctttgagtttaatctgaaaattttaaggaggagttatttgtattttacatatattttctttgcaactgtgtagctatgtgtaactttgaaacctacaatttgcagactgtgcattggggatttcataaagaaga

SEQ ID NO: 10078 - DNA, 438 bp, Oryza sativa
  Intron number 2 from transcript LOC_Os03g22800.2 (locus LO C_Os03g22800) derived from phytozome v7.0 (chr-ID Chr3; po s 13165513 to 13165950 reverse strand)
tcaaaggggagcaacacctatattggcaagctaaggtgatcttttgagatttcatcactgaaaagctaaagctaaatttgttcctagtttctttagtagtatgtgtaaggaaggccctttagatgtactataggctgtttcatataaaagcatcacatggcatttttccccctctccttttgctgtaagtgttagaatttggaaagtacaagaaattgaagtgctatgcatttcacatctaaactattcattcaacttagaacaaaactgtatgtatttggatgtcaagtgcattactcaaacttaatcttcagttatatcttttttttgtttgtttcttacagatctaaaaatatagcctacaataacaattaaaagaaccagctaaccacctttgttttaacaggtcaaactttctcggaacaaagtttaccgtct

SEQ ID NO: 10079 - DNA, 660 bp, Oryza sativa
  Intron number 4 from transcript LOC_Os04g31790.1 (locus LO C_Os04g31790) derived from phytozome v7.0 (chr-ID Chr4; po s 18864304 to 18864963)
aactaaggtggacaagggcaagaaaggtatgtggcaccttagtaatagacagaatagaagaagacaacatgtatctctttagaacatgaatatttcatttattttaacttattagattatgtgcatcacataaagatttttgcgtagacattccatttcttttccaggaaagtgtttaccttactattgtaccttggaagatcttccttagctgtctcactattttacttgatagaaataccaaaatattgttcagtttggtcctttctgtgattcacaactcacaagttagtctctgtcacacggtaatttgtaagaatggtttgtccaaaatgttccttttctcatctaatgctgattcattactacaatctagaagaaacactagtgtgttccttaggataataatctagtatttcaaaccgatcaatttgaggcaatattaattgcccattctgaattcctgatggaagaaaatacttgctatcccaatacatcattgtgtactcaaacagtggatgtatcaacttgctgcattactctttcagtgtccttgagagaattttggtttgatctgcaaccaaattcacttcaaatctgacagtatatctttgtacggacataggtggtggtggatagaagtgccagattacaaaaaaa

SEQ ID NO: 10080 - DNA, 662 bp, Oryza sativa
  Intron number 1 from transcript LOC_Os04g46892.1 (locus LO C_Os04g46892) derived from phytozome v7.0 (chr-ID Chr4; po s 27612345 to 27613006 reverse strand)
tgacaaagagattatcactggtaattgtttcttttgactgtttatgctttagcttctatatgtattttttttgttcatttagatgatctttcctcttcatccatcattttctttccattttctggggaattctctgcttactagtggaggatgagacatcctacctgctagatttggggggagtttatagattcataatcattttcttaccagacagattcgttatcatgagccaatgaagttcatatgtgctagacattcactaacgtacaagaaaggcattaaatggaacacagcatggagttgtggattcatattgtaatgtaaaaagtcacgcgcatgtaagcaatgtagtttaagattgccttgtgagttgtgacaacacttcgaatccaaagatgcaaatttgccctttatatcttgcatatattggatttaaattaaaatactgaacacctgttgcgctagataaagtcaagcaaacagcttgatctgaaacttctggatttttttctcgaataaaaacttctggattttttttctcaaatagaaacttctggattttaatgaagtgttatggtaggcagcttccattatttaatgattttttttatgaagtttcgtctgctttctaataccattttactcaataataggtgggc

SEQ ID NO: 10081 - DNA, 930 bp, Oryza sativa
  Intron number 2 from transcript LOC_Os08g09300.3 (locus LO C_Os08g09300) derived from phytozome v7.0 (chr-ID Chr8; po s 5395349 to 5396278)
gttcctcacagccacagttcgtggagttcaacaaggttagaaaaatgttcttttttttctcactatcacatactcctggtgctggatactgttcaatgcagcacaacttctggttctcttgaatctgttgttcatcattagatttgcaaaatactaaaatcttttgtattgggctttttaccatgattatgtctttcgtgtcatgaaattcatacattaaggggaactgaagaaccagaatttgctaaacaacattgtaaaagccatctgtgtaaaattgcttcctctgtctaggaatgatcagccagataaacattagagtaatagctagctcataagcatagccaatatcacattacccgttctcttgtaaaaacaaatcaagtgttgttctggtgtgctgttgaataaaatgtgttattcacctgcagcaaaccgagttgtagaggtcaataaaatgtggcgagcaagggagaaggaacttgaattggagtctaagacaaaaagaagatctattaatcgtggtgactctagaggtaaaaaacgcaggagtgatgtaagaaaccagagctcaagtccaaggatggaacaagatagcacttcttataatagttcttacttggacctggagggtgctctaggggatgatgaaatagagatgttccttcattcgaggttagtagcgtccattttttcttgaaggaactatagagttgttttctcatgccctggtcaattataaaactaataagcccatttatctatcttttgatagtcatagcatcaaataattgtttccatgtctctgttttcttagaatcaaatatcctgcatatgattcccgtaccaatctttaagatttgttgacaaacaatttaattgtgtgctatgctagggtgaagagaggacgaggggccgttggttctagga

SEQ ID NO: 10082 - DNA, 944 bp, Oryza sativa
  Intron number 1 from transcript LOC_Os05g33200.1 (locus LO C_Os05g33200) derived from phytozome v7.0 (chr-ID Chr5; po s 19407955 to 19408898)
cggccgcgccatcatcctcgtctctgactattacggtcagtgcacgcatacatgttaggagcatagcgtgctctctccgcttcatattataagtcgttttgacttaacattttaaaaaaaaagtcgttttgactttggttaaagtcaaactactttaagtttaactttgtaaggaaatatgttaatatttacaatactaaattagttcatcaaatcaataattgaatatactttcataataaatttgtctttggttgaaaatgctaacatttttttctaaaaacttgggcaaacttaaaacagattgatttagaccaaagtcaaaacaatttataacttgaaacggaaggagtagttaacaattttggggaaaaaacgccaaaagaaaacagacatgataaattcgaaatatccagaataatttaaattttgaacaaacctgaataacttttgctaactcgtgaaaataattgaaatttcaagcgaaatagtttcgtgtgtaggtgagggggagggggtggatttccaaaaattgcaaacactgccttgagagacagtagccactcgtatatgctccctctgtcccaaattataaggcctgtattttttttacacggtctttaataacatactttgactattaatttatttcatgttatattttcaatgaatatgaaattagcatcacatgaaagcaatttaaaatatgaatctaacggtacaacatgcataatacttggcatatatatggttagcataattgttagttaaaagttatcaagtttgattttcctttgaaagagttgtttttttttttggggggggggggggggcggggtgatgaagagagtatctcataaatcctcttctgttttttgtctgataatatcggcacttcaacttttgcaggtttccgagcaccaaagctgaggtacgcacgtttg

SEQ ID NO: 10083 - DNA, 964 bp, Oryza sativa
  Intron number 1 from transcript LOC_Os07g27490.1 (locus LO C_Os07g27490) derived from phytozome v7.0 (chr-ID Chr7; po s 16029197 to 16030160)
agtcctccggcaccgtccacacctcctccggcaacgtgaggatttctttgcttcgcatctgaattctgagatactagtaaatgcaaccttagtttgactttgtgtggtgtaggatagcctggtagagatgattgtgcttgcctcacacctttgcccgttttagggatccatgtttgatcatgcatgcatgactttgtgaattcggaaacttcgtgataggaatcggatatccacatttggattacactagggacaatgaaacatcttaacaccaagttaaggcatgcgtttgtagtctattgtgagctttttctttttttttttgcttgttatagaattaagagaggttgaccagctcattcctgatgaacaaaattactaacaattctatgatttattgatttgtaagttggcatgcttctgaatgaggaggatatgtggacattggaaatgatttataataaacatatggtaccttgtgttttttcattttcttttagatacgacacacttggctgaatgggaatatgttgctgatgcctcagttgctttgaatccatcatatcttagttgtttttcttacactgattgaatttcaagtcagacattttaaaaatatatggcgcataattatttggcgtgcctactgcatcagattgttctggagggtgcctaatttacttttattctagattttttttcttttattaacatcctagctcatctgctctaccagtttgagagtatgctctatgttggacatgttacttattgccattctgctatgcttgccaatatgaagaccaaatgatcaacaaaagttgcattgttgcacttgggaatagtttccctcatgaacaattctatctttagtatgaaactggaaagttagattttctttttaatgttagaagacatttccaacctggtttcttatatatgtgaacatgctgtatgtttccag

SEQ ID NO: 10084 - DNA, 431 bp, Oryza sativa
  Intron number 1 from transcript LOC_Os06g43760.1 (locus LO C_Os06g43760) derived from phytozome v7.0 (chr-ID Chr6; po s 26332607 to 26333037)
tctgggagaaagacctcgtctacaagggtttcaaggttaaatttctgatctcacgcctgattaggttttgagtctcggggtttgctttgcatatttattatgatttagttgctacaaagtggacaagctgaggcggtagggaacctgaaattttatggtattcagaagtatgcaatggttaactgtattttttattagaatttggaatttatatgtgtggagaatggaattgttctggtatgtctcaatgagaagaatgaatagcagagtttaggttacatggaagtggcttttcattttgtagataatgctattgtgattacatgaaataattgattggtttttatctgttgtttctgttaatggatttatttttatgaggaatttcttgaaagttaaagtgtcctgggctcttgttcttgtcccaggtg

SEQ ID NO: 10085 - DNA, 982 bp, Oryza sativa
  Intron number 1 from transcript LOC_Os04g42090.4 (locus LO C_Os04g42090) derived from phytozome v7.0 (chr-ID Chr4; po s 24730112 to 24731093)
atcgggggttccaaacacagcttcttcgttgaattgtaagtttcttcgctgaaaccctctccgtaggttggtacttctgatttttttttcctttacagattttgtggtttgtagggcgtattgctatgtgttgctattgtttatgatgggaattttggtttgttggtgtagataagcttatctatgtaaaacaaaaggtcagtaggttacctctttgatcttgcttgtgcagttaggctatcctgtttgagttgttcgtgatttgcagattactgcaaaagctatcctgtaaaatttcttgtcgtggtaaagattgtactaagaatttttgtgtgttcagatcctaagacatagaaaaatagttttttttcgtctccccataggaatataacaaatgttctttttctgtgacaccatgatcgaattttgttttttaatgcaaatgtatggtattatcattaacataggatgggatcagggacgaaacatatgtgaatataggaacatttgcatatgtccaacggaaaagtctcaactctaaatcttaatccaaatgacatcacgattgtaaatccgaccagatcttaaatctgaatccaagtgagactcaattgtaaatctaaatataagaaagaatactgatatatgattcattgtaaaggacgctgtggcttgtaggaattgagtattactggaaaattaggaattgaatcagattgtgagatattaattgacctgtcctgttgtggcatatttactcctagttagaacttggaatctatcatattgttatgtaactgtttactctttggtatcgttttgatagcttcttatctcagttttacttttttgcattaaagactcagatgcttcggtctggcacatatatcttctacaaacatatgcccttattttctctttgggccatatatatttgtctgaacctgatatttaccttgttatatacttgtgcagtaagtgg

SEQ ID NO: 10086 - DNA, 528 bp, Oryza sativa
  Intron number 5 from transcript LOC_Os04g46370.4 (locus LO C_Os04g46370) derived from phytozome v7.0 (chr-ID Chr4; po s 27310511 to 27311038 reverse strand)
gtgctacattcaaaattccaggaaggtgagcatttttgcgcttttggtgttttcatgttaccatctatcatggagccttttatttttatttaaggttatatttttctcacgtttgagtggtttcatgtcactttaatttgtgtactctggcataatctattttcatcatctaattcaattttccatggttaatgacaagactcacaattccgaccgtgaaatatatttttcttagtatttttatgctgtatttgtatatgtaaagtcactggtgaatgttgttgttaatcttctgcatgtctgcataaaaaactaataaaatgctaatgtatggtcagaaatttcattgccttgttaatgatggggtttatatatgtgattaacaggtctactttttttttcgtgacatcttgactctcaaaatggatttgatagctagacatggtttttaatcattatggaattgctgtttcatctcttggtaggtatcactgagcattgtctgatcatttggttccagggtaggtg

SEQ ID NO: 10087 - DNA, 875 bp, Oryza sativa
  Intron number 3 from transcript LOC_Os03g56190.1 (locus LO C_Os03g56190) derived from phytozome v7.0 (chr-ID Chr3; po s 32011039 to 32011913)
gggtaagtttgttcagctatggcttaaccctatctatttgagtacttgttgcgatgttctattgagatttatcgcgattaatattctgactgaagtcaaatggctggtgtatgtacttgtatgcggattgtgatagttgcatgttacggtatttcattttgccgaaatacccattcctttagttctggtcgtttataatcttggtgattgttcatcgttttctgatgaaactaccgatttagttgactagtttgactgtgataactcgccgaatatcatttacgattggcatagatatgtctgcaaggattttttttttgtctgcgcaagaatattataatttcatgtttggagattcgatcacatttcctaagatacttagggcaacaccaatgtctgaggaacacttcaatgcctagtctgcaaacattgggactttcaccagatacttaccgcacattgagatggaatttgatcgtacattgtgcttgcaatattgcatccagttcttggtgtacattttgctacacaaacttatagttgtactatacctaatcactctagaaacctttgagatctgggatggtaattttaagttgtattccatttttctgcatgacgactttcagaactcatttctgggattcgaaattcatataattagcatgggtgttgtaatcttctttttttggtacaaatgtttaagagttgcatgcaacatatgtcatgaacaacaatggtagttatgacaatatgaccttaaattcaatcagattttagactagtcttatgccttccacctatgattatcgtacagcagagtatagaatagtttgttatttttgtataggaagctatacaaagctcaaagttgc

SEQ ID NO: 10088 - DNA, 662 bp, Oryza sativa
  Intron number 3 from transcript LOC_Os03g53700.1 (locus LO C_Os03g53700) derived from phytozome v7.0 (chr-ID Chr3; po s 30785294 to 30785955)
acctggttctgcatgcacccttcatttttttctagtcccgtaactcaaggaacttgtacatttcatttcatgttaagtgccatcttagttgcccgcttttcttttagacgagatcttagataccctttaattgatacacctaaacaaacttgatcgttctatattaaagtccaaacttattttgacagtttgcgtttgtcaagttcaactccagattccataatgaatagttacgaacttagaagtatcacacaggaagactaatgtttgcagtctaaaaactctgttttgttacaattacaaaccactaatagtatctggcatcttgagattatctcatgagatttaatgaaaagcctgatgtctgtcatactgtgttatgtctcatactgcccatatactaaattgaatgttcggatgcctgacactaaattacatcaatgctagaatcatatactaaattgcatgtcctaattctagaatctcaattacattatcaactcactgtgtcccattcagggacccagactaacgaaacaaaatccatttttgatatttgttccaatttgtgtcatttatatcctataatattttgttaatacctaactgtaagtaccatggatggattattgtacagatagagagtcatatcaaacgtctgg

SEQ ID NO: 10089 - DNA, 1001 bp, Oryza sativa
  Intron number 1 from transcript LOC_Os05g07600.1 (locus LO C_Os05g07600) derived from phytozome v7.0 (chr-ID Chr5; po s 4076123 to 4077123)
ttcaggttctgtttgcaatctagtagtatcattttttctgcttgattggtctaaatgttaagaagattccctcaaaaaaaatgttgacaagaatttttttttgtttcgagaatgtgcggaagttttagtctttgtcagcagtgatagtttaaaaattatgatgtcgtcaccaatggtcgatatagatggcttgtttttgttggtagtgccctcttttaaactcaattacctgtatataattagaaattgtgatatcttcctacctacagctcttcaagggctgccgtgagaaaaaaaaaacttgtttgagattgtgttcagtttgaagtagtataaaaatgaattaaagaataaatttcactaaactagtactttgataaaattaacacaaaactacatatttaaaccatagtatcatacaactacagatatagaaataattttatcataaagctttacatttaaatcattgtatctcaaagcatagatttagtatcgtctttttcaaaacaaattttagatgtgctatccctacacctcttaccattgtaaaattttaaaatgtgtagttttgcgtaaaaaaaaaaacgatgatccatctgtagttttgtgaaggaaaaaacatgacactcaatttctaaagtatgttattttctaattaagatgctgattttacctcggttttcgttagcacgtttttcaaattgctaaacgatatacttcgtgcgaaactttctatataaaagttgctttaaaatattaaatatatttgttttttaaatttataataattaaaactcgattaatcaagcgttaaatgctttctcgattggcgtaccctaactttatcttcatcttaatctatctcaaatactaaatttgtagtcttgtgatactatgacttaaataattaagtactatatataccaaatttcatgtttttttaaatataattctctcaaacattccttggtttggtgcgaagaacatcgaggaagaca

SEQ ID NO: 10090 - DNA, 283 bp, Oryza sativa
  Intron number 1 from transcript LOC_Os05g40290.1 (locus LO C_Os05g40290) derived from phytozome v7.0 (chr-ID Chr5; po s 23614080 to 23614362 reverse strand)
aggccccccgtcccgcccgacgctgccagcggcgggtaaggaccggacgccacgattgggttttgattttgtgttttttttttctttctttgttcttcttcttgcgcggagaacacaacagaaggaattatttctttctctgaattgcggcttgttccttgtgtttcttgtggtgttggctctgctcgggatggatggatggattggattggattgcggtggtggtggtggtggtggtggtgaagcaggcagtacttggcggagttgttgcaggagcatcaga

SEQ ID NO: 10091 - DNA, 719 bp, Oryza sativa
  Intron number 2 from transcript LOC_Os04g31690.2 (locus LO C_Os04g31690) derived from phytozome v7.0 (chr-ID Chr4; po s 18813774 to 18814492)
gcttgttctggatcagaaggtgtgtattaatatccaaatcgccctccttttttattgtttcagcttgaatgcagcagaatggacctaacatagtcattatagaggagcaggtgaaacaggaatttaagaaattcaatgcaatgataatgagttcccttgatatatgaaagttattttgtgtcagtatttcattgagacaactcaaggctagattacatgtcagtaatgttgcatttgattgcctcttggtcaccctttgatttattaggtttgctcctgatatgttgagatggtgaattatgggtaggcagatcgtgacttgtcagttgttgcttgccactgcatgatgtagtcatttactcatttcatgtattttttttctctatgatattttacactgtggatggtgttaagcatttgttgtggaacattatgtaagtaagaacatcctaggcacaaaatgcctgaatatagtcatgccagtctttcattttaccatggcaattggttctgcatgctgatgcttactctagaattgtggaaatagtttaattacttgatttgagtttgctttggttggtattctttgtgtttgtgtcagaactttgaaaggaatcttgaaagacaaaatttttttctttgcttttggcctttctaaacacaccatgccatgctgtttcacaggtaaattcataccccacaaatagaggatttacagc

SEQ ID NO: 10092 - DNA, 490 bp, Oryza sativa
  Intron number 1 from transcript LOC_Os08g31700.1 (locus LO C_Os08g31700) derived from phytozome v7.0 (chr-ID Chr8; po s 19645301 to 19645790)
cgctcctcgtcgccgtctccggctccttcctccaggtcacctcctcccctctcgctgactgcgggacccactccaccttccccgttttacacgcacctactcctatataatttgattatccgaatattccatttccatcccaatttttatcttcgaaaaaactccatttcgataagaaaaaccagacaaacaggaagaaagctccatcgtttggcatactatggacatatatttacaaacgaaaaataatttacaaataaaacttttatgtaagtgttcttagcgataagaaataaaggccgaaaaataaaatacgataaagtcaactttaaattagaaattaaaaaattaaattttgacttacaaagataggtttaagtaaaaagatgagactgtcagcctcagttttttcttccactgacgctgtgggtcccacctgtaagggagagagggaactggatgaactgaaaaaattccgtggcgcgcgcag

SEQ ID NO: 10093 - DNA, 880 bp, Oryza sativa
  Intron number 1 from transcript LOC_Os05g11850.1 (locus LO C_Os05g11850) derived from phytozome v7.0 (chr-ID Chr5; po s 6755195 to 6756074 reverse strand)
acaacgccaagttccgccaccgatctcgcctcaaggttttgctccctcccgatccccttccacccctcccatttctttccccgcgaggtgcgcgtgcggtttgctgttgtgatccccgaatcccttgcggcgcggtgcggctgctcgattcgttttcagtagcatttgtgttgtttttgttttaggagatgtagaaggtgtggaatctggttggcttgagggattcatggctccccgatctgtgggtttagctgctgccgaattagttcttggtcatgtccgtgggcgtctgcgccttagggtgtgtctgatctgattggacctgataattatgtgctgttcttgtgctgctgccaaatttaatttaataagttaggtgatgagggtgtagtaatacgtagttttttgtgcatttagggattcagatagttgtctcctagttatgccagagctggaaagaattggatgacttcaaaaggttttctgcctttgtccattatgagtggactccgatagatccggtttgttgaatgctatgtccatagagattgaggtttgagctccaagtgtttgactgcggtcttcggtgctccataagatttatgattgccagttataactaaattcacaatgataatatttcgtgagatctgttgtgtagtagtagatagtgttagaatgctaattacatagcattaggaattaaataaaattcactctcatgaatcctacaactttgcttttgacgatcaattgatatccttagcttgtaaagtaagttcataacagttgttttcgacttcttgcaatgtgaaatttttattaattttttaatgtgtttatttcttctttcgtaatgtttatttatttccctatgcag

SEQ ID NO: 10094 - DNA, 557 bp, Oryza sativa
  Intron number 1 from transcript LOC_Os07g28720.1 (locus LO C_Os07g28720) derived from phytozome v7.0 (chr-ID Chr7; po s 16814942 to 16815498 reverse strand)
ccctgggggtaaccactctgtttctcttcacccccatttttttttctttttttttgttcgatttgatctctggtccatgactccatgtgatcttgaagcaaagcaaagaaataatgatatgtttcaattcgagcatataattgcatgagattttcctaagcttcgaaagaaatgggtagctactgatctgagccttgaggtgtattgctcactgtctttaaagagagcactgcactgtggcctgagccaatcggttctactgccatgaattgttacaaacagcgaagcagatctaaacactaacaagcatgtcaatagctgcctttctcaactgcagagtgcctaccatgtcctgaactacagggctcaattatttctccaaatttttgttaggttctactgctagaactagaagtgtatatgcatgcaattttctcgatactgcccattcccaattactacaacccttttcttttttgcatgcaataattaatagaaactcgttctcaattttttttatagaaaccctgaaaacatttatctaagaggggagatca

SEQ ID NO: 10095 - DNA, 904 bp, Oryza sativa
  Intron number 2 from transcript LOC_Os05g06360.1 (locus LO C_Os05g06360) derived from phytozome v7.0 (chr-ID Chr5; po s 3257966 to 3258869)
tcatcatcggcgtctccgccgccctcgtcttcaaggtatacacccccaaccctagtgccctctcctgcttacctgacgcccaaacccgaattctgctacttcaagaaaaagctttgatatgtagtactccatccgtttcagattataagtcgtcttgactttgctacaggtttgatcaagtttgtagaaaaaagtaataacattttcaacccaaaacaaatatattatgaaaatatattcaactattgatttaatgaaactaatttggtgttgtaaatattactatatttgttttcaaactcagttaaaattggagtagtttgactttgaccaaagtcaaagcgacttataatctgaaacatagggagtatcaagcaaatcaaaggaactttgatgtgcctgtgacttgtaaaaattggcccgtgtgtgttgaacctaggtaattttggtttggggaatttgttgagataccctattgctgactaagtttcagaggatttgtgaatactcagttgttaagccaatgaggtaatgagcatatctgctgtgcaaatcttctgaaactttgtgagaatataataggctacctgattgcaatgccaaaaaaattctgcaaacctttatgccacaatctttttatcctggttaccttttctactttaaatctggtatacctttttttgtttccaacttctgttccaatctgccaagtgatgtaagcatataacaaaatttaatgcctatgtcattgtgctccatcacttggaatgtgtgtgattactcatgatgttggtgctcactgcgtgacttaaaccactggctgcttagttatagaataacatctgactattgtggatgatgcacaacagaaaacaccaaacaaaacagtggcaactaagaaggc

SEQ ID NO: 10096 - DNA, 565 bp, Oryza sativa
  Intron number 1 from transcript LOC_Os05g44560.1 (locus LO C_Os05g44560) derived from phytozome v7.0 (chr-ID Chr5; po s 25862704 to 25863268 reverse strand)
gagcgtggacggagatttcgaggggctccaggcaggtgaggcgccccgctgatccggatgctctcgggagtttgaattctagccctagctgctcgaggtttgggttgctgcgagtttttgtgattttgggggtaaatttgtggcgaggaggagtggtggtcggcgatgggcgaacccgctttttctgcgctctgatttagtggttttcgagttggaattcagctcagcgacctcagtgattcgtgcatattcttcctctggttctaggcttctagctatcgccagcccagctattgttcagttactatgttttagtgtttgaagttagctggcgaccgctggattttgaattttttgctgtttcgatagtaaaatgtttgccgaagaagaaccgtgtgttaacccgtttttgtgccggagggttcaaaagttttattattatcatttttgatctgagatatcagttccgagctgccgatctgagttgtgatttttaatttctcatacttgctttacatgatggtgcaaaaaacattgtagcggatcggcgtgcggaagtgattga

SEQ ID NO: 10097 - DNA, 707 bp, Oryza sativa
  Intron number 1 from transcript LOC_Os08g14830.1 (locus LO C_Os08g14830) derived from phytozome v7.0 (chr-ID Chr8; po s 8923865 to 8924571 reverse strand)
tcgcggcacacctgcaatctcacaggtgagctttttaccagagcaatagttattcgcctacatatgcaagctaacatatggagatctgatctttatctattacttctgggcaaaatgtaagtatttgctagctagttgtatactagtatcttgatctataaacataagtaaaacggtcgtttatctaaatgtagacttttcttctttcaaaacgaaaatggactctgcattttaatgcttagattaacaggaaaacaaaaactttgaggtgtacaatgattttttattttgtatctgaaagtttagaattggagctgtaaaaactaccggtttacaacaatagtttggaagctttgaggttgacaatcatatttgacatttgattatttagactgttattgaaccatatatataggacctaaatctttttttttacacaatcaagcaaacttcatgttcattttttttaatcttatgtttttgtatgtgagtaattttacagttcttaagtatcttaagatatctaaaatttacactaagaattttgatgccttgagatacctagtactgcaggtatcaagttctacacttgaaaaatatggtacctcataatatcttctaaagaacagtaaaattatcctttgtgcgttgtggaatatccattgatatatagttttccatgtctgttaggtacttaattgtaattg

SEQ ID NO: 10098 - DNA, 615 bp, Oryza sativa
  Intron number 3 from transcript LOC_Os03g45180.2 (locus LO C_Os03g45180) derived from phytozome v7.0 (chr-ID Chr3; po s 25513137 to 25513751 reverse strand)
gggtcctgcttgttgttctgattgtccttttccaggtattctcaatcaaataattttgtatgtttctttttatcattgttggtatagacacttcgtattgtggctggccagcagcaactgcctaaatagttcctagacaggctaggtgcttgctaagggaacaccaacttactgttcaataaagactcatattgaaagacatgaaaatacaacattgttaagttaactggctgcattttgttattggggcacttccaccaagtttattattaaggagtaatatacattgttaacttactgcatttcgctaaaacacctcactcttgagtttattcataatattttcaagtctaaacttagatctcttgctctaattagcgaagatagttttatttttctcttagtttcctgtaaaatagagcatgaagcaactctaaattctgtgacaagaccaagaagtaataacattttcttttgataaggaacgatcagtgactcaattttaacaagtattttattttgcttatggaaaaatgtgttctatcaaattgattgatggtctgtcctggcgaaaaaaaattgattgatggtctgacctatttttcgttatagggg

SEQ ID NO: 10099 - DNA, 674 bp, Oryza sativa
  Intron number 1 from transcript LOC_Os03g45180.2 (locus LO C_Os03g45180) derived from phytozome v7.0 (chr-ID Chr3; po s 25514394 to 25515067 reverse strand)
cttcgattccgccgccgtggggcggtccatcaaaggtataatcgtgcccgctgtttggtgcaccatgggccggatttgggactgctgctgcgtttgcacggggatcgtagcgccgttctatctagggtttaggggcctttggggtggtttggggttttcgctgtaagatgcgtctggtagctgcttcatattttaggttttcatggggcttagttatagaatagggttttggagttggtttgtggaggggtgattggaaagttgcaactcttttgtcgcgaataaatctgcagtaacatgcctctccttttacttcagaaccaatgcatttttgataatgtctcaaaatttgttttgtattcagtggtttcggccttggctgaaggataagtattgtcattttgaagtatacagatggatgatttttacctgaataacatctcttaatagctagaccgtacccactttgttccgattcacctgtgtgtttggtatgagcttcttttcatgtatagcccttttacttacatgttccttttagcacaacacttggatttttgtatgataatccccttgtaggtttgcctatatggttccaatgtcctattattattatttttttgtgttccaatgtcttctacctaacatgctggtctaattgattacttccgcag

SEQ ID NO: 10100 - DNA, 1050 bp, Oryza sativa
  Intron number 1 from transcript LOC_Os06g07660.1 (locus LO C_Os06g07660) derived from phytozome v7.0 (chr-ID Chr6; po s 3709419 to 3710468 reverse strand)
actactaggaggttttggaccactgaagagcacaggttaatatgcttaattctaattatatggatgatatattatatctggtgttatgctttagttttccatgacatgaagtctttgagcaattctatggtccttgaggagataccatgaggtatcaaaaatttagtgtaaaactagtaaggtggcccacgcgtatgcgcgggcacttatattgttgaaaggtaagattattgtttgttcagaaattttgtctcagattcagggcaaactaaagtttcgataatgttattttataataatttaagggttctatttttcttaaggtatcttaaaaaaccattcacaaacttttgagtagaagatggattaagtacttacgacttttgaatcatgttttttttctcgagtaaataagaaactattgctagttaattatcatacagttcgtatatacataccgtgtagtatagccgcaaaattaaaaatgcgagtgcaaggtactcaaaattattttgattaaatcgtctcatgaaggcgcatgatatagtaataaagggagggaagcatatgcatgggaaaaaaagaagaaagagaaaaatgaaaaaagggaggggaggcgtacctacccacgcacgcacatgcgtacctatgtcgaggtgggacctcgtagtatttagtttattttaagatcaatttaatctaacggtttataatattggacctaccgatttaagtgaaaatctaataatagatactttgatttttttttcttagaatttctaatatttgccttaatttattatagcaccacgtggcagcttgagagtattttaaggaattttaaatgactaattagaatattaactgcgcaatatatttgtatgggacatatggtaatatttgttccagctttgtccatgtttatatacatgttgagagaaattaattttgtggctagcaagccattagatgtctaattaatagcaattaattttgacacttatttacaattgttcagagcaactcttatatattcatcttacgactttg

SEQ ID NO: 10101 - DNA, 971 bp, Oryza sativa
  Intron number 3 from transcript LOC_Os03g17730.1 (locus LO C_Os03g17730) derived from phytozome v7.0 (chr-ID Chr3; po s 9863583 to 9864553)
ctgtgccctgtgagcacttcgatactgcattcaaggtattgcagtggaaaacattgcaccttgtgtgctgtttatgtatgctgtagatgcagcattgaagatgatacacgtacaaaaaaatgtctacaaacatattagaaaacggatgtgcacattgtgattatatcttgatttttcataactaaccactaattatatccatcggttgaaatctttgttagttagagtttagtaaagattctttagtatgtataacactactatgcttatttatcacattgttatgcaaaggaacaatcctttgtttgtccttaaaagttttttagacagtgttcagtgctacttggcatgtcaagttctggaaataggcatgtaagggtccttacataatgaccagatattaataagttgttgtgtaacaaaatattattttctaaaaatagtatttggtggacacttggacaggcatgtatcaaagactgagtaatgttatgaacattatgtgttcttgtttcccttttaccttatgtacattgaagtttgtgaattatgtactccataaatgttacttgtgtggagtatttgatttaattagctgattttcccagccaagtttgacattttattttagttctgttttgcaaacaaaccaaagaagtccatatttgaggtgcttgatttcatattctattagcacaaattgatcttgagatctctgtccctatgttagacagaggatttgagagatcacctattcgttctaagcttttaaacttttggatccaccaaatgaagggcttgttttaactttttatgagaatttctatcatatttattatacttttatctatcaactgtaaatcacctgcagtcaaattttattgtacacaagcaaatagacataatgtgcgttgatgccccttattgcttttacaggctgttgaaaactggttagctgacagggcagtatt

SEQ ID NO: 10102 - DNA, 1036 bp, Oryza sativa
  Intron number 1 from transcript LOC_Os03g27390.2 (locus LO C_Os03g27390) derived from phytozome v7.0 (chr-ID Chr3; po s 15686649 to 15687684 reverse strand)
tcgtcgtcctcctcctcctcatcctgctcgatctggtgagtgcttgatttgtttttcttggttgggtggggatgtggtgctctgctcgatcgaccccgtgatgttcttctcgtaaagattcgtgggctagtttggttctgattctgtatcgacgtgtctcgcgttgtctgtcgctgcgggtagagttcttcagccgctcggatactttcggtcttcttccccatggataaaagaggtttgtgtagtaagtgttagtggtatgtattctgtgtatactgtaataactgttgtgttgttgagtccggatggtgtcaaatcggttggtgtttttggagattttaagatgttcctcgctaggtaaaaaaagaacaaaacaaagaaactggggaagttttgtttcttggctcatacaggggatatttgcatgctgaagtccggtcaaacgaccaaatttgcttcttcccttttctcttttggaggctctgcttcttcccttttctggtttccggagctagatttgtggtttcttgtagtcaggtcgaatatggtgtgtgaagtagctacattgataccgatttcattgtcaaaatcacatcttggggaaactttggagcttgaggtggttttcatttagatggatgcttgtgcataaggatttacgttgtgcccacgttaacaatgccgagcatatctttccctcttctgttttcttttgtaaatttaggcctagttagtttttttttaatctggaatgttttaggaatttactatgttattagttaagttaggaggttcagagatatcttgtaatcttatccaccaatttcacttaactaatgggagctggaatttgagtgtagtgcttacattcttgcccaaatgtttgactgcatcgatttatgttaccaggcaggagtttgacataaacatcctgtattaggtttgctgcatggcatgtttacagaaactattcagctaaccaaattttcctcttaatgcaggtaattctagtgttgagggtctgaggagctgaaac

SEQ ID NO: 10103 - DNA, 936 bp, Oryza sativa
  Intron number 2 from transcript LOC_Os08g30020.6 (locus LO C_Os08g30020) derived from phytozome v7.0 (chr-ID Chr8; po s 18450489 to 18451424)
ggagcggcgaggcctcttatcaccacgtgtggccggtaatactactactactacaaagcacactctcttctgtttctgacaattaattaatcttggagctgtatttttttttgtccttttttcccgtgttggaacatgttttttttttatgtatatatttttagtaagtatcttgtttttttttttagttttgtcatttttggtgcaatcatctaaaaaaagagtttaagagttctggtggtgctgatgtagtattttgtttgattcacggtttaaaactacgaaaatctttacctttctctttctttactactggctttatataggattctcagttattatcggtttatcctaaaatttggtcaaaaacatgtctaactgaatggagtgttcctaccttgagttttttcaggggaataaatttgctggcttaattgctaaagactgcagttttgttttgtggaagaacactgcacttatctttcgtgatgaccctgtcaatagtagttcatatactgctctccattttttataacatgttgattttttacagcatatttataggctgtcgattttttgtaggatatttcgaacatcttttatactccctctgttttatattataagtcatttgacttttttatagtcaaacttctttaaatttgaccaagtttatagaaaagcatagcagttttttaaacacaaaccaaacatactataaaaatatattcattattaaatttaatgaaactgattttatattttagatgttgctaaatttttttataaatttagtcaaatttcacaaagtttgactagaaaaaaaatcaaacgacttataatatgaaacaaagggagtatatatatacctctcgtttttgtgtcaatatgccgttaatttgttgatttaaatgaatcactttgtttttgcagccg

SEQ ID NO: 10104 - DNA, 355 bp, Oryza sativa
  Intron number 1 from transcript LOC_Os08g13014.1 (locus LO C_Os08g13014) derived from phytozome v7.0 (chr-ID Chr8; po s 7729689 to 7730043)
atccaaccccgaggtcagttcctctggatccagccgattctccccttcctcatctcctctccatcgcagcagcagttcggtcgtatccgcgcagtgacgattctcacttttccatgatgttgatttcttgtttatatatcttctcaactcgggaatcatgttttgaatttcccaattgctatgtcaaatctggaaagcagttctaatttgattgcatatgcttgccaataatcgagatgtagtctcccccacgccaccacacatttttctatttgtaactctacaatgcttgtgtcaaatcatgcatgtttttaatttactttgttgttttttctgtttaggcctagacttttgt

SEQ ID NO: 10105 - DNA, 929 bp, Oryza sativa
  Intron number 2 from transcript LOC_Os08g06070.1 (locus LO C_Os08g06070) derived from phytozome v7.0 (chr-ID Chr8; po s 3315191 to 3316119 reverse strand)
gttgccactgaacaaggataaggaccggtataaagaactacttgtctactctcctttttctcggattgatttctattgttgcttgttgtagtggtgattagcaatgcacctgttacagtacaagccatttcaatgttgtttatctagctttatcatcttccgatttgaagataactttgtgtcaagacaactgaggttggtcatttactgatcatagagcgtaagtcctttctttgtgtgttgccactaagtgcccttcatttgttgttagagagtactctcccaaattttcggtcatttgggcagcttgaatttaggtgtagtagaccgagcagaaaattgaattattccatgttcctttaatttaccatgtcattttgtgaatgctgacgattagatctttgtgaagaatttatcttcacaaaaaatcacttcatgatccttgatgaagtaggtcaagtggtggtattggagcgttatgcagcagccatgtttttcatggcttgaaggataaattaagttagaatatttctggtagttgtgtaattctcttgacaggaaatgattgccacattctggtttatgtatggttcctgaagcacactgtttcttagaaaaacagtcattatcactagctacttcattgtgtatgagagcttgccagtgcacctttgttacacctacacagaggtcctgtgccatttgcttttgatttttttttttcaatttgcatagcctcctctgcttttcacttttattccgctatccagaacattagtctgtgttgaatttttctgtttctctctactgttcttcgccgtgcatggtgctcttaatattattttaggatgtctgtgttcactctttgttttgctatccgctacctctttgcagatataccaaatacagaatcacttcattggagaaga

SEQ ID NO: 10106 - DNA, 589 bp, Oryza sativa
  Intron number 2 from transcript LOC_Os04g44540.1 (locus LO C_Os04g44540) derived from phytozome v7.0 (chr-ID Chr4; po s 26185794 to 26186382 reverse strand)
tccgcctccggccctgcaggtttgggtttcttgcccagttgctagataattagagatcttccactgtttttagtggtggtaatcccatatcgtgaattgcgttagggcatgtcgatatgcatagctttccaacacctacaagctactgggggtttatgaggataggtgatgtttgagttttgcggttagtggtgagtgactacttgctcagcctgccatccaaaaatcatggtagcattgggagactgaaaattctaaaatggatggtaatttttatgtagtgcccacattataaactatcaaatttgtaaaaagaacttgctgcaaattgatcatattggtcatacttggcagctggtgttgtaatagaattccaggccacctctttagtttttggccatattcttaggtgtctgttccttataaaatttcctggtcgagaaatacagggagaaaccatgtgaatcctgcccttttttctaattcctgtgtgatgatttctcatcacctatatatatgttacattggaatgaaattattttcctttgaatttattgtgtgtgcttttaggcctttacagtggcattgg

SEQ ID NO: 10107 - DNA, 605 bp, Oryza sativa
  Intron number 1 from transcript LOC_Os03g08060.1 (locus LO C_Os03g08060) derived from phytozome v7.0 (chr-ID Chr3; po s 4117045 to 4117649)
atctgctgctgcaacaaggtatatctctagtgttcggtcttttgttatgattgttgagcctagcacttgtttgtacatattcgtgatgctattctagatacaatgaagtcgcataatctgttttattcactatgcatctaatacttcaatgtttgattcttgcatatctgtcttcttttatgattgatctgcacagcacttctgtacatattcgtgatgcttgtcctgaatactcttgattacatcaatgaagtagctttcatttgaacgtctagttgtttgttactttatactaagcatctatttgattggtttaggttatattttaaattatctggttgtggtgttgtacttcattttgtcatttttatcctgctggaagttgcagcccctgtcctgtttcattacatcttatctggtcactgtgtatcttatatgctgttaagtaccttttgatactcctacatctggtccctgctcttgtatatcttatatgctgttttaagtattgtttcatatgatcatatcttgtatggttatctttgtttggttgccaactgaccccctgctgaggaaagttattgttttcctttgttctgttacag

SEQ ID NO: 10108 - DNA, 717 bp, Oryza sativa
  Intron number 1 from transcript LOC_Os04g36560.2 (locus LO C_Os04g36560) derived from phytozome v7.0 (chr-ID Chr4; po s 21891197 to 21891913 reverse strand)
gccaacgtctgccccatcgagagcctcgactacgagtaagccccccgaagcccgtgacctctctcttctgataattccttggttggggaaaagtttgatttttattgtttggcggtgacgatctgattcttgacggatgatccttactatactagtttattgtttgacttgggcacaagaaagttaggatcctgccgtgcatttagaagatgaaaacatggtcctttttgatattttaaagggggaaacgggtgatcttgatgtgccttttgttgaagttcgaaaagaatcagataatatattgtttaacgaacacttgctgtaaaataataaccatgtaatagattgtacgatgatgctagtgaaaaagaaaagggaattttgggctttgctccggggacgtgtcaatcatttctcttcatgtaaacgaatatcatatataagcaggactgtgttttcatttttgttgcaaaaattttagacggattaagatgtttctttaacggactgcaacatacagaagtaatatatatcaagaaattgataataagttaactacaatagttcctgcaatgaatttctaaggaagccagggattgaatcctgaagagaaagaatagcagtgtgttcaagaatgcacagtgcttaattgtttactttgcccgtttaattagtcactctcttaattttataccgtgtatttcagaattgtggaaa

SEQ ID NO: 10109 - DNA, 437 bp, Oryza sativa
  Intron number 1 from transcript LOC_Os05g30780.1 (locus LO C_Os05g30780) derived from phytozome v7.0 (chr-ID Chr5; po s 17781632 to 17782068 reverse strand)
gccaacaccaccgacgaggtaaattaacatcgactagctagttgtttattaatgcttggcttaagcgcttaactcgatttgttaaactagttttatcttaagatttataatgttaaatttatcatcaagaacttacttaagtacaaattatgttcgaagtaattgaagaattaagtgtgaatttaacgatcactaagtaaaacaaatatatgataatctttttaagcgaggtaaatgagtagcccgtgagatggctcgttaattacggtcttgagcaaaagctcatcttactatgattacgagttagagccgattgaatccacgagcttttgagctctttgggctagtagagagaggaagccttactatatcaatctgaatgtcatttttcttttctcattctgcagctagcactgttattgaaatataccgtataa

SEQ ID NO: 10110 - DNA, 734 bp, Oryza sativa
  Intron number 1 from transcript LOC_Os05g31900.1 (locus LO C_Os05g31900) derived from phytozome v7.0 (chr-ID Chr5; po s 18506491 to 18507224 reverse strand)
ccttctgctaccattgcaaccactattgtatcactgtatgctattgttctcttcttcccttctctgttggttcctttcatatgcgcaaatgagttagatatgcctattttcatggtttacactgatatcatgtttttttttcatattcctgttgttgagagtacatcgtttattgatttacgctatcataatttaaatttacatcgttatgatttactctcttattttctacatcaaatattaaggtgatttccttatattgtcaataattcaaaaaccttattatagccaaatatcatctacggttaagaggctcgtataaaaaattgattttcgcttatggttcttaaaccgttttcatagaaccatcttcttatagacaagagtagttatggtccaccactccacctacaatctaaggggcctcataaaaaaagatcgattaatctgcatagtggaccaagtcaattacgtagtcaatgcaggtttgtgtaccctgctatagctgagaacgatcgatcaccttttgagccagtcctcttaatcaattggcatccacagttgacaagatggcatgcaagaatctaaccatgcaagcggtactcgatcaacacgttaattcttattattaccgcgaatatggctgtgttcagttacacgttaaaattaaaagtttaaagaaattaaaacaatacgatgaaaaagttaaaagtttatatgtgtagaaaagttcg

SEQ ID NO: 10111 - DNA, 568 bp, Oryza sativa
  Intron number 1 from transcript LOC_Os08g32970.1 (locus LO C_Os08g32970) derived from phytozome v7.0 (chr-ID Chr8; po s 20457671 to 20458238)
tacgaccgctccctcgagaaggtgatctaccgatcatgcacagcagcatatgctttggctttggttttctctctctctgaatttaatggaggacgcgtacgtgcgcacatacaccactacacacggattcatttgacgcatggcgcttcatacaagacacgtatgtgcacgcacaccactacacaaggattgagaaacgcagaggggtcttccggccagctccacaagatggtgggttggctggattcaaaacctcactcctatttatttgatattaggtcattccttaatattcgcgtttttttactacacaagaactcatatgatgcacgtcgcattacatacacagtattgatctatgagtacgtccctttaacgtaaggccagatagatatagtttagaggcaaaattctaacctcgttaaaatactattgaaaatgcacgcgcatatataatatttatggaaaccaagatttggtttgtgttttaatttctttttggaacaaaatttttgtgtgcgtttaattgtcaggctgtgaagagtgaaacttcagggaactttgggtt

SEQ ID NO: 10112 - DNA, 661 bp, Oryza sativa
  Intron number 1 from transcript LOC_Os08g31000.1 (locus LO C_Os08g31000) derived from phytozome v7.0 (chr-ID Chr8; po s 19137724 to 19138384)
aaacgtgctgcatatctcggtataccgcggcgaaggtatgtatggccaactccttgtttattttccattcataatatattccggccattgaaactctgcaatcaatcctgttatgtgccgcactgagacccattgagactacaggatttctcaagatacctttggttctccttggacatctgtaccaagtaaaacatccaaagtaaccagccataagaagaatgtgcaaacgaaacaaaaaaaaacacaagtaaattaatactagctagtatcatagtctctcaagacagtgaaagaaatgctgcctaatatcaaagagtatacttttttagagtattcaaagtatgcacagcatttataaagtactcctaaaagggttttacacatacgagtagtctggccataagagatggatacataatatttgtttatggcattacaaaatttgaatttggaattcaaatatcattaattgctagctctggcactaatatcacttccttcttttataaagtgctggtaattcaaaaactagtggtgatgccagttatgtactggcgttgattgggtattactattatgagccttattttccctttggacttgcttaaccgacgacaccgaattgcagcgctgtctatactgttagacaagtgcaagg

SEQ ID NO: 10113 - DNA, 809 bp, Oryza sativa
  Intron number 1 from transcript LOC_Os07g39540.1 (locus LO C_Os07g39540) derived from phytozome v7.0 (chr-ID Chr7; po s 23689549 to 23690357)
tggtggtggcggtgcgtgtggcagcgccggtgggtagtggccacggaggagatcggcgtggtgtcactggtgttgtcctcgacggtcggtggcggcacggagatgtcgagggtgggcttcggcggcgccggtgtggccccccgaggtggaggttgccggatgttgtatcaataatccctaatcctatacagcaaaataagaaaatcatgaggaagattacggtggtgcaatgtttcatgaagcttattgcactttgcttaaaaatgaaccatcttggtacagaattagtcaaaagcttactgaagtcataagttcatcttgaccaaatctgtcaagaatccagaaacaattggattgtcctaacatatgcatggtgatggtgatttcattaatcaaggaatgaatctctactatactgataattgacatagatggtgcatcatcttaaatattctgtcattgccagtgaaaatcgaattttaaggtttgacttctgaaatgtgtaaaatcttaaataaccagatactattgttctttggagatgtttagacatgtgcagacagttatgcgttgttcatagacatagatactttagttatcattatctaaaaacatgaattctttagataccaaaacgatgctttcggtttttttttcttttgattgattctggattatattaagaatcgtatgatcaaatcagcggcgactgatggggggagaggaaatatatatagtactggattgtggattaaaaaaaaggagggaggatgatttctgtaccttaatttcggcgaatcagatcgagg

SEQ ID NO: 10114 - DNA, 632 bp, Oryza sativa
  Intron number 1 from transcript LOC_Os03g62379.1 (locus LO C_Os03g62379) derived from phytozome v7.0 (chr-ID Chr3; po s 35329312 to 35329943 reverse strand)
gatcaaacgggaacgttcaggggtaatcgcttaaggtgttagacaggactctcaggttcagtggggtatttggacgttttccttttcttttggtcatgtaaacttttcttgtggagagtctttcctgtttcagacaagttatttccaatatcaaattgatgctgctattgttagcttcatcatctaaattgtttgctattgttagcttcatcatctaaattgtttgctgcaatttgatggtctgctatacagcttcacttgctatctttcagtgatatgtacatacctgatgcaattcttattttagattgaccgcaatcttttttgtggcacttctaataattgtttcattcaattcaatttatttgactattgaacctcttaaagtttcaacagtctcatttgtcttctaacaaaaattctcagtgtcttttatttagacattgttttctttgtaaagcgcaagccattggagcactcttgtttaataatgtctcgaatatatgttcatggggaagttaatcgtccacacgaactacagcttttagctgaaaatgatttaggcgattcaacttatctgaccctatcatgatcttggtttgtcttaccacagcacctcccaatttggagat

SEQ ID NO: 10115 - DNA, 680 bp, Oryza sativa
  Intron number 1 from transcript LOC_Os06g07914.1 (locus LO C_Os06g07914) derived from phytozome v7.0 (chr-ID Chr6; po s 3845984 to 3846663)
acgagctcctcgtcgtcgccggcgacgagattgaggtaatagttataaaaagttggtaagatagattatgataataataatacataagagtgatacttcggtgctttctattggtggtattataccatcagtattataaaggataattagtaatttactattataatgattaaaagttactttgttatttatgttttccttgtctaaatagatatatgatcattcattgattgtgttggcatcgcttatatttcatcgaaaaagaaaaaaaaagagaagaaaaaaaaggtttagtcattgctaaataacgtttatgccctcgcatctattttttctaatactcctccacgtttctaccaccgctaactaggctggtagtataaatagatctgagctcttcaatcaaatgaaattaacactttaaattgatttctactaccagtagatagccctacagtgaggctccatgcgtaaacatggaagtttaaattcgatctacatttactagctgattttattgtttctcttttctagttctagattaaatttagtctttctataaatttatgtcatcccatttgatattactattttcttaattttttatagctatttgagtaaaaaaatagatctgcttgaataaaaatttaagttgtttgcattgcttggtgttgcagatc

SEQ ID NO: 10116 - DNA, 892 bp, Oryza sativa
  Intron number 1 from transcript LOC_Os03g07430.3 (locus LO C_Os03g07430) derived from phytozome v7.0 (chr-ID Chr3; po s 3768796 to 3769687 reverse strand)
gcgcctgtaagtttccttgatactctcttcgtcgaaattccaaatttgtcttgtatgtatttgtcactttcctatcatagctgtaaagctgatattggttgcttgggatgttgggttgtttgtcctactagatcgtggatttattgtgtgttgaattgggtttagtactttggtttgactatgttgaagataaaattttaagatcagagcatgtgttctgcaactagttatacctgttggcctagttttttttttttttttgcatgataattttttttagcctagcttgttagttgctgcttttgtgcagcttcacttttgtttttgttcctctttcttacttctatagagtaaacaaacaatagcatggatgcatggataaaatcatgttttctctagtccttgggaggcagaggtaatttttcgtgttgatcagactggattaacactatgaggtacatgtaactctcaatacctcccaaggaccaaaggaagactctgatagaacatagaaatagggttcattgaaatatcataagcttctattgttgtaaaaagggagtcggatattttctttaaatgaatggcaggaaaatctgacttggtagtcctgacgacctgaccatacatatgcagagttctgattgaatttgaacagaagcggtgcttttggatacattttgaatttcacattgctttgttaataacaagttgttcttatgcacatttcattaatttcttgttgagatagcagacccatcaaaagtgaccagcaaaacaagtttatcatctgtcccttccacgtttaagagcaattcaagtcgctcgactttgactctgccatctatgaaggacagaagtgagcttcctactcctcggacggaaggtgaaa

SEQ ID NO: 10117 - DNA, 856 bp, Oryza sativa
  Intron number 1 from transcript LOC_Os07g42760.1 (locus LO C_Os07g42760) derived from phytozome v7.0 (chr-ID Chr7; po s 25614134 to 25614989 reverse strand)
ggcctcctgcagaaaaatcgccgatctcctccgcggtaatcacctcgatcccctcctcgctgcgtgcgcgtgcgcgcaccaccatttgtgctcgcatgccactcggacgaactggctatcagaggagaggaggtgcgggccgggagggtgcctgattgattcgattcaggattggcgactttgcgtcgagggggagccatcgcttcgccatggcgaccggcttgccggaggaagagacgacggggagagtggcggcttcgcacggtggcgtttactgttgcgtggggaatcagcttaggcccgcttgatttttagatcattgagcacattattatggggaattatatttacttatcatttagataaattgattatttcacaaaattaactcaataaaatagttttagtggtatagaaggaagttttctaaagaagatgtattttcgaaccgtgggacaaataattcaaaaaaaaatctgaagggtccaaaccagaggttattttgtaaaaatccagatcgctatacctaccaaatggggttatttgtagcacaaaattctcgggtagcgaatagcagttcagaagggggctattttgtaagaaaatggcttgctgccaacattagcaattaaaattgcgggttatttgtaaaagtcaatgatgggctattttgcaaaatattcttcactgccatggatcaatcatatgatcctttgataatttaccttatgtttccagaatgaaaaatatgcagttgaacatcatactaatatggtctacttgcttgaatagtattatattcctacaacataagctaatgaacagttttttttcattgtagcggggcgaaatttgg

SEQ ID NO: 10118 - DNA, 516 bp, Oryza sativa
  Intron number 3 from transcript LOC_Os05g46290.1 (locus LO C_Os05g46290) derived from phytozome v7.0 (chr-ID Chr5; po s 26776511 to 26777026 reverse strand)
agttgctgaagctactaataaggtcgcaggaggtaaggaccgagctctaggaaattactttacttgagctgccatatgaactatatattcgattgagctttgagcatagcagattagcatcccgtttgatttgtaagcctactcaatgcaaacaagcatattgttaatctgttttttctgctatatgtgttaatccttcttgtcagctagtaatgaatgtgtcgtcaggataggtaaattctgatagcatgaatcaaaatattgattcttaagtaaactcacttgagtgtgatgctcagtgacttaagttctcacagtggataatggcggcaatagtttctgatatgtgtggttttcatgttctgtttttttttttgggggcctcatcgcaaacattatcaaccctatgaatagcataattactagcatgaatataatattcagtgtcactcactgcatttctggttgtatggggtaacaggtaccacttgtgcaactgtacttacacaggctatt

SEQ ID NO: 10119 - DNA, 759 bp, Oryza sativa
  Intron number 2 from transcript LOC_Os04g43922.1 (locus LO C_Os04g43922) derived from phytozome v7.0 (chr-ID Chr4; po s 25855025 to 25855783 reverse strand)
aacaagctggtgtacgtgcggacgcttagggcgaggtactcaagctctaaccttcctcggattcactgacgtatcatagaatcaattttccagcggttttacccgtttcttatgaaccttgaaaagcggttcatttgcgtgctcctttattggataactctggcagaacaatggtattttccctgggcgttttgttataggactagcttccgagatgagagcggggtttatgttattgtaccgagtccagtagtagattttgtggggtggatgttgatggactgatggagtatatgtagaatggggattatggattcaatttcgaagcactcaggcagtggtaacaacttgtgatatactgtgctgcagctggatttgttctgagcctgtaatttgcaccaaatcaaaccatagatttgatatattttggctgtggaaatgattggtacagaccattacaacttctttatgaattcattaaaagtttgctaccatggaagagacatactttgaattactttacaagttcgtaatgagttctgctaccaaaatacaatgtcctagctacttttatttaaaactatttggtttctggttttgaatgtctggacaatctgaatgtaagaattgctcgtgtgatttctgttggtggagaggaagcgaggggagcttcatctgaatgagcgtgtcaattcttagtccattttctctctgacctttttaggtataagccggaggttggtgatatcatagttggcc

SEQ ID NO: 10120 - DNA, 897 bp, Oryza sativa
  Intron number 1 from transcript LOC_Os05g40270.1 (locus LO C_Os05g40270) derived from phytozome v7.0 (chr-ID Chr5; po s 23591066 to 23591962)
gtttaatttggggtagtgttcttcttcgcaacaaggtatattctccccgcttgaatcatgggggcgcgtttgcctgtgtgtgagttttttttttttgtgaatttttcggtggttcggttggattattctcagccacattttaccacaggaatttgctggggttttggcgttccttcctcttttatataggagtagtagtcgacaggtcccatctcgagttttcatcctgatttgatgggattttcggcatttctcgcgatttttttgcacttgttgagttggtactagtacaaaagtaggagtactactactagctagtagctgccgctgcatgcatctgcggagtttagttgggacgtcgtggttgcgaattaggatggtgttactgtcaggtttcgttggcctgatgttgctgagtggcagatgtgttatttgtctctagtttgattgattttgatcgcacagagccattgcttgagcacaaaagcgactagctaggcaggttgttagaggcagaagaagtaggtacaagtaaacgatacaaatggggtgatcttcttttctgaagaactttcatgtcacttgcatactgttaccgtcaaatttggccatctgtttcagttttcattgatccaactttcattaagcaacggagtatagagaaccggagtgatttgttttcttgatattggggaattttctgaaccccatgtaccaaactgggcatgcatatgcaaacacccaaaacctcgtgcttcaaaaagaggaataaatgatatctaacatcataaacaatggtggtattcataaactcttcttttttcctagttaggatcctgaaattttggaattttgctgtcgtggatatgactagttgctgctgattatcttgaagac

SEQ ID NO: 10121 - DNA, 990 bp, Oryza sativa
  Intron number 2 from transcript LOC_Os03g55030.2 (locus LO C_Os03g55030) derived from phytozome v7.0 (chr-ID Chr3; po s 31288469 to 31289458 reverse strand)
caagctgatcgaggacggcgtcctcaacgagaagggtatgtgtaatttaaattaattaatcccaacttgcgttttgctttattgactgtagcgtggttaattagtcgtaaaatgtattcttttcgttggtttttcatttgggtgtttattgactaaccactcataaatctctctggttaaaaaaactagctgagtggtccgcacaattacacggttagtatccatataacattatctatttctaatatgattttacttaaaaatttttaaatagttatatcgttattttaagattttgaaagattaaactttatcatccgtgtttatagccatgtttctattctctatttttctagtttttaaaagtcacccatatttatttattctccttagaacatttaagaattggatcatgtagtttttagagtttattgtcttattaggtttggtttttctaatttttagaactctcatcaaacgctaccactatacttatctatggcccggcccgtctattgtctcttccctttattgacattaggatttttaaaagtcgaacataattattgcttggttattttttactttataaaaatcggatcgtaaatcagatgaataatttaagagaaaattccataagaaaaataatacatgcactttttttttgagaatcaatacatgcacttttgagtgtactagtagtaactagatatgagattgagttagctggttatatcaatacatagaactgtcttattgtagacacgtatataaattataggtagatttacgtgtaaaagttagtgttttcttaacagagtaactttttattattaatttgacagagattaataataaacaatcaacaattagtactgacatgtagatgtgaattgaaattgccaacttgtagagatttttctcacgtgcgcgatcgaacattttacacttgcagggtggccggagcggcaggagacgctgcagctggcg

SEQ ID NO: 10122 - DNA, 1062 bp, Oryza sativa
  Intron number 2 from transcript LOC_Os05g18470.1 (locus LO C_Os05g18470) derived from phytozome v7.0 (chr-ID Chr5; po s 10673501 to 10674562 reverse strand)
ggaggcgtcagtacaggccggacacaatccgctgggtacgcgcacgaccactagctccaattttcattcttcttcctatagtcctttgttgttctcgctcattgcgtactctctatgttctaaaaaacatcaatcctaaagatgagtttggacaagtactaagatatatgattagggatttttaagacttagggattacgaagcaggcaacccccttaaagcagcagtcaaagttttcgaagcaaatgcgtttacatttgatgtcattagcttaattttatacccagctcggagagatataccaatgcttgtagtcaatcatttcgtggagaagtaacaaaaaaaagtgtgttatatatataaccaactactccctccctcctattttaaacatagccacgagttttcgtgtccaacttaaataatccttcttatttaaatatttttatgattaatatttttattgttattagatgataaaacataaatagtactttatgcgtgacttatgtttttttatttatttttaaataaaacggattattaaagttggacatggaaacttatggctgcgcttagaatgggacggagggaggatcttgtttcaaatgtcaaatagtattactttatgaccggagaagtacatgttcactaccaggatcaagcttttgtgacactgagtgagagggtggttatgtgttcttgtcagaccaacatgatagcataactttccaataaatctatatatgtaatttgaatttgatggtcaaagtttttaaaagtttgatcaaaacttattctaaacatcgaatagttataaattaaaggacatatatcatgaagggaatatctttgtttttttgaaactcatgaagggaatatctttatagtaccaatatatgttttgtctctttatgtatattaccgcgagacgtgcagtagattttttttatattgtcttattaattctgtgtatcgttatgaactgattagaataaatgtcatctgtattttgatccaacgctaggaagacattcctggaagggagcacgaagctaggag

SEQ ID NO: 10123 - DNA, 894 bp, Oryza sativa
  Intron number 1 from transcript LOC_Os04g52130.1 (locus LO C_Os04g52130) derived from phytozome v7.0 (chr-ID Chr4; po s 30777166 to 30778059)
ggcccgtgcccttctttgccgctggcattagctcggtaaggcacaattactggttcattttgagtgagaattttaggtgattttgcagttctagtcattgcattgccgtcagagatttggatttcttagcatcaggggtagtacactacactacgattccattcttcagctttgttggcatccgagattccgagtgcaagtgaactgtttaggtggtcagtaaaatttgggagtctttacatcgcagttgtgtgaatgatttggctattgtgggtgtttactgttcacaatgtccatttttaaacttccatgtgctgtttgacaataacaaacagttgttgagaaggaagtgtttgctagattagtgtttgcttttctgtttgaaatgtagtgatgtcattgctatcttattgtgagaacttgaaatgcataactttgaatttggatatgtagttaagcatttgaatgatgaatttagatgagcccgatattctatcgtcttcctgtatattctcataagagactaggaattctcatatatcggaaaattatgtttttaagaaatttggaacatgctgcattttgttagatgcttcagcttcagccatcatttgaagaactgcggtgaccatgtttgccatgcctgtgcaatatttcctactgtctcttgtatcccaagcactggtgactggtccactgtcttgtgctactgtttatgtgctactaattggaccagtagagttataaagagctagatctttagccaaactttgtatttttgttccacgattaaacacactcactcttgtttcaacatatcatacctttccagtaatggaattattccttttatctgcaggttcttcaccccaagaacccatttgctccaacatt

SEQ ID NO: 10124 - DNA, 542 bp, Oryza sativa
  Intron number 3 from transcript LOC_Os05g28090.3 (locus LO C_Os05g28090) derived from phytozome v7.0 (chr-ID Chr5; po s 16364395 to 16364936 reverse strand)
ttcacctacctcttcttccccgggtgagttgcctcttgctaccacgtatgcttacaaagaacaaattaaagaacaaaatgcggcatcttcgaatcgtgaatatatagtattgtaattacctttcaatctgattttctgttgagcattaatgcagcaaagataatcatctagtgatctgctctatccctctggacaaaaatttaaatatatatacatattttgctgtcttaaggagatacccagagttactaaattttactgcggtgtagaattaatttttctgttataaaatttggcatctctccgtacattctaaggaccataaattttctaaaaaggactgcagtattgctttgccgaagatcatcatatcaatggaatcgatgcgcatgccgttgccaaattttgtttgtgtgaaccaaataaccgtgaaactcaaaattcccatcttcaacaacatatatctcttgctgtgaatggcctagtcatagtatcaattgaacccaattccttgtctgtgtgcatctctaccattttgcagg

SEQ ID NO: 10125 - DNA, 944 bp, Oryza sativa
  Intron number 2 from transcript LOC_Os03g29570.1 (locus LO C_Os03g29570) derived from phytozome v7.0 (chr-ID Chr3; po s 16860522 to 16861465 reverse strand)
tcaggcccaagaagagctccccttccgggagcaaggtacgtgtgtacgagatagtttccaattcttgttcgttttttcgtcggcttaattaatttctccgagttcttgcatgggagatatatatgtcacatagagcatcagggatcaacgagtaattaggggatgggatgatacgacgatttaccgttgatacagctatccacatcaggtgctagctttccatgatcttaggctaaccaagtaaagggtgaagccgtgtttttttctttttttttttttaaaaaaaaagatgggatgagatgagatgggagatgaaagggttttagttttaccaaatggctcagtttcatattgtccctttatttatccgtcttcttttttaaaaaaaatcgtctttttttttaaaaaacaataactatgttatgaaaatatcaaagtagaggcaccgattttctatctgtttttaagctaaaactctataggtgacagagttatgtttaaacacacaccacccatgcatataaatagatttgcatgtagcataattctgactgcggcgacatgttgtcgttaggtactatgtaactagctaagaatgtcgatatatcttttaataaaaaaatctatatatttatttatttattaaaaaagtttttaaaaaccaaaacaaatctcttgttcccttgtgggtagttggctagcttttttgtaacgccaaagttgttcatgcatggtggcatgcacaatggctgaaatggacacatctaggaaaggttcgatccactcaagagtacttattaaattatgtgtaaagtgtatttggtccggggtttagctttttgcgtgctcagttctgaaactgttaagtgtttcagtttccaacaaattaaacgcgatgcttgcttgcagggcttgccgctgaagaagcacatcgacgccaccct

SEQ ID NO: 10126 - DNA, 283 bp, Oryza sativa
  Intron number 3 from transcript LOC_Os07g16970.1 (locus LO C_Os07g16970) derived from phytozome v7.0 (chr-ID Chr7; po s 9986281 to 9986563 reverse strand)
attccaaaggtcaggcccggctccaatttatatttgattatattctggagtttgtgtgtagtttgttgggcttagatggcactgctctactttattatggagagtggagacatacacaaaaacttattggaacttgggttttaagtgtcgcacagttaaatattcttcgcatgcgcatatgcaaatatttataggaaattctttttagattgtgtgatgattaatttcaccctacttcctttctagttactgacatattgtgaaatgctattttgtctagttt

SEQ ID NO: 10127 - DNA, 1031 bp, Oryza sativa
  Intron number 1 from transcript LOC_Os07g47360.2 (locus LO C_Os07g47360) derived from phytozome v7.0 (chr-ID Chr7; po s 28324197 to 28325227)
ccttcgtcgaccccgacgtcgcgctctcttacattgtgagtggtggcccgagcgaaatgcccgcggtttcctctgctcctgttgagttcgtcgcggtttctatgcttgtttggtagttgcccgatgacgatttaagcttagttgagtagtttgatcggttatattcgtttagagaacggacatgtctagcttaaattttatgcttcgtaggagtgatgctgctgatttagcatgggaatgaagtgattgcattgatgaatcatttgaagtctgatcaattcgttgcttcggttgtcggatactggaaacaattgcattggtgcagcatttaaagtttgctctttctttttttgtttgtttcgtagtagttgttgttgatgatactatactagtctatgtagatgaatcctttgatgacgctggttattatgtaatagaatgtgaatctactggttgcaattttggtattttgtgcggtttattcgagattggcagtattagcataacattttatatggtggaatcaatctctcctccttttcttttcccttttgaactgccaggctgaattcatggtgctattacttggatttgttcatgcaaggctacacgttatttttgatagcaggactatgtgcttcctcgagctacttttaatggatcaaacatcactcttagtctacaatgcccagtgaattaattaaatacgcttatgttttgaggttactgtcaacagttactttatagtaatgaaacggaattttaaactcaaaatttccaatgcatgctttatatctgaaatcctttggaccagaagaaacggaaagggaaacaaattgaaaaggcagaaatagcgaagtgtttaattatcaaaacttgcctataggtaggttgccttttatggataacttgcaacatgaatgcgatagacaccagcaactttcacttgaagacgatatattgtattgtgccaacaatcaaatctgttgaatggttccttttttgttcttgatgtgcttttttccctcagg

SEQ ID NO: 10128 - DNA, 821 bp, Oryza sativa
  Intron number 1 from transcript LOC_Os07g10300.1 (locus LO C_Os07g10300) derived from phytozome v7.0 (chr-ID Chr7; po s 5520782 to 5521602)
ccaacgcctacgtcgatttcacgtacgcgccgcttctcttctcccttgctgctactgtcacgattggattcgaatgcggtgatgcgcgtgttctagtttcgatttactggtttttatatgaaatctggatcttatgtggcgtttttgtgaataactcataaggcatcaagtgaaagaaaataatagttgttactagcggtagcaaacaattggttgccacgatatttacaggtaatgggattgggtaattgtatcggtgtaaataggtgcagtgctgtatgcaaatgtatttgtgcagttagaatttttttttgtttgtttcatgtctaatctaatggtggagtatgagttttgcctttacagctttacttactactcccttgattttcatgtgtggacattggccatcatttcacaaactttgaactttgacgtgatccatttcctggacataactactccctccgtcctataaaaaactagcctagtactggatgtgacacatcttagtactatgaatctggacattcatatgtcacatatggtcctaaattagttttttatgggatggaggcagtatctaaataatgtttattttacccttgttacttaagtacacttgttcttctcgaaggtgctctgcattctgcaatattttgttgtatctcttatattattatatcacaattgattcgtagagataagcaagtcggtaccataggctgtaatgaataagctaaaaatagtttctgtttcagacttaagatttctttgggtattaattcttttattttctggcatgtggccttttttcagcttgg

SEQ ID NO: 10129 - DNA, 774 bp, Oryza sativa
  Intron number 1 from transcript LOC_Os05g38120.1 (locus LO C_Os05g38120) derived from phytozome v7.0 (chr-ID Chr5; po s 22292623 to 22293396)
gaagacgtgagtaatcgcaagctatatttgttgtttcatatcgctgcttctgtttttccaaagaaaatactatactagactttacttttgctaccctgcattaattaacttcatgaataagaatctaataacgaacacctcatggtcacatcatggatgcacttactgttgttgcacagattatttcttgtgcttgtgatttgatgagggttgatctggattagtgacacatctcttctcttttggatatatttttgttctttaatatgtctcaaatcaatcaacagttcaaggctcttttaagctcccttctaaaactagcaggaggtgatccgcagtttatctataatcaaaaggtagcatacaattctgtgaaaatgcacgatagaagctaaattcctcaggatgctcttaattacatcataaagaaaaattcagtttgctagtacttgataagattccagcagtttgtcctctttcacgagataagattcgttgagtttgtcagcagaaagattctgattatatagttactagtacatactgaaaatatgttgagcaccagttttttttatttgcaatggtgtcaaatatgatcctcgttccttaattaggaagcttgcgttggtgtagtgtccacatgatcgtaaagtaggtctgcacaccttgatgtattattaaacaattaattgggttacatatcgtgatgtcctcttaacagttacaaaaaaccttgtaggtttgcaagcgatacaggcaatactaccagcaact

SEQ ID NO: 10130 - DNA, 350 bp, Oryza sativa
  Intron number 3 from transcript LOC_Os08g31470.1 (locus LO C_Os08g31470) derived from phytozome v7.0 (chr-ID Chr8; po s 19464388 to 19464737)
gtggtagtgatccatctatcggctctggttcacaggttatattgccttttcatgttgaagttaccattttcttgattctgcatgacaaaacagataggttaatactgcatctttctttgactgttttatcaggttggccattcttaagtactcgtgtttttatttatatatggccttctttgctgagaaaagattatttctgctctttttcgttgcaatatattttccctgtagagcacaatatatttagttcttcacttctgtacgtacgcacccaacttcatgaaattgacacagctaacttgcatttgtttctttttttaatcttcaggtagctagccttgaaacat

SEQ ID NO: 10131 - DNA, 695 bp, Oryza sativa
  Intron number 3 from transcript LOC_Os04g36680.1 (locus LO C_Os04g36680) derived from phytozome v7.0 (chr-ID Chr4; po s 21979837 to 21980531 reverse strand)
aagggacagccggatctgggcactgttcgagcaaggtatattattttctctctcttttgttttaatgtaagttcgagcaaggtatagtttagcttttgtacttttgcttgcgttggaaacgatttcagactctcatgactttggtatagttgttggcttgttgcttagaaggcttttttattgaggccctattcagattggaggaattttgaattttggaggaattgaagtgttttctaagaaaatcctgtaaaatttctacgttttgaaggaaccctaagaaagaagacttcaagctgactgaggtcaacagtcaactgatgctccattgttagggttctacaccgtgcacctaatattatacattaccacaagttaatactagaaaaagtgatgacctccggtatcaaccacaagttaaagtgcatttaatgacaaaccaagtcattacaaaataaacgataattatatgatctttttaatgaaacgatggtcaaatatatgtatcattttgtttggtccataaggactttggcaatgcagagttttttctttcactttttctagaacagatgtgatatgcagtgcctgcacggtttctgtctctcattttgaaacaaattcataaattgagatttgaaataacacatctcttctcatcttgtgtcagggaaaagttccattgctctcgctcc

SEQ ID NO: 10132 - DNA, 469 bp, Oryza sativa
  Intron number 2 from transcript LOC_Os03g42290.1 (locus LO C_Os03g42290) derived from phytozome v7.0 (chr-ID Chr3; po s 23533441 to 23533909)
agtgctaattttgagcatagcgtaagcctgcagctaagaccactcacttttagtctcatattcttcatggtggattgattggattttgcatgtgattagtttatcgcttatctgatgaacttgattaagtttcaagtggtatgctaatcaaacatgctgaaatgcaagctagcatgggagcaaaattcactagttaaaaaccttgggtttcttgataacagtttacatgcaaggatgactcattgtaccaagtactccaaagtcctaaattctaagctgaagttgatcactatatcatgtgttcgaaaataaaaatgttttgttatgccattgtggacttctcattaacaatatatcaagtgttgtatgaaactaggaattgctctattcacaccaataccattatgttacactgttattttttttctctacagatcataccaaacaagttcttggaccaattcggagg

SEQ ID NO: 10133 - DNA, 655 bp, Oryza sativa
  Intron number 1 from transcript LOC_Os03g17780.1 (locus LO C_Os03g17780) derived from phytozome v7.0 (chr-ID Chr3; po s 9892537 to 9893191)
cgcgcgcctcctcgcgccgaatcagcggctccgaggtgcccctttctcggtttttaatcccatatgatcctggtgtctgatttcttggaaccttctaggtgttgatcttgtagagttcgcaagtcactaaggaagtaataaggccgcgtatttttgcccgtaagggaggatggatcatgatggccgtattcgtgaatcgtgaagtactatttgatactacttgttcttgttcgtaacagttcagtttgcataggcattatggagttaatgctgtaaaattcatatcttacgactttatgagtccgccgatacgaattgagtactgtcagggtccatggattaggcacacttaaattgataatattgtttggataaattttgattatactaccgtttcatttgtttgtaacttgtagaacattttctggatgtttcattgaagtctgatcatactagtttattgtgattgttattgttgttcaagaatgtgtatatgtatgattggagtacttcctgagataaattactaaagtcatgtgacaacctttctgatttttttttttttgtaattgcttctttctataacaccgaatatctcattgtcatgttggactagttacaattcttctttcctccaattgtttagggcctagtg

SEQ ID NO: 10134 - DNA, 727 bp, Oryza sativa
  Intron number 2 from transcript LOC_Os05g02060.1 (locus LO C_Os05g02060) derived from phytozome v7.0 (chr-ID Chr5; po s 600647 to 601373)
cgccgccgaggacacattcgactgcctccacagaggtgagatatcgtcagtctttctaccctttcacctcctctcctttcttccccaactccgccctatcttgcacagttgcattatacttcactatacaaagtttctttctttttttttcacctttggggctagggctgcctgagcctcacaccaccaaaataaattaaattgcacgcatcccaaagtggagtactctggtggagtggagattgggaaattgaaagtggcttccaatctttgggtcaaaggattatataatcgaatgaaggcaacacatctatggccaacaagtcatggcttgtcgatttatcctcaccaccagagtacaatctgtatccattcattcacttcactgtcggctgaaaggcatattccttttttttttttcttttttgggttgatggagcttggctcacttgatattgacaaatcaaattcagtttgtcgataacaaacaatttaataattctattttatccaaggctcacttgatggagcaaggcttttcttatgtatcggcatggtacctgcctggcactatatagtatatactgcaaaaatatagcactagcatgatgaatacatgacaataaaatgggagtatttccatatatacaataaaatgtgaccgtgtcctgtttctatatacatgtacacagtgtaacataaattcattctgtttcctttccagggg

SEQ ID NO: 10135 - DNA, 609 bp, Oryza sativa
  Intron number 2 from transcript LOC_Os03g39530.1 (locus LO C_Os03g39530) derived from phytozome v7.0 (chr-ID Chr3; po s 21954069 to 21954677)
tacaggttaaagatgtgtacatcatccttcataatgaaatcctgatgtacatcggtacatatatatgccaattgtttctggaatcttaacaaattggtctacaagaatatatacttaaaaaaacctttttttattattatcaattacgctcattcaggattgtagataaatgtatatgatatagtactacatggcagatgtgattttttccccaagatatatacttcaaaaatataaaaagttagttggagagttcaagttttgatgttctttgcttagttgtcattttcctgtaaatgttaatgagtgaattctgaagtaatgtcagtattccttcattgtacaatactggtaataatattttgtgggcatgtcaatgagttttcttgctgtcacctttctatgcttctgtttttaggtatggatgttttcttattgtcttcttttgatgatatatgtggtcttcatatttcttatcagataatttaggtttagttccacgatagcatatcatgtttatgctatcagaaggttttgcctcaatttccttcctctccaacaaatcatattttatttgttaattcgtcgtgcgctaattcagtacacata

SEQ ID NO: 10136 - DNA, 923 bp, Oryza sativa
  Intron number 1 from transcript LOC_Os07g03150.3 (locus LO C_Os07g03150) derived from phytozome v7.0 (chr-ID Chr7; po s 1215690 to 1216612 reverse strand)
ggggtaaagcgaggacactactcattggtccagaggtaaaaggagctagcttctctgcctgcctttgtggtgctctttactttgcccttcttggcttcttgcttgcttgcttgcttctcctctttgccaccagctctgggaagaagaatggtgtgtgtgattgtgaggctgcccttcttcttgaatcttgattgattgtttggtgcagcatgagcaaggttgtaatgtgaggtacaccctgttctagtattttgtttcttgcagtttgttgcccttcacagtgttctgctagttcttaagttggagggattgtgatttgtgagaatgtgggattttctgttgctatttttttggtcagttttgtcttaggatggcaaaagatgaggggtttggtgtgaattttaatgtgaatttttaggagtgtggaagagtagttcatcttggttcatgtgcttgtttgcccctccgttcttcatgatgctttgcttcagattttgtggtttgaatgggttggagagtcttattttagtggttgaaagttgcaaatttggttattccttcattctgattccaaaggtagttcatttttttatatgtgatgaatatgtacctaatactaggaatgaaatgagagttaatgtactgggtaaagtttaaattccggctctatttcattggggaaaatgtgaatgggagaaaattagctatgttctattaggtaaggaaaaaaaacatgaaaaaggaatcaagaaaagaaagcctgcaagtgcaatgaatcatgccatgttctgttgtttgcttactggagatctttttgactgcatcccctatttcagttattcaggtgaattttgactcttcagttaattattgtatgtctttgttcaggggtgtgcaatagtgccaatcataaggtcaaaaga

SEQ ID NO: 10137 - DNA, 676 bp, Oryza sativa
  Intron number 4 from transcript LOC_Os08g01794.1 (locus LO C_Os08g01794) derived from phytozome v7.0 (chr-ID Chr8; po s 477968 to 478643)
acacaccggtggaccctgttgctctaggaatacctgtgagtatttttatttggtattgctaggtgtaatggttttcttcctttgaaatgataaccttttggtatctttataaattttgatcttgaaaacttgcttctcgtaaattttggtgtagtattcattgcttccaacgaacaggttcatatagatatatgttaatgtccgctagatatgtaatcattactgttgttccgggtagggaaagaaccgattccatggagggggtaactctataatcagtggcttgccttccttatctgatatctctaattgttatgtttgaatagcacattccatttctccgttctgtagctaaattttacaactcataggctataccttgccagatgggtcatcttgcttgcaagatgagttctgcactccagttcattttgttgtttcatgaacatagttgagagagtatgaaacaatcatcacaaataaaatttgtttgcaagctctgtagatttttgtaatagcatgtctcatgtttgttctattaccgtagtaaatttatatgctcttaaatctactggtactggattttttttcactttattagtcttccaacttttgtttatttgccatttacagttagcaaaatttgcaggattattttgatattattgatactcct

SEQ ID NO: 10138 - DNA, 818 bp, Oryza sativa
  Intron number 1 from transcript LOC_Os06g50350.1 (locus LO C_Os06g50350) derived from phytozome v7.0 (chr-ID Chr6; po s 30478450 to 30479267)
cctctgcgtcgccgccgccgtcccgacgattcaaggtatcctactctccctattactctggttcggtagaattaatcttggtggtcagcacttggttggttggtcgaatatgaattagcgtatgagcagctaacctttttgattcatgtggtgcccaattgtttcttgtgaaatcgcaagaaaaaaatatttgtttcttgtgatgtatagggttcgttcctctggttgatttgatttggttatggcaaacggcagcttctgcaaagaattttactactcttgtcctgtttgtgcaagcttaaggcttctgtgtaactgtatagaatgcaacaacagtgtgttcttttgggaagatttggtcgtaatgtgagaggtcaatgggtcatagctctgcatcactctagatcaagtttggtgaatctttatcggacattttacctgtcaagaagtgtgtaagaagaacaactaagaaaggcaatcaccttctttgcactagaactgataggcaagatagaactcatttaactgtagctgcaaaacatcagaactttaactcgtgtgtttttaaattccatggacaatggtctgcttgtactaggatcttaaatagaaacgtctgattctacatatcttcacaaaatgcttagtacttgctgctctcaagcacttaattatgttcaacccttcttttgccactgctgctggtttcacaccttccaattgttgcgatgatttccctatctatattacacatacaaattccagcaaaacctgttctcacattcagctgcgaattatgttggcaggttcaagagtcg

SEQ ID NO: 10139 - DNA, 859 bp, Oryza sativa
  Intron number 1 from transcript LOC_Os06g30970.1 (locus LO C_Os06g30970) derived from phytozome v7.0 (chr-ID Chr6; po s 18015767 to 18016625 reverse strand)
cctgcagaaggatcccccaacctcctgcagcgctggtaggtatcctcctcttcttcttcttcgctgtcccccaattccagggttcacgggcgattttgtttcttgtcgattcatcgacttcttagcgtgccggctgctggatagtggaatcctctgttgactctttagctttcgaaaaaattttgaaccaagggaaggggaggagggggaggtcatactgtgcagtgctgcaattttgtgtttgtttatggttttgctaccaatttcgtgcatattattatcccctgagcgggtgtggagctgcgttttgttataattctggagctgttaattgttcttctttcgcaaatttaacgcttattacggctggctggatagaaggatagagagctcaagcagagacgctggatagagggatatacggttttagaggttattgttcgttcaacctgcttagttaggagtataccttcgttgttttagtaatttgtggaagcatggggtagcatatctaggacatggataagtctcgttggcaatgataccaggccacaatcgttgtttacaactcaacaatttgtgtaactggaactaattcttgtgtaccgatgaaataataataccctcaatatgtgtgtgatgataattgttcttgtctacatgctagtgtaccccaaacaagacatgtggatgttgtagaattgttttgatatttctaactgaatgtgacaacttgtgtggcgaatattggtttcatgatatgttctgttcaaatgcattgcaacaattgagattggattggagtacctttgtatgactaacacgcgaaatacgcctaacaggccctgtgggagaagat

SEQ ID NO: 10140 - DNA, 872 bp, Oryza sativa
  Intron number 1 from transcript LOC_Os07g48200.2 (locus LO C_Os07g48200) derived from phytozome v7.0 (chr-ID Chr7; po s 28790753 to 28791624 reverse strand)
tccggtggcttcgccgtgctctgcgacaagtgcgggtacgcctccgcctcttcctctctcggttcctcctcctccgcgctagcttgctgtgcgcgcccatggtggtccacgcgccgcggctgaaatggctggctgcatgaattagctgctgtgctcttttttttttggttgtttcctgtatatcgtctcgatgatttcccctctttttctccctaaatttatttgtttttccaacggctacaacttgtgtttattacttgtttgatgtgatttttaccattaccatttgtggtgatctcgtattggcgcccaaattagttgatttatgaggaaactgtgccggggtagaagcaacagtgttgcgcgtgtagaatttttggaaagtggaaaatccggtgaaactttggaaggttgacttgatggctcgttgtgcgattagctagcagttaattgagtggacatcatgctcaactgggatttcgatgatcgttcagttacttgctgcacatgagcttctcacaattaaaattatatttgtggtgacttgtaactggattgctgtcccggatgacgtttcctgcgctttggtgtaaaaaggggggaatttgtttgccaaagctctatgagttgtcaaaattgctgcttggtaaaaaatagatgtattgtgaaattggtgtagttatgcaacctgatttttcttacaattgatttttggtgatggagaaaaacatatgcttagttgaacaacataaggttaaagagtgttttcttctgaaaaggaggttactttaatcccctataccaatttgaagtccaatttccttgatctatctattttgattatgccatttatgctttatgtaggttggcat

SEQ ID NO: 10141 - DNA, 851 bp, Oryza sativa
  Intron number 2 from transcript LOC_Os05g51119.1 (locus LO C_Os05g51119) derived from phytozome v7.0 (chr-ID Chr5; po s 29265780 to 29266630)
tgtttaacaagtccttcaaggtacagagtacatcaattgaacctttggtttaaccttctaagtatgataaggagtgctaacaattatggatcagaacatttttgaatgataccagcgatttctagaagtaataactgctttgtggagccatttattgtacctgtctgttctgtgttttattaatactacatcagttttcgctgtgttgttgtttatccaacatttcaaagatgcatgcgatctgtagaaacactttggtttcacctttccttttggaaaaatagtagtcctgtcgcttgacttaatccccactaaggtgttataaggttgattgtggacctgtagtcaaacttcaaaggttacctgagaaaaacagaagttgtcttttactgaaaaaaagtacataatataaatgtcacttgacttctcctaatcttaagaaatttaaggtcagcgagtccttttagaaggtgattggtgacaccttctccacatatataacaatcagctgtttcctgtcttcctgagctacgataaacatttctcattgcagtgataggaactataaattgaatatgtaataaataacatatcgttgcgcatattacatctaaaaaaaatgctctctggttgtcatttatggtcaaaactgtaacaattttcgcaatgtttttataggcctcatttacacgaggaagtgcttgatcacgattagtttctataatcctatcttccctgatcaattgggttatgatgaattttacaccattgactgctcatatttatttatcttctgatttccattcttgttttcagccttggtctctccgggttcattcctctttgccttc

SEQ ID NO: 10142 - DNA, 501 bp, Oryza sativa
  Intron number 3 from transcript LOC_Os03g09280.2 (locus LO C_Os03g09280) derived from phytozome v7.0 (chr-ID Chr3; po s 4849247 to 4849747)
taccactaaagatttgtgatcaatcccactttgatgtaagtgttttttagtcgaaagatttcttcagactcctctcgttgtagtttatttctttccttaagtgtcaaggaaagtcccaggagtcaaacaagagatgtaaatcccagaggaagaatacaccgattaatgattctgtcaagttgaagttgggttaatttttcagtgaaagaaagttacttaaacattttattttgtgaaacaaactgtcacgtcctttgaattgttccattgtacattaccatgaaacaactcaaacaagattatttcttttgggctgataattggcacttacattcatgtgttgagctgagaatactttcctagttttaacctcaaactgctcagattattttagttccgtaattcattattaaacatctattattattataacttccatttatattctctttgtcataataatcagctattaccattgtggcgctgaatattcagtgataa

SEQ ID NO: 10143 - DNA, 772 bp, Oryza sativa
  Intron number 1 from transcript LOC_Os07g33680.1 (locus LO C_Os07g33680) derived from phytozome v7.0 (chr-ID Chr7; po s 20126119 to 20126890)
acctccagcgatctccgccgccaccgtcctgcccggtaagctctaccgcccccttcttcttcctcctcgccgatcgttctatccgatcccttccccgccccccgaatcttcatcagcgcccccagatccgcacgcctccatgcgccaccccaagcccgcctcccgcccgcgccatcaccggtgctacggccacccccgcttccaccacggccggccagccggccggccggcagcgcccttatgtcccgccgccgtctcctcctcctcctcgtgctccaccctaatttgctactactactaggcgaccacctttcccaaaccctagcctcgccaactggctcgtcagaaaccaaaccctccctccaaccctacccccgaatccttactcggacgggtgggagcttcatggattagcagatgccctggaagaatgggaggttttaatgttgggtgtgccaattgcacatggttgcagtgagatcgatctggttatctgctcccacaatttaatttgttatactattttctttttttgtaacacaattcaaagccttctgttaagcaccgagttttactgtagtacaaatgttgcgaaaatgcatcatttgatctaggtatgaagttcagtaggttcaactgattggcaggtctccagcattaatgctcttcctcaaactcagttttgcaaaacagaaaggataaatagattccttttactaaaccgtgattttgtgttgattaagacgattcattactgcttgtttgttcagga

SEQ ID NO: 10144 - DNA, 586 bp, Oryza sativa
  Intron number 2 from transcript LOC_Os02g56570.1 (locus LO C_Os02g56570) derived from phytozome v7.0 (chr-ID Chr2; po s 34649213 to 34649798)
atcaaaagagtgcagcgtggggtgagctatacttttcgattaatcccttgcatgctccgaactagctgaatttacgccgtgattgcaccacagcgccaggctaaattatactttttcagaaagtagaattatactgttatatgcttagaaatcaaataactagttttttttattattctgagattttcagttatcctacattgtattgatgttgactcttcattttaatctacactaatatggatctgttacacaatcaacaatgtgaactatgaactatttatttttctccaattaacatggtaaattgtagcctgatgaagtgcaaatgtggaggctaatatttgccttgttttaataatttagtaatatatagatatttgcaaaaattccttctcactaacaacacaagcctaggtccgtatgtcaatgagacaatggttgacagatgatccaaacatgatgggacatcaggaattcctcattttcttcctgcattcatgaatcatgacctcacactaaggccttgtttattttggttggctaaacagggtacccacccaaatatcaaaggagaagtttggga

SEQ ID NO: 10145 - DNA, 904 bp, Oryza sativa
  Intron number 1 from transcript LOC_Os06g09090.4 (locus LO C_Os06g09090) derived from phytozome v7.0 (chr-ID Chr6; po s 4572787 to 4573690 reverse strand)
tcttgccctccggtatggttagcctctgctgcttcatttcatcctctcctgcgcgcccatcatctccatgcgccggctggatggatgtgttgctaatctcgtttgaaagaattaattattttctgaaccttcttatccaacgagattttctgaattatgcgacaatgctatgtccttgcgattaactctctgtatggtgagatttctgtttatctggtttacgtacgtgaagtgcaaattaaagctttgccaagttcctgttaattcactagcttgtgtctcacatttgtctgcaagtttcctttaatttacgtttgtcaaacctttaattatcaaaattcgtcaaatctaagacaaattaatttgtcaaacctttgtcaaaatcgggtaaataaataaaaacttttgataaagtagggtcaaatgagcaagggcataaacgatatttttattacaggttaacaccattatgttgccttctcgtaatagggtcaagtgtgatcttcatttttaaaaaagagggtcaaatgagcaaacttaagaaaacagggttaaattgggagttaggctttaaaacagggtcaaaaacgcaattgccccaaaattttatgcataatgaaggtatattttgacaatgttggctatgaatttattgtctagcactctacatacttacttacaaatggtagtagcatatttgttgcgataacactcatctggtagaaggatatatttatgatcgtggataattccacctgcacggaatttgagtagtattttttttatgttgggctaaaatttgacatgcaaagtcatccccgcctccccacaccaactacaccgtctgaatcagagctaccttcctgtaggtgtctcctcggcacccaacccctaaaggccgtgg

SEQ ID NO: 10146 - DNA, 682 bp, Oryza sativa
  Intron number 1 from transcript LOC_Os03g25270.3 (locus LO C_Os03g25270) derived from phytozome v7.0 (chr-ID Chr3; po s 14430652 to 14431333)
tttgcttccgccgtcgccgtggttgccgcgccaaggtgagagagctcagggggccaagctccgggggacgaggggttcttgctcggtttggttgattcttggaacgatttggaggggctatgaggggattttgactttttgaggcacaaaggtgccgatttttttttttttttgttggggggatattgttcttactgtggcgattccgtggctgctgctacaagcctacaataatcgagcgcctaatcttgcgcgatgaaggctttcttcttgatgctgctcctgctacgaatttggctagtgttgttgtgtctactgtggaggatagagctcatcccaactaacttttgattgtgctgcattcgttgtatgctcgtgtcatgtctgcaagtcatttcatagcttatgattctcttaatcacttctcagcttatttctcgacagaaatcttgttaggtcgttagattctagaacgccgaagaacgaatatttcggttgttttcctttactggcaaaccattttccctcaaatatattttctgtacttgggagctgtctgtaacaagacagacatgcctttcctttcagaattttattatatcggtgttcctgttcgaacctactgcttgcgtgctagtgtttttttttacactgatttaatcaagagttgattatcctgtag

SEQ ID NO: 10147 - DNA, 713 bp, Oryza sativa
  Intron number 1 from transcript LOC_Os02g53060.2 (locus LO C_Os02g53060) derived from phytozome v7.0 (chr-ID Chr2; po s 32461759 to 32462471 reverse strand)
cgtcgtcctcgccgccgattccagaaccagcaccggtatgcctcgacacctcccgatgcgggagatctcttccattgatgtggttggggtttaacgtggagccggtggcgtcgcgggcccaattttgatgcaaaatcgcgggggatggggggaataggagtagtgattgttagcctctgcgatcctgattcaagttttactgttttaggtttgtgacttatgagattattagttgtaatatatatatagcgtccacagtggatcacgtaatgtagtgttgatggaaaattgcttcttaccactaatttatcctgcttaaatctgtatgtgacgagtagaatgcgtgctaaaacttgtatggcagatatgtgaaaaaatcgtgactgtagcattagaggaaactagaaacaacaccaattgttccagttgtatttttctgtccatatagttctcgtttggccctgaagagtgaagagtcagaaaagtgtacacgattggtgtttagcgtgatgttgctgttttggaaatttagaacattgggtctcgtgtctacatgattaacaagctttcttagatgattttgatgttctgacttgttatcttagatgtgcatgttctgaaccaactgaaatcgatgttatgttgacgtactatgttggtttttgttactttcctttaatataccctttgttgtctggtattaattcttagga

SEQ ID NO: 10148 - DNA, 716 bp, Oryza sativa
  Intron number 4 from transcript LOC_Os06g28590.2 (locus LO C_Os06g28590) derived from phytozome v7.0 (chr-ID Chr6; po s 16266808 to 16267523 reverse strand)
tgattggaatatcctggcgtaattctaatccaaaggtatggatattggaccgctgaaactttcatcttttagtaatgtttcttgttacctgttgccgtccatgttttgtttggaatataggttcttatgatattgctttatcatttgcattatttgattggttggaaatagttttacgttgctttcttagtaccagaaagatctatgggtatgaaatttgagttctttaaggttttatccctgagtaaatatcattaattgtgtaacatgcacacaaatcttagactacacatcactatagatggtaaatgctgtgtaaaattgtgactccatggcaaagaatttgagactacctcaattggtcacatatccagttcaaatttgggagtgttttctttgtctgattcaagatagatgcacaataatttcctcataaagatcatatctttgtatggcataaagaacatatctttgatacaaacattttttcttgcatgcttatctatgatatgatgtgattcctttgtacctgttgagaggcagagttaaaactgcagtatttcaataagatcattatttgatgtttcatataaatattatcatttacttcatagatagttttcagtagtgattatctccccattatatattcttcaacattttattacagttaatgcaattattcttttgtctttctgtcttaggttcacagctca

SEQ ID NO: 10149 - DNA, 672 bp, Oryza sativa
  Intron number 1 from transcript LOC_Os04g52330.1 (locus LO C_Os04g52330) derived from phytozome v7.0 (chr-ID Chr4; po s 30911407 to 30912078 reverse strand)
gtgttcgtccgggaacccaactacgacatctaccggtaaaaattaatcttcgctaattactttcttcgtattatcgttattgctatagattttgagtttgttacttttgcttattattatcgttgttgctgtagtgagaatttttagtttgctagttcgtcagtgaataaatgtccatggggaactgaagctgaaagcttccactaaaactgggctgaagttttcagtgtttgtgctagttggctaatcatggaaaatgatgtgtcagtcaacatagaaacggaggaaatgattggtagaatgataatttatcattgtcaagatttccattaaaagagagtgtcatattcaagattgataattgaatcaactgataaacatggagactgagaattgaatcaactgataagtttacactttcagagagcagtgacaggtagcagtccatatatcaccagcaattacagcagtttgtgtaaccaaatgattcttgattctagtcatgtatgaagaacactagttgttgacttgacaagtgtacttcttgtagtttcatatttatattatttttgttgatatattctacagttattcttgtaaaatgggcactaaaaacactctttgcatcacactgcagtgaagatataacattcgtcgatccgttgaacactt

SEQ ID NO: 10150 - DNA, 726 bp, Oryza sativa
  Intron number 1 from transcript LOC_Os07g47540.1 (locus LO C_Os07g47540) derived from phytozome v7.0 (chr-ID Chr7; po s 28435518 to 28436243 reverse strand)
tccgcggcaagatcgtcctgaacatactcaagaaggtatttatatgcacatgatcatcacggctagcacacagtttttgatatgtttttttttcttcgatcttacaatctacatatgcatatgatttccatgtatctaatttgtttaaatattatcaaaccttaagatctcgaaattcttatcatatctatgccgctttatcaaaaacaaaaaagtacttggacatttgacgatcaaatttgacattagttttgatttagctcaaaattatcaaattcagagccttttaacaaaggccggtcagaccacagtacatgtctgatcggccctactgcgatctgataggtgtttaaccatatggtcttccgagtcttttttttaatgattcacacgagacagtgcgaagtttatattgatagagtagaaaaaaaatacaagattacaaccttggaaggtcgtaaccaggaaaacgaagaaaaaaataaccccacccaagcattgacaactccaacacacaatcctactaggagaaagcgcactggaccgaccgccgctagaccaacaaagggacaatagttaggatcacccaaaacccaaccctaacaaacggatacaaatctgcactctatccacaactatttctcgtgttttcttgatcgggcatgtgtgtcgttaacattgtgattgcatgcagaagcttgcattcggcaagtgggaagggtacaa

SEQ ID NO: 10151 - DNA, 574 bp, Oryza sativa
  Intron number 1 from transcript LOC_Os07g10910.1 (locus LO C_Os07g10910) derived from phytozome v7.0 (chr-ID Chr7; po s 5971396 to 5971969)
atcccaatcttcagtgaggcttcccattgtttaatttctcttgttttttttttctttcaaggaaatggtgatgattcagtgcatataagtttcctgtgtcgtaatgagggttttgaattttgaaacatgggtttttgccggtggggaccgaaagaaccgaaattttgtttttttaaaagaattttaacatattttaactgaatttaaataaattttaatcaaatttacaaatatttgataaaaacaagtaattttggggagatttttgcttgccagtgggggccgaaattaccaaaattttcgaaccgaaatttcaacccatggtcgtaaaacaccttgtagaaaagaaaaaaaacctttcgtaaatagcgtaccatgaactcaggactttagggtgctagtcaggtcacttaaaccactagcctatatagcttttcgcaaggcgtctttgttgtgatgttggtgggtggtggccgaatttgtggggagaaaaaaaaagagatacttgagattaagatcctcccaattttgtattccagcaggagcaaaggtgccttcaattgttctcaaggat

SEQ ID NO: 10152 - DNA, 733 bp, Oryza sativa
  Intron number 3 from transcript LOC_Os07g40930.1 (locus LO C_Os07g40930) derived from phytozome v7.0 (chr-ID Chr7; po s 24495209 to 24495941 reverse strand)
gatcgaacccgaggtatggtttctgttttacgtggacttaggtggtctatttttccataggacatgcttcgagcaaatagcaggacacaaatgtttgtctagcatcatgataacaggttattaatcttttagataattcaaaactatacctggattgctgattttgtcactattgtcttcacttattacaagaaggtttatcagcaacattgctcttgtggtcaaatgattttagatctagtccaccttgctgatcaatattttcaaattctgcggaaaatttcttaactcaactaaaatggactgtggagccaaagatttgcccatcccagggctaagctaaaatcgactagtgcacagttcacctatctcgactagtgcacagtttacctatcttaagaagacaaaatgaaggatgcattcaaaacaagtccatgtatgagctcaatactacatctaaatttggatcctaatctcatactgctcttattctaccacataattttaccgctagcccaactaaagatcttcgcaaaattgtcttccttgtggttccatacttatcaccattactattatgcaactaatacatttacatatgtatacaatagatcataggctgataattcaaatgtactgttctttcttaaccttttctcatatttttctttcgcttggtttccagtatcactaaactattcgtcttttggcagtttcgtattaacaggttgct

SEQ ID NO: 10153 - DNA, 771 bp, Oryza sativa
  Intron number 2 from transcript LOC_Os03g14250.1 (locus LO C_Os03g14250) derived from phytozome v7.0 (chr-ID Chr3; po s 7742755 to 7743525)
cttctcaaaattccaatcaagctgagcaggtttgtgttgctttcggtgttcacctgtagttagaatccttgagaaatgccattttacttggaggaagtcccaatcacaaactgtgacttattaatgccattttattaagcaaccctgcttgtacctgtgggtgctgcaaaatttgaagttatggaaagtactgggttgcaacgaggccattttttttttgactaaaacgaggccatttattagctattggactggtttatttgcattttgtccatttatatttaaaatgaaaataactattcatgtttgtggtagattcgttcatgattgattttgtatttgctgatttagttttatataggccctctctgatgctcaattaaggactacactatatcactcacatagtattttgtttcattttctttcacccactgtaccgcagaaagacataatttttttttctacatataattttgtcaaagagcaactcattgcatttttgtttgtggcacacaaaatttattagggaaaatttagattatgacatattttgctaactgctaaagtacatactgctgtgtggagtcagtagaatacccataggggacatcggtattaccagttcatttgatatttgtttgcatttattcttatctctaaagctgacattataaatggaattgtctactggtgcatcctgaaagttttccaattttaccttacctttacatgtttatttcttctaatgccatgtttccacttttcagg

SEQ ID NO: 10154 - DNA, 906 bp, Oryza sativa
  Intron number 2 from transcript LOC_Os03g60610.3 (locus LO C_Os03g60610) derived from phytozome v7.0 (chr-ID Chr3; po s 34435055 to 34435960 reverse strand)
gggcgccactcaaatttattgtgcaaggcattcaggttgttttacctctcggtccttcaaggccttaactctctttttttagataatggaagtaaagaccttgattctcttgatttcctagatacacacaattatttttcttctatcagcttgtgcttttgaaaattgcttgcttaaatgagatatatttctcttgttgcctctcaactaagtagcaattaccaataagaactgtcacttatgttgattgtagcattttatattccacttttgacacttctggttgcaaccataacatgcaccaggttcagatgcaagccacacactctgtccacttaatcatgctcaacctggacttaaattttcacggagaaatgaatataggtccagcactattattcttcacataggcttttaggctgctataattttcttttcaccattactatattctttgctgacagcaacactagaccattgtattacaggtttttacatatgaacgattccatttggcttggagtttgttttggcataggttatctatttatcatgcatgttgggctttttgaagcatgttctgggcttccacttagttaaagattaagaaactagaaatgaccatgtcttacaatttcttgcgacgtatgttagctacttactgagttaacatagtgaatcccagatcaattcatgtgaataatatgatggatatgtccatctatgctagactaaacctgcttcaatcctcgttttgaacatggttgtgggtttttactagtttgatgaattggtgcactgtgacacttctgctatgctgtttcacttgtttctttaataatttctttctgaatatttttctcctatacagaaattatcgacaccactgttgtttctttctgtcac

SEQ ID NO: 10155 - DNA, 660 bp, Oryza sativa
  Intron number 1 from transcript LOC_Os03g60610.3 (locus LO C_Os03g60610) derived from phytozome v7.0 (chr-ID Chr3; po s 34436356 to 34437015 reverse strand)
gattctgcagcgtgatttcatttgtggttggtacggaagccctaatgcagcatgcttggattgctcgtagggtaatttgttgtttgagcaaccaatctaatttgtcctgtccaatccatcctgctatttgtgggttttgttggattgctctcataccagcttgtttcccaaaattttgggggaaagtacataacctgctttgggtcgggtttccgacgattagtgggagatactctgattgtgtttgattagtagctaggtgccatattgtttggacttggtggtagtatagatggagatttttcgtcataaattgggagaactggataattagagtccccctatgttgcttggatcatttttagtattattattgtttttgctgggagatttatatgtatgatagtgctggaccgtatgcttccattgtagctagataaagatcagttatagaaccaagagaagtgacattcatatcagacaatatatccatatctcatttcaccatatagttaggaatagtcaatgaagactgttctgtttgctggtttgattcttaaaaagttagtatcagtattttttttgtttacttttctaacacctcatgctgatgggattcacttcttgtttgttttttcagctccatttcctgctggttcg

SEQ ID NO: 10156 - DNA, 992 bp, Oryza sativa
  Intron number 1 from transcript LOC_Os05g01820.1 (locus LO C_Os05g01820) derived from phytozome v7.0 (chr-ID Chr5; po s 492582 to 493573)
ccaaggacgactgctggctcatcatcggcggaaaggtctcatcttttgtttttcttttcttttcacgcttttacttacttgtactattcgatttcatgtttcgattcgtttcgttggttcttggttccctatcctccaacaacgtcctgagacctcgatctggtcggagtccacgaccagatcttggccgcggcgcagatctggccctccagccgccggcgtggggaccttgccagatctggtcttctccgacggtggccaacttctcttgtcccttggttgcagccaccaaacctcttcctcccctcctcgatccaaccttggtcttgttcatcgactggccactaaaccccaaataagcgagatagaatttggattcgtttcgttggttattgtttctctgatgctgtgatggtggctagatcatggcagatctgcccagtaaagtcgaattttgtttgattccaccgcacctcctgaggaatcggtccaatcctgtgaattcttctcttctttcctgctgattggattgtctacatgggctttacctggaaacaggggtgagtgctagcagattcaaacatcatggactgactgctcctaaacaagttccatatgaaaacctgttctacatgctttttttcttttactcttcactcgttgtcagtcaaacactgcaaaatttgtccctgcgcctattctgcaagagcttcttgttagtacaactgaagaatcaatcctctgttccaacttggcatctggacagaataatgaatgtttcataggaaaggctcagctcaactaagtaaatcatgttgattggccttaaaacacacttcattaagagtctgttttttttatattggacatgataagaataatatggctgttttttattattaatgttttttcttggtaacagtgcttctattgatgaacctaccctgtttacctgatctcaccagtgttctgcaatactatccaggtataca

SEQ ID NO: 10157 - DNA, 687 bp, Oryza sativa
  Intron number 1 from transcript LOC_Os06g16370.1 (locus LO C_Os06g16370) derived from phytozome v7.0 (chr-ID Chr6; po s 9336329 to 9337015)
gcgtcagtgcttacacagattccatcagcaacagcgtgagttcatctattactagctgcaactatttttttttcagagaatgaacatctattactgttgttagttagttgttactacatgccacgttgtcaatgttttagagttcatactagtacttttgagtggaaaaacattctccaaacaaaagctactgtctaacaaaatgaagggataaataaacagatctcaacaagaaaacaaagatacttttctacttccaagctgcgatctttaggctgattaaatggaaccgataaaaaaaatactttaaagaaaagtacacaattgatctttaggcagaccagttgactacttcctgtatttctaagcatatacgatccatgctaactcactaattgaaaagaagtgagtttgttaaccttttatgtacacagcaatcaccacacgaaagacctcatgaaaagtaggataagtgtaagtgtaattcatattttatcccagtgcataaatttaaaatatcttacttttgcgacagtaaaaaagatattggaagtttttcttatgtatgtaaaattaaattaagcccatctatatatcattgcagggtctctgacacctgcaatctccttatgattcgcatatttcagtgaccatttgccgattccatctcagatatctttctcatca

SEQ ID NO: 10158 - DNA, 900 bp, Oryza sativa
  Intron number 2 from transcript LOC_Os06g10480.1 (locus LO C_Os06g10480) derived from phytozome v7.0 (chr-ID Chr6; po s 5392844 to 5393743)
cctacggtatgtgtttgattcggtacgggggacagggggagttattggtggaacttgtgctatttcaaaatggagtagctgctttctcaagatatatcaatgtggaatttactggattttactgactccccaattgtataattgtattggatatgtggtggcctgcttgatgtaggaagtaataaccaatatattcatcaaagttcaaactagttaaagggtaacaactgtagtcttggttaatttttatatgtgcttgataaatacatcaacctggatatttggtactgcttgatctttatggtttgattgcacttgttaatacatgaactatatcacatttttcatgcaaggcattgactgtgttgctgtcacaatacaaataaaagatgttgttaatgattgggtgaccatgcatattggggcaaaatatgcctgaacactgtaatttttggctgtttcattgcatatgacatataattttcacatgcgatggtattttccaattcacacatctttatgacggcacttatctaactttctcagtaaacatttgaggaattcatgtttaccatcccatctaaattgaatttcttgaatttgctcggttacatttaatgcagtatcaaatttagaagccctaatttgcttttgatttcttcttcaactcactgtttataatacatgaaactcatatcaagcccacctaggtatatataatatttgaggtaactatgttcaatgcaaagataaaatacttcctttctgaggtaactaatagagtacccacaagactaacaacactctttttttttttttaaaaaaaaaacaattatcagaggctaatacaagatttcatatccagatcgagtctttggaccaacaacaacaacacgtcac

SEQ ID NO: 10159 - DNA, 353 bp, Oryza sativa
  Intron number 3 from transcript LOC_Os06g10480.1 (locus LO C_Os06g10480) derived from phytozome v7.0 (chr-ID Chr6; po s 5393789 to 5394141)
aagggaataagtattgatcttttgttctcttattcctatatttcttgttatttaaataaacttttatggttacaagaatgaagaatagttgttgctcttttagcagactttgaaatgattcaattgtttatttgagtttcaaaaatgttcaagatatgctgggaacataactgaaggctttgcggtttgggaaaaaaaatgatccatctgaaatttcacatataatatgatcttcagtggtgaaagatgccgcaactatttattgcttctattatttgggatgaatgtcaaacttctgcttcttgttctctgccacaggtacaatatttgcatacggggttacaagcagtgga

SEQ ID NO: 10160 - DNA, 262 bp, Oryza sativa
  Intron number 10 from transcript LOC_Os06g10480.1 (locus L OC_Os06g10480) derived from phytozome v7.0 (chr-ID Chr6; p os 5399155 to 5399416)
ctaacgaagcggaagcggttaccttatctcagctggtgggatgataatcttctcttccccttttcttcttagcccatcactcttactactaaaatgatatgcacatatgttacgcacctgcatgtctgcattccaaatatgtctgtttatttaatccatatttgaattttatgtatattcatgcaaccaaaacacaatggtttcttagttttcttactcatttgcagaacctcatcgacctggcaggttctgagagttcaag

SEQ ID NO: 10161 - DNA, 452 bp, Oryza sativa
  Intron number 11 from transcript LOC_Os06g10480.1 (locus L OC_Os06g10480) derived from phytozome v7.0 (chr-ID Chr6; p os 5399452 to 5399903)
cttatatcaataaaagcctgctgactcttggaaaggtagtcctcatttatataatcgacattcaataatgtaaatttccactaatattgaaatatagacatgctgtactcatgctactaagattctgtaagcctagccatttcattgcttctggaatgtatgtgtggactgtggctttgtgagtttagactctaaatcctttctaaatttccaatgccacagtccacaggtatactttctgcatgcagtaactgctgagggaaagaagacaatacagtttcttaagtttattcatttcgtgcaattttgttatttgatattttataactttacccatttttccagtggtaggagcttcccttcttttatttgcaagaataaagttacccattttttttattttgactaaaagaagttaggttgtatatttcaggtgatatcaaaactgactg

SEQ ID NO: 10162 - DNA, 481 bp, Oryza sativa
  Intron number 16 from transcript LOC_Os06g10480.1 (locus L OC_Os06g10480) derived from phytozome v7.0 (chr-ID Chr6; p os 5401047 to 5401527)
atcagaaaggacaccttaactggctgaatctacgggtatgcacatgaatgatgtttaatccactgcattttaaacactttctatcatagtgaagagttgtaccattttttttcatgtatcacttatattaagctatgaaggtttcagaggaatggttacctttaaggaatacaggggactgcgaatcacatattcacatccttactaatgttgctaacttccattatgacaatcctatactatgatagtgtaaccttgcatgtaatactcatattccgtggccatatgacatcatttgtttctaaatgattatgcaagttgaattcttcaaatgttctttgcagatttgtacttagattatggaaccaaaatataatgattgagtttgcttttgtttgttaggattcttcctcttactgacctttttgtgatttgactgcatgcagaagtgtgatagtggttctactaatctgacaagttc

SEQ ID NO: 10163 - DNA, 559 bp, Oryza sativa
  Intron number 4 from transcript LOC_Os03g43720.6 (locus LO C_Os03g43720) derived from phytozome v7.0 (chr-ID Chr3; po s 24449551 to 24450109)
ggtatggcaccctttgttgtcctttgtggcttatagctttcaccttttcatgctaaacttgtttgtctactgaaggtgcattctgtatgttaaggaaaggataagtaaaaaccacaaataatgcatgtatttggtttcaagaacatagtctaggctgatttctgaaaccagtgccacatgaaaaatcaaaatgctgcatcaaatggagaatgatgtctgtttgttcaggttatgcgtgtggactatttgtgtgagcacgttaatcattttcgtacttttgttgcagtatctgtatgactaataactattttgtactctctgatatcatacttctaccttcttatttcaactctgaattatctaattcaacgcaaaaaaaaacctgatttcttaacaaatgaaaaccaaaacagaagatgttcgattgagcaacggagtgataggtttttgattttgtagttcttattttatttttcataagcatatattttaagaaattatatttaataatatcccttttgcaggttgttatatcagtattgagttggaggtggttgct

SEQ ID NO: 10164 - DNA, 996 bp, Oryza sativa
  Intron number 1 from transcript LOC_Os08g04440.1 (locus LO C_Os08g04440) derived from phytozome v7.0 (chr-ID Chr8; po s 2174928 to 2175923 reverse strand)
gaaggccgacccctcccccaacctcttcatctcaggtacgcctcactttctctctctctctccctcttcttgggcggcggccgtagaagtgctcccgttgcgttgccgtacccgattcggtcgtgtggatgatctaggatggcttaatttagaggatctcatggtggttgcacttttgggcggtcaaaagcaacattagagtatactagtatgtatatatatgttgttagtactaattcaatgtctgatggatttgggctgcttgattcgtatgagcaaaatcaggggagataagatcatatggtagtaagacatatagtggatactgatatgttgtgaagttagtataatcttttgatgtttctagatgtaactttatactgactgctcctctatatattagtttgttacttagtggaggatataggatataggacggatctaggacgccggtggaatgactgatgaaccagctgtacatcagcctaggttgaaagagacctattgctggatttgctggttcagattatgatagcaaacgtcgtacccctccaccttctgttcatggaacttgattcaattagttttacgaacaattgagtccatgcccaataagctcaggtcttcggcgttttccacacttgctgcttgcttgattctacatgctcgacacaaggaaattcactgcgggaactgaggaaatggacaatcacttaataaacattatttaaattttgtctacttatggtgctctgacctaaattccttatctgtagtgacaaaatgtgtgcaagctttctgagcttgtactccatattattatcggacctacttaaagctagcaccagttccctgttttaccgtcttacaatttaaagttcaataatgttgttccattttggatgcttccttgcatgttgagccttgttgcacacaatctctggactcccatcttagcatccttgtttgcaggcttaagcaagcgtacaacaacag

SEQ ID NO: 10165 - DNA, 861 bp, Oryza sativa
  Intron number 2 from transcript LOC_Os04g33080.3 (locus LO C_Os04g33080) derived from phytozome v7.0 (chr-ID Chr4; po s 19851658 to 19852518 reverse strand)
actccttgaacagaagcaaccccttcttacttcaggttgttgctaccggcctaatctgtctctaatccctccgctcgagttctgttgccgtatgtggttccttagtttctgtttcctgatgaagttcttgattgatttggtggtgggagacaagaaaattttaagagtagatctcattgaaatttatgttatgtgggttgtgtcctcatttttcaagaactttgcaaactgtgcctgccatgtttggtagcttatgaaaataaaattctgatatgtataaaatgatgccgtctatatttaacaaggtacagtcttgtataattaatctaaaattgttgttgcagtcatgtaaaaatttaggggataatattaccagttgcaaatgtcaaactactggggcgtctcatcgattccttccctgcttatattttggatggaaggatagtcaaactaaggactaatagtattatgctcaggggcagttgacggaaaccatgttattcatcaaagattcgagaagcaatcttgttcacatacctatcaattacacctcctgtacacaactctatcacgttggactagaaagctagaatacattatggaggaagtcattcgaccaattctaactttacccctgtataattgaatctgatccattagatcaaaagtaatggatggctcatatccattatagggtactctaaagaaactataaattttgatgaaatatttctttgtttggcaacgctttgccgtctttattctctacagttcaaccatgctcagaccgtacttatataaataatgctttgtgttaaaattgcaggtctggtttgcgtttccatttaagtataaaaggac

SEQ ID NO: 10166 - DNA, 726 bp, Oryza sativa
  Intron number 2 from transcript LOC_Os05g04860.1 (locus LO C_Os05g04860) derived from phytozome v7.0 (chr-ID Chr5; po s 2337990 to 2338715 reverse strand)
tgcttggtttcgctgtaaggtgaggcagctgtgaagttatcttattatttttctcaggagttcattgcacattgtggcatatgacacctatattaacatgtcatgtgaaacacctttgtatcgcctgcttgtcgcttgatacagtgttggatggcatatgctttatggttagcatggaaccacctagaatttcagtcccaaacagaactctaatgtaaaaattgatggagtttgtgtctttatccagtcatgttggctattctactagaaaacagagatgacttataacagccaggccacttgccactggaggagttgactgagccccttgtgagtgacttttaatcaaaacaaaatcgttttgtttccttaccagcattgctgactactggccaatatgatgcttgcctggagtttgtgcgtgcacgcattatgtcaacatgccagattgatgtgatcagtggaggcatggtgctatgagtatatatattggctacatatggtgttttctgcctatgtaagactaattggtgcaatgtccaatttactcacatttagtgcagtatctgtggtttgatcttagtaatacagggaccaaattggttgtatggtcgttcactttgcacaaattggtgtactagataagttcgatagatggcagtccattttccataatagagcatattgctgagctaaaaacaagtcatcttatttcttttcagatta

SEQ ID NO: 10167 - DNA, 901 bp, Oryza sativa
  Intron number 4 from transcript LOC_Os05g51380.1 (locus LO C_Os05g51380) derived from phytozome v7.0 (chr-ID Chr5; po s 29398346 to 29399246)
gccaccaggaggggtagcaagtcgctatcaacactgtgagctttctcctctgtcccatcatgttagattgctttacttttttttcatcatgctagattgcttcagtttttcatccaaacattgtttcatgggaagaaatttgatgatatatgatttagctattgggctctgctaagattgtccctttcttttatagttcttgcagttctgagtttgtttatgttctaaaggcctgactaagtgttaagttagacctaaattccgtaatatggccagcgagttggaacaacttagtgcccttggtgtttgatagtgatgggttgtgctacatggcatatattttttatgatgtgttcttcgtttacaaaagcctcatgtttttttttgggttatagcagttgccttatagttgcttgccatggcagtagcaccaggtattttgtcgggcctctgtttcccatgggcaaaaggtgggctaattgtggcatgtctacattattaatcaaatagtggaattgtatatagcactagagttcttattagaactatatatctccacgcaagttaaatagaagaacaagccttaactaactatatatctccacgcttcattatttatagaatgcacggtctgaatatttattcattcaatatatttggcaacatcctgtgtatactatggcagcaaaaattattggcagtcatttcttttgctataatgataccagttgtacaatgtatgattgctgatataaaatgacaatcatgttattggatttttttttggtaaatcctatatattaacttgcttttgcttcctacccactatctcagcagtcttgactaatttgtttccttattttcagtttagctgattcatatatcatcactaagcctagca

SEQ ID NO: 10168 - DNA, 916 bp, Oryza sativa
  Intron number 1 from transcript LOC_Os05g48760.1 (locus LO C_Os05g48760) derived from phytozome v7.0 (chr-ID Chr5; po s 27881625 to 27882540)
cgcggtgctcctttgaccagacgctccgccgagaggtgagcgagatctctttgtgttcggtgatgttttgcttcgttctgggtgtgtgttggtgagaacggtggctcgactctcgccttgggggggggggggggtgcagctttttgctgtctgcttctgatttcgtggagatgcggggaaaggttgggagttctcgtctgttgtttgtgcgtagcggtggatctgcgagctcgtcaaccatttcgatgatgtgcgaggttgcacactgttctatgtgatttgttctgaccgatttgaatttcagaaatgaacgagacagcccacttttcgttttcatgtggagatttcgtcttaattttggccgatttgtgggatttgcgggtgtttcgttacgactagggtttcactgttccttgtgcaaaacggtagctgcaaatttttgagggatttgtcctgtgtgcttgctgcggatatgctacttttgatttacttctcatcgtgtttataatcaatcttaggtgttgtcgtgacatatcacttctgttatcttaagatttttttggtcgttctactgttacatcttccgaatttgcttcttctgctgtttagatttaaacacgccgggaagtaatcattcgttgggtgtgttagctatcaatatacatttcttgtaacttgtaagttgtaaccagatgaagatctggagtcaacttggtgatgttcaccctttatcaacacatatgaacgtattatatttcttagcttaaatcacgtttgctaggcttttggcaaaatctatatagtttttcttttccttgccatgattctataggctcaaaacatctggtccttagcatattttcctttcttcaataaagcaggatttccaggacaaccggctgctgaggtcacttgt

SEQ ID NO: 10169 - DNA, 449 bp, Oryza sativa
  Intron number 1 from transcript LOC_Os06g12090.1 (locus LO C_Os06g12090) derived from phytozome v7.0 (chr-ID Chr6; po s 6474331 to 6474779)
ctctcacaagaggtataggctcccatcggatggcctaatcaaccgaagaaaatgccaaattttaaatttttaaacttaattttgagattgattttaagatattttcaacgtagtttttttttcagcattggcttttaagtcaccatgaacacatatataaaaattttacctacaaatctatttttattatctaataagccgttttagcttattaagaaaaaagccaaacgatagggcctatatagatcgatcgctcgctgcacatatgtttgatttgcaaaggccacatatgtttgatttgcaaaggctgatggtgatgatatcaaaagctactcctagattcatatatgcctgtgctcatgagtgttcattgtgtggtgatggctggttgggctgtgttgtgtttgtgtgcagaatctggcggtgcaccagccgacgcagcacccgac

SEQ ID NO: 10170 - DNA, 810 bp, Oryza sativa
  Intron number 1 from transcript LOC_Os06g44210.2 (locus LO C_Os06g44210) derived from phytozome v7.0 (chr-ID Chr6; po s 26667554 to 26668363 reverse strand)
cctccgtcctctcggcagcacgaattgaattggaggtaggtaggtatgtattccgttcttcgctcgtagcgccttcttcgcaccactcgatttcgcctgcgtagagtggagatccgtccggaatttgattggtttcacccccaattagcaccccccgtgtgccccccacgtgaggtggatatactgtactagttgactgctactaggatggacttgctttgaattttcgttgtaaaaatgtaaaatatacatgtataatccgtttactttctatgatggtttatcttcatatcttggctacgctacaaaatgatacatcaaatatggtattgaactagttttgttgtcggcagaatcgattgtactagttataggcggactttgaaacacacatagtatatattggcatggtcgcaaacaaaccaaaccttttcttcgctgatttttgctgcaccctgatatgctttatttgttgttgcatatacactggtgcttttgcaaagtttgggtctagtgctatttctgctgaaaatgctctttaatctttggatgtgtagcagcgtaaaactctggtttttcttgtatgcaggggctttcaagttattgtttaagcatttttttgttgtaatttctgacatataaacttgtcggtatgctagaaagaactttggaactaactttagattgcccgtacaatcatatgcaaagtagatgaatgccgcttcattcaagtgtattctagagggttgttagtgcgcactaggcttcttttcctactgacatattctgttgtcaggcacatttgtaaaa

SEQ ID NO: 10171 - DNA, 1054 bp, Oryza sativa
  Intron number 1 from transcript LOC_Os08g03430.2 (locus LO C_Os08g03430) derived from phytozome v7.0 (chr-ID Chr8; po s 1605816 to 1606869)
tccgcttccagaaggagtacgtcgctaagatcaaggtgatgtctcgccgccttcaaatcgatgtaattttggattacactgaaattcacctagtcattgacttcaattgatagggattagcgagtttttttagataatgatagtgattagtgaggagtagttgctaaattgttttatatttagttaagacattttctcgatgaattactactccactactagattatggcatgaaagtaggtgtcattttactgcaacttgtgcatttgaaggagaaatttgtggactcaggtggaatgtgatgttcagattgtttagcattgaggaaacctggaggattttgaggctgtggttgtaagcttgtgcttgcatctaggttgtaatttagtacgagatcttttgtatggagttacattttttattatggtagcaccttggattcatgggattgtcttcagtgaagggtgaactgcggtgattgattctctcagttatatatgcatttgcatgttgctacttctacttatgcccccatgtgagttgatgtcatgtgcatgggaggtcactttttttgtctgtgccgacaaacctgtttgtgtttttttacatgaagacgcgtcattaggggctgaacaaagaatcgtgctctggaagactcacatttcttcagatatgtctttagcagttctaatgggaggaatcaattgaagcataaagccatacttgatttgttatcaatagacaatgtttggttaggaaatgggcacactctgatttctgtacttttttctttttggaacagaagacaaattaaaaataaaaatgagctgtgtcctgctaggtctatggtctggctgaaactgctatcaccctttgcgtgatgcttcatgctttatttttctagtggatgttttaattgcaaaatttaatgtttaggatggtaataaccatgcatttgttatttgatatgccagagttttgtttgccatattgacatgtgttttcaatctctatggcaggatttcttcagcacaattttgtggtggatattgcc

SEQ ID NO: 10172 - DNA, 914 bp, Oryza sativa
  Intron number 1 from transcript LOC_Os03g34310.3 (locus LO C_Os03g34310) derived from phytozome v7.0 (chr-ID Chr3; po s 19527023 to 19527936)
tccggcgccgccgtcaaactccatcgctgccacaggttacttgcatactgaaaaactgaaaatgtctgcaaatttttcaatgacttacattttgtgacatactgaaaatgtctgccaaactgccacaggttatattttgtgaatttttcaatgacttacattttgtgtcttactgaaaatgtctgaaaaagtgtgccaaactgccacaggttatattttgtgaatttttcaatgactttgaatgtggctcaaatacattctgtctttgattccactttaattcccctattgatgtcaacaacatgtgaccatgtgaactatctccagtggttgaattatctccaggaaatgtacttgaatgtctctggttaatctaactaataattcacagcagttatacattttactgaatcaagtatgtgcagtttcacataataatttgcagtacatgtgtttgatttgatgcacgttatcttcaataggtccagaaggctggagctacacaatcagctaggtcttaccatggtaaattgtttccggttattctcaattgccgttcggtgggctcaggataaccgatcgaaattagagttgtgatagttgatttgcgggtctatggaggggaatgtggggtttgcgctcatgatttggagggggtttctgttcggttcatgcaccagcctcctatagtgtctttgttagatttatcttatttgcgcacataatgcaaaccatttaggtttacggtggtcgttggacagaagtagaatgtgtttacccatcggcgtgcccaatgcccacctacgtctattttcttgttagcgaggatatcgatcaattgactgctcaattaatcaattcatctattgtgtgggttattcaggtcaatcggctcctcccctcagcccacttcc

SEQ ID NO: 10173 - DNA, 669 bp, Oryza sativa
  Intron number 3 from transcript LOC_Os04g28060.1 (locus LO C_Os04g28060) derived from phytozome v7.0 (chr-ID Chr4; po s 16397519 to 16398187 reverse strand)
aaagtggaggagcaggtttgtattgtctcagttggaaattttgggtggcattaggttactgcattttgtttagtcataccaaaaccaaaggttgcagttcatccactctctaccatgactgaaatgataatgctgctgccttatgacctagccctacaacactgttgtttggaatgctcacttacagtgtagcttctgcagttttaatggaagtataaaagtgatcatgcttctgcagtgtaacatagtgactaattttgggaactctatgttgatataaggatatactccatacaacattttctcacctcttttttctagttgagtactgatcatgcatcactatgttaggaagagaagaaaattaagtcatagcccatgttgtgttgaaatgataaggtttcttgtattgattttgcacttcattatttttttcttgatttgatatttgttactttttagtataattgtgtgctttggtcatgtaatagttctgctgaattgcagacgacaatgttgtattgtgtaaattcagttgttctttgcttttagcctccagcttcctagtgtttttttcaagggaaccgcttcctagtgtttttgtttctaccttaattccaatttttctttgcaggttgcgttgcttaaaactcgagttaatattgcttg

SEQ ID NO: 10174 - DNA, 812 bp, Oryza sativa
  Intron number 1 from transcript LOC_Os07g38590.1 (locus LO C_Os07g38590) derived from phytozome v7.0 (chr-ID Chr7; po s 23177627 to 23178438)
ggcggctcaacaaggcgcccctcgccagcatcgaggtagcggcccgtctcctcctctcctctcctctcccaccaacatggcgcgcattcaatgcacgccgccttgctcgccatcgatttcccgtttcgttttttcttttcttttcttgctctggtcgctcgctggtatggaggggcggaaggaatgaatccatggaggtgaaaaaaaaagaaaaggcggtggtgcatttggtatggaagtcgcaaaaaaagttttgcgcttttgattgatgggtcgacttgctcgtgcttggtgatgagctcgctttggaagtgtggattgactgttcctcctcctctcatggaccatgcattggggtttcttccgttgatggaggaaaaggctcgcttttggaggaacattttatgggtgcccgtgcttctttgggttctctccacttcaagggaggaaagatatggttgctttcctttctttggaggagaacagactacagagtgtcttcttccttttctttctttcttttttttcctctgaaccattaacaaattttgcttttgttgctcaaagatttcttctttggagtatggttgatagtctacttcatggatgttttggattatctgaagttgcattggtttgatatatggaattctagaactttcttttcctattttttttacactacttttgctaaaatgagatttttccctgtctctctcaaatcattcatgtcctgaatttaggataatgttttctctttttttttcttgctttgattgcataattgacagtgtgaattcaacagagtcctg

SEQ ID NO: 10175 - DNA, 491 bp, Oryza sativa
  Intron number 2 from transcript LOC_Os04g42770.6 (locus LO C_Os04g42770) derived from phytozome v7.0 (chr-ID Chr4; po s 25132781 to 25133271 reverse strand)
tgctaactgatagaactcacagaggtacaaaaatttcttccactttttctttgaagtgctgcttaagcaagtgatctgcaactcctgattttgctttttttcgccgggtcggcaactcctgattttgctttcataatgcatatgaatttatactttagagttacttgtgatagacgggctagatggcattggcattgtttgaataatgattcatttgcataatgttagatggtggtctccctttagacaatgtcatgtttgattgtttgtagatgatgacacatttgtcttttctttctggatgttttcctcttcttggattcgaaaataattcaaaagagctcttgctatttttgttgcaagacactgaccttaaaaatcaaactgactgtgttctttatttgttagtttgtattgatagacataagtgttttctgcctaatgttaattgttcagcttgcatctttcaggctctcgagttcataaaagcc

SEQ ID NO: 10176 - DNA, 743 bp, Oryza sativa
  Intron number 3 from transcript LOC_Os05g44590.3 (locus LO C_Os05g44590) derived from phytozome v7.0 (chr-ID Chr5; po s 25880930 to 25881672)
ctatatcttcaaggtaggtcttgtatgtttgtattttatttcgttaatccgcaatcttgattatcatgccagcgttgaagacacactaattagtgatcacaatttttttttcatgccatcatttctccatattattttgtctgcatgccagcccttctaagttacattcttttcttttgaactcacttgacataacctggtctattaacgtatccactgttattgttaatgttaaaaagagcttgagcaatactactatctatttatatagacttattatttcagaggaattgcacataccatttttagtcactatttcctttatattgcagttatacagccatgtgaatatacggagtactttgtagtgagtttaggacctgaggtttcttttgataattgataatttcttaatgcatatgactagagaagtggcatccaataatctaaaaggctacaagcatccctaaacagtgttgttatgtcgacatttttctgttccagtcctgcgggttcatgatacaattggatattaactccatgggcagtgaaatatattcttaattttaaatctggaacataagaacaggcacaaatccttacctgtctctctcctgactaatgcataacagtgatagtgtaaatgcgacaggatttttctggtaggttatcaagcatcaaatttattataatatgaatttgtttcaggtgttgtcctatttcctggagctaccctgcctctc

SEQ ID NO: 10177 - DNA, 408 bp, Oryza sativa
  Intron number 2 from transcript LOC_Os03g02820.1 (locus LO C_Os03g02820) derived from phytozome v7.0 (chr-ID Chr3; po s 1098849 to 1099256)
tgccaattactccgtcgacaccacggcttctccaggtagaaatcaagcacaccctggattatgtatgcatttatgcttgcactgaagtttaatccactgttatatagttgttatgttaaccattcgatattaatatgtgtacaaagtatgatctagcaaagactgcatttcaattcaaacggtctctgttcggagtggcgccatagcttgcaacagttacataatgcaaactgacacactgaaagcagcacatacgaaacttcaattcgatatttttcgttcaaatcttcaatttgtttcatagcaagtacttagagttgctttttcttttttgtacacaatataggaaactgatcagattactgttctttcctgtttcatctgcagtgtcattcttcgaggtgagca

SEQ ID NO: 10178 - DNA, 909 bp, Oryza sativa
  Intron number 1 from transcript LOC_Os05g46950.1 (locus LO C_Os05g46950) derived from phytozome v7.0 (chr-ID Chr5; po s 27103155 to 27104063 reverse strand)
gctcaatcattctcgcccgccaccctatacatctggtaatgtttctccgctttctttatctcatagtctgaatcccgggcttcccaaatattttcgtggttcggttcttacctaaaaagtattcgtgccatatttttctgttaaatggcatgtgttttcgttcggtctttgtctttactagttaaggagcagttttgcttgatgctcatcttcttgtccctcatacttcggattatctatgcctaaagtctctttaggttttttttttccagtcactgaagtctcttcaggtttttcagttaacaaattttgggtaaatttgatttacagttaacaaattttgtggaaattgatttggatttaactagatttagttagtacttaggacttaagattttgcaaactagatctaactgcaatcagccagattggaaaatgttgatacttgacaagcctcaattgcacagtgctctctttaaaaaaaaatcaattgcatagctctccttcagctcatttgagaaaacgaaggggggaaagcaaccttttatggggaagaaaatgtagtgcacaccctagtggtggaccaggtgaaatgcatcatggttaaactacctcagtatgagtggacccaattagttgtgcacccaattagattctattgtatttttagtgtattaaagatagtaataggatgtctatgatagtttttgctagatgaattaaataatttgttattgtaacataccattatatttatgttgaatattgcagctctcattcaatagatgcttatccttgtattactttagctattcggtaatctgtgtttgttaagcacctgcatcaagttcaatgttaactttcacatatgcaggaaaactttaagggcatctccttttgagctatcaa

SEQ ID NO: 10179 - DNA, 447 bp, Oryza sativa
  Intron number 1 from transcript LOC_Os05g41950.1 (locus LO C_Os05g41950) derived from phytozome v7.0 (chr-ID Chr5; po s 24508306 to 24508752 reverse strand)
cttggccagcctcgtcaaggagatctccctcgagagtaataaaatatactaccatttcttcccttttttcttttcctgatttcttcgtgccgaaatagcaaaaatatctccttttatatcttataaaggcgaaaatgtgatatgtataattcatctgaaaattaccatgctcttgacctagtttcacctttgagctatgacttataagtcagagaaaaataaaggaaagcaactaaaaataatttatgagtaaaacctttatatttgtattattaactgtgttaggtaaggttgaaaaaaaaatctacattgaaaaaagaaacttcaaaatcaattctaaaattggagtgtcgaaatttaaaatttggttacggctgataagctaacaagatcctaaactttgttcgtgcagatagtaccaggaacagggcagcggcaggagagata

SEQ ID NO: 10180 - DNA, 899 bp, Oryza sativa
  Intron number 1 from transcript LOC_Os08g27970.1 (locus LO C_Os08g27970) derived from phytozome v7.0 (chr-ID Chr8; po s 17034799 to 17035697)
gatcctgcgacgcagtggcaacagtgattgtttctatgaaattgttgagggatctgtgatttgtgattctttcatctgtcatttgtgtgaaacttctgtgatttgcttcgagggatatgtgttggatgaatcgatggtgatagtgtgaaacttctgtgattttgttttggatcgaaggtggtctcatgtgagaaacatctgtgattttgttttggatcaatggtctcggggtgacggggaacggctcgatgcatcggctcgattcgagccaattcatcgagccctatttttttggattcttgggacctcaaaggtgtcggttcctaaaccggcacctttgaatacttacatcagtgctgcctcctttgtgctggctgggaaaaccgacatctatgtggggttcccaaccagcactgatgtggtgttatgtggtagtgaatgtaatatttctccattcacatcattgactgctaaggcatgaaaataaaaaaaacagttgcattgtggaaccagctatagttcttttacatgttttcgtagttatctatatacatcatatagtcaattatttactttcaagaacttataattaacattttcttaatgctagttgtaacacaacatccaagaccatacatctgaattttgtagccttatcttatatgtttcgattaggaagcattggggaagtatatttatccaagaccctacataatccaaggaaattatatgcttggattaggaagcatcgggaaactatatgtatgaagaatcaccattactagccacttagtcgtgcgttgcacgactttgggtgcccgtaatgtacaatcatacttaattttgattttttttcttttacagaatcatacaacttgataaactattagttagaacta

SEQ ID NO: 10181 - DNA, 770 bp, Oryza sativa
  Intron number 3 from transcript LOC_Os04g54940.1 (locus LO C_Os04g54940) derived from phytozome v7.0 (chr-ID Chr4; po s 32500113 to 32500882)
tgttcaacaagctgcggttgagcaaggtattggttctggcctcacaaatgagtgcttggcgtctttgatacatgtaggttttcatgatcacgcccttgcggctttgatggtttcttgagattctaaatttatggtatcaggagattttccattgaagcatgcctgttagtgacgttagcatagtgagatgacaaaaatattcatcatggactaaatttgttatgcaatattctgcggtactgaaatcagattgatgttgtgcttaacgacaagtggaaatgaaaactggttaagctcttttttgtgtagagctgtagtgtgtatactgcaaagattgattttgtgaggcatggatacaaaatgtctcatgattcatgatactggttatatcttagtattgtgcagcaaaaggcagcaatgtattctgtaaccgtactatcattaggatatggcaatgtgattaggttgtgttattatgtagaatgatggtggactggtgattgctttcatggtttcttatctcaaaattagtgcacgttgaagatgtactgttgttgtgtttgtcctattttcactctatgtaacaaggtcattagattagacttgtgccacaggatggcatctgattgtgaggcctttgttctaatgcttcatctgtgtccctctgcaactatttttagatcatatgccccatacaagctgtttgttctaatcaacagtggatgttccgtgcagaatattgaggtcaacaagcttgtcaagggacgtcc

SEQ ID NO: 10182 - DNA, 621 bp, Oryza sativa
  Intron number 2 from transcript LOC_Os06g04510.1 (locus LO C_Os06g04510) derived from phytozome v7.0 (chr-ID Chr6; po s 1934425 to 1935045 reverse strand)
cgcgaggggcgccgtgccgagcggtgcttccaccggtaagcagatggctgaggcactggctcttccattctgaagaacaatgggtgtttttttttgtagtgataattcgttatatgttaataccatttgatcttcgatttccaagaaacgcgtatcttcgatatcatcgaatggttggtcccaataattcttgggcatggcagtaatgaattggtgtgtgcgtggaaagagatgtttgcatagttatttagatgggacaggggattgatgatttttgaaaacactcaaacagtaatagtaacacgatcatctctgtctgtcaaggctgtgtattgaaattcattagctcatcgcccaaagcacttgcaatgtggaccgtaactgaaacaagagaaacctcttcagtttttgtttttttaagaaagttgaaatatcttcagtttgttataaacttatagagatgacaatattagcacgttattcaagcgctgatggtttccttcttaaagatcttagttcatgtgtttttttacgctgatcttagatttgtcgtttaccttggcaaaggtgtacttaaaattcattagatttttctgtttcctgctttgactgtaggaatat

SEQ ID NO: 10183 - DNA, 187 bp, Oryza sativa
  Intron number 1 from transcript LOC_Os08g36890.1 (locus LO C_Os08g36890) derived from phytozome v7.0 (chr-ID Chr8; po s 23304731 to 23304917)
attgaggtgcttcttctatcttggctgtggggggggagctaggatatctgcaataatttttccgcatttaatttgtgcagcatttgattatttttttaatgattgttgctaatttattcacatgcttacaacttttgtgtttattattgtagtaccctcgacaaactagacgaaagaagtgtgcgac

SEQ ID NO: 10184 - DNA, 1002 bp, Oryza sativa
  Intron number 7 from transcript LOC_Os03g24460.3 (locus LO C_Os03g24460) derived from phytozome v7.0 (chr-ID Chr3; po s 13944498 to 13945499 reverse strand)
ccacgccgttatcctttggtaagcttgcatcaaacatttctttcaattttcagcatctattcttgtggtttttgcaaagttagtatccatatcatctatttttcaagacaagtattgcattggtatagatagagaacagaggacctctgaagcaacatgacgatgtaacagggagttgaaggggtcgcttgcagaaaatgtgcttagatattgtaaaacaaacgtgttatagctaaagcgagaaaaccagatggttggggataataccttagatgaaagttatttgaagttatgtacgtatatcttcatttggatagcctgatcattctgctgaatttctagatcatcccatctaattttttgcaagtagtttttttcaccattgtattgaatatgttatggttcttgcaggttagctttttgagaacatacaaacaatagggatatttggtttgaagaaataacttttggaataaataatagagcagtgtgatgatgctggaaaggtccaagctgaacttacaaaaatggtacaaaccacaaacatgaaaacaaacatacatatatggctaatctgaaagcaagaaaagaaaacaccaatgctgttcaaaagttcaccagatagattccttggttttgtccttaaatagattatgatacctacacatgatcatggactttttggcatttgtacactccatttattcgagaagaacatttttgcgtaccattgaaccccatgctgcttcatataggagtcaaccatcaaatatgaaacaccttatttgaaaagagctgatctgttaagtaaatatgcattctaacaaaatatccattgagatgtaaaagagtttaaccttattgagtggcagccctgtcaaacaagtttccgttcctaacaagatgcaattcatttcatcgtgagttggtgtaacatttggtacagcttttaattatcattgactttctctattcgatttcagacttttccatttgctttgt

SEQ ID NO: 10185 - DNA, 849 bp, Oryza sativa
  Intron number 2 from transcript LOC_Os05g35980.2 (locus LO C_Os05g35980) derived from phytozome v7.0 (chr-ID Chr5; po s 21255910 to 21256758 reverse strand)
agcaaagctgttgccatctgccggcattatctcaggtttgcttttccgcatccttctctccttatcaatttctttatgtgccccttgtcagattgcatttactttctccttctcctttctgctatcaaataggatcaatgaattgttccgtgaatgctgatcatattatgagaattttcccctagctaaaaataaattaatggaatctgtagcaatatgctatatgttaatcttgaatttgtgataatgtcaacattcaacctttcgactatgaccctatgtcacactgattcattgtcttatccgttgatttccaaatttgcttgatcgatacatgttagaatgcaattccaatagatatgaaaataacaaaattgataaaatgtttgattatgctatgaaaattatataaaatgaaaagctcaatttttatgtaaatcattgattctgggtacttaatcaactacaaaaggcattgccccaaatcccaaatttcataattttatcagttggtcatttttgcttttgatcctttcacacgatgacagtacctctgaggtattgtttcaccttcaccctgaatttacatgacaaatcctaaatgaaattataaatgcagctctcaatttggtttacctttcaccctgaatttgcaagattcaagtgcaggagctgaaaatttctctttcagggaccaagaagaatacaaacttaacagttaggtataatcataagattatatagtgtgtttcattttgttatcattaaactgatccacatggtgttcaagtgattacacaagtgtatagattgttttaaaagttgggttcgatagatatgtagaattcc

SEQ ID NO: 10186 - DNA, 997 bp, Oryza sativa
  Intron number 1 from transcript LOC_Os06g16260.2 (locus LO C_Os06g16260) derived from phytozome v7.0 (chr-ID Chr6; po s 9260067 to 9261063 reverse strand)
gcgcctccaagctgcagatcggccgacccccccaggtgcgccctcccccagaaaaagtcctccccccccccccccccccccgcgcgaccccgcaactccccctcctccgcatcctaccggatcctctctcaccggccgacgccacctcgcctcgctcccagccgccgccgccgacgagcgccactgccaaagccctagatcgaagcgaagcagagggccttgcctcgccctctccactcaggatttgtaccgctcgcattcgcatcgcgcgctcatgacctggagttcatgttgtggaagtagacgcatcgtagcaagcaccacccacgcgttggcttgcccccgtatctgcggttgattgattcctgttgggttcggttggtgtttgctcagattcgaggtgacaacgtaccagcagtgaagaaaaaacattgcgaagaagtgatcctcgttgcaccaagagtgtaaataatcttttgatcagctcctagaacaaacaataatcacatgtgttggtcccatgggcagaactagaaaatcaatccaaccaagatgagttcatgattgctcattctttcgtgcgtcagataaatcaagctgcatacttgggtaaaagaagatcatgtgctcaacatcttattgttctgctagcagttgtgttgaatcttcctatgattggccgaaacgtattatgaagctcctgatgcttctgctctcccagttgttggtaaagaaagtgatgctgttggtttggctagctgtctagttccttccagtttcttttgttcctagcatgggcaacagtagtcagcaatcatatcaaaattagatgaaatgcttgttacttgttgagacattgagatataatggattatggagatattactccatatgacataaatacatattaattatggacatctatttccagttttctctaatacttttttgtttttctgcagtgtgttgaagcctgcccttgacacttagcaactgc

SEQ ID NO: 10187 - DNA, 732 bp, Oryza sativa
  Intron number 2 from transcript LOC_Os07g39690.1 (locus LO C_Os07g39690) derived from phytozome v7.0 (chr-ID Chr7; po s 23788592 to 23789323 reverse strand)
tccaaattgataagctcttgtcagaaagaggtcagtgcaaaccatccttgctaggttctcttcgccatccattcttgtgctcactcctgaaacatagagttttttagggtttaaaaatcctgtaaaaattcctaagcattttattagaaacaaatggctgagctaatacttcaaaaaatggctttagctttacctcctgactctaggaaatagcccctgtatttattggacatatttatgctaaggctatgccattgaaaaagttttgaatttgattcttaagccttatgtgtggacatcttatcaaaagtatacaaagcaacatataggaaaactattcagtgcatacacaaaacatttttttttaaaaaaaactcaagagaattatttagtttctatagcttatggctgtcctggatgtcatgaaacctggtcgaactcttctgctcagttgtgatgagattgtgttagtgaattgcatactgtgtgatttttgaatggggactagcttgactgcagttgtgatttatattagtaatttgatgaagcacattcactgaaaaatgaaacttcatcagtccttttagctgtgatgataatatgtggaatggctattatgtttatcttgccttttgctaacttgagtatgtttgattcttcttgcaagttacaactatttttttagtatttcctactgcatatgttcatcttataaattttcatctagggagg

SEQ ID NO: 10188 - DNA, 608 bp, Oryza sativa
  Intron number 1 from transcript LOC_Os07g39690.1 (locus LO C_Os07g39690) derived from phytozome v7.0 (chr-ID Chr7; po s 23789366 to 23789973 reverse strand)
tcgtgtcagggccgcacttcgacggcattctgcaggtattgggatggtttgcttctgttatttgatttcgagtactagtattttggatgcacacggtgatttttcccggatgaacagtgcttgcaacttaggtacaggaagatgcaggcggtgattttcttctcctttttttgtgtgtttcatatacggcataaatttaatttattatgtagagagagagagagagagagagagagagagagagagagagagagagagagagattgtaggtttttctagtggtcagcctatatttgttcatgtccttgattaatagggattggaactgagttgtcagaatgaaaattaaccaattttgtgtgaggtaggactaataggagactggtctccttgattcccatggaatgtgagtctgattcattgaccctaaatgaagttagcactattatggaaaacagagatcaaatcttcagcggcctcttaaaatgattgcgatcctttgagtcttaactcgtcgcagtaactccacagaatttttcttatcttgttatcattatggagttagaactgaattataatttatcatatgcaggatatttcacttcttc

SEQ ID NO: 10189 - DNA, 559 bp, Oryza sativa
  Intron number 1 from transcript LOC_Os05g28610.1 (locus LO C_Os05g28610) derived from phytozome v7.0 (chr-ID Chr5; po s 16689072 to 16689630 reverse strand)
aattgcagaggtctttcagatttgactaaatttcggtatgtggcagatatacttagagaaaaaaaagctcgactttgttgcgttgcttgatacaagaaaggacgaaatgtcaaagacaaattcagatcgcctcactggaggtgctgattttgtctggcattgccttccaccaaaaggaagataaggagggtatacttcttggtattaatgtggctatcttggatctatctttaattgtcgaagggggtttttttattaaatttcatatcaacaatagggaggataattttaaatgtattttgatggcagtgtatggtccggcccaagatggatttaaatctagtttcttggcggaatcaatttgtacatgccaacaaaatcatctacccactttaatagggggatttcaacattatgagaagtagtgccaagaaaacaatgatcgatacaaatgctcgttggccttttctcttcaatgctgtgattgatatctttgacttaacaaaaatcactataacgggcaggcaattcacttgggcaaactcacttcctataccga

SEQ ID NO: 10190 - DNA, 849 bp, Oryza sativa
  Intron number 1 from transcript LOC_Os03g22340.1 (locus LO C_Os03g22340) derived from phytozome v7.0 (chr-ID Chr3; po s 12797319 to 12798167 reverse strand)
gtcaccgtcacctccgacgggcccttctccaagaggtataaccacctccccaaactcctccttgcccccccccccccccccgatgcccagatctatgcttgttgcttcatgtagtttgtagttaatctgttatatcattgacgtgtctagagcagatgaaagcatattggtccgttgcgtttgatacgaattttagcgagattcgatgtcaactggtaatgtttttggctgtgcaattaggcattttgtcccacttagtcttatataagcatcgagttctctgtaggctgcagtgagcaaatcatttagtggatatgctgaaatgaatactggtttgtgttgcagagtagtgtagtgtctgaatgatacacactgctagagcatataaaagatctttgtgccatattggttgttttctacttctctatagtttatgcctaatggaattaggctacttaactaccataaaactaatggtaccttcgtctcctgtgcatttgttaccttttctgtacaggataatcctgcaatgcagattgtgtgccactaaaatgttttctgatgtatattgtgtacttaccatatcattttggccgacatttttgtttgctcattttgctatgccttgttcaattcttgtcatgtctgcttaactacctctgtttgtattgaacactagactagagtgtttcgcaatgttctacttatacttgaggatctgatgctctatcccctgtgaaatgcttctatacttgaatcaaaatatttatttgattattttgtttgacccatatatcgtttattgtttcctcaggtacctgaagtacttgaccaagaagtacctgaaga

SEQ ID NO: 10191 - DNA, 908 bp, Oryza sativa
  Intron number 4 from transcript LOC_Os05g27940.1 (locus LO C_Os05g27940) derived from phytozome v7.0 (chr-ID Chr5; po s 16246471 to 16247378 reverse strand)
ttgttagggaacttgagaagaaattcagtgggaaggtaaatttctaaatgcataatccatgatttgcagcacttattttgtagaattattttcacttctgacaaattatgcactgaccgtttctcttggatatgtaaagtctgaagtctgaacatttgccataacttattgatgcagtttcctggacaaatttcactaaaagtcaacaatagacaccttgctttaacctggtaaaaagagcatagtaaatacaaaaggaaaaagtctataccattctcgtggttgtctatacataggccctctttgtttaggcttaggcttattggcctagacttttaagtcagcttattggcttatatgatttataagccagtggatttaatgtcctacgtttagtggtggagtcatacatctatctcatataagccaaaaaagcttctccaacctagcttttggcttaatagtgttagagtggcttatggcttcaaaaaagccaaatgaaaaagctgcttgtttgttttggcttagactttttgacttataagttggcttataagcctaaacaaagagggcctaagtagtttgagaacttattctatccagtgtcggaattgagggatgataacctgaattccaacttttgtttgttatagggaaaccagcttaactgctcagtacaactttttattccagatgctaactgcaatttttttgtgctaataaagatgtccatcaagaatacccagctgtaattctgagtttctgccaattatattctgagctttagacttgttactatcttccttgaagttaatcattgtgcaatttactctagctttcttattatttctgctaacactcttgctggatgtcatgacaatattttttgattgctaatttgatatagg

SEQ ID NO: 10192 - DNA, 896 bp, Oryza sativa
  Intron number 2 from transcript LOC_Os03g31010.1 (locus LO C_Os03g31010) derived from phytozome v7.0 (chr-ID Chr3; po s 17668401 to 17669296)
tcaatatcgtggaggacatcaagaaggtgtccaaggtgtttgtggtctacccccgaaacgttaatgccgaaaacgctgccagtatgcttgctgttccacttctcttctcttgtgtcaccaatcgatcgctatatcagtaataaccacactagttaggtagatccacaagcataaagtttgtgggaagaagaatacatgaacataatgtagaatggaattgctctgcgtagttcaaaccttcacaaaatattgccttgggcagctgttacacgctacccagctaagcagaccacttttgattccatgaccttaccaaacagagtcttctcatgttcaatggtgcccaaagccagatgagaagacaggtcacctgttatgagaaccaagaaatatactatgtgatttctgttatgagcaacaaggatatatgagatattatggttatgctgcatttggtaatgagtagttcatatatatacatgtcatttcttttacgagttgttttacacatgaagaaccaattgttgacctttctcacttcctagcaatagttattcctttggtttaaatattgagattaaacttcaggctgatatggctaattggctttagttaaacgaattttatcctagggtaaattggtaaagatattcctaatgtagcatgggtagccatttttgtcaacactttcctatttctgggataagtgtgataggaatctaaaaatgacctaacaagatgctaattggtcacggttgctgtatatggttgggatgcatcgcaatttgtgttcccatgttcatctgcttctagttttaccacatcgttagtcctgtttgatattcgtgagtactgcagtactgcctgtaatgctgtcgtcaaagctgttacctgag

SEQ ID NO: 10193 - DNA, 571 bp, Oryza sativa
  Intron number 1 from transcript LOC_Os06g13330.1 (locus LO C_Os06g13330) derived from phytozome v7.0 (chr-ID Chr6; po s 7332626 to 7333196)
gacgttataattctctcatttgctaaatatttctctacagctacttttcttcgaacaagaaattattggaggttattgactaggtctgcaggtacttttgagtttcatggttgatgtgttctgtagttttgtaatcatttgccatggattaccacatgccaatctttaatgttttttatgaatgaatagtggaagcactgtaggagtctcaaaataactctaagggaaatagaatttgtcatcaccatcacaagtctaattttcaatagaaactcagagatgtacatgtgctaaagcaaatgtgagaccattagcctgtcacctccaaaccaactaatcctgacctcctgtcatcaactgacaaccctcctccctgtaacaatcatgaaaagagctgtgcctgtgcaaagcttgaattctagctgaacttggcaaacttgagctttttgaactgtaagaaattgtatcgtgtctacgaattacgttgtgtgctttatttttattatgtgcaattgttgaccaaattttgcatataggaatcttgccgacaacaattttcaaggtcctattc

SEQ ID NO: 10194 - DNA, 456 bp, Oryza sativa
  Intron number 2 from transcript LOC_Os05g27110.4 (locus LO C_Os05g27110) derived from phytozome v7.0 (chr-ID Chr5; po s 15720069 to 15720524 reverse strand)
tcagatttgatttctcgtgtagctagtaactactcgtaagacatacttatattcaatttgtcgtgtaggagtacttttttatagaacctttcttcagtgctcatttgttttcagggtttaaacctatttctgataatgaaactacttttttcatctttcataatgataaagtgtagctatttacaattatcaattttttcactttattagtgttagtaagaagaaacaattgtgcttttgtgcaagttactggaattaagtggagataaaattcttgttttatctatatgatgcaattccttttcttgaggattgcttccatgagccagccagtacaacacaactaaaatcatatggagtatgaaccaactgtacatatatctgtagtttgatttagagatgcctaaaatttacttgtgtgaaattattattcccttttttcagaagattggaggc

SEQ ID NO: 10195 - DNA, 1023 bp, Oryza sativa
  Intron number 3 from transcript LOC_Os06g06380.1 (locus LO C_Os06g06380) derived from phytozome v7.0 (chr-ID Chr6; po s 2974844 to 2975866 reverse strand)
actaagaatctcaggaggtatttccaagacaaaaggtatgccagagtttttttgttattcctccctgatagtgaactataatagtttgtgctttaaaaataatccatattttcttttgagatattgctggttatggtgaagtagaacgtcaaaatggcagtcttagatataggaccgtctccattttataggaccagttggtattcaatttgaggtagttgctggatgtaattaactgtcaggcaatttaatttgaaattgtgtatttattgccaaaacataagtgtgtttaacttaaatataggaccatatccattttataaggaggtccctctcatttccattaaataaaccatgttacatagttcaaaagggagcagaaaacaaaccaacagattgcagataaaaccttcacatctagaaccagagacaactagttattcatatagaaccaaccagatacagagatttggctcaagccaccattggcaaaatgcaaggccatcatacaaatcgagtctcaatttcctagagttggcttaataatttggattcaatgtgaaccattcaaagccagaaaattagttttacgagttgtgatggagaaatcatctgtaaggtcttctactattctagtatctatctatctatatatataggagagagagagagagagagagggcccaaccactatttagtattgatgaatcttgaaagttccactatctaaggcatgtgtacctgaaaaatataacaaagatccaaataggttacagtgttacactatccagtgtaaaagagaaaaaacatcgtatgcaatgaaggacttttcacctatttgtttgcaattcgttttctgttttcccttttttaccgatgcaaaggaaaaggaggcgtatttactgctaattattctttttttttttttgggggggggggggggttgttcctagctaatcctatctgttaccacgtttccttttgtttactgaactgtttcttctaggtacattgtgatccttg

SEQ ID NO: 10196 - DNA, 953 bp, Oryza sativa
  Intron number 1 from transcript LOC_Os04g48310.1 (locus LO C_Os04g48310) derived from phytozome v7.0 (chr-ID Chr4; po s 28603884 to 28604836)
tcgacgcggacttcccctcggatttcgatcgcccggtatgtggcaccttgttctccctcaataatagtcttccgctgcgattttagtccacaaactggagtagtaatttgctcgtgttaacggtatcactgctacctgcagtggcatggcacgtgcacaaaacgactggagtatatctgttttcattttctgtgttcatggacagtacttttctactttcaagcagaaatacttgtcatgtgtcatgctcaatttatgatggccttactgtgtagtaaatcaaatggggaataagtacaggcactagtagtacactagcctgctttaccttgggcgtgcaatgttgttaaagtggctttggattgcttactggggttccttaagagattcattaagaatttgagatgttaccgtctaatctttttaatcattttaatattgtttatggttttatgttccctgtacaaataacaattttatttaagcgactaaaggaggaaggcacatcaacacatgtatgctagacttgtttctgaatttctcttctttgttggtttaaattgggttattctctcttttaaaatgaaaaatgtgttagtcttttggatcatttcctatatatacaaaataagctgaaaaatatcaattcaataataatagtataatgtattttcactgaagttcgtatagcgccaactgcacaaagcatctttctttcagagttagtggtcttgtagtagttcctcttagctagtactactacatataaaacagtgcattgaatctatagtactatgttgagcgtttgagctcatatggaaattattagtgaatagatcaactgaatcaatagtcaacacgccctataaattcattttggacttgaaagtaaatgcaagatttttttttattgttcagatagagcattcccgcagtgggttggaaccattggc

SEQ ID NO: 10197 - DNA, 635 bp, Oryza sativa
  Intron number 1 from transcript LOC_Os07g02040.1 (locus LO C_Os07g02040) derived from phytozome v7.0 (chr-ID Chr7; po s 622740 to 623374 reverse strand)
ccggcgaacccaccaccaccgccaatccagtgaaggtactctccccttcccatcctgactccatcctcatcctggagtgctacaagggtttcttagatcgtcccggggcgggagtagttgtcgcaattctgtagtgaaaataatggatcaacagttgagcaccttcagtccttcagagctcagagcagagttgggatagagaaaagcataggaaatatcacaactcaaatccttaatccagttagtatcagtttatctatcctagggtttgatacttggcaccagttgaaaggacaattacaaggtgaattctaccaatgttgagtcgttatggtggccttggatgtaggtctttcatactatcagtttagggacaattgctcatttcaccctatttcagagcctaactaccaatctgaccttttttttttagtttgcttatttgatcctgcttttcaaaaatgaagttaccgtctgaccctatttctattataccgttagggtttcatttaggaaaagaaaaaaatcacattattaatcaaactgaccaaaatacctttcatgactcaaccctatccattcactcccaatcctatccagtcactctcaaccctatatctctcagcgccggtgca

SEQ ID NO: 10198 - DNA, 1001 bp, Oryza sativa
  Intron number 2 from transcript LOC_Os05g05830.2 (locus LO C_Os05g05830) derived from phytozome v7.0 (chr-ID Chr5; po s 2926197 to 2927197)
ggtccaccgcctcaacgccgacccagccgtccgtatatctaatccatccgttcttactacaagaacaataatccccattcattctagtgtaattagtactacctggttagtgggatagatgtggagatgattttagattaggcttaggtggaatctaaggtaatcatagtgatgctgtaatgatttggggtaccttggcatgagctctacggtggagttgacttgatcttgtcttcgaatcggaacatcggtagtcagggtgatatgtgtttgggggttattgaaggatttaaggtatgtgtttatattcactatttggatctgaaactgaaaaggctatttaaggatatctccaatctctacaatgtggggttggtacttaatcgtgagattcacactgcaattccagtcctctgttgcttgacatctggactgaaaaatttgtgtgatcttttgaagtctgctcttgaatggatatcgggatacaggcatttgaagttgaaagattacataagatatgttgcctagttgattacaggagcttgtccttttgatctatatctgctaaacttgtaattatctcctcatgctattcgaacaaagtagttcctatttttcttgctcatgcttaaggactgactttatctgtttcatatgcaagatggatgttgtagtaaaaaaattggggcttagaagtggcttagatataatctattagcttgtctacaaaaagtgtgatttatattttcctaaccacgtggatgtcaggtaaacacaattaactctagatttaatgtccatttaataatgtacaagctagagttagtctgaaacagcactgtaacttcagattttgcctctgcctaatgttgaggtattgattggaggtatatgactacatctatatggatctgaattctgatgcaatcacaagtatttgacaatgaacttgtgctgtcataacaggcatacttgtccagcttccattgccaaagcatatt

SEQ ID NO: 10199 - DNA, 1025 bp, Oryza sativa
  Intron number 1 from transcript LOC_Os08g19100.1 (locus LO C_Os08g19100) derived from phytozome v7.0 (chr-ID Chr8; po s 11394392 to 11395416)
cggagcctcggggtcgattgctagcgggggtaaaggtcagcgaaggagatgggacggatgccagctaggcgaggcccggctaacacgttgactccttttttatgctggcacagtttggtggtggcggtggagaaggtgggaaattgaatctaacctgtgtttggattttgcgggaggaggagcagggggagttcgccggagaggctggtcattgctcccatcaccagcatgtcaaactccccctcccatcgcccggccaccgatgtgggcacataaaacgaggtgtggagaagaggataaggttagtaggagtagggggctcacccgttggaaccacccagcgatttgggttcgaaacccatcaattgcaactttttattacctttctatttttattcaccctagaaaaaaattgttcctatttttttattcgacctcacccaaaaaaaattatttgccccaaaaaaaatggctaagggaaaaaatcgtgcctttctaattttttattcgctacgacatgaaaaggaaaaaaaattaaatgatgaaagggggagggagtggaaaacagaatcaccaagtctcaagggaagtcaatttaccactaggccacgcaatacttatggaaaagaagagctctgaacatttttaaagagcatataactcagcgccatgcgcattggtgatgagggtgggagtcagcgccaaggcgatgttgggcctcagcatcagagcccatggcgttgaggttttggttcatttttataataagtttttggcgtggtctattctttaaataagttttttcaaaaggctcaaattatcaaaattttggtagtttttgggcaaagatatttttgaaaagaaaaacatctccaatcagcttgaatacacaccaaaattcacattcaaaaaattttcccaacaaagcccgattcatcggccctagatgccatcatcgggaaggggaaggaaaactaacccatcgttgatgaagggggaatgggccacgtgcagcaccgacctcc

SEQ ID NO: 10200 - DNA, 315 bp, Oryza sativa
  Intron number 7 from transcript LOC_Os03g13614.1 (locus LO C_Os03g13614) derived from phytozome v7.0 (chr-ID Chr3; po s 7361343 to 7361657 reverse strand)
ggacagttcaaactcctgtaagttcttgggcatcttttatctgctctgtagttgtagaaggcaagaagaatttcatctaatcttttttttttgcttccctgggtcttttagttgtgtccgtttattccagtttcagtgatcttgctgtcaaaattgttgcttatgctatcataatttagctacattttcatgtaaaaattaattggtttgatttgcacctttatttcattacctgtctacttagattagatatgattgtggttgaaaatcatgttgttagacatctgctggcggaacagagacagataagtcagg

SEQ ID NO: 10201 - DNA, 853 bp, Oryza sativa
  Intron number 1 from transcript LOC_Os06g40590.1 (locus LO C_Os06g40590) derived from phytozome v7.0 (chr-ID Chr6; po s 24203845 to 24204697 reverse strand)
tggcagcgccgccggatccctcgtctccaacggtgggacgctcctccttattaatgccctctaagcaaaaatgtgtgtgggaagaagcattaatttgatgataatcctcgtgtttttttttggcttcttacacgtgccgctgaattgtgtatttgtttggggttatttgtaggtctggttttttacattttatcatgttaattttggcttaatcataggttacttaattttctctaactgctcaaccccaaatgtttatttcaaatggttgtccacctgtatatccttatgtggtaattttggttttagttgctttcaggtttgggtttcaattttacttctcacttcatcttctctagtccatttatcatttattataggctatcattgcctgtggaaactatgctacagttgtgttaaggacgtgatttatgcttttgggttaagaatcgagcaatttagtatcaaattatttttgcatgtcttgttcccttactagtttggcacggcagacagattggatgcccttacttcttagcacagatggagatggacatctgaacttgatgtgattgttcaatttattaaggaagctgatgtaacagttcctgctcattaatttctttaaaagtcacatatacttgccacatttgagtgattggtagttaattttcctcgctacacagtctctatgtactatggtattgtgtagtattttgcaactttgacaaactattcatgcctctagtgcaacagcacatcggtcgtgttagtcgtttcttagctaatgtggtattatttttgtggaaacatactgtcttcttacttgcatcttgcacatcccttgtgatag

SEQ ID NO: 10202 - DNA, 1006 bp, Oryza sativa
  Intron number 1 from transcript LOC_Os03g31440.1 (locus LO C_Os03g31440) derived from phytozome v7.0 (chr-ID Chr3; po s 17913756 to 17914761 reverse strand)
catagagccagggcttagcgcgcttactgcgagaggtgaaattttgttttgtcggaagagggtgtgatggggttgatcatgaattagctatttggaagaagattgtacagtttggaaaggagttttttttttaggaaaaaagtatctactttggtttaactttcaaaacatttgaccaacaataatataaaacaaattatatttgttaaaaattatatcatagattgagatttaaatttactttcatatggttatagttttattgatcaaaccatatagtatatgaaaaataataagttaaagattaattttgggcaccgtgtcaactttgaccgcgccttatattatgggatagagggagtatgttcttaggcacgatttggtcatagagcacaaaaaaatattgcgatcaagttttactctattatataatacgtggatctagtccacatcttatatttagtcagaatatgtaggccatgtacgtagccggtacccaccttcttcacaacttgaattataaaaataatatcaaaactgtacgagtaggttagacttcttgcttcattggtacaaatggttcctttggtacagatggttcctttttccttggtacatatgattcttttttccttggaacaaagagggagttttttatccctaagtatgatgtaataatatcgatttgtactagattattaataagtatgtggaaaatattaaattttcagtgaaaatttctacactcatttttttagtgacttcaaagcatatttaatgatataaactgaacttccagccctatcatagatttttatttaaactttctcaatcaagctcttgcatcactgtcaatatatagcttctcttctaactgggtgctcaatcgtctatactcaaatcgacgtcgtacaaaaatatcttgttgcaactcactttcttaatttgttgcttttttttcccataacaaggtgccaactacgaacgggcactaggacaccagagc

SEQ ID NO: 10203 - DNA, 872 bp, Oryza sativa
  Intron number 1 from transcript LOC_Os07g09780.1 (locus LO C_Os07g09780) derived from phytozome v7.0 (chr-ID Chr7; po s 5207366 to 5208237)
ctttgttggacgccaacttgaagatattgctagtaagcttgtgttctatatatatacactccctcctctccgttttttgtttgacgccgttgattttctaaaattttaaatttgatcaaccaattttcttgtaaaaaaattatgtaattattgtttattttgttgtagcttgttttgttgttacaagcactttaaccatgacttgtgtttgtacgaaacttttggatcagacaattaaccaaacgtatgtgcaaaagctaatgttgtcaaatataaaaaaacagagggagtatagtatgccttgatctggaaaatatctagtatattaaaaaaacatcattaattattaataggaaaaagtccatattgctccctcagctatggtcatagtccgattatctcttaactaatctctctactcttgaaactattcgtatttcatcattggcctaaaccagggtgtttttcgaagacatagcgtcacttgatatccttattagaaatttaaaatatataaatatataatgtctatgatagaaagagaaaacggaggtgagcatgacacatagataagcagtatttttatttttattgttattatttattattgattggtatgttgatgccatcactaattgcctatatggactccatgtagaagccacatcgttgaaagtactctatttttgaaatataaaaagaaaatcaatgtaactgataatttttttctttacaactcaaatctttttgactgaaagtacaaattttcccgtatatacggtgatctatgcatatatatattcttctaatcactctcttttctgtcctcattttcagataatcgttacgggcgtatcgctgggggtattcgt

SEQ ID NO: 10204 - DNA, 856 bp, Oryza sativa
  Intron number 1 from transcript LOC_Os06g36400.1 (locus LO C_Os06g36400) derived from phytozome v7.0 (chr-ID Chr6; po s 21374922 to 21375777 reverse strand)
accaacgcgccctactacgccgtcaacggctgggggtgggtacactcaccctgcatctctctccctttcctttactgttcatgcacaaaattgaagcgatttgcgaaacaacgagttgcaattttcgtatttactggggaaattttaccactgattgaaagggtagtaagaaaattctgtgtgctttgctactcgtgtaaactgagatcatgtgaaaactatttgtattaatcggtgaaaactattcttgatactggtattctagcatgtggcactatttggttagataatgtgcccaagtaccaacacaactgccattctgtggtggatttggttttagtatcccacatagcaacaagatatgtgattctagtcatttataattatcaaaagattatactatatttaattggatttaagcggtaggcttacaatctttcctctagaatatcgtgcgacatggtattcctttcggaaaatactatgcgtacaatgtttttggttacaatctttctacgatctaacgccgtgtgccatccacctaggagagaaaacgtcttcttaggactggaacatgcagctgttaacagaaatgtttggtcgtaaggatatcgtaagcaaacattgtatgtgtagcagctctcattgctttctaatgaaatagtaatcaattttattcaaatcatggagttaaagaaaacaaactggtatcttgttgttttgaagggattgtataatctctctctttctgaagtgttaatcatgtttatatttctactgaaaaatatcactgcctcatttttgttcatgcttcctctgatttgtagatcactagagttcaacgagacctcatttg

SEQ ID NO: 10205 - DNA, 287 bp, Oryza sativa
  Intron number 2 from transcript LOC_Os05g50815.1 (locus LO C_Os05g50815) derived from phytozome v7.0 (chr-ID Chr5; po s 29084540 to 29084826)
gccttcctgtttctgtaagtagctaatagtactcaatttctttgctagcactagttttacactttcaaaccggccaatttataattccttttcttttttaaaaaaagaacaaggcggtgccttttcttttgtttcctttctcacatctatgcaattttcgataactttgatttttccacaatataagagtgaacttgtatgcctttgttgaaaaaaaaaatattaatttccttgtactgccttccaatgcagcaagcaaagtgcctgaattctattcaaagccctaa

SEQ ID NO: 10206 - DNA, 802 bp, Oryza sativa
  Intron number 2 from transcript LOC_Os06g13070.1 (locus LO C_Os06g13070) derived from phytozome v7.0 (chr-ID Chr6; po s 7170073 to 7170874 reverse strand)
agctatctcggttcaaagggatcgggccaaagactgtgagttccatctctctcttctcctgtttcttcagcgaatttggttttcgtcctgttggatttcatcgtaatgtagagaatgctagtattgattttgttgtgaaggatgaggaattgataaaatgtgactagtgagaagtagttgtagtttgcatgatggtagataatgatcaaaagcaaagcaagttgcttttcttgttgccatgtaagttaatacagcctgaactcaagtttccgcaaaagcctgcaaagtattttggctaacagtagtgttggtactaagttgtatgaaaaggaaattagagaaagtatgcccttgtgactgaaatcatatgcttgtgtcggttatacttaaatattgctgtgtgattatggatgggtgttagtcaccaacaaccagttttgctttgcaatgaatggctaacagaaacaggtgcctggtagcctccgtgcaatggcatggagcttcttctagattcttgtattcggagtgcaattgtccaactattttccttctactaagggtggtagttacaatcatggctggagttgtcaatggaaacttttgcaattatgattgacagtggaattcaaacagcattcccaaatcaaagaagggaccttacttgtgaatgtttataatatctttttacgctctttgattgcttgcttaatactatattggctgcttgagtaagtgtgcatatagctgatgatctttctaatatatgcaattatgcatgttatgacaggtggcgtgtgtgctg

SEQ ID NO: 10207 - DNA, 885 bp, Oryza sativa
  Intron number 1 from transcript LOC_Os04g04970.1 (locus LO C_Os04g04970) derived from phytozome v7.0 (chr-ID Chr4; po s 2403711 to 2404595)
ccgccctcagccgctacgcccgcctggcgctcaccgtgagagagagagaggaagagtgaggagagtgagagatagaagagcgtatgacgggggctcccactttgttttttaaaatagaatgctgactggactgccacgtgtgcgccacgtagattaaaaccaccgcggattaggtcgaggggggtaattcgtccggtttgtatagttgggggtgaagaatatccggttttgtggttcaggggggtaattcagacgaccgcgatagttcgggggggtatttcgtaccttttcctaaatacaaacaagattaagaagattaaggctgtgttcgccagtccatgttcccaaccggaacagtacgcgcggaaaatgaagcggtcattagcgcgtgattaattaagtattagctaaatggtttttaaaaatggattaatttgattttttaagcaactatcgtatgtatatatatacatatatatatacatatatatatatatatatatatatatatatatatatatatatttgtaaaaaacacaccgtttagcagtttaaaaagcgtgtgcacggaaaacgagggagaggggttgggaaaaggggatgtcaaacacagcctaagggcacccacaatggttatctataggctctctacaaaagatccatgtcagcatattttcttacttggaatgtattaaatgaagagagagagcaaagctatctactaacttagagatagtctatagagaaaaacgagacaatgcatgagagagctatagataccaatgtagacatactattaaggtggtttactattaatcgaatctattgctgagatgtacatgttttatagatagcaccttactttaccattgcgggtgctctaag

SEQ ID NO: 10208 - DNA, 753 bp, Oryza sativa
  Intron number 5 from transcript LOC_Os03g14830.1 (locus LO C_Os03g14830) derived from phytozome v7.0 (chr-ID Chr3; po s 8069085 to 8069837 reverse strand)
atttctattcttatagaaaacaggtaaagcttatttccttaattagcttgcacgtatgcttgcctttagccttttgatgagcttcacagcaccaaccccaggctagaagtcaaaaaagaagtgagatttaacctgaacgtggccctagttggttatttcagctttgcgaaccacctaatcttaaacatatattttcttcatattccactaaagcagtaacaaactcatttgccacttgccagtgcctaatttatggattaacatgataatttactgaaaagaggtagctcaggtagaaccataagggagaagttgtactgtgctttgtaatcggtattttctctttgtatatccgtggaaaatgtttacaattcacctatctgaaactgcaataaattgcacaattatttagaggcattgctttgaggtctgttctttctcttatacagttaataaatttgatatttgttcgtgtgtgctctatgtggtcatgatatcgtttatcatgtaaacaaataaagattcgatgggcatgcaaaggatgaaccatttgtaaataaataaaaaaaaaatcagtgcagataggttgcacggttctataaactgaaatatactctcttcccatgtttaacttatgtgtgaattacaatgcagatcacccttaaagagttgtgccactgttaaataattagcttgctattttctatcgtttctccagattgaagcacgtggccttcctctaactccagaggt

SEQ ID NO: 10209 - DNA, 768 bp, Oryza sativa
  Intron number 1 from transcript LOC_Os03g12700.1 (locus LO C_Os03g12700) derived from phytozome v7.0 (chr-ID Chr3; po s 6776768 to 6777535 reverse strand)
gagccaggcatcttcgagcctaggagctcaatctggtaaggaattatgtccttgcttagctctgtgctcttcgatactgttcatggaaacactacgcaggattccttgtttgggagatgcttcaggtgttcagtgttaagtcagaaactggaaatcaaatttcttgttctctgattccccaaaatcttatactctgtgcaagtggggatcatgattatgattacattatgattttatcatcctcttcttccccgttccatcttatgcaggagtatgaaagaactatcaaattattcagcagtacttcatccttagtttagaaaatcaaaggggatttctaaaaggaaccttaacactgcatcctaataagttcttgagttgtttgcgagtttgatttgcttttgttaaataatttctagttatgattcttatcattggggaaaaaaattcttccatttatgtcctgtatgcagaattcatcgtagttcttgagaagtatccggtatctgtatgtatttcatattcagaatttagcaaggtgttcgtccaagaatctatcttctgctcctatgttttgtatgaataggtcataggttttcattttcatccgtcatgtcctatgtagaattcataatacatgagcagtatcagtgtcaatgacttgcacagttgtgctcggctgaaaaatttgtcatatggtgcagttcatcacagatgcctaaaatccttccattttaacaccttttctttagtttttgattgttgcag

SEQ ID NO: 10210 - DNA, 895 bp, Oryza sativa
  Intron number 1 from transcript LOC_Os08g02930.1 (locus LO C_Os08g02930) derived from phytozome v7.0 (chr-ID Chr8; po s 1274757 to 1275651)
gaggaagcctcggggcagttggcgaggtaaatatttgacgccgttgatttattaaaatatatttgaccgttcgtttctgttactacttaaaaaatttatgatgtttttgtcgtccgtctaacttaaaaaaaagagcgatcctgaaaagaaaaacgcggcaacagaaaaacaaaagcgaatcggaggtggaaaaaaatctcctccccatctcccgatctcttttttttctttttatttctagaaaagtaaataaacaatctaaattcctaatcacaaaagggaacagatctaatctctaatccctaattttacttaaaaagttaaaaaagtttccgtcgtccgtatataataaaaaaccattatatggtacaaggggcggaaaaatccaattttctaattgtggtaactacaacgatccatataaacattatcattaatatggttatgcatgaaaagtgtatattgtcattggattctttttacccgttgcaacgcacgggcatttttgctagttatttaaaaaattgaagtaattcttaattatttttctatcatttgattcattgttaaatatacttttatgtatacatatagttttacatatttcacaaaagttattgaataagacgaacggtcaaacatgtgctaaaaaaatcaacggtgtcaaatatttagggacggagagagtatttgttacttccatctctagatttggcgtggttgtccacagtgtttcacgttgccacggcctccaccattcgccgagatttctgaccttggcctcaagtctcaacatctgctcctccagccagatgattttcatcttcctttatcatggctttgcctcctctccatcttaggagattgaagcttctagggtctaactctgcagctt

SEQ ID NO: 10211 - DNA, 746 bp, Oryza sativa
  Intron number 2 from transcript LOC_Os08g02930.1 (locus LO C_Os08g02930) derived from phytozome v7.0 (chr-ID Chr8; po s 1275682 to 1276427)
cattcgtcatttatttattcctgtacaaggtcaaggtgcttgatgaaaccccgttgtgaataagtttgttctgcgtgggacgatacataaaataaactcaactcttttgttttttttttctcttttggaaaggtaagcataagccagatggaccattcatgccgtacgtcgtgccggcgccggcagtcagagacaagggtgtcaactgcagggatgaaggcccatcgtatcgtacaacaactacggttgaacgttaatgcgagtatgcaactcactaatccggtgccaacagattgaccccatccattgcctcaaacgtcggcttcttgctcttgtccctgtaaaaggttctcccttttcttctctcttttcttttttttaaaaaaaaaagaaaatgctgcttgatttatattttgtccatgtgtctcatgttcttcttgcccccttttccctaattttcctagaaccacaaacaattaagaggaactgcaagtaggtggagcagactgaatgagaattcaatctcgcctctccgtatgtcctcctcttgttcgaagtaatgcccatatgtgtgcacattccaacactaggctcagtatgaggcatcatgtagcagagagaagagttatttagtaataaatatatatgttcatggtcgaaaattacatttttctatcactgcatattgctgcatgaatggatcataagcaggtgtgttgtcatcagggttgcatttaccgcggtaa

SEQ ID NO: 10212 - DNA, 880 bp, Oryza sativa
  Intron number 2 from transcript LOC_Os05g06290.1 (locus LO C_Os05g06290) derived from phytozome v7.0 (chr-ID Chr5; po s 3214674 to 3215553 reverse strand)
cttcgaaaggtacattgcattgctttcggaacaactttgcttcgaaaggtactccttgacttcgaaatgattagcaaattagaactttgtgattagcaaattagcctgtaggtagaactaggaccttgtttgggggagcttaagattttgagaagcaattggttggtagtcagtttatgagaatatgaagaagctggaaagttaggtttcttgtttctagtttattttctgtattctttaactacatcttctcagaatctagatgaaaagctgaactgtttgagtgagcttttaattttaggaaaagctgcagctgccaaaagctccctcaaacatgccctaggttgggtaagcacagagtaacgatttgacaccagagtacacagacatgggaggctgagagcttggggatggcgagggaaaaggtctaaaaaatattcaattttcaaagataagggcttgagtttgtctcttttacagtcttgaattgactgggccagctctaaatcagtcccgtattgttagcactaattctctgagatgtctaattgaagttttttttctgtgttagtactcgttgtgctcaacattttagagtgcttgagatccaatggtttttaatatttggcccatcaataagtttaaagctatctagattggttgtataaaatccatttgaccctctctttgaaatcaattatattgatgttatattgcaaccgttgtaaaaaaaaaattgtgcatcgatttttctctataagcttcatgggagaaatcaagagaaatcctatatggcgtggtccccaagctgtaataatcaaataataatgtgtcatcatgttttaacatgtccagtttcggtttgcaggatattgctata

SEQ ID NO: 10213 - DNA, 929 bp, Oryza sativa
  Intron number 2 from transcript LOC_Os03g11640.1 (locus LO C_Os03g11640) derived from phytozome v7.0 (chr-ID Chr3; po s 6070400 to 6071328 reverse strand)
gttttggacacatcaaggaggaccatacaaaggtacgcaatctgatacgtagtatcttctgcacaatacactgtttgaattggttgggggaatatcctgatgcctctcgtagtgcaaagaacaaaacgttatggtgagccaaaaaagatatatattctacgattctacgtactggagtatggaagtttgagatcgacaacaacatgattgagaacaaaactgaaaggttacccagatcactgttgatttgtttttgtttcttaaaaaaaaagagagatttggagggagatctatccctccaaggctccaaacattttaaagaagaaattgcgaacgtgttgagaattgaacacgagagctcagggttgaaaccacatgccaacttaccactgcattatcaattgcatctctagtttggttttactttaattaataatattattattttgaaatttttattccaccatttgaaatttaattaatttccaattgatccacggagcaattgttgtgccccatctagcccatttccagctgcacccaaatactcctcgaggcccaaatgtacctgaaataaaagagaccgatggtgctattttctactaggttgcatccttaggtctgttttgcaaagtactccactatggtgtgtttagttcacactaaaattgaaagttaggttgaaattggaacgatgtgatggaaaaattaaaagtttgtgtgtagtaaagttttgatgtgatggaaaagttggaagtttgaagaaaaagtttggaactaaacaagtcctatgttaattttaggatccgtatatcgatagatttaactcgtattttttttcaattctagatataattttgttttgcgcatttcctgatgcattttgtactgtagctgaacttggtgcactggatagtacaattatagtg

SEQ ID NO: 10214 - DNA, 741 bp, Oryza sativa
  Intron number 1 from transcript LOC_Os03g11640.1 (locus LO C_Os03g11640) derived from phytozome v7.0 (chr-ID Chr3; po s 6071337 to 6072077 reverse strand)
ttttttgaacgacgaaaaaggatacaaattgtctggtaattttctggacattcctgagttcttattaaaactttcacttgaatcagaagggagtatattcttcgttccttttgtttcacgttcaataacttggaaatactccatgtttatggagttaatggtcggacactaatgaataatggaaatgtggattctggagacaggcaaactgtttttcatatttctttgaaaaataagcatatgttggtctctgtcatggcagaataaggccacatttcttattttatgttttgtcagttatttctgtcgaacctattgaaagcattttaaaatttggtcaattctatgactactttccttttcaataccttatccagtgggaggtccagacaaagaacaaaagtaacaatctggtggttcaaaattaaagatcatagaggtggatgcctcggttaaaattaagttggatattaaggtggggcttcagaaaagcgtccagatgcttattcactttatattgaggagggtcaacgtggagaggaggcatcgagaacagtagcctttgcacacaaaaaaaaaacaaaacaaaaaaaaacaccccttttatgaagagatgcaggttgatctttttatcttttatttgcatcatttgctgatggtctggttgtcttgattgactctgatttaatattcttctcccaattagctgaactggaaagttctcacagaaatctgatacgt

SEQ ID NO: 10215 - DNA, 431 bp, Oryza sativa
  Intron number 1 from transcript LOC_Os06g06160.2 (locus LO C_Os06g06160) derived from phytozome v7.0 (chr-ID Chr6; po s 2854840 to 2855270)
ggaaggaagtctgaagcttgagccctgtcagttctgtaagatttgagctgattcttggcttccggtttattgccttttgttgtttgattttagtcgaattgttttggggaatcattcatatttgattcgagaagacttcaggatagaaacaaaaacaagggttcatttctcatgcttgcttctcatgtttctgtcaattgacagaaatattaggatttgcttcttttctccatgtaaattttgatttggttaatgaacactcagagagattcagaatgagccaataaacttggttcatcaggtgtaattttttatttcggcatgttgcaccatcttatacttaaaaacaaaattaaccctgtttttttaatgatttttttctgtgatctaagcaagggggttggacaaggattaatctgtgaggctcactc

SEQ ID NO: 10216 - DNA, 636 bp, Oryza sativa
  Intron number 1 from transcript LOC_Os06g08850.1 (locus LO C_Os06g08850) derived from phytozome v7.0 (chr-ID Chr6; po s 4436316 to 4436951)
gagctcaggaagcagaggaccgtgaggtgagagcggctactacttgctttgctttggggaatcggggtctttgagttttgagtttgtttttagcttggggggaagttggggggcgcggaggtgaaggcatgacaagggcagtctttctcccacttattagtggggaattcaagaagaattccatttcttgcgaggagaagatgaattcttgagtggatttggttgctggtggtggtcagttggtcactgctgtatttttggactagtgtttagctcatcagttatagttatgttcgatttaaatggttaggtttaatttcttgtgttggattatggataatcttgtagtgaatcccacaagttgtttgctaacttcaggcttaactttgatgagcacaattagagatatatttataaatgagaatgagatgggaaaggtagtctgataagcctaagaagatcatgtcatgctgattgctgatcatttcttgcttttagaatcactctaacaatttctctctctactcctgtataaaagaatctagcaaattaataatagtcttactttttgagtgaattctaatgctgtcttcgtccccagattccacgaggagagagcaaaaccaactataccca

SEQ ID NO: 10217 - DNA, 698 bp, Oryza sativa
  Intron number 2 from transcript LOC_Os05g45280.1 (locus LO C_Os05g45280) derived from phytozome v7.0 (chr-ID Chr5; po s 26218490 to 26219187 reverse strand)
actgggtaagtctctgaaggatgctgcctaataaatttctgctcgttcttctatgcatctgagtactgtctaccagtgaacagtataattctttctagctaaaagaaagttctatttatgctacagtgtctgtgatggtttatcatacatgacacggttgttgtgggtatgtattatagcatacttaaggaatgtggttacaattcaaaaggtcaaatttatgggttccagaattaataaaatcttccagaattcaaacttctgttctctttgcagaactgagagtaattcaggcaagtgctttggcaagatcactaggttcattgctggttcgtatgatagtgggtgcctatttcttggaatctgggatatagtctttattttttaaaaggaaatcagcttggagaaattggttaaatgccaagatggtcacgtttggttggaagttatgtagagttatagattgatactcgtgtggttgcttgattagtgattgtgtatatattcacatggcaatgacaacgatgaagcacacaattagggtttaacactgttttcttatgctatgataatttcaatgatagtatatgaatttatctttccacatgctagtttatacactaagatgtttgtttgttcattttcttttccggatacttccagtgtaattctcttccccatagcaataacattctaca

SEQ ID NO: 10218 - DNA, 742 bp, Oryza sativa
  Intron number 3 from transcript LOC_Os02g57080.2 (locus LO C_Os02g57080) derived from phytozome v7.0 (chr-ID Chr2; po s 34942862 to 34943603 reverse strand)
tcctcattcgccatccccatctccccttccacaaggtttgttatgctctaatcttttcatgaatcctagaggaagtttcttattctctgggagcatctaaatttgggtgttttcaatgcaatttaaaacttttgaaaagttatgattatttttggcaacatagttaatgctgtcatctgtcattccacacacatgacttgtgtacaaagcagaaaaaaagctcagcaacagtttgttttttatttcagagcagcagaatttgttttttcttgatgtttagatcagatttagattagggtttttttttgggtgtggttgatggcaccattatctgcgatatcaaactattgaattttcttattgaaaggtttaaatttaggtgctcctgaggctcaggaaacttcctcatgcatccttgtactgctacaccaaaaactttgatattattcttttcgttagttgtatatgtatcgttgtgctgttatcttccaataagtataggtgtcttatgcaaacctgtagccctattgcatatactttgcttgattgtgatctaaggtccatttcttcaacatggtattgtgagcccattctgtggataattctttatatgaagtgttgctattcacaacgagtatttttggaactaaattatgcttgcatcgttgcatgctttctcatattattttactaatagttccttgtatctttggcaggttgtactgataactgctctgatcca

SEQ ID NO: 10219 - DNA, 624 bp, Oryza sativa
  Intron number 1 from transcript LOC_Os07g08000.1 (locus LO C_Os07g08000) derived from phytozome v7.0 (chr-ID Chr7; po s 4048897 to 4049520)
agaacacggccttcatttcatccaattgagtcaaggtagagattcttctggcttttcttctcttcttcctctccaaatatcaatgctgcttcaagcttttccaagaatcgatgtgccttcagattaatgttcttctggcttttgtttttttctctcttctttttcaagcatctgtatgattgtttttcatgctttcttcttctcttcattgcttgttcttcatctgttccttccctaaatgctgtcctctagtgtgaaattaggaattgcaaccgaattttgcaaattgatatcaacttcgcatttacatagctattaattgcacttcttattgtcctttatgtcctcctttcttgattatgacttgtgaattttcatgaggcaaatccattgccaatgttctttcaagctgaaagcaaagcattcttggctcatctgttccctatccaagaaccctcaatggattttgaattttttgaatggcatgacatctcgagccatttcaaaaactagtatttggctgggccacatttgaacagtttcacagaaatttcttgctgttcccttcaaaatcatatcattttcatcgcagagaggaaatctgaatttgggggcggccaagaa

SEQ ID NO: 10220 - DNA, 711 bp, Oryza sativa
  Intron number 1 from transcript LOC_Os03g05200.1 (locus LO C_Os03g05200) derived from phytozome v7.0 (chr-ID Chr3; po s 2523493 to 2524203 reverse strand)
agcggcagtggtatcaaatccaatccaagtcacgggtataaaactctcctgtttcactcaatcctgcttatgatattcttgcattttatttgcaacttttgcttaggagtgactgaaaacctatttgaattgataactgagaacaaaagtgctaaatcaatcaaatagctttagtcttcgaggtcaagtagaaatgggcaggtccacgcaatcagatagtagaaaacagcagcagacaatgagctctaatgcttccacctatcttactatgtgttgtatgcatttcaacaacggaatcattgctcaacagctatattgttaaagaaaacgatcaaattgctaataccgcaatggtgcaatatgaattttcatacttgtagcgaagtagttgatgcattctgatgttctcatgaatcataacccggtgaacctggtattatttgagagtgtgatccccagagcaaattcacacaccatagtacctctaatattttgatctacaagtatcaaacatgtctcaagtacaaaagtacttcccttagaaccacagagatctgccttttgtattgcagtgcgctagtgcccatgttagtttctgttgcattattttggtttgtattcaatgtgaacttccccttgttactacgctggttatttactcttcttttttctgcaggacaataagcagtataaggaaccaacaacactctt

SEQ ID NO: 10221 - DNA, 1000 bp, Oryza sativa
  Intron number 1 from transcript LOC_Os04g41020.1 (locus LO C_Os04g41020) derived from phytozome v7.0 (chr-ID Chr4; po s 24154733 to 24155732)
gcccggccgccctcgtgccaccctcggggaagaaggtgatgctcctagttcccatctcgcagcgcgcacacacactcttcgattgctgcctccggtgccttctagtgttctgtgtggtagtacggagtcgcgcgcgattagtgagatctggttggaattaggtatgcctctgtggtttggttggactagtagaacacatctgggttgattggtatcttcccctcgacaccaaatgccttgctctctagttgcacttatgagctatagtttaggcatcacctttgatagtactagcaggttgattgcttcctgaagggtcttgatgtgccggttgtgaaatttgcaacagtatttttgcttcttaggagaggaagaaattaatcatgcattcatgcctgcaacttctggttgagatttcagagtgaagagctgtttgcgaacagtaatctttaggagaacccgcaaaatctatactcatgctaatgtttatgaactgtaatctctgtgtttttgaattaacataggcatggaagcagcaaacacatgctaaatcatgtccgtttcaccatttgtttgagctagaagcagcaaaaagccatctgattttcattccgatcccatgccggattaaattaagactacttattttgctgtaactgccagtttttgtttatctaggcatatacagtcctaccatctaatctaatatcttggtcctacacatcagagtaaacacttaattatgtttgatatcttatttctgtgtatactgcatgaatttggcaagtgttgtaaaaaatgtaaaaactcatgtatctcacttcgatatttcttccccttcccattagttttattatataatgacttatgctatgaggactgttggcgtgatctataattttgtatggcattttcaagttgacttgttttttaagtagtcgtttttttttaattttcttgtgcagcaaacaaaggaaaaaatatctataggttccacgga

SEQ ID NO: 10222 - DNA, 720 bp, Oryza sativa
  Intron number 1 from transcript LOC_Os04g27250.4 (locus LO C_Os04g27250) derived from phytozome v7.0 (chr-ID Chr4; po s 15928812 to 15929531)
ttcgaggtaaatactaaatcttgatggtaagaaataatgaaattattcttcttatcctggactgttgagcatcacttttatctttgcaatttaacattgaacagatgaaaatggaacaattgaaacacgtgggaagacaaaactgaaagatatttggaaccttccgaaaggtcttaggattgtggttcagtgcaatgatctcaatcaggcagtaggagatgaagctggaattttgtctaaatttcttggaatggtagctaggaatggtactttgtgtagcttaagctacacagactggagatttctaataggaaagagagagagaaaaaaaatgaattaaaagttaaaaaggacattcttaaacaaatatccatgttcaggacaaggttttgcaactaccaaccaagcaatctactgtagataaggtcattctcttcctatttgttatgtcgaactcactacatagcattatatgatctcaatattgtttgcaactgtcaacgtttattgtagctgttcattacaatcttatgtcttatcttattacacagcaatcaaacttatggccaaaatcaccttgagaaacagaggaagattatttgtgtgaaggctagtcttcacttttttattgattggaactgacagtgtttgattataaaaataactagattattgtagtttgtgccaatattttgatattccgtgcagaataaaggaaac

SEQ ID NO: 10223 - DNA, 676 bp, Oryza sativa
  Intron number 1 from transcript LOC_Os08g25734.1 (locus LO C_Os08g25734) derived from phytozome v7.0 (chr-ID Chr8; po s 15667319 to 15667994 reverse strand)
gctcgcagacctgcctcgacccggacgccagcacggtacgcgcgccatcgcgaccacgccaccgagggcgatgggataatttaatggcggccgcttctctgcacacctcgctgcttctctgatccgtcgtgtggttgcgttgttttggtggggaatctgactcgcgcggagatggattttttatcttctttttctttttaatagtttagatgcgcaaatgcggttggcgtcttgtccttccattttggacgttttcgtggttccttaattgtttatttccaataaatgtggcaatcgtaggattgttagtggttgaggagtaagattttgtgggtgggagaacataagaaattggtaacaacttgtcatgctctatggtttttgggctcttaaactgttgcgcaatcagatcaggtggtagctggaccattatatatcattcaaaacaattctcttcccaaatgtttttaatcattgaggtttgacatagaattttcagtagtacatacaccatgaccattgctttctaaggatctctaaattcaaattgcacaataatcttttttaagacaagattttgccccactcatcgtttttgttggataattatctctactgatgctcttcttttgttggtgcagagtgtgcttggaatcattcttggaggtggtgcagg

SEQ ID NO: 10224 - DNA, 500 bp, Oryza sativa
  Intron number 1 from transcript LOC_Os07g15000.1 (locus LO C_Os07g15000) derived from phytozome v7.0 (chr-ID Chr7; po s 8600226 to 8600725 reverse strand)
aacgtaagaaagaagatacacaaaggtaaaacatatgagtttggttgatttaaattaactgatatgttttattacccttgaaaactacaagcatacgaaataaaattattttgattttattgtctgatttgttgaacaaataaaccaatattcggacggctaagcctgcccgatcgagtggttaaatcacctatcgacttttttaattgataacatatatagcatttgtcttttccttccagcatacaatcaggtgatgctcaactctgccaatgattactcactgagacactggttcttgcaatatcgtctaaagaaatctgtagctgtttggcactagacaccactcatgaagatgcagtacaggtttatatatattttttcttacagaccgaaaactgcactatgcatgcataatcctttttgctacacaagctaaatcacatgaaaccttattatgctcaggtgttacagagacgccagtttattacgtctatcag

SEQ ID NO: 10225 - DNA, 863 bp, Oryza sativa
  Intron number 1 from transcript LOC_Os05g40270.2 (locus LO C_Os05g40270) derived from phytozome v7.0 (chr-ID Chr5; po s 23591066 to 23591928)
gtttaatttggggtagtgttcttcttcgcaacaaggtatattctccccgcttgaatcatgggggcgcgtttgcctgtgtgtgagttttttttttttgtgaatttttcggtggttcggttggattattctcagccacattttaccacaggaatttgctggggttttggcgttccttcctcttttatataggagtagtagtcgacaggtcccatctcgagttttcatcctgatttgatgggattttcggcatttctcgcgatttttttgcacttgttgagttggtactagtacaaaagtaggagtactactactagctagtagctgccgctgcatgcatctgcggagtttagttgggacgtcgtggttgcgaattaggatggtgttactgtcaggtttcgttggcctgatgttgctgagtggcagatgtgttatttgtctctagtttgattgattttgatcgcacagagccattgcttgagcacaaaagcgactagctaggcaggttgttagaggcagaagaagtaggtacaagtaaacgatacaaatggggtgatcttcttttctgaagaactttcatgtcacttgcatactgttaccgtcaaatttggccatctgtttcagttttcattgatccaactttcattaagcaacggagtatagagaaccggagtgatttgttttcttgatattggggaattttctgaaccccatgtaccaaactgggcatgcatatgcaaacacccaaaacctcgtgcttcaaaaagaggaataaatgatatctaacatcataaacaatggtggtattcataaactcttcttttttcctagttaggatcctgaaattttggaattttgctgtcgtg

SEQ ID NO: 10226 - DNA, 988 bp, Oryza sativa
  Intron number 1 from transcript LOC_Os08g38550.1 (locus LO C_Os08g38550) derived from phytozome v7.0 (chr-ID Chr8; po s 24370214 to 24371201)
gcctgtaacggcgcaaggcgagcgacatcgcggtggtgagcggcgaggagagtcgccggcgacagctagccgcgcccgcaggaggaggcggagctcgtcatgacgcaagaggaggacgacggcgggctctcttcgtattataagtcattttaattttaatttttatttactatttttttaaatttaattaagtttatagaaaattatgagaatatttctaacccaaagcaaacatattgctaaactatattaaatgttagttttggtgaaacaaattccagtgttgtagatgttaattttttctacaaatttgatcagaaattgtttaagaaagattcaaaataacttataataggaaatgaaggagctaagacgtttggcggcccactaagccaatgcggaagatacgttggcccatgtaactatactataaagcatttcatactgacatattacacatagtgacatgcctcatgcttaagagcaccgagaaaatctggccaagttttatggctgtatacacacagctgatttatactacaagcatatactctgtcgtttcatattatatataatacgttgtggctctttttctaatcaaacttttttaaatttgaccaagttttaaaaaagcatagcaacattttgaacagaaaacaaacatacactcaaaatatattcaatattagatttaatttgaacacaaaacagacatacaataaaaatatattcagtattagctttaatactaaaactaatatggtattgtagatgttgctaaatttttatataaatttgattaagcttaaaaaaatgtgactaggaaaaacatccaaacgtattataatatgaaacagtgggattacattttagttggatcatataggcgaaagcccaaaggtatttggttatagagaaagaaattatcaatttcctggttttttttttgacaggtcagtttcctgcatcttacgggcggtccagaaaa

SEQ ID NO: 10227 - DNA, 794 bp, Oryza sativa
  Intron number 1 from transcript LOC_Os08g01320.1 (locus LO C_Os08g01320) derived from phytozome v7.0 (chr-ID Chr8; po s 201648 to 202441 reverse strand)
gtccggcccgccacgccgctcctgcgtctcccctggtacatatactcctctactttcttctttcttcttgccaccaccaccatatttagctttaggctatggaccatccccgttttagtgcatgtcttgtcttcactctccatgccatcttcagactttgaacacctgacctgacctgaccacttaacatgctatctgcaaattgtctaatagagcacttcttcacttcccttaccagctatctactctagtagtaccattcaccattcaggtatggtggctagttgaagatgctcccaaagagtcagaccctccctatgcatatggtcatcatatttctctatgaaatactcgtagggcatattggggggaaaaggtgttttcttgcataacactttcattttaattccaactatcatgtgagcaataactcaaagggaagggctatacgcagaagactgtttctaccttccattctactgctttagttttgggtgaacctttttaagctcagaacagctccaccatctccttcatgaaacataaggtgtctgttttctaattttcacaggacactaggtttactggaatttgggtggctttgtcattgttataatatgaatagaacgaaaatagggtaatgttcactttcaagcattaacagcccaatggcttttatttccaagtcattccatagtcatcttgcttctatagctactgcagtgatgttttactgatgttacgggcagcctcattgatcttcataagtattgtccaatttttcctgacagtgc

SEQ ID NO: 10228 - DNA, 1041 bp, Oryza sativa
  Intron number 2 from transcript LOC_Os04g52380.2 (locus LO C_Os04g52380) derived from phytozome v7.0 (chr-ID Chr4; po s 30936154 to 30937194 reverse strand)
agaaccaatctgggtctagagtcaagggtgatacggtaagtgtagttccttttgattaaatcatgaaaataccaaacttgatcctttttttaatacgttatgtttcaaaattagtcatgcacatttttggtgtccttctgaactctgatgtctcttccacaagcaagccaaggataatccttgaaagaacaagtggctgctaatgattagatgcaaagcaaccccttgacttctcatctgcattagaatttatgcagtttcatttagtggagtctagaccacttacctttctttcccagaagcaatttatcaaatactctgatgatatatagttggattgcattgctgtttgccagctgtcaacatccgcaatgtgatggagcaagttaatgaacaacctttctgcaacacaattctaatatcaggacatgttcgagtaaatttctgtggaaccaaggacttttctttagctcttttcaattaactaaacatagcagtattttctgtgatactccgtgtgtcttctgtttggttaacaactgcctacgttacagtattatggagaaattactcgttagtgaatctttttcctttgtttatgcaaacatttagcataagaatgtgaagagttaatgcatggtaatgatcaacttgcagttcaccaatgttttctgcaataaaaataattagtcagttttgcacagaatatttttgttcaaccttgaaattatgacagtatgaatatgaagaatgagagctgctaacttcacaccttggttttagcctcacactaaaataattttggcgtgttctaacaagttagtagtgaatgtattctgttgataacaaattgattacaacttttcttgagttgttttcttacaataccttttaagctctcgttttatgccataagatggtctacttgaacctattatttgcttgacatcattttgtttactttatgttttaaccttttgttctgtagttttaactggtatgtccatcttatcactgcagttctatattgatccaaccaat

SEQ ID NO: 10229 - DNA, 855 bp, Oryza sativa
  Intron number 2 from transcript LOC_Os06g39690.2 (locus LO C_Os06g39690) derived from phytozome v7.0 (chr-ID Chr6; po s 23559331 to 23560185)
tcaaccctcagaatctcaagttctgtagccacgtggttagcattcttgcttgacactgcagcttttggaacatttgtttcttcgaattaatgtacgttaagattttcttttattgttcatgaaatgaattagtggtattttaatcccctgaatcatatgtatggatcacgtcttacagagtctactatatgttagaaccataggtctcctgcttgcgacattcgagacctctgagatgaagcatatatattaagcatatgcagcttagaagttaaagtcttaaaagagtacggtttcttttatcaagagcattagtaagcagtcagtctggagtaagatttcgagagatgagatcagggagttcctgacaaagctttcagacaagctttagttgcatacttatgtttagctatgtcaaataactttttattgttgcaattctccaccggatacagttcctcctataatgcaatgcttcatagtcctaattcaatttgatactaaattttagcttttcaggaagcttgtgggactatttattgatgggccggcaaaacaatacttagcttccatagtccacacttgataaagtttacaatactcttaataattgcacttgctgtgatgtgccgtagagttcctggttcttacttatttgtttttttccccccgtttagtgtgcatttttgtaaatagaagattaaggatactatgcttcccagcagagtgttggagagattttgtacatacagagaactccaacacactaaataagtttacccaagtaatcattaaatattattataacttcccaatatgctgaagtgcaggatatttgggactcaatacagaata

SEQ ID NO: 10230 - DNA, 522 bp, Oryza sativa
  Intron number 1 from transcript LOC_Os03g63920.1 (locus LO C_Os03g63920) derived from phytozome v7.0 (chr-ID Chr3; po s 36107192 to 36107713)
gctcgcaacaaggtaacctcgctcgctcgttcgcacctcctcgtcctccatgatttgcactccaactccaacgccacccttcctaaaccctatctataccctcctcctccgtccccttcaaataaaataaaggttttatccccccattcctagggtttttgggacagtaataatttacttcgcattcgattgttgtgatttagtatctatttacatccatcttcacattaacctatctgcattcctctccttccgctgcaccatgcacttgttgttaggaagtatcctgattttacattttcgacttgcacaccgtgataccaaaatctaatgaaaaaaaaaataaaaaccagaaatcaaacccatgatactgatcccccccccccgtccctgtgattctgcgtgtttgacaaaaataaaaagagaagaaaaaaccaatatgcaagaccatttctggtagcactttttattgccaatcaattatattttttttaatgtaggaagcattggttttgctattgg

SEQ ID NO: 10231 - DNA, 256 bp, Oryza sativa
  Intron number 3 from transcript LOC_Os08g09250.2 (locus LO C_Os08g09250) derived from phytozome v7.0 (chr-ID Chr8; po s 5374604 to 5374859 reverse strand)
tgaggacaccaactttgcacttgaattgacatacagtatgttattgatcctctgatattttgcttcttcatagatgattagatattgtagttaatgttttttaaagtatgtgttaacctaacaaaacaactggagaattgttctgtttttcttctctcttaactcaaacaagtcagctcttgtttttattttgagtgtactgtcacccatttctacactctaatgtgcctatatgttttttgttttttgatagatt

SEQ ID NO: 10232 - DNA, 901 bp, Oryza sativa
  Intron number 1 from transcript LOC_Os08g09250.2 (locus LO C_Os08g09250) derived from phytozome v7.0 (chr-ID Chr8; po s 5375141 to 5376041 reverse strand)
tccactccactgaatcctcccacctcggctcgaaggtactcttcccatctatccgtaatcagtggcttcaattatccagtgttcttctgttgttggtgatgttgttggtgaattccaactttcttggattactttgacaactttgttcaggtcttctttactctgtgtgttggggggatgggatggtgagatcattctttctctccagtccatccaatttggtgcggatttgattggggattagtcgtttatttacgaaaaattttgtttggggggggggggggtggttcgacggaacccgcatgccgctcaaaggtggggatctttttgtgttaattttaccggaggtcttgggcttcggtagaggttctgtcaggcctcgggggtaatgggtaatgaccccgaaatggaactcaaaactaagaacggattggggagatttgggagaattacgttgtgtgctagtttggagttagcatgtaaaacttccagatcttgaacctgcgtgtcttcgttcagaaaagggtccaagaactccagataagagagaaaagggtacagagaaattacagtagaacaccatggtggatgaaaaagaaaattagggagaaatcgactaggaataaagagtcctcataagctgcggctaaaggattttcttcctggggatatgaaactttcatcttatcttacaactgccgtttcatggaatattttgttttgtttttttttttggttttgaaatgatagctttgaggcatccttttttgctttcgaccagagttctgtccaagtgatttactgtcattgtatggacgctgagattattcttagtcctttgattttattataattagcttgtttattcttcttatcaaatttacactctctcactttagga

SEQ ID NO: 10233 - DNA, 799 bp, Oryza sativa
  Intron number 2 from transcript LOC_Os07g02340.1 (locus LO C_Os07g02340) derived from phytozome v7.0 (chr-ID Chr7; po s 796812 to 797610)
aacatccaggtgagcacccgatccatctcctcccccctcccgattcgctccctccacctaaccctattctattattcctcatcttcttctttcccccaattgcttgtgttttgggaccacgatttatggtgggatttagggaggattttttgattacgcgcgtgtagacacgcaggaaatcaatcgggttcaattccttcggctctgttcagacatatatcgacagcctatgttctcaaagttctgttaattttgagcttttataaaggaaaaaagaactgctgatgtaaaacaatcgtttatttttcacaagataggctgctgttaatgattccaggttagctttatgcttgcctggatctaattccaggttttgttagttgagatccatgtactcttatagttctgtatatgtcagtgtgatgatttatctgaaccttcgggtagcaatagcatcgacaatccttgtgaggtattatcctgttgtgtaatcgttagaatatatgtgatggaagttatgtcctcaacaaattaatgaactgattgttaagtatctttcatcagtccactagttatgtattaagccgaagtttgccgatggcttcactggttaagatatgtaaagcatgaatttgtgctcctagcgttgttgtttctcgaatctgtagtcgtattgatatctagtgcattctcttggtgaatttttccattgtagccatcacgatgtacgattttgtggtaatcttttttcttaatctggtgtactcaacaacggttccatctcaatgcagtgcaagat

SEQ ID NO: 10234 - DNA, 769 bp, Oryza sativa
  Intron number 3 from transcript LOC_Os04g12900.1 (locus LO C_Os04g12900) derived from phytozome v7.0 (chr-ID Chr4; po s 7124817 to 7125585)
cccccagctcgaggtcttatctcacaaagccacaggtatggaacaaaaagtcatgttttattgacaaagatacgcaactagtaagcaactttctttaatctggttaaacgttactcaaggccccatatctgtttgattcaaatgcggaaatgtaatatattcaattcagattttgagtcaaattggtaataatattgttaatttcagttcattcactaaattactagttcaaatatttcatgagacagaattaatgtcataaggccatgattatagatatgtggtgtgaatagaagactgaaagtcccagatattggaatatatgaaccatatctctctcaaaattacataagccgcgtagacagttaaaagtagttgtcagagtaaagacaaaagcacgaatacaatagttgtaactgatgcatagatactgatcagtttgattggagtgtttcttcacttaaatttaatggcatctatagaatcctacaaggacatactacccctaattttgtacacatggcatactgagtcattttcataagatctatattttggatcccacgaacctagctcaagttactgccttcaaccaaattatccaatgggtaacctatcttgtcaatccaactcttgggtgataagatgtgtgtatcatgtcaattcttctatcggaactctctgcagtaatcagtttcaaataattaagctgcaggtagaaactgatcattcttcattaatcaacaggttgtttcttaactcactgtgg

SEQ ID NO: 10235 - DNA, 886 bp, Oryza sativa
  Intron number 2 from transcript LOC_Os06g11630.1 (locus LO C_Os06g11630) derived from phytozome v7.0 (chr-ID Chr6; po s 6160784 to 6161669 reverse strand)
cctggcgatccattgttcaccttcattggggaccagtaagtagagttaatcaaaatcattttatcatgtgtggtcctttccttcattgcagaggttagatcgcttgaatggaaacggtacgataccttataaccagacggttgcacatgaatttgctagagaattagacagttaatttacatctcatcattgcataatgcgctgggccgtttgctcaagagatggcctacattgccatgggatgcattgataggtaatatatgatttgtgaagctgcatgatatgaactggatcacggggatacagtatcctctatcctctttgaattgacaaggggcagcgtgtgttctggatcatcttgattaggtagacatatgctaaggtgtttccttttatttatttatcttcacacattaaacttcaatcaatatgtgctagatttggccgtgtccaaacaactatgccccatgtatgttttggggattaatgctgtcaaattctgcccatccaaatcacatcagtacaaacagaaaagacttcagtttattaaggtctatcagttgccaaaatagtactagtgatccttgccttttaaattgtctgtagattgattatgatgtatgctgaaagcagcaatacagtatcctgtacattcccccaccacgtcgtgtgtaccattaactgatttagtacatattctcaattggaatatttttactgcacaagacatatccattttggcatatccggtgagccttccatctataaacctgaaataacgggggtatgcagtacataattcttgtgatttattagtgatcctacttcattatgttttgtttgatagtacttatttgcttttgcaagtgcacggtcacttaaaacc

SEQ ID NO: 10236 - DNA, 613 bp, Oryza sativa
  Intron number 1 from transcript LOC_Os06g11630.1 (locus LO C_Os06g11630) derived from phytozome v7.0 (chr-ID Chr6; po s 6161951 to 6162563 reverse strand)
gcgcgccgccgccgccgggaaggccggctggcgaggtgcggtgaccgccccctcctcctcctctccttcccaaccccgccctctcgtgtccatctttttttttgcgccattttatgtgagccacccggtcttgaggattaagctggattggtttcttcccctcgaactgacccatcatccagtttgttgtggatttctttgatgcgttgtgtagtactcgtagtcgtagcagcctgtgttcctcgagaaattgggggttcaactgaacctcgtgtccgcaggaaggggatgggattttttttttaatttgctgttagtttttttggattcttagtatttgcctctttattgtgggattttttttctctgccattttcttcctatgaattgcgtatagcatgtgtttcatccaataaagttattaagaaaactataatttttagcactgtgttcaccgacacaaggaggggaagaaatcgaggccgtttaattataaaatccttagtaaatcacttaaattttgtgaattttaaggttaatcttgctagaaaattacttaatctttgttcttggcacaggtagtcgaaaaatatcgcctctgaaggtcagcact

SEQ ID NO: 10237 - DNA, 809 bp, Oryza sativa
  Intron number 1 from transcript LOC_Os06g50180.1 (locus LO C_Os06g50180) derived from phytozome v7.0 (chr-ID Chr6; po s 30384783 to 30385591 reverse strand)
actcatccgcgccggcaagggcggcgtccgcgcaggtcatctctctctttgctttgctgcctcattctcaggtcaaccgttgtttgcttcttgggattggtcgccgcctagctcaattggtcgcacggcatctcgcttagtttgacgacgcccgcatctcaatcccttctctggggaataatcgaacactttggtggatcttgattcgtatgcagcaacacctggaattatggattacgcagagcatttttgcaattggatcccatcctgtcctgatgattagggtggtttttttgtttgacaaatcgttgcttacctgcgccgccgcgattgggtggcggctgctgttgctccgcttctagatcttgacgaggctgcggttggttagtccaagtcgtaagcctgctcgtgcgtgcaaatcagcatcgcggtcgtcgccattgtcgctgtcttctagatgcaaacggaaactcttgctgtttcgtcttggaagaccttgtcaattcaaatgcttttgggtcggatctctaaaatttgaacccagatatcttgactttcagatgccgtgctccctatttatccccctgcgttcaattaccatggttggcattttggcaatgtaaaagcaaatgtttttttttactgtttcatctccgttgccaatctaaacatggattctttttctttttctttttttttacttactctgatgactctttgtgggtaattgccctcccatttcatcttacctgcttcttttctaacacattacaggtggtggaggatacacttatcttttggaacctcta

SEQ ID NO: 10238 - DNA, 352 bp, Oryza sativa
  Intron number 2 from transcript LOC_Os03g04430.1 (locus LO C_Os03g04430) derived from phytozome v7.0 (chr-ID Chr3; po s 2055639 to 2055990)
ttccaccatctcaggagtaaggctcctatgttatacttccttccctttgaagtttttggaatttggaggcactgatgatgatgcaattataaaatatactaccttttgcttgttactttgatcatatgttaccttttcttttatgaaaatgagtatgatgatgctagtatttttttttagctcgaagaggtatgaagatgctagtgcctggtactcattgcttgcagaagaaaattgattagatgctcagtagatttgctttgtatacttgcattattatcaagtctttgttatctgcctcagtttatgacaaattatttccttttcaggatttgcaactgagcacaagtgc

SEQ ID NO: 10239 - DNA, 983 bp, Oryza sativa
  Intron number 2 from transcript LOC_Os08g33920.1 (locus LO C_Os08g33920) derived from phytozome v7.0 (chr-ID Chr8; po s 21219058 to 21220040 reverse strand)
cgaagtgccccgtcaccgggaagaagatccagggggtgagcgatgcgcgatgcggcttcttcttttattcgctgtattttactttattttgggatttccgcggggctattatagtgtcgcatgcggatggattgtgcgtcgttagtgttgtatccgatgtacgagtaggtcctggtttgcgctgattagtagctgtgcttaatgctgttattgtggaactaatgcttgaactagatcttgtttttgggttgtttgattagatgatttggtggtggaatttgtctttaaggttaattaaattgtgattttttttggggggggggactgctgcacgaaatttgattggggaatgctgttgtctttttaatcttttgtctaaatctgttgatgaacaagtatagtatttggcttatggaccaaatcgaatgtactaattagtaatgggtaatacaggtagcagtaggtgaatctactaaaaatgggtgcttgttacattgtccaatgacatttaggtggtatgtgttgtagctaagagagaattgctctggagttctgaaatgctaattgaatagtctacacttcttggtactatttcaagtctattgctccttggatttatggcttcatatttacgtccgatcttgtcttgtgcaacattacagtagtcgaggttatttcacttcctagcctactactgggcctgaagtggcgcttttagttccaatacaagcagaaaccctttgtttgtttgtattaattgagaaatgtagtgcaggatagagtcgtttgtttgtattagttgagaaatgtactgcaggatagagaactttggttgacttacaatcatggataccgtttggttcttcatattaccgatattacttttctctatgctatttcactggatatttgtacttgaggatttatacagtgttctattttctccagattccccacttgaggcctgctgagtacaagaggtc

SEQ ID NO: 10240 - DNA, 696 bp, Oryza sativa
  Intron number 1 from transcript LOC_Os03g07190.1 (locus LO C_Os03g07190) derived from phytozome v7.0 (chr-ID Chr3; po s 3680541 to 3681236)
gaatcgctcgactccctcgcctacggtaagagttgtcggatcctcaccctcttttcgtggatcgtatccgttcttgatcgattattaaggagtaaaagaaaaaaaatcttcgatcgatttaggggttttagtttttactagggggtttaccgagatcgctcgataaactgcgttctccatactcttgaagtgtccgaagatttcatctttatctgtttgatttggcatcagcaccaacgacgtgaggcttgtacgtgcacgcgtacataccgtatttcgtgatatacgtgtgattcgaggtttgcctagttaagacttaagagcatgcgtgtacgtgacaattaacagtaacaatctctagctgtttccacagtttttggctctgctcaatgtatcgagatttgaatgttgacatgtcattgtaacaaagtgctgaattgacatgtatgctgtagtaaaacataccatcctgcattcagtagtatcagaaacactgatccccactccctagttaagctttatattttaacactttgatttttcaatcaaagatcggttagaaatggtgttcaaaagatttatgcttttagaaatgctgttttctttgtatgctttgctaaactgttttacaagcatggcagtctgaaattttactaactggtgtttttcttctggttcagtgttggagacaaaccc

SEQ ID NO: 10241 - DNA, 943 bp, Oryza sativa
  Intron number 1 from transcript LOC_Os03g56540.2 (locus LO C_Os03g56540) derived from phytozome v7.0 (chr-ID Chr3; po s 32201976 to 32202918)
cgcggatacagttgtccccggtcggtgtcgatgtacgcctcctcctcctcctcctcctcctcctcctcttctctccctcatcatccgaggaatttccagcctcggtgtcccgcacggtctggtccccgggccgggtgttcatcaatgcgaggcacaaagttttccagacctgtcaccagtgtagaatcgagaggcgctgtacaatacgatgatattagttagtagcgtgtgttcgagaatcgagaggaggtgctgtacaatacgatgataaaaacgttgggggattttttttttctgccatggttgtctccgcgcgtccttttgcgatgtggagaggtctctgacttggggagctaggaggaatcgggcattaagtcccgggtggtgtttgtgtggtcaggggaagagcagcagacgccggactgcactgccttgcacctgcggtttatattcttttattggttcatgtgctgaaatctccaattgagttgttcacctttgttgtaatgtcgttgattagtcaggaagtcatgtctagttgctcctttttttggttgaaccaaactgtcctttttatacagaaaagtaaactatgttagtgtggttagtgatcttcaaatgcaaagatgttaaattgttcagatcagatttttagtacgttttgtttgattaaacctgcatcagcagcttatcgttaaagtaaagtttaagaatacgagtctcatgaccggtttcagggtgattgtgggtaacataatgaattccactgtaggggtttggttatattcaatcgtgcttcctaaaaaagtagtcatgtcgcaaattgctcatttagattgttgtgcgactgtaagggatatgatctgagaactgtatcgccttgctcatatagtttgttgttatgtaaggtgttcagtctgagaactgcatcgccttgcatctc

SEQ ID NO: 10242 - DNA, 1012 bp, Oryza sativa
  Intron number 3 from transcript LOC_Os03g48040.2 (locus LO C_Os03g48040) derived from phytozome v7.0 (chr-ID Chr3; po s 27303468 to 27304479)
gcaggacatcacgctgcccttcgcgtgccgccgtaggctcccatcctcgtgcctttcccaggacacattttttcttctgattggctacactttgccctcactactcactcgctcactcaagcttattagggcagtcccaaccctccacctagtatggtgtctatgacattaactacattgccatgtaggacttttagcttatgcggcactatattaattaagagagagattgaagagaggaagaaactgggtctcatgcaagacacagcttcaacacgagaacctatgcactagacactatcaagttttacattgggagagaatagtgtcttcataatagatgaagattaaatatgattggtagagaagagagatgatgtatttattaatggcccactttaaaaaaccatgggttgtagagtgtagttttgattgtgatgtcttattaacatggcaccatagacactgcttatggatattatgagttgggactgccctaagagtcaagttaatctgtgctggactttaaggcttagtcgttgcttagacaaatccatcatactctgctagattttagttgcacaaaaaggaagcatttttttacttgtttgtcaaatgttattcgtattgtattatgtatgcttaatcacggcaaaggaacacattaagcaagaaaaacgtgtgccgtaccatgttgatcaattgacacaagcggttgcttacttttggactcagccagtgtagtctctggctagcgtatcatttctcccttttcttctgatctacaatatagataagcaaatgaattactttagggaatgtgcaaatggattgctcactttgtattaagatggagaaagaaaagttacatcatcagcaattcggcatgcaaaaccagcagattgaccaaaacaaaaaaccaaatacaaccaggcgactatacttctgaattactgaagacacatttttctaatcaggttgctgtactagctgtgcggttcggataaagtca

SEQ ID NO: 10243 - DNA, 622 bp, Oryza sativa
  Intron number 3 from transcript LOC_Os08g28680.1 (locus LO C_Os08g28680) derived from phytozome v7.0 (chr-ID Chr8; po s 17511453 to 17512074 reverse strand)
tgtaagttattgcaggtgttacttttacatgtaattttcatttggtggttctgtgaaatatgttaccaatttttctgaattggtgattctacatctacagcatccattgaaatgacatttgaattgtatgcaaaataaaatatgcattctcctcttcctgcattaataagtgcattccatgatgtaatgatagttgttagaacaaggaataacaggagtcatgtgtgtatcatgaagggctaaataagtttttctatttgataggtttcgtatgatattttacataggaatgcatgcaggggcattagcagcaaacttaactttgcctttgtcttctcaacatatacctgttcttgattacggtattgcagtaacttgtaattattgcttttgtttttgtccttttggtttctttattctgcatggggagtatttaccctgtagctactcaaatttgaagaaagtggcagaagtggaccatgttttacctttctcgttttctatttcagataatggtggaacacagccaagtacttattattttaatttcaagtgttggttctaatatggattttgttattcttcagaggtggtaaatttatttttactttccaagttcctc

SEQ ID NO: 10244 - DNA, 723 bp, Oryza sativa
  Intron number 1 from transcript LOC_Os06g07200.1 (locus LO C_Os06g07200) derived from phytozome v7.0 (chr-ID Chr6; po s 3446400 to 3447122 reverse strand)
aggaaccttctcacggtatgattgatcgccttgttgcctgttatgagttttatagttgtgttgattggttgttcttgtggtgattttgggggtgaaaattttgagttctcggttctgatggtggttttttttttttattattttgccggtttctgattattgaggatcgttttgtttgctgaagccttttgaatattttaattttggtgaacttcatgttatatggactcctggtttatgtttggatcgatcttgatcgacttcgtgacaggatcggatttggtgttcttactgatatctgtggaaattattgagttgttaagaaatatctttttaagacttttgtcaagacatgattatcataaatatcttgatgaccttttgtttttttttaaaaaaaaatcttgacaggattacgcggtgaattttgttcctgattttgtattagatatttgtttgaaacgaaaaggcaggaggattgccttttatatgttaattaatagagcagagcagaatttgtattagatatgctattatattttgcaagactatatatttggaatgaccacagtaccttcttgacccaagttttgattgcaagcctgatataatacttttttttatctctttcaaattttgagaaaaatgtgaaactaacagcatattttgtggttcttcaattttacaggattcgtttgagctcagcaaagtggaccaagcccc

SEQ ID NO: 10245 - DNA, 1002 bp, Oryza sativa
  Intron number 4 from transcript LOC_Os07g06390.2 (locus LO C_Os07g06390) derived from phytozome v7.0 (chr-ID Chr7; po s 3106575 to 3107576 reverse strand)
cccagccccgctatttctccacaagagctaccagggtaatattactgctctaattgccttgcctatctgctacctctgtccccaaatccaaatatgagggattttggctctgcattcgcattgccaaaatcccttgtatttcttttcggggacggatgaaatcgattctgcatttgcatccacgcttcctaactggatgagagaggagtgacctggagaagctacctgtgacgctggaagttttacccctgttttctgtccctagaagttttgcccctattttctgtccctagaaagtcctgaagttacctaaagttgcattttgatctctctgtggttgaagtcttgctgcgctgatcatctgtccttcttgccacacgggtggagtctgcttttagtatttgggtacagttcttttctgattaagattcagattttatccgcactcaccctgtcctgctatttctccacgcgagctaccagggtaatgttgctagtttaatattttatatcactattttggtgtgatttgctgaaaaaaagttgttttctgatttgctacaagaaactatttgataggattttctaaagtgatttatattgctatgacactaaaaatgattgtttgaactagcttttatctgacaacatcctttgatttgctgaaccctagtttaaagtgccaattagtgcaaagatatgtagtgttgagtgaaaagtttggtttggcttttgtaccttgtgaagtttttatgaaaaattctaagttatttgcacatgtgcatatgcatgtgttgacgctgttgtcttcgcatggttactcgcatcttcaaacaatttcttacaaaaatattatcaaaattatgtatgttatggccgttaggtgcttgcgtgattaattttgtatgatgcagatcatatattaaattttatatgtatgactgatatgtggatcgattttaattatggcctttatatattatgtagttagcaagcaagaaa

SEQ ID NO: 10246 - DNA, 675 bp, Oryza sativa
  Intron number 2 from transcript LOC_Os06g10430.3 (locus LO C_Os06g10430) derived from phytozome v7.0 (chr-ID Chr6; po s 5359591 to 5360265)
aagtgaaaagaaaaagggacaagaaaagagaggtatacatttttgcagttttggactcatgttaatgaggattgagaaatgtctttttactattttcttttggcagtagcccattaactcatagccaactacacaaatagttatgcttcgtatacctttcttatagtcgtaggacaatcattgttgtgacagcaaactacaatgtaaaatttgatcatatacccactgtttttaagattgaaattgaggaattaccctcccgacccacatgcaattaccttagatgaatccatacgtcattggcacaggagagtaaatcctcaatttctaaagggatggtatatgatcaaacctccatttacataccaagatgtagtacgcctgaatatgtgaattcaattgttaatgttaggtttgccataattttacagtgtgtaatttgaaactgagatggattcaaagtctacatcttccatctaattacaatcttattagtttttgaggctcttcatgttacagtttggttgtgttgaatttctttatgcccacatgtgagattttgctccgaatgtgatgtttaatccattgcttaaagtcacacattgctatggatcaccctttttgatcatgcatatctgttgctgttttagagtgctggacagaaaactgttcctg

SEQ ID NO: 10247 - DNA, 893 bp, Oryza sativa
  Intron number 2 from transcript LOC_Os07g47500.1 (locus LO C_Os07g47500) derived from phytozome v7.0 (chr-ID Chr7; po s 28401886 to 28402778)
gcggcgagtcggaggctaaggacggtgtggaggaggtactcttcagtaatttcgctgtttttttgagttattatgtgctttcgtttggtcataatgtacattcctctgttggatttcatatttctgatgtgcactgagccttccagtatataaccagtccaattccctgatataccacgccttgagctgtatgcctgtatggctgtatcatgctcaagccaattttaagatgatctcaaggtttaattgttgcacggtagaggcataccaacatttttcttttaaaagatggctcaaaagaagattcagtgacattttaaatctggggcgaagatgttgatattactagttgaataacatgacacagtttgcattcaagtttgttgtcggaacactctttcttttgggggtcatatcttcatccaaatccaacttagagtcttagacacatactagttgaaacacctaaagaaaaaggctggagtgtgatatgatctctctcgataccatcctatatgtactaaaagcaactttctgaaactgcaaaggatatgctctatgattgtgagatgcgagacataactagaattttcctgcctatctgaaagtctgacttatagaactcttgatagtctgctgcctattgttacgttataaaggtgaatttcctgctgactgctgtgtcacacttctttgttgccatctgctaaataactcatcgcatagactttctgataatgttgcctagaggtaaaggtaatatgacaatttgtagatcattgtttggccttttctgttggaactttcttgtagcacatattaaatggcttcatgttaactctcaattctttgaggcagaagtcatattcaagagcaattaaggttgttcttag

SEQ ID NO: 10248 - DNA, 702 bp, Oryza sativa
  Intron number 4 from transcript LOC_Os03g50560.2 (locus LO C_Os03g50560) derived from phytozome v7.0 (chr-ID Chr3; po s 28863047 to 28863748 reverse strand)
cacgcaaacaatccgcagtaagaatatgttacattttaatggcttgctctttatttcaactttaaagttacatcaaacggaagcaatcactacttttattttgggaaggattatgattacatcgtatctcaaacaaaagagatttattattattattattaactgttttctacagacaagttattcttgcggcaagtattttggggttaagacctggccaaaaaaaactccttgttgacaagagttgagcagtggaataagagaacatagtgatttcttataaatgctagaagatacttggattatattgctgttactacctacatttgcattggttgtctatatatgttattttccaccagtcaaacctgttcgttttgacaattagcagttaaatttcttagcaatcatgtaacatgggtttttaaactatgtgccatggtaagatcattccaaaattagtcagtttatttgaatcagatctggatgtcaagtggaaatgcatccattatgtgtcaaatcaattatgatgccattttagattttaaaaccattttatctgcatattgaactgtttccgatcatgggacaccaaagtacttcctgctgtacttgttggtactccatttctatgcatttgtctgaatttcatcatttgtatgaacagggagagaaatcttcctctgctgaatctgtagtcag

SEQ ID NO: 10249 - DNA, 867 bp, Oryza sativa
  Intron number 1 from transcript LOC_Os05g40270.10 (locus L OC_Os05g40270) derived from phytozome v7.0 (chr-ID Chr5; p os 23591066 to 23591932)
gtttaatttggggtagtgttcttcttcgcaacaaggtatattctccccgcttgaatcatgggggcgcgtttgcctgtgtgtgagttttttttttttgtgaatttttcggtggttcggttggattattctcagccacattttaccacaggaatttgctggggttttggcgttccttcctcttttatataggagtagtagtcgacaggtcccatctcgagttttcatcctgatttgatgggattttcggcatttctcgcgatttttttgcacttgttgagttggtactagtacaaaagtaggagtactactactagctagtagctgccgctgcatgcatctgcggagtttagttgggacgtcgtggttgcgaattaggatggtgttactgtcaggtttcgttggcctgatgttgctgagtggcagatgtgttatttgtctctagtttgattgattttgatcgcacagagccattgcttgagcacaaaagcgactagctaggcaggttgttagaggcagaagaagtaggtacaagtaaacgatacaaatggggtgatcttcttttctgaagaactttcatgtcacttgcatactgttaccgtcaaatttggccatctgtttcagttttcattgatccaactttcattaagcaacggagtatagagaaccggagtgatttgttttcttgatattggggaattttctgaaccccatgtaccaaactgggcatgcatatgcaaacacccaaaacctcgtgcttcaaaaagaggaataaatgatatctaacatcataaacaatggtggtattcataaactcttcttttttcctagttaggatcctgaaattttggaattttgctgtcgtggata

SEQ ID NO: 10250 - DNA, 900 bp, Oryza sativa
  Intron number 1 from transcript LOC_Os07g13050.1 (locus LO C_Os07g13050) derived from phytozome v7.0 (chr-ID Chr7; po s 7482044 to 7482943 reverse strand)
caaattccgcgtcagtggcgccgccacatcccaaggttcgtccctttcttccgttacattactctgttttgcttcctgccgagatgaaatgctgcataaacaatctcccactcaactagtcaaagaattatgccctcaatgatatgaaagtattagttgtatgataatgcgttagtttttgagccaacttgattttgacttgagatatgttagttcttgagccaaaatgattttgacttgagtgatgaaaacgattacgagcaagctcttttttttgtttgcacgtcctctatattgccaatattgtgtttgctaatgtaaattaactgaaataacatagatgtcacattcatatactgctaacacatcttggttccgcatgttgctgctcatggtcttctttggcatgtatcctcaccagccgtcttttccacgctcaatcattttgaatctcataggcactgtaatgtaagtccattaaaacaaccgacaaatgcatggctgcacctactttgtatttcacttggtcagacctaaactgatagcataccggccattcattttcccttgttttttcttacatttaagatggaggattgtgtatttgatgtttggctgtgcaataatctttaactctggtccccaaattgtaaagttaatttttcctcttaatccatatttaccatctaagcccgtgcagagcataacttaggcagacactgcacaattagtgaagcaaactgtgtactaagtcatgtaatgcagtgcacaagtgtgagcacaatctgatggatgatgtcgagcgctgcaagggatgacagcttaaggactgaaatttttgctgttgcacgtgtgaaattctgctttcattggtcaggtgcttgttggttgatagggagt

SEQ ID NO: 10251 - DNA, 850 bp, Oryza sativa
  Intron number 4 from transcript LOC_Os06g06740.1 (locus LO C_Os06g06740) derived from phytozome v7.0 (chr-ID Chr6; po s 3159807 to 3160656)
gcacaaccatttgaggcctaacatcaaggtactctgtgctcctacattttgtttgtccaagtactgtttcttaatttgaaaaggatataatactgtctatttcgatgctttcagtgcacagaaaagaaaatgttcttgtgaataatgcccctgcatttcaatgttgttcgatatttccttgttttacttattgcttgtttgaacgaaattcctcaagaaaagccaattttgatacattcatatcaatgctaataaactccccaatacatttattctcccttcacaaccttgagataaactccccaatagaatactgtctattttgaaggtcacggaatctgaacgcaatgtgtaaagtaaatgtttgaagctagtcaaagattaaaaactggtctaagagagagcattgaatattgatttgaatacatttaaatcaatcctaataaaaaaattgaccttaaactatccctaaatattttcctatatagcattcgatcattttgattagcccaacattcacaagtgctcaaggacagtttcttcttgataagcagggagccaggataaggtggtgttctaaatagaaaggaagccacagaaattaggaacaaaaacgcttaggaagcatcacagtagatgagaattagaaaagctaaatatcattttgcaactgttaatatcaaggagaaaccaataaatctataagaacggatattcataaaaaaaattggcatgttcctttttaaaaataaaaactgacatgttagttttcatgacaatcacactttttatagagtttccatgcttggaataatccttctgtgtaacaaaaaaaaatgcagaaagatac

SEQ ID NO: 10252 - DNA, 635 bp, Oryza sativa
  Intron number 2 from transcript LOC_Os08g30930.1 (locus LO C_Os08g30930) derived from phytozome v7.0 (chr-ID Chr8; po s 19094568 to 19095202)
ttgcacgcaggtgtgtatttcttctgccttactctgtcaccaatttaccctgatgccataattgtaatttccgtaagcatacctaaattttgatgcacatctattttaatttcctagttgatatctgaagttcaggtggtgcattacttctgtattacaaatagaattgctaaatattactgtagtctgaattatttggtgctaagtaggagtttccctttgtgttcgctaaaatgctgtttggtgctagtgagatcttttgtctgttcctgttcagttctctttttgaaaggaaaacttattatactggttaagtttcagttttggttcatttcagagatacattgttgctcactgcctacaggataatggtgccattgcccttgtttgcaaaagagttcatggacttcttcaaaaaagttgcttgttatatttgtttcatttaatcaatacctagagttttttttttaaaaaaaattcctattgttgattgggaactacacaatttcacaatctacattcatctattttaagttatgttccataatccgcactcggaaacttcaaatgtgctccattatttttcagtttcttgtgtttttctggttatcatttcatccaattttcctgcagtg

SEQ ID NO: 10253 - DNA, 707 bp, Oryza sativa
  Intron number 1 from transcript LOC_Os08g07480.1 (locus LO C_Os08g07480) derived from phytozome v7.0 (chr-ID Chr8; po s 4199252 to 4199958 reverse strand)
agaagggtgcgtgtctcccttcccctgtttcttgatcgctccgccgccgggtttgttcgccgttgggcgagtggtcagaggatgaggaggagaaaagaaaaggaaataccaaaaaggaaaaaaccctcttttttttttgtttgtgacgcacaaatctgttgcggcgagtgggttttgtttggttttggcacgagcttgcttgctctgtttttcttttattatttccgttttgttgtttatcagattgcgattgttgatgctgggttgcgtgtgtgatgatgatgatggaagtggggggtgattgggcggtttttgatggtggttttcaaccaaaaaaaggaaagaaaaggagagattttttgttgctgtgattttggttttgggaatggtgcgttttgatcatggattgctgactttgtttagaccaaaataagaccatcttttggagatgattgcgatgttgttgtgggtgatgtgaggggtgggtcgggaggggatcatcgtgggatcttcattttgtgacgagcaacaggttcgctcgatgttgtcggggtttgttcagagaggagcagagatagtggtctaataggttaagaaaggttgatttctttttgtgccattgctgggataggaatgtttaggtaaaatggttctctcttgactgttgtgcagaaaggccccgggtcttctgtctagcaccacaagat

SEQ ID NO: 10254 - DNA, 759 bp, Oryza sativa
  Intron number 1 from transcript LOC_Os04g41130.1 (locus LO C_Os04g41130) derived from phytozome v7.0 (chr-ID Chr4; po s 24207420 to 24208178 reverse strand)
ttgctggccgcgacataaggaacctttacactctggtaagtccaaatcctcattactgcattgaacaatattgagttcataaggaatactatttggcatctagcccagggggaaaaaagcatgtgcctaattacacgagccccatccaactgtgtagagtgctatacctgtagcatgtgctattagtgttcagtacgtatagaacactggaagcaaatattctcagctttctgtaagttgtacaacttcatctgtgtgactgggtggattgaaaaagacctttgcacctctatttctttatttcgtgtaaacaaagatattctgtttgcttttgataggtcagcacatatacctgcatatttgaatgctgcctgtggatcaaaattatgcacgtcagccatgaagtataggaatctgaatcattatgattagatgcattaaaaaattaactgtactttgctagaatcatgaagatgcattagtagtgacacaaccattgaagctaacaaaataatagtgttatagaaagttaattttctaaagcatcaaagttatggagagccttgtatctgggttgtgtcaattaagaaagcaatggccatataatcttagtggaacacaagtaactgagatgcacagttcatggaccttataccctcaaattcaaagtttttatcctttgcttggaatgataatgttttatttaactaaaaagttatatttttccctagaagtaacacgctaacttgcttttaggtg

SEQ ID NO: 10255 - DNA, 508 bp, Oryza sativa
  Intron number 3 from transcript LOC_Os08g15840.4 (locus LO C_Os08g15840) derived from phytozome v7.0 (chr-ID Chr8; po s 9630694 to 9631201 reverse strand)
gtgttgatatcaacctcaggaactgcagaggacaggtaaagttattttctttctcaccttgttcatggccattattcatgaccattaatatcttgccttggtttataatatttcatcaacgtagcaacaagtgtaaagaatattttccactagggactaagaaatacaatctattcttctagatttggtttatatgcaaatactattgaaatgtttttttttgcatattatacaaacatgtgcattccacgtgcatatgaggctcctaacgttctatgggatgagaagcagtagcctttgttagaaaggggcagcaagctagacagacctacttttcttttgtttggattatgttgtttaccttagctttgatataacacatggagtactcttcaatggataattgaatatcaactctttaatttgttttcatttctgttgtgctaaataaaatgtttctatggttttgtgctaatgaacaataaactgccgtacgcagactgctcta

SEQ ID NO: 10256 - DNA, 493 bp, Oryza sativa
  Intron number 1 from transcript LOC_Os07g39090.1 (locus LO C_Os07g39090) derived from phytozome v7.0 (chr-ID Chr7; po s 23428932 to 23429424 reverse strand)
agggaggaggcccacggcgggagctggccaaggtcaggaccgtggaattcaacgacccgtacatctcacccatggacgtcctcaaaccctgatcgaacatggtggtgccaagaattttctttcttaagctcttgttggggttcgagatatgaaattattagccatgtgtttattgtagtgtttaatgtcgaaatcattggcaattttgttgtgagccagtggtttaacctagaattcttttgtacattgaaaacagagcaaatgctctgctgttagtagtaattatgaactgcatgtaatatcagatgtacttaacaaacattatctattctgaactgaagagtactactaagttttttttttcacgattgcaacaaaattctgtcgcgatgcggattaccactcattatgagctttgaattagttgggccaaaacacttagttcgtgggcctctcagcctacaaaggcaggcacaagctgcccagaaccaga

SEQ ID NO: 10257 - DNA, 775 bp, Oryza sativa
  Intron number 2 from transcript LOC_Os04g51370.2 (locus LO C_Os04g51370) derived from phytozome v7.0 (chr-ID Chr4; po s 30236727 to 30237501 reverse strand)
aacttggaattggtcaacaggacatcaaatcggaggtttaacttttctcagaattgatgctacttcggttgtgtttgatttgcttcatctttttgtccagttttggagagcactatgcaccattaaattataggttgattggtctagattattaattcaagtatcaacaatacacaaattcatgagttgaaaactgtaataatgatactgaataaaattccacacattgagaagtcactatatgaactggtagtggttgaatataccttaaatgctcttcaagctttcatgatattttatcccattgccaatcatgccaatataggagtatcgtgcagatagccatggtatgccagagtttttacttcataccacaagggaagaaatcatctaggttcctagtaccgagtgatgaggaatctaaattttgtcttttgcacttccttcaagcctccaaatttctactgtaaccctttaaacaaaattaaaagcgctgataacctctctagtctccactgcccttctcgtatgggagttaattcagcatcatggcaaagcgtttgtttgatatcataaggatagtactggtggatgggggatcaggactgtataacaaacaatcaaattttgaagtagttaaagaatcctgtcctgtttgtctttcctttgacatcccctgttctaaatcccaggaatgttgaacattgtttagcatcccattgaattatatgttcgttttttctttattgtggtgctcaggttcgtagtcaaggaa

SEQ ID NO: 10258 - DNA, 966 bp, Oryza sativa
  Intron number 1 from transcript LOC_Os06g07650.1 (locus LO C_Os06g07650) derived from phytozome v7.0 (chr-ID Chr6; po s 3701732 to 3702697 reverse strand)
actactaggaggttttggaccactgaagagcacaggttaatgcttaattctaatcatatgcatggatgatatatatatctggtgttattctttaatttctcatggcatgaagtctttagtttctttttgtatgttcaattaaaattccactctttaggagatcttcttatgcatctttgtttccatgcatgcatgaatgttgtgttctttttttctttggagtgggtgggggggggggttcaatcttaaatataagaacatgttgtgttttgattccttgtggtgcagtgatttagttctttcaagcaaaaaaaaaaaaaagaagttatgttgtggcgtatgatgagaagttgtttaactgcttatatatacagtaagacattgtagtcaaataatatcacttgtaattacctatttctgtttgtttaaagtacatgtgaattttggaactctctccgaatatatgaaaaataattgtacatgttaatatatgaatatattaaaaagaatactttttaatgtaactgcatctgaatatgtgtatacaagatgacaaaatagtgtatccgaagtgatatatcatatcttacatattgcgtttgaccttaaaaggtattctttttttaaaaaaatcatgtctattttggaagtagcagtggtatatttatgtctttatatgcacaaaggtccacatcttagtccaaggaaaaaaatgccgttcacttcttcagtacaacaacaagaagtcagtgtttctcctctgagtctgaccgaacgatggacacagattttctcaaacaattttagttcgcaaagatttcttacatattgcgaggagtttagaaagaacacagctcgatcataaatttaatttaatttaatttaatttaatttatacagtcctaaaactttttaaatttgaaaattgcaggcagtttctgagggggctgcgtgtgtacggacgtg

SEQ ID NO: 10259 - DNA, 734 bp, Oryza sativa
  Intron number 1 from transcript LOC_Os08g04180.1 (locus LO C_Os08g04180) derived from phytozome v7.0 (chr-ID Chr8; po s 2029108 to 2029841)
ccctcgccggcgacgaagatttccaggtaaccgccgcggtgctggatcccccctccccccactccgatttattggatttggtgctcgcttgtttcgatttgattcgcgaagtatatttcgtttgggttttattttcttcaacccccttggaaaacgccaccatttcatttcgtcgccgaattggttgatggtcggagatgttgatttgcaaggtttagtccgtcgattttgtttcttttgtggattaatgatgattgcttcgattatattcttatagtttgcttcttttattttgtgtggattaacgctagtaatacgtgatacttgtgtgtgtttgagatctctggtttgtggtagaggggagaagtcacatcaatttgcagaaccaatcaatcttcctttgagaccgattgatttttcgacgaagattcagttttcgtctgtgtccctttccgagaactgcagccacatatagtactttggagcccctattcttcaagcaccggtatcactgtatttgagctgtagctacatcgcctttcagagaccaaatgcatttcaatagtgtgaatagtttgtttcatttatcactgcaatgcctgcaacttcatatgattcctgaatcatgcgaaatgtttagaagtagtagtagtcattttgattgctagggagattatgaaataacaagagagttgtgtgcttgacaacaccttgctctttgcagaaagaacttg

SEQ ID NO: 10260 - DNA, 985 bp, Oryza sativa
  Intron number 2 from transcript LOC_Os04g39090.2 (locus LO C_Os04g39090) derived from phytozome v7.0 (chr-ID Chr4; po s 23045591 to 23046575)
gccagcagcgtaacaaaaggtatctgtcttggacctacaaagttaattgtgggaaaagcctttcttgcccgacaactcttggctccatctatttttcatccctcagctagaaaatcactaaaatctgcccctcaaccctgagaaccagttgaaatatgctcttccaccctatttgattgttgttttgactgaaatggtgtgctagtatgatccaatgtggtggtggggtctgttttgtcactggaggagagaataagaggaaaatgttgtttcgattgccaccaatgacatgtgggcctgactaccaccacatactaactagataacaggggctgtgaatagtattgcagaaactatagcaaactacgagtattgtttgtgcatgttgagtgtcctttgattgttatgcaccccctattatgtgtcatggatcagatatgtgttactaaacatgtcattggttaattaagttcgaccagttgatcatttagcatgtatatttgaattacaactgttggatcaataatttatcaaatttgttaataacactctaatattgtatggagtattgagcggtttactttcatttatgtttgtacttgatacttaatagcagagcagttttctgtttgttgattgcggtaccatttgctctctcattcgtgttagctgatctagagtctagacatgcggacatgcacaagctttttttattttgctcaacaagtgttcctacatttataagtcaataacaattatgctttatttgatagctttggtctgttatgttattctgtgttccttagaaagtaattgcttactataccatttacaagatgatataattagatatatcatgttagtttcgttatctcccttgcattccgatagatatgattgtttcaatcctaatcaattgcttagatattttactttctcatgccagaaattttttactcacttttcagacgacagatagaaacca

SEQ ID NO: 10261 - DNA, 550 bp, Oryza sativa
  Intron number 3 from transcript LOC_Os04g39090.2 (locus LO C_Os04g39090) derived from phytozome v7.0 (chr-ID Chr4; po s 23047287 to 23047836)
cctacagctcctgtggtttgtattttgtacttcctcttgtatatttaatttagtcatgagtctgagtaaaaagcaaaacttagctaaattagtttcattatttattcttggcatttggaattattttgaaccatgtgttctgttttatatttattattgaataaaaagttaccttaagaaagatatatctgtaataataaggttcatcttgtagtcgtttgttactactgcattggaaccagaagacctttagtcacattgtttaagcatgatcttttgcatttacttgctggtacagatcatacagtacaacttccatttgtgacaacggacaacactctgcttccattcaatatgatatgataactttagttatccgtataagagctcaactagttatgcttgtaactagctgaggtgctctactaattttattagcgagtttctgattttgtgttttcttaactatcatttgttcttgcaattctctgacattgctgtatgcaattttgcagccagaagtaccgctaacagttactgggttgctgaa

SEQ ID NO: 10262 - DNA, 814 bp, Oryza sativa
  Intron number 2 from transcript LOC_Os04g52710.2 (locus LO C_Os04g52710) derived from phytozome v7.0 (chr-ID Chr4; po s 31205168 to 31205981)
ctcgatgtaagtatggttttcctgtggcagcgattgtgaatgaggatttctcctatatagatagaatgtgcttgtatactgttgtgtgtagaaatgtttggtttttgacttaggggcttgtctaaagcaagaatatcagttgaaccattcgaagaggaaaagcaattgcttagtgcggaaggggaaacaatacctattaaactaacgaaaacatcttaggtcaaatccactaaatggttgaatagacgctcttaagttgcattcacttcagacgtttttgagtgccactggtgcaatcttattattgttgggagaaagtgatgtgttggggccattaaagcctgaataggtcctacttggaaaaaatctgccgcttttcaagttccacgtgttttagctgctgttcgctaagaactgttctatcaagcaattagttcactatttgggaaatgctatttagttttgttttcctggtatgatgtgatacatgtaacttccacctattaactcatgtatggctttggttattccacgagcatgataaatgaccacttcatgtgaccaagtcctttaacctcgaatcaatatttcaagagaaatcacgcaaaattatcaacatcagttgcgtgtagcaaattgccagcgcttcattcgaaagaagtgtttttgtctagttttctgcattttgaatggttctactattgtatatgtttctcttgtaggtaccagtctttacacatgctgcataaatatgctcttttagtcaaatctggccattaattctgtgtctataacttacagcaactggcatctc

SEQ ID NO: 10263 - DNA, 715 bp, Oryza sativa
  Intron number 3 from transcript LOC_Os04g52960.1 (locus LO C_Os04g52960) derived from phytozome v7.0 (chr-ID Chr4; po s 31361115 to 31361829)
gttctgaggaggattcttcagaatctgaagaggaggtaactagttcaatcttcctcaatgtagcttgctgatattctcttaatctgacttctgtttagagtcttagttcaatataggtattgtatatcagatgattgattgctttgcttactattataagattcatggtatttgtgaccttgaatgctcaggattaaaattggctgatattttctccgaccacctgttttatctcagtagcttgcactatatctcagtatttctcctatatttatacaacttttatattttattatttatactatctcgtttgactttcttcttgaatgccttgggctaaagtgttattacaaatgtttgctttgaggaactaatgaattttttggaggaactaatgaatcagtagaagtagcagaaattgtattattatctatatgctgtcaagctgtaattttgacctctgagattgaatagtttgaacattggttaaacagtagaagttttcctcttttgcctcagtctcatatgaaaataggtcatttcatattgaagatgcatgttttctttcgttaactgtttattttgtgtagtttcgtgtgttccaaattataatgaacatggagttttttttttctttgcactgctttcttcctattaattattttcaaaattctttgcaggtaaaggcccaaccaaagaagactgtccaaccgaa

SEQ ID NO: 10264 - DNA, 809 bp, Oryza sativa
  Intron number 3 from transcript LOC_Os03g44820.1 (locus LO C_Os03g44820) derived from phytozome v7.0 (chr-ID Chr3; po s 25275402 to 25276210)
cgatcttgaatctgttgagccttcacttagagctggtattcgtcctgatctttgcatatcatcttgaactattgcttgtttggtcctatcatatgatttggtaaaatgactcagagtaactcagttagctattagcctattacaaagtagaggtttgtagttcaactggcagttagccatttgcttcattcttgatacagttcagttttgtgcaatcgtctaggtcgtgatacactatctttcttgatttgactatcagagtagagttatttcataactgagcaatgcaactaactaatgtttttttttatacatatggttttggaatcttgacgtgtttatgcatgcttcactttttagtgctgcatttgaccgcacgcatggtttgcattttaatccctgtcattttacttgaattatgctacatgctacacacctgaaatcaaagaaccaaataagagggataacacaaccaattacttatggtttgaaaaatgaattttgagttatgatatgcaacaaaacaagacagcgagtcttctgagttctgagtgttctattggcgttcttcattaattaactttagttcagtatttcaatgctttcatacacatatttggtttgctttcaagaaaattactgtatagacttactcttcactacattgcatctttgcacaaatgtcctactacatattgtttccattagttatgtcgtcctaccactgcagtgtgttactgttacctgctttgcgcttgactgtcttgtccacaggtactgcggcaggtaattcattgagagaagacagg

SEQ ID NO: 10265 - DNA, 692 bp, Oryza sativa
  Intron number 1 from transcript LOC_Os03g42900.2 (locus LO C_Os03g42900) derived from phytozome v7.0 (chr-ID Chr3; po s 23923872 to 23924563)
cagcaggggaggggaggggaggggatcctggtgaggtgagcatccacatcctcttcctgattcatctctctcccaccccaccgggactacgtttgtctggaatttgctcgcgtccgttcgttaaaccctagcttctcttgtagatctggaagaagctcttctcttaattccagagccttaaccttaatactagtaacactttgtttgtttgttcccccaaaagtttgggggttcaactgtcccaggttggatccgcccctgccccctagccaaatgttttttttttttaaaaaaaattcaaagtcttgggtgttcatgtgccttaaatttatcatcggagggagggagtagtatgactcattgaacgtaaatgccattataatagcatacatacctgctaagtattcaaggaagtcttatctcctctaggtatcaaggttacctgcccattcaagcgtttaaacatgggctggccactcattaaaactgctatgaagtacacaactgtagaagagaatagaattctatgtgtaacacctcagaagtaataaggagtaaggtccacagtgggttttgcctgtcatacattacatacatgtctccctgataaacttaaattttgtatcttccataaatttgatatagcttgtggtttcagtctgacattcttgtttttttcgtgaccagcaaat

SEQ ID NO: 10266 - DNA, 923 bp, Oryza sativa
  Intron number 1 from transcript LOC_Os06g07700.1 (locus LO C_Os06g07700) derived from phytozome v7.0 (chr-ID Chr6; po s 3722805 to 3723727 reverse strand)
agcacaggttgattcttcatctgtatatacgtcttctactttgatttatgacatgattttttttttgtttctttgcatgtttagttaatcaaaattccacttttttggagatgaaaatttaattaactagtttctgtgcatgtttaattaaaattccagtcttttggatatatatatatatatatatatatatatatatatatatatatatatatatatatatatattatttactggttaagcacgtccaaaattaaagcatgtgttgtactgttttctttttgttttttgtgtagtgatgtactagttctttaataaaaaatatagtgtaagtgatgtatgataaattgatagtaataaccttttagtttttgttgtttatatatagtgaagtagtgatccgtatatagtcaaaatatattattattttaacccgttttgctacaatatatatgtagtagtaatttggaactctgtctagataaatgaaaattcattgttcatgttcatagtttggcacatgttaagatgacaaaatatagtatacaatgtcgattgcttacatatttaaagttgaccttagaattagaagttctttgtttttttataagaaaacatcatgtttaatttggacgtagtagtagcaaaggagtagtagtatttactcacaaagtccacatttaatttcgttcatttctaggaaatacatataggcacttcttcagtcataatgacagctcattaattaatcatatcagtttctataccacaccaatttcatttctaggaagtgaacagatttctttagtaaccttaatttggaaacaattgcaaggttagcaagctagctaattaaacagctcaagagaagaacttaattaatttaatcaaatctttttcaccgcaggctgtttctgactggg

SEQ ID NO: 10267 - DNA, 1049 bp, Oryza sativa
  Intron number 1 from transcript LOC_Os07g17689.1 (locus LO C_Os07g17689) derived from phytozome v7.0 (chr-ID Chr7; po s 10441724 to 10442772)
acctgttggtattaaaattttacactaataattaaataagtcaacttataaagcgattcatataaggatgtaatctaactcaatttatttaaagattgttttgtgttgctcaaacctacaattatgatgcattaataattttgtacaagatcatcggcttcatgatatacacttatgtaagacttgtacatatcaatgtagtttttaagacatttatgaactgtgttttgaaacaatcatgttttcaaattatcaccttgcaataaataactattgctacctagcaaggtgagaatgtatagccacctcctcaaggatggttaaaaaaaagatcctttttacggttcttgtagagctacacatctggtttaaatttgtggtatctgctatcatccaggaggtatgatactatgtacatcttcgaggcctgtaaaaaggctttttgtttgtaaataatcaccttttctctatagaaatgtgatacatgccttaatttgtgtttacttgtactgatgatatctggtctttgtctaccaggattttatagtaataatggttaattatttgatgatttcatgtaatgatggacttagtcaattgcgagctataataagatgccaaaaaatccctatttttgaaaattcatgaggaaagcactttctaatttctgactcttaacacggtatttgtgaaatttcagctttgatctgtttgagaccaattaaactctactagcaaatttcatgcctgatgtcgacatcaagcttccatctgcttttggtatgccaacatttccttggatatttattatcataacatcatctcttcaagctcttaacaatttgatcaataggttataacttctatatagaatttacatttatcttttatttttgaattatattatattactctaagttgtatatgccaactaatataatattgatatccaattgcaggttatattattaattagaactatccgatttacctcatttctttattttgatttaggagtaactggtggtcttttctgagcacgactgaac

SEQ ID NO: 10268 - DNA, 988 bp, Oryza sativa
  Intron number 2 from transcript LOC_Os03g17560.1 (locus LO C_Os03g17560) derived from phytozome v7.0 (chr-ID Chr3; po s 9756427 to 9757414)
ggaaaaacaaaatagtactccctccgtttcacaacgtaagtcattctagcatttcccacattcatattgaagttaataaatctagacatatatatctatttagattcattaacatcaatatgaatatagaaaatactagaatgacttacattgtgaaacggaggaagtaggatcgaagtgcgcatgaaaggggatgggggctgttagttcaccagatgttatgagaagttgaactgttccgagattctagtcattagtcaatgagctcttggttcaattttcaataaggtgtcttgcaccagaactagaaggttgaaatcaattatcattggaagatagaaagctgaaattattagtgtatgatgaccgagaatcatgagaagattggtttttgctatgagcactacatgctaaattatgctattttagctgtggtgtacagaaattcttaactcaaccagataagactagcaatatatgcttattttctagcttcagtaagctcatgtactatctgggacaaccttttttattatttgtataaccggccaagccaggaactgaacagttcttgcgccttatgagatgggataaaatttcctagtaaagtttctactggtacactggagggtgggaatgggataaccgttttattacaaatcatgaattcctttccactaccgttattatgaaccttgatttggacaagctgctatacagtgctatgcataatggatgcctttcctagttgaaatatagcatgtaatatgatttcttctcaaatttaccagggctgtaacctatccttgcataggaagagtgagaggcttcatttttttgacttgcaggccttcccaggcaagcaatcacatcaatgccttgtattcgttccaaatgatattgcataaaggcataattactgagttacaggtttgctttgcttctgtacgcaggtggagcaaagggaggtgccatttctgatagtttt

SEQ ID NO: 10269 - DNA, 790 bp, Oryza sativa
  Intron number 1 from transcript LOC_Os07g33660.1 (locus LO C_Os07g33660) derived from phytozome v7.0 (chr-ID Chr7; po s 20112825 to 20113614)
gcagggacgacttcgaccgcgacgacgtcgagcaggtgagccagcttctcgttcttcctcctccccatgttgccttaggtgttccttgattgctccagtccatggggaatgtgctgacgaatgactgagatgctaccttaccactgctatattacttggtggattggtaattctgatcctaatgtgagacatacgaagtagttgattgctatacttgctagtttggtttgaggacaaatgatgcagcatttgatttgagttgaattaaggcatgtctttttccttatgcttatacttatcaaccaacatttgaattttaaatttggagttgatttagaggttttttcattgaagtatatttttcagcatttgcttttaaatctctaagaatatacatataaaagttttatttacaaattactttttatttgcaaatattccgtttcgcttgcttcgcttattccgcgaataagcaaaacgatggctcgtatcatagccagcagtagcaaagaggaagagaagaaaagaaaaaaacaacaatcacctcgcaatttagtctttgtagtttcatggacaaaatgcaaattgcagctgcagggtatctgaaattctgaatatgctaatcaagaattcaagatagctgtagactagcacattcagattgaagaacagcacctgaacatggaaagctctagtgacaagaaagattcagaatagtaactttgattcctgagatgagattctgaatgtatctgaatctttctgtctgcgcttgtagtacttcaactac

SEQ ID NO: 10270 - DNA, 414 bp, Oryza sativa
  Intron number 1 from transcript LOC_Os04g40330.2 (locus LO C_Os04g40330) derived from phytozome v7.0 (chr-ID Chr4; po s 23793535 to 23793948 reverse strand)
gcggcggcatcgccggccgcaaatccgagcccgctgtaagcttccttcctctctgaacaggaacaactctttcgcccatctttttttctgtcacgtttggctcggtagatgtgtttgtcattgtcagctcataaaaagctgctctttttattgcctaactaataactggctcatctggtttgatgtgagccggatacccatttttcatttgtttggcttcaaatttttcactttggtgaacagctcagattattgcctttccacattcttcgtttgagctcctttttttgtgagatctcaggggattgaagtgcctttttcttgcttttcttcgattcatgtctctgctaccataacaatccctttcgtgtcgcagcagctgggtttattgcctcaacgggtaaaagaaagata

SEQ ID NO: 10271 - DNA, 616 bp, Oryza sativa
  Intron number 3 from transcript LOC_Os06g51330.2 (locus LO C_Os06g51330) derived from phytozome v7.0 (chr-ID Chr6; po s 31086724 to 31087339 reverse strand)
catcagggccacctaatacacaagcctgagaacaggtaaacatccaaacaacatccattggatttgagtatgcttgatctgatctagtgtaaacttaagaggaacatatccgatactacaaacttgaacgggaatatctttaacggtttttgaacatatagataattcgggagaagaaataattattcccatttatccaaaaacatcaccttgctctagaacactgaagttaaggaaatatgtgtcgcttactgagcttcctcccacctgtatatgataagttatcaacagaaatatttcttcatcttattatatgattttgctcttctgctactttattaatgttgtatggctacctcaagtcctcaacctgtatgtaccaccatgttttttttccttattattattctgtctgaatgtctatttatgataccagcaatcaccgtactcaaatactttgtacctcaatatccttgtttttttttctcatttccctttgactggtatccatttctattctgatatctgtcattcatatatctggaaagctacatgtttactgtctgtttgtgctgttgcaggaacattacatttgcaactatttccattgggcaca

SEQ ID NO: 10272 - DNA, 702 bp, Oryza sativa
  Intron number 3 from transcript LOC_Os04g53200.2 (locus LO C_Os04g53200) derived from phytozome v7.0 (chr-ID Chr4; po s 31496405 to 31497106 reverse strand)
gtgaaagcagagggtaagtactctcactctaagtcttttgcatgtgaagatactgtatattttggggtcaatttgatttgagcatgcgaaaaaaaggacacacttctcgcagcattttggagtgtgtcattctcactatcttcatccttttaagctagattcttcatttaattacgactcactatctgcttgccaggagcatattgagtaagatgaaacccacacttcatcttttaaccatgcaaaaagagtgcttctgttaggatgttgtgtatggtttagtagtacaactcagtttccatgtttctgctattagcaaatccgtagttcttggaatttgctgaccgttcttgaggtttttatatgacattgtattgtttgtcgaaaagcgaacatattattcttttctggaagttcccgtatgtactgctttgagtgtatgtcataatgaggattaacagaaaagtgaaatgctgatatattgtcctagttaggagcagtagcttggagctgtacatatgttggggcccagttagggacacatctcattttattttgttctgccttactgttttcatttctcaattaggttccctatctgtgctatttggtctattcatttaataataactagccgaagttacatattgttactattctgttgcagggaaaaaacgtcgtacaagcttggaggcactgaga

SEQ ID NO: 10273 - DNA, 532 bp, Oryza sativa
  Intron number 1 from transcript LOC_Os07g30090.2 (locus LO C_Os07g30090) derived from phytozome v7.0 (chr-ID Chr7; po s 17740253 to 17740784)
aactgccagaagagcaagatcttcttcttctcctggtatgggtacttaaaaatatatcctaatcttttgaggggacgtcctctcatttctcacgtctaaatagttaaaaaaaattaaaatattaataagatatattaatatgtgatatatcattaatttgaacctgacttcaacaaggtgcaaaagaaaaacaaatatgactgaatacacgcatcttagctagagtttaatttttttgctttttacaaatcgtaaaggttgaatttgaatagtatatttgtgtatataataatctatcttgataactttttttactaaatttttcattactaaaagggacaagatgcaagaaaagaacgacagagagttttagaattcattcccctatatagctataccatcgaaattaatatgcgtggctaagttcaatttcatttcgatgaggtatcatttctgttataccagtaaagatcacagaaagtgccatgcatgtatgtgtaggtcgcctgacacggcgaggacaaggagcaag

SEQ ID NO: 10274 - DNA, 733 bp, Oryza sativa
  Intron number 1 from transcript LOC_Os04g13300.1 (locus LO C_Os04g13300) derived from phytozome v7.0 (chr-ID Chr4; po s 7386955 to 7387687)
ttccgtgaagtaagtctcccttaacaacctacttgcaagcttatgccactaagcctcatccaaaaacaaacaggattgggtcactgctggtgtatgtcggtcatgacataggagtatttcttttccagagacagattggcattagcaatcaacaaaaaaaatacattttatgcaccccatgtatactttgatgataacgtcttggttaaaacatgtgcaagagggagctctgctaattaaggctttgagaaactcaggattgtaagatactagtaagaaaagaaacttgtatactgtccagatgttccggtttaggtctagttcatttccattcatcaacagcaaaaaatatgtgacattttttattgcattgatatatactgtacagactatagaacaaataagataaactaagttgctggatggatgattctcttctgttaagcattccagtaaagaaaatgttctattaggaagagtaggaagaacatgagtgctggttaagttggggcctacctttcttccaaccagagaagggatgattgatacaatttatttttttattgaatttcatttggattgtcacaagtactatatatttgagcatatgaaaggtgatattggtttaacacacgcataaacagtataagaaccaagattaagtgctgcttacatatcgcatgtgtgtgtgcgtccttaaatctacttaacatttcaagggttactacttgtc

SEQ ID NO: 10275 - DNA, 578 bp, Oryza sativa
  Intron number 3 from transcript LOC_Os02g56100.1 (locus LO C_Os02g56100) derived from phytozome v7.0 (chr-ID Chr2; po s 34323096 to 34323673)
aaggtgagatacattcttatcaaaatcagtttggaagttccttaacatttttacagcatgtgtgcttctgcaatatggcatgcatgaagattgcaattaacatttgtgacgatgaccgcctcgcaaattgttaactgtttatttgttttcttatgatattattcccccaaaaagattgtttccgaatcatgtattgctgcaatatgtcactttctatagaatcgcaccaataggttgttcttcaacatttatttactaacattttattcacgtgtattgccgtgactctttgtttacttctgttcttttggatccattatgatgcttatgttgcccgtcatttggtttgaaattcatatttgatgatctgatatttgtttagctttattggctttgttggagttcttgaaattttcttatatcaatgctgcttttttgcgttgttcaatttcttgtgtggatatatttcttcaggtgcttcaattttttattatatgtatattgtgccaatgtgacttgataatttctatatgatgcaccatttcagaataccacccgcttggacagtgagataattt

SEQ ID NO: 10276 - DNA, 639 bp, Oryza sativa
  Intron number 2 from transcript LOC_Os07g16310.1 (locus LO C_Os07g16310) derived from phytozome v7.0 (chr-ID Chr7; po s 9519491 to 9520129)
aaagggtgattgtaaccactcatccatcctattccccctaccaaacaaaaaaatggatcgtcatatccaccttcatccccacaaccaaacaaaaaattagatcaccatattcactccaccaaacaaaaaactggatcaccatatccatcaaaatatggaccgccatatcccatccaacctcactactacaaaaaccctcgtagggaccggccttatacgtgccggttcatttataaccgacacttttcccacatccgcatgtcgagaaaatataaaaccaacacatttaaggattataggctggttcattaggaaaaaccgacacctatgaaggttttttactagtgcttgaccaggaaccaaacacaccataagaacagaagtaaatcaaaatgctttttgtttctactctacatcacttacatcggcaacaatctcaaatttagttaaagacattatgctgagaaataagataggaccgtgggcatgaagaaatagaaataagtacaataatagccatatttatcgtaatttttagattgagaatatggaaaaagagaaaagaaattggtaaaatatattgaacacaacattatacagaattatatcttagtatctttttttttgtttttttaggta

SEQ ID NO: 10277 - DNA, 695 bp, Oryza sativa
  Intron number 3 from transcript LOC_Os04g11640.1 (locus LO C_Os04g11640) derived from phytozome v7.0 (chr-ID Chr4; po s 6374769 to 6375463)
tacaaggtagcttttgattgtattccatattaactctatgctagtttgtctatgtccaccagtagtgctcaagtgtgaatttattataaaattcaactgttgaatgcaacgttactaggaggttaaaaacaatatgaaaaaactatttttgtaaatgtctcccttgtattgctcaagtggtccctaaggtaaattgcctatgcaatacgccagtagggcgtagtccacagatcgcttcagcacagataagcttggtgctaaattgaggacctaccttttacatattataaatttgtttattccaatatattgtaacgaagcaaaagataaatttcatagtcactacaatacagaatacagggtaccccatctgttgaacctacagagtttattggttagcaatgagggcatgccatcttctactgttggttaacaatttagtagttgttaagtcacttgtaatggttgaactgtgccataagagtgtatcaccatcaactgattactctgatcttatgaatcattactgatgaggatgatcaacgaatagatactgtaaaacatgtgcacatgtagggtttgctcaccatctttaccatgttggctgctcatctgcaatgatattattggaagagcttgaggctgctcccccaagtgagtgaatctgatcatcttttttcctgtttcgcagttct

SEQ ID NO: 10278 - DNA, 789 bp, Oryza sativa
  Intron number 1 from transcript LOC_Os04g35700.2 (locus LO C_Os04g35700) derived from phytozome v7.0 (chr-ID Chr4; po s 21585264 to 21586052 reverse strand)
taggtaagtgtgcgatcgtggaatacctcagcctgttcgatttctatttctcggggggtgcaacgtgcaattccagatatataggtattgtgatcaaaatttggggaatttcatgatctgataagcgtagcatgtaggcttcgtgcgttactttccccactaatttcgtgtgaatggctttactcggctttgctacttgcttttaagtgttcctagtcaagtgcagagttggggacgtgatgaatgaacagtgtggcttcgtaccaactctacaagttgaccttttcccatggtcgtttcagattacttccagttcgggaatcctaagccatttatttttctttctctgctaaatatgtattgcacacaggattactcgggacgctaaggtgtgttaatggttggacaaagaattttaaaaaggctgaatagttgtttcttttgttgccctggagtcaccattctgttgaaacgtgtatttggttcttgtgctaaatcattgacgttctctcaacaataatgtacagtgcttttcgttaatcattatgctctgaacttaatttgacaacttctttgagttggacaatttgagaactttttgaagtatataaattcatatgacgtgcctatgtttaggggtacttaaattagcgtattgttccacagcacattgttacagtatttatatatttcatttcaaaatttgtgttgatataatatctgatgattcttggctgcttggtgtaatttctaggtctacggatccggcgtcttttgtcaggggaagaa

SEQ ID NO: 10279 - DNA, 467 bp, Oryza sativa
  Intron number 3 from transcript LOC_Os07g48820.2 (locus LO C_Os07g48820) derived from phytozome v7.0 (chr-ID Chr7; po s 29213571 to 29214037)
cgattgttgtagacaacgacgacaaaaaccaccaggtaatcctttttgaggttgtcatctttcctttacacgttaagatgccatcaaattgactgctagagctcaagaatagagctggtgctgttagggtagtaacttcttttctcgttttctacttgctatgagttggataattgagagatactcaaccaatagtcttctggagaatggagataccactgactatgacagtagtaagaagaatcaaatgtaattgaccgtttaaaccttgcaattcttgtgctgtttcatctactgacactgaagcactcatacttttaatctattttatttactgattcgcaatgtcatgttttgctgtagcaccctgataacatattgatactatgaatccactgccaaatagtgctctaaatatgctcagttgctcaaacttgcagttagaaaacggacatagtggtgcagtc

SEQ ID NO: 10280 - DNA, 256 bp, Oryza sativa
  Intron number 3 from transcript LOC_Os03g57950.1 (locus LO C_Os03g57950) derived from phytozome v7.0 (chr-ID Chr3; po s 33004711 to 33004966)
gagggaggcaggcacagccaagaaaagcagaactggtacagttaaagcatttggaccacacttctttctctctcttcagacatcaaagatcgcagctacctccttttcttttccccacgactctaatttccctgttgagcgttcctgttttcgcctaaatgatttgaatgattatctaaaatccgaatactgttcattctgttccttaccgatttatctgaatgtctgttttttacttatgggcatgatagaccgg

SEQ ID NO: 10281 - DNA, 641 bp, Oryza sativa
  Intron number 1 from transcript LOC_Os04g42470.7 (locus LO C_Os04g42470) derived from phytozome v7.0 (chr-ID Chr4; po s 24948552 to 24949192 reverse strand)
ctctttctcggcgaggattggctgtgtgattagaggtaatttaatcgcgatagattggtttaactctaatccgggagtttgcttggcctagggtttggtggatttgcgtccctgtgagaatttccatatccaatcgggtaattctccaccaccgtattctgtgtaattctgttgcgattttattgggtgggtgggttggttggttgtcgtgttgatctgcccaactcgtactctctcgatgcttatgtgttattctgggttggaattttgggcattttttttaattttacggtttcttctcccttgatggagtgatttgcagaacagggtgtggaacaatcgaaagtagggtacagtgactgaactattaggggtttgggggatttgataatacgtagatagggttgatgctttgattcgtaagacatggttcatttttcttgagctagtgtcatctgttagttttcctggattgcacttaggattggcagcaatccgtaattattgtaagagcctaggttgcgtgaaagatgaacacacccaccaaaaactgaggactcgtggggtttagtattgtttggcagtatctgtatataatctgataattttaagtcaatttacacgattgtttgatgtgcaga

SEQ ID NO: 10282 - DNA, 853 bp, Oryza sativa
  Intron number 1 from transcript LOC_Os03g27250.1 (locus LO C_Os03g27250) derived from phytozome v7.0 (chr-ID Chr3; po s 15613076 to 15613928)
cccaccgacgtcggccgcctcgcctgcgtcagcaggttcgccgccgtggactctctctctctctctctctccttctgctgccttcccccacctccttttatttaccagtagtactactttgtttatgctgggttttctttctcagcctcccttttttgttagtttgctggaaatgctgaggttgtgatgcttcggtatgtgatgagtcatgatcgctctggatgactagtaaagtgtatctgattgcgaattttgtttgatcgtggtcagttataagagtggaaaatgagccaatttgcacaaattgtagtttaatctatttaatcagttgaactgattgaagagctgaagccatgttaaattattacacattatatgttttacaatatgatggtatatatggtatgtgtgtttggggaaaagaatcagagaggaaacatttacgtttcagtgagactcttgtggattttttttaggcatgggccatccatggaaaaaatgaatttgcactttaagtaatgtttaaaacatgcgactcatggaaaaaaatgaatttacatttaagtctaaattagatgtcagcagtttagtttttgatttccgcatgcttgttttggtttttcttctaggcagcactgtcatgccaaatgaatacactacatgctttctgtaattgtgagatgtaataaagtggttcatagggataaggaaataaatgctacactattaacttcttccctgaccttgctatgattatttgctttcttatagcatctgcgcagttgcactgccttgttgtgcaatagctaataggatgtgactgtggcattaacttaaatttcttgacagtgtc

SEQ ID NO: 10283 - DNA, 942 bp, Oryza sativa
  Intron number 6 from transcript LOC_Os03g49960.1 (locus LO C_Os03g49960) derived from phytozome v7.0 (chr-ID Chr3; po s 28474131 to 28475072 reverse strand)
atctgaaagtatggcgctactgtacattagaataatgttggcacaagattaaaaaaaaaaatctttgtttgattgtcaaaactgaaaaaaaaagagactatttctttaggttgattatttatatattatgtttttatttaatagaatatgtttcatgcgcaatgataaattggcttagacgaatatcagtgatgccaaatttatgtctaaattgtaatatgctacgacaaaatatttgctactgaaattccaaattgacagacaatgttgcttccacatttgctttgaggggctcgaaattcttagattggtcaaatgaataaaaaggttgatgtcaagttgttttatggtcccaaattataactgtgaaatctccctaggagcctagaaattcttgcattaagcacaaaaagacggaagatctatgttgcttcttttggtggacgttggcccttgattgtaaaggctcaaattaatctcaaataggttgaattagatttacagatatattacagttggttgcttgtgtactgtcatattaggaacataaaaaaatgcctcactttctttagaactcaactcctatagtcacattgcttcattcatgggatttttcagttgcacgctactccaaagcttgtaattttaagaagaaatggcaactgctgtgagtatagcgatcatcattagttctgagcccacatgtgctgttagtgtaagaatgattaacagtttactgaacaaagttcagggtggtatgcttatagttaatacagctgttgtccttgttttctgttttgcatttggctgttcaacctctgttcgttactgccaaccactttataagttcattacatgccattgtctttttaacaatttagatactaacttttgattattcttctagggtgaggaagaagagctatacttcttcacttcttc

SEQ ID NO: 10284 - DNA, 500 bp, Oryza sativa
  Intron number 1 from transcript LOC_Os03g49960.1 (locus LO C_Os03g49960) derived from phytozome v7.0 (chr-ID Chr3; po s 28475939 to 28476438 reverse strand)
gcgtctaccccgtcgccctgctgcttccgcctccggtgagcacccgtgcccatgaacagcctcttcctttctctcggttctagccacaccttctcgcttttgccttaaccgtatcttctcttctagatctgtggaagctaggtttctctctgtcttaaccttagtaacaatagcagttttttttccccaaaagaaatttggggttgaactgaatcagcagcatatgccccacgacccacgttaggtccgccaatggtgggagatattgtgtgttgtgatgtatctcctttgattgacccgttcgtggacgctgccattagtttgattggattcatccttgtgtagaacataagcgaatgcaacacaagcgatcggcctaaagtactaacttatagtattattaatgatcaaactaggtagaattaatccatgtgctgtgtttttgttatgctgccatgtgcttgatcagctgatactcctactttctacagaggaagaac

SEQ ID NO: 10285 - DNA, 565 bp, Oryza sativa
  Intron number 1 from transcript LOC_Os08g04520.1 (locus LO C_Os08g04520) derived from phytozome v7.0 (chr-ID Chr8; po s 2231803 to 2232367 reverse strand)
ggttcttgttctacttctgaatccaacatttgcaggtgcaagggtggatccacacagagctcaagtggtgcacaccacacagggtaagttctgaaaaattcattagcatttgatcatgttatcacataaataaagtagcatatgtgtgattaagaggtacttgtgtatgatacctggtaatttggattctacatttgcccctagacaggtgagttctttctcgactattttttgacgttattggtataccttttcttgtcatgtagcctctatctaaaaaaaaaagacttgatttctggctaagcatagaggcaagtaaatagccagaagtcaaatcttttttagagagagggagtatgttgtgtcttgcaatgtttgttgtgatttactctgtttataactagtgctttgtgcatattcaacagtgaaattatagatcagattccttctccatgcaagttctgaatggtgatagtctgattgatgataagcattataacaagtggtagttaatctcttttttttcacagaggattgtattattgacattggctgggtagtgttc

SEQ ID NO: 10286 - DNA, 431 bp, Oryza sativa
  Intron number 1 from transcript LOC_Os07g32610.2 (locus LO C_Os07g32610) derived from phytozome v7.0 (chr-ID Chr7; po s 19444518 to 19444948 reverse strand)
ccaccatattggttcactccaagaagatgtaattcgattgacccctttaccacattacactgttctgtacagttatatatatatatatatatatattatttattttatttgtgacttaagttattatctactgtactttaaatataatttttcgtttttttatatttgcaaaaaaaaattgaatgagacgagtggtcaaacgttgcaagcaaaatctcaaaatcccttatattatgggacggagggagtatatatattcttatcgcagcaaaatctagtcaattgttatggcatctgagaaatgttgaatctcttaagtctagtagtcttcatgtttcactccggcttattagcatgttgatccttcatccttacggaagatttttcaaatttttccttgaaagaagaacccgaagaaggagataaagttc

SEQ ID NO: 10287 - DNA, 941 bp, Oryza sativa
  Intron number 1 from transcript LOC_Os03g53750.2 (locus LO C_Os03g53750) derived from phytozome v7.0 (chr-ID Chr3; po s 30806460 to 30807400 reverse strand)
ccctcaacaagggcccctccgcccgccgccttccggtgagactcctaccccgcgctcgctgattccctttctgccctaggctggggctggattggagctatgcccggcggcgctgctccggtgttggttggcttgccggtcgcgtggttggtcgctggccgtggaaccgtgcgtcgtaccaaaaaaagtgtgtgtagttttgtgtagccatatgggtgatgcgtggtaatcttagcagcgtactagttcgtctcaccatgcgatgcgggatgattctgtatcgatattggaagattttcgagtgctgtactgctgatgtctagcctgtaggcatcgattgatagagcgtgcagagtagagaggaggaggaaaaggaggcggaattgattttgtccttctgctgttaggttgtttgtgaacgagacgaggggacaaaatggtcttggctaaagacgagccaccattatcgaacactctgaattcttcggagttcgggggtgggatttatggtatcagatgctttttttgctgcatactgtctttcctgctgttcgttttagtcgagagaaatcaaattaaagcctgcagtgagtgaacaacctctccagaggtgttgaagaaaactttttgattagtaatagagaaacatatgaaaccaaaacagaagtccagtatcaggtgttggttgcaaacatgaaagcaacgttcaatcatatatgatttctaactggcacctagttccctaattgtttgttgaatggcagaataaactcaataccagactttgcacctttggtatttacatctctgcacacatttgtacaagtagcttcaaaattagtataactggatgattcgcttcccatccgcataccattcctcatatcttggcacttctgttaacagatcaaacaaaaggaaattgcagtgagcacaaatcc

SEQ ID NO: 10288 - DNA, 975 bp, Oryza sativa
  Intron number 1 from transcript LOC_Os03g11440.1 (locus LO C_Os03g11440) derived from phytozome v7.0 (chr-ID Chr3; po s 5895143 to 5896117)
ctcggcgtcgggccgtcgtcgttgtccgctacctggtagatccgcgtgttcccttcctcgtcatgtctcgtgtctggatctcgcggaggcgatgcgtttcagattcagtggcttgtcgttagaattacgtttttgcggcgaccactttttgatcggtgaaaaagcgggaagtgggtgttccggtggtggattcgtgctcagtttggggatttttttttgtgggggctgatctgggtgctacgtgcgcgcgtgtgatggaacgctcggttggtcgtgcggtgtagatgtaggcctgatgctagcgaaatttgttctagatccaagctggttgatccatgaggattgctttagaaaaaaattttagggatgccatagttttagtggccttcatatttgtcatatgagcgttacatggccagcagccagttaccctgttcatttatcgggcgtgtgattcatctatgcatgttgtcagattgacatggaaagcgtgtcatgtattcattctgtgattcatatgatggatgcggatcatcagcttccttttgtgcagcccgggcctagccagagttatctttttcaccgaactgtttcaatcaagtctgcatgaggaactgagaattttttttattattatttcattgtgatgtgatcatattgtttgatttcaagttcatgcagctgaataagcattcatgtttgcacattatttaagaaagaagcctattattgttcatgttaatgtgggtttccattttttttttcaattgcgccctcctgtttatggtgaagaataacttctctagtttgttaggttctattatgattcagtgttttttttcttaaatgaagtgtgatatactgtctaaagtctgaactaccaagtttgaaatttttttacaagacacatgttttataattttgtgtgcattgtacaaaatcttgacctatttttttgcttggtcacaggaaaag

SEQ ID NO: 10289 - DNA, 625 bp, Oryza sativa
  Intron number 2 from transcript LOC_Os05g39410.1 (locus LO C_Os05g39410) derived from phytozome v7.0 (chr-ID Chr5; po s 23053324 to 23053948 reverse strand)
gtcgagttgtggccctgtaagtttttcacttatgtgcagtaaaagagataggagacccagaaaataacctttctattcatttggaagaaatgaactgccttaactaagctgcgatctgggaaaaaaaaactataatcttaaatttactcgtttagattgaattagatcttgccattccatttttgttgcataacgtcattagtagcattgcagtagtagtgataattgacattttttggtgtatagggaccatctgcatgggacaattttttttctcacaccctgtttaggagggctctagattcatctgtagagcatcgtcactttactgtctttgtttacatttttcacacaagtttgtgcgggtgggtgtgggtattcatttagtagcagttaacagtattgtgcctgctgcaattctatgttatctattattgtgtgatgcaatggcaccacagagagtctatggtttttaatctggaataagacagcggtttgttcttttgtcatacttaatattcatagtatatccctatgctactattgatcatgtctttgcttgcgtttccccttagtttgagtgtgcaattgttgtaggaacttaccaaatcttggtctaaagggt

SEQ ID NO: 10290 - DNA, 943 bp, Oryza sativa
  Intron number 2 from transcript LOC_Os05g36160.1 (locus LO C_Os05g36160) derived from phytozome v7.0 (chr-ID Chr5; po s 21370916 to 21371858)
cacagctgttaagagaacaggtactgtttacttttgcgtttttggaaatgttatctgtgaaatgttgaaatggagcatggatacatcaaccaattatactcatttgccgctttattatgcctgaactctttctggtagtaatttttcccatgttagataactgcttagtacattacattatttcagtaaagcaccagggcatattgggataaaagggacactgacatttgaactgtcagcaattcaggatgttggtgtgttcaaaatataaagttgtcatgcatcttaggatggtcgctatataatgttagtgtttttacagcatgtaaggcaatgcttgatccatggaaattcactaatcaaacagaaaatgtattttagtattaatatttcagtaccaaatatgtcaaatctttcacataagtaaaataaggtagttcatatccctgccattttccccttattttgttgaatgaataaaaatattatttttgttggccttagttcatttcaagactttcatctgtttcttttcttatacaaataattatgaagttaaaacatgtgaccaccaatgaactcttggtagtctactgtcttatgtatttcccagtgcgtagtgtcatatgtaaacaggtatatatgacgtatattgttgtcatgttcttgaggtagatacattttccccattacttcattctctagtatgagcattttgctccttgcagtgtccagaccaggattaccccttaaaagttgtgcactattcttttcaacaaattagacagacagcaaattgctaaaaagagaacaattttgccctgtaccttgattatgttctatctcttgttcggctatatggacttctaccaagtttatctaattttaccatctctgttgaattgcaggaggagaaaaatcaaaagaggcttaaggaggtaag

SEQ ID NO: 10291 - DNA, 881 bp, Oryza sativa
  Intron number 2 from transcript LOC_Os06g46450.2 (locus LO C_Os06g46450) derived from phytozome v7.0 (chr-ID Chr6; po s 28193662 to 28194542 reverse strand)
ggttatcaaggtctgaggtaggcgaagccttgtttctccaatgatttgtttatgtgggtgctcattcagtttgtaatgatctcagtttttgtgcattttcttttgggaaggaaggtgtggagccccattataataaataaactgcacatacataatctattaccaaggcacaaaaataatctttcgagtgccatccacctatatacatgaccatattttcagaatatgtctaggtctagcgacagaaccgatgggaaaaatgggctgttgccattgtgacatacctttggaatcccacatgttattctgctatgtggcccgctatttgggttgcctgattgcttgcattatctttttagagctctcatttattgcatagtagcgtttcttagtgatacagtttgattaatacctgtttgatgccaatctttgtgcactgcctgtgctggccatcatgaagattacataccccaattattaaagatatgcagtttcttcatttacaaatcaacttatagaaaatggcaatgctgccaaaaaaaagacccattcagttttcaattgattgatacacttgttaggcaggcacacatgttgaccctttaatggaatcagtatgttgcattgcgaacctaacaagataatttacaaccatgcattattatctaaaaaggtctgaaactagaatgaaatgatctgttcaggaacaaaaaatcatgctgatctaattctattaccgggtaatcaatgaaaaaccttttttgttgttcggtatgagagttaattgtgaaaattactggtgtgcacccattttaagtgtctgtaagtcttaaaattcccctgatttcaggaacagcaggatccatttgagttggttgctg

SEQ ID NO: 10292 - DNA, 589 bp, Oryza sativa
  Intron number 1 from transcript LOC_Os04g02820.2 (locus LO C_Os04g02820) derived from phytozome v7.0 (chr-ID Chr4; po s 1089938 to 1090526)
cgcgcgttcgctcaccgccgctgccgcctcggcaggtaagcattgatcgatcccctcgccgaccgtctctcttttcctctcttcttcttgaggcaggtttgccttgtatgttcatcgcgatcagtcatccacatgcaaagaacacctctctttttttcttttttgttaatttatcatccgatctagcaggatggaaatggttttcttcaaatcttttcagtactgagtgctctagttttgttgcgtctagcttcttgatttgccttctcatagatcggatgttccttttcagtattttgactgcacatgatttggttgtgaggatagcagtaaaaatgaattgatgtgttcttgataatagccataagtaatcatctttggtatcatcctaaactcgatttggttggtttggtatctgggttctgtgaattttccttgggcttattaacttctcctgacatagttgctggaagatttttggctaagattgcatgcgcttcagttttttttttgttggcttctaacgaggaggctcctttgctttttgtaaacaggaatttgcatccgtagcgtgatcttcaaaggctgc

SEQ ID NO: 10293 - DNA, 986 bp, Oryza sativa
  Intron number 1 from transcript LOC_Os04g40090.1 (locus LO C_Os04g40090) derived from phytozome v7.0 (chr-ID Chr4; po s 23685790 to 23686775 reverse strand)
cggcgcgcgagggcgagagggatctcgtcgtgaaggtgaggttttcttttctttctttttttaatttattttcccggctcctcgcgggtgcggtgtttctgtgctaggaatgccgcgttcttggtttgctcgcgcatgggggttttgtcgcagggaggtggggagtgggttctgttgcccgtgctgggttgtggagcgatgcgaccgggtggtagtgttgttcttgaaaggatggattttgcatctttttgggcgcccaggattagatcgtttctgtattgtttgcgattgtgaaactgtgtagaaatatcgggtccttaacgcggcgatttttgtgaggactctttcgaaatcaagattattgcagggattgtaaaatagtgtagaaatatcagtccttaacgccggcgattattgtgaggactccttcgaaatcaagattattgcagggctttttgtttttctgattagctagacaagagtacttgctatggggatttgattgtagagtatcttgatcactttgatgtatgttcctttgtaatttgttggtatgttgaatgttccagttttgcatgctatggttgaataaatctgtttaggtttgcatgatatggctgtataaatctcttcagtgtagaagacaacccacttccctcaacatgcaacggcttaacttggcagtcgtccttaactgattaatgccatgtaattttggtacttatgtagcatcaggtgctgagatttggttccgtgaattgtgttttgacgctactgttaactgaatcaacattgatcagctgctaagataagaacagaattgagttatcatttgcttaagcatcttgcctgcaaagcaaaccacttactgttctatttaagtttacctcgtgcaattttactagattattattcttatctatttctcttttaatttgcttgatgtttcaggtaaaattcggtggcactcttaagcggttcactgc

SEQ ID NO: 10294 - DNA, 635 bp, Oryza sativa
  Intron number 2 from transcript LOC_Os07g05820.1 (locus LO C_Os07g05820) derived from phytozome v7.0 (chr-ID Chr7; po s 2797429 to 2798063)
ctccaggagaacagggaggccttcgccaggatcctgtaagtattcaatgttcttttttgctatgttacagctcctgccactgttacacttttgtgcatggttttttcttgtgggagtgtatgtgagaagtgtaaaatagctgggccttaagtattgtttggtaatcagcctttaatacacattttttgggtaaattttacttccctaatccttttggggtaaatttttagtggttatttgtgagcaataacatgtttgttgatgcagttttggttctatgcttggtataaataattgttctcttattatactgaattttctattgtatttgattcacctaacataacattatcgaaaaaattaaaaaaaaaagccagcatgttcatcgttcttcgacaactttcatttgtcatagttgatcctgaaaatccattctcataccataccataactaaatgtttcatgttgctagatactgaagaacagatgtggttttcctgtttatgtacagttggttgctcaaataatttatcagtacaaatttttgcagcttcatcattagttcattacccatctcctcatatgttctgttttggccaggtttcgcccacgcatactgatcgacgtatccaaga

SEQ ID NO: 10295 - DNA, 315 bp, Oryza sativa
  Intron number 1 from transcript LOC_Os03g63050.1 (locus LO C_Os03g63050) derived from phytozome v7.0 (chr-ID Chr3; po s 35647024 to 35647338)
gtgagtaagaacataagaaccaatttggttatttcgtaagtagcaacagcttgtttcgaaatcttcagctcctccaaacaaaatgcatattctcacctacccaaattagttatagaaacaaaaagaaaattaattaaagtcaaaagctgagaaacctaacttaacttttctagctgtttctcgaaatctcaagctcctcatataataccaaaaaaaaataaatttaggattattttagttggttaccgaataaaaattcaaatcttgtattttgatttagatttctgcccaacaaaaactgcctgttaccggatt

SEQ ID NO: 10296 - DNA, 822 bp, Oryza sativa
  Intron number 2 from transcript LOC_Os07g39730.2 (locus LO C_Os07g39730) derived from phytozome v7.0 (chr-ID Chr7; po s 23809870 to 23810691 reverse strand)
acacacactattttctcggcacttggtaaaataaggtgcattttggtgttctcaacttctgtttggttcattatattgtaaatgcattcatatctctgggatacaaggcagaatattagtgccggacgtaagctaataaaagcgaaaagagtcctaaacttagttgacatgagcatccataaggaaattgtttgattcagttttgttcaatgtccatcctggtggtttcctattttgtttgtggactcatattttgttcttacttgccttcccattccggtatacacaccttttgagagcttaatatgcgcattaaaattagcaccacctgaaacctgaaggtctgccctgtctagttggttttcatccacatataagtttcttctcactcatatcgcttcttatattttgaaatctatgatctgattctccaagatagcaattaaactcagcaaaaaccagttcatacagtttctgatgttagtgtggtagcttaggtgaatgtgttagctatgttcaaaattcataataaagaagcttgggaagtaacatgggtaaaataaatttctttagtagtattagatattgcacgcataaaatccatgtcacacaaaacaacatacgacataaccctagtgcatcaagcacaataatggagtaatgtctattgtatacatgtgacttctttaaataacactgcacccaatttcttttaaattctgcaggttatgaactgcccttcacattttggggaacttactccgcatacccttttctttggcattcttctgccaattttcaggaaccttaatatttctagtg

SEQ ID NO: 10297 - DNA, 933 bp, Oryza sativa
  Intron number 1 from transcript LOC_Os07g10170.1 (locus LO C_Os07g10170) derived from phytozome v7.0 (chr-ID Chr7; po s 5472727 to 5473659)
tggggaggagaggggagggggcggatccagacgaggtagaggaagagatgggaggaggaagaggaagagatgcgtgagtgaggagaagaggagataaaggtcagaacttattaactgatcctcccgtgcgcctcggtcctctcaatctcgatcttttttcccggttggtagcaccaatcggaactaaaaatagaccaaccgggactaaagataaaaaggggtctaacaccacctgccgtcttttgaaccgggactaaaaataatctttagaaatatcaactgggactaaagatcaaaaagtagctctaaccttttgcatcgggactaaagatcatctttagtcccggtttttagtgcaaccgggactattgtggatttcggccgaccgagcaaagatgatttctccactagtggtcgttgttgagcccatacgactaatagtgtttttttttgttcatcgactaatttattttaggtattgatggatactatatattattttagtagttgtagggggagctagctctgctgctgcttcggcggaccatccttctcaattattgtcgccgagaggttctaggttgtatgtttggataaaagtctgttctacacggaggtgttaatagagatataatttaggcaaatttttgctacaggcactgctattgtgtggttttagccatgggacattgcccaaactcacttttggggaaaaacactccataaacatggtaatttgccaatggacaccgcgccgattaaaataatgatttctagttgaggaggagaaagaaatcacgtgaaatgtcaaaaatacccttgggcccacatatcagctcttcatcactcttcctctctttcttttctttctctcttcttcttcttcctcctgccgcaggttagcagccgcacaactcacggtcggcgcgacgg

SEQ ID NO: 10298 - DNA, 741 bp, Oryza sativa
  Intron number 1 from transcript LOC_Os04g52450.2 (locus LO C_Os04g52450) derived from phytozome v7.0 (chr-ID Chr4; po s 30991755 to 30992495)
cctcttcttcctcctctcaggtgaatgaatgtttcttggattctctctctatctcgtagtcgtcgatgcaaaaaggcggtttcttttcttttttttttctttctttcgatatggttggtaggattaagatcatggaagtttggagttttgatcggtgagggttggaggataagcctggttgatgtgggattgggaagaggtggtccgttcctttgttttttttttgttttgttttttcaaattgagatcacggactgtgcagattctaaagggggaatctttgtccttgttcttgatccgtacccatgcccgaattgtgtgctgttctcagcctctctcaggttggtagaggtgataaatttgtaccgtctccggttggaatttgccagtttatacggagcgatcagggagagagagaaaattttcttttctgaaatttcagctccctttgactgacagaagtgtgcgaatcttagtttcttggatttcccttttgtctttcgtgtgagttcagtgtacctgttttgtatgttcattacggctttcgtgctatatcgtcatctgaaattgacaggctaagttataattgaggaacagtgatgagaaaatatttggctgcttcttgtttttcagacttcagacatcaccacagctgttaaggtttgcattgccattgctcatatgagattttttttttttgttctttgttcccttgtttacaggcaatcaacttattgaagt

SEQ ID NO: 10299 - DNA, 462 bp, Oryza sativa
  Intron number 4 from transcript LOC_Os03g31750.2 (locus LO C_Os03g31750) derived from phytozome v7.0 (chr-ID Chr3; po s 18155962 to 18156423 reverse strand)
gcaaaatcttggaaagccactacaaagaagtacagtacatgagaatacatagttcctcttcttggccatcgtatcctagtatcttttgtatgattagagcagaatcaaaataccatgtttttaaaagttatctataatgatggatagatttgattacaaatagtttttaaaataaaaatttaattacagggagttgcctgttgtcagaactgttttcaaaattacaatgaacttattggcaatgtaactaggaagactacagaattacaacgaacttatcagaactgttttctgtgctttccatgaaacaagattggttttcatgtgactgatattatagacaagcatttttataatgagttcactgtttctcttgtaactgatttttgcttgtgctcaaattaacttattttttcatgtcatgcaggatattgagttcactgttcaagaaaatagactttg

SEQ ID NO: 10300 - DNA, 823 bp, Oryza sativa
  Intron number 1 from transcript LOC_Os03g29750.2 (locus LO C_Os03g29750) derived from phytozome v7.0 (chr-ID Chr3; po s 16947661 to 16948483)
aggcaggtcagtttcggacgaaaaaaataaaagaggcatgggcagattggagatccgttcagggtttaatcgatttcgttatctctgttcttattaaccaatccaatccaatctcgtctcgatttgtgggttgggggtgcagtttggagttcagctgaaaccctatgcccccgcgattaggtccgatcctgtgtttgatggagacatgacaataacaaagagatggggttctgaatgtgctgtgtatattcgctcctgatgatgatgcatgaatgctaacgtgtttaatatttgaatttaactgtgttcgaccttatgtgaaacctcgttttattgtttattattataataagtagtgctgctttttttttcagaccttcctgttattaggtctgaaattaaaaggattgatgtttgtgttttgcaataaatttttagatggatggatgtttcctcttaagggtcataggattttaatgtggacactactagtaaaaatttggttcttcgttgtaccgtgtcctgttggtactttagcagtggaagcccacactagatttggatatcatacttgatatacaaattggctattagttttttgctaataaatattactggctttctgattaagaaaagctcaaaaatgttatagcctgctaactgttgctattttgatataaaatgtatttcatatttaggattttactttgttaatgaggcatcaacaatatgatttgtgattactgacttactgtgtttatccaagtcttttcctattcttagcttgttctgttattgcagaacacaagtcaccaaggttcca

SEQ ID NO: 10301 - DNA, 857 bp, Oryza sativa
  Intron number 1 from transcript LOC_Os05g05600.4 (locus LO C_Os05g05600) derived from phytozome v7.0 (chr-ID Chr5; po s 2786153 to 2787009)
gcagagacggaggcaggataggccggcgagcaaaggttcgagttctttcccctcggattccacaaagtaggtgtcttttttgtttaagaaaaatagaatcaccaagttgttgttctcgttgagttttggttgtattttgtcactcgagagcctctgcatgttccaaaagatggtgttttattggtggtgttttgatcatgctagatgtggaggatggacggatcagatattctgttgtttactcgctttgaaatttatgcttgttttagtattatgcatctttgggcaattatcgcatggatggatcatacatgccatttctttcggttcgaatgtcttcctgtttactactttggaattatcgtttttagagtttcgaattagctgattactgcaagtacagttccccgctgtgtttttgtttgtgattctgaactgcaaactgatctaggatcgagaaatgttggtgtatttagagatttaaggggggcgactgatgtgtcaccatttagaaaatcaattatgcatttcctaattgtcatggctgcatgctgtcaagttaaatttgagataactgctgaagattacagaaggcctagaattctattaccccattcatagagtagctgtgattctgacaatacaatgcacagcaggtatttagaaaggaaactgttactacatggttgttaacagcaagcagctattattgatctgataaggaatgaagttctacagtatttttgacgcgacgtattagcatcagttttgctcaagattcacttactgttgcgtgcaactaatgtccaaatttcacatcaggtactaaagatcatatctcttcaaactggttagga

SEQ ID NO: 10302 - DNA, 609 bp, Oryza sativa
  Intron number 3 from transcript LOC_Os04g20474.1 (locus LO C_Os04g20474) derived from phytozome v7.0 (chr-ID Chr4; po s 11442262 to 11442870)
attgaagtgagcaaatattgctgtcgcacatacaggtctgttgttcttccatccttcttagtgatttttacctccagatgtttatatatagatagaatagacaattctaaggtacctctttagagataacattctcttttgccttattttactatcgtttgtgtctgccttcaaaataaatgttctgaatattcagatagtttaaatggggtatctaaatgatttatatgacttaggaaattagagctgttacaaacaaatttcttgattttttttcccatcaccatagtgcattaattgtctagttttttggccttctcagatgaaattgatcttgcattcttacattggtaaagaaatattttctttgttggtttaaactcggcttgcttttgcatgagcgaatgtactattttggtagatacatcacatgcataattaaagacagtataacgtaccatgaacagtgagtgcatcagcaagttattatgagccaatgcatgttatgacttagtgataacattaaaaaagtaggcaagcatgcatggagtagaattttttgagttatataaatctaatgaaattgtaattgcattcaggttgagtaca

SEQ ID NO: 10303 - DNA, 894 bp, Oryza sativa
  Intron number 1 from transcript LOC_Os03g45850.1 (locus LO C_Os03g45850) derived from phytozome v7.0 (chr-ID Chr3; po s 25891488 to 25892381)
gtcgtcgagcgcgcgctgcggaaggacggtggccggtcagcatgacgcctgatgtgtcgtgcggtgtacatacacgttgtccgtgtattctttgattgatcaaattattgtaaccttggagtttctaaatagccgtcaagaaaatatgtgtatgcttgtcagcgacttgagtttcaaccgccaagacaatgactaaacttcccaaagaaatcaggtggccgccgattcttgcagtaatttgatactgattttttttatggagatggtgaatttagctcaaaagtcaaaaattacccatactgtgcttcaataacgaaattatactccctccatggcactaaatttacccattgccaccgcacgaacaatattctttcttcgtcccatagaaaaaccaatttagtactagatgtaacatattatagtattatgaaactggacatacatctgttcagattcgttgtagtagaatatgtcacatccagttctagattcatttttttaagacggagagagtatgtagggatgctaaataaatattttataactatatgattatactagaaaaaatgtccatgcgttacaactggggaaactatttagccttttaagacaatgatatgtttttttcttggtaaaattggatgatcttaaagttgaatgtacccttagtttctagtttacaatttttatttgtccaaaatatatagaggaaaattcagaaactatacataattgagattttttttgtcggcatggatatattatatgtatcacaacaattaatgttctatcagtatgtccagctacttccggcaatccttgtcataataaaaattatattttcgtgcatgtatagattggcaaataataaaggtaattaatttgcttcat

SEQ ID NO: 10304 - DNA, 532 bp, Oryza sativa
  Intron number 2 from transcript LOC_Os08g08790.1 (locus LO C_Os08g08790) derived from phytozome v7.0 (chr-ID Chr8; po s 5093659 to 5094190 reverse strand)
tttgtaatctgtaataacgtatgtgtgtacgtgcattatgcttctcggtataactggaaattagtcaagtcgcaaataacacagcatgatatggatttgattgtatttctaattgatcgaacatgtatcaaggttttaaaatctccggctataactaccattatcttcggagatggttgtttgaggaggatctagctattttactatcattatacaatttaactgctatagtcttatttagcctgctattagttgtttgatagggtctacaactaacaggctcatcttttcgcttatgcttattagtcaaaaatttaaattttcaatcttaaatttgaagttaattttgaggttttttcatcaaagtttattttagatcgttaagaacacgtatataaaagttttatttagaaattatgtttttttatttgcaaataagctgtttggtctattcaaaacgatggggctgtaaatgtcttggcatgctgttttaacattggcaatgtttgctacaatctctcttaatcagaaa

SEQ ID NO: 10305 - DNA, 731 bp, Oryza sativa
  Intron number 2 from transcript LOC_Os03g19280.1 (locus LO C_Os03g19280) derived from phytozome v7.0 (chr-ID Chr3; po s 10843021 to 10843751)
ttgacaagattttgttccgcatcaaacagtttcaggtttgtttctgaatttactttgtagtgaccatagttcactgtttgtaattttttgcatgtttgttgtgcatgggttatttcttgctggtgcaatactattctttctgcttgatcaacacttgatgaaaattatcaacacatagtgaaaattatggattcttactgcatgaaccatttataaaactttttggtcatggtatacctaagcaatcattcaggtaaactagctaagttgaaagctttaagtgttgattctactgtagtgctgagtctggggcaatggtttctgaagagaaccagagcatatgcttcctttctttcactatctaaaggctggagcaagagactagattgacatatcctaagttttgcctcaagccttcaaggaaatatggttgacttactatactagaaaattatctaatagccatgctgctggcatccatactgaacgacttcttaagcacttccagatgcaaacttttttttgattaagcagttcttgatgtgcagaaatgcctcactattatgtataacatgaaatatggttgattattgcaactccattttgtaaatattaacactggtttctctctctctctttttttctgataaaagtctaaattggatgtttttcacttttctaacaccactttacattatttcaggtgtctcttgttctgttagcttcaaaat

SEQ ID NO: 10306 - DNA, 552 bp, Oryza sativa
  Intron number 3 from transcript LOC_Os06g02620.1 (locus LO C_Os06g02620) derived from phytozome v7.0 (chr-ID Chr6; po s 930501 to 931052 reverse strand)
cgagccagggggagatcaagaaagcgtattacgcggtatggttggctctggaatcaagactatgtcatgcttagggtgtaaattgagcacaccaacgcggcacatcttagttctatatcgcaagtcttgaattataaagtgaagactaaacttttagttgctaattttagtgatagactttggaagttcccatcattacacttcaggacttgtgcatagaaagatcatcacccatttggattttggaacagtaatgttaaccgcaagttgatgggtatctaccagtttttttgtctaccagaatgtttctgaaaagtggttgatggactcttgagtaaagggcagttgaggttgtttgatttaccatttctcatcctcaattttagttatgtattagccttgtgttaatatagaaaacattggcatttcctttccttatgcaccatcgaaagaaaaaaaaaatcatcgcgtattgtttacctcacaatccctttttttttctttgttgtcctaaaagcttgcgaaaaagctccatccggatacaaataaagg

SEQ ID NO: 10307 - DNA, 742 bp, Oryza sativa
  Intron number 1 from transcript LOC_Os05g06780.1 (locus LO C_Os05g06780) derived from phytozome v7.0 (chr-ID Chr5; po s 3539797 to 3540538 reverse strand)
gccgaccgccccgtcggctacaagtgcggaggtaaagactggtgttgcctgggaacttatccctcacggacgtataacagaacgattcatcgtcgcatgattaattaaattgtattagctatttttttaaaaaaatatattagtatgaatttttaaagcaattttcgtatagaatattttttttaaaaatatacaatttaaaagtttgaaaagcgtgcacgaaaaaaaaaaggacatttgagttgagcactaataaaataacttagccttaaagatgtactcccaccatcaaaaaaacccaacctagttggggttttgacacaacatggccaatacatggccaatttgacataataggccatgttgtaagttgtaacaaatccccaattaggttggttttttttactgagggagtagattattttttctcggttttcgttagtatgatttcggatttcaaactgttaaatgatgttaaatgatgtgtttcgtttaaaatatcaaatagatctatattttaaatttaaataattaaaactcaattaattatagttaattactttctcgttttatgtgcactgatttatcttcatctagtggcttttctaatgcaagtatatactcttctagtcttcttcatacaaaattaatcgatggttagcattttttcaatatttagagcaattaacttattttaattttcacagattacacgctgccttgacccttgaggccttgaggg

SEQ ID NO: 10308 - DNA, 787 bp, Oryza sativa
  Intron number 2 from transcript LOC_Os06g41010.1 (locus LO C_Os06g41010) derived from phytozome v7.0 (chr-ID Chr6; po s 24491274 to 24492060)
gaaaaaaaaagaaaagggcttcctcgtcgtctaaggttcgtggctcgattgcttccctgttcgatttatgattattattggtttaatttagcgtgttttttttcctttttccgcggtcaaaaggtgtgattttttttgatttgttgatttgatgtgtttggggttggggttgggtgtggaaggaacggcgatgagcggcgagcgaattcgggggaggtatggtgtaaaggcggtgttccctttacacgtattgggggtgtggttgttgcgcctagttgatggatggatgaatggatggatggcttctttggggcgctttgggcaaagtcagtgagcagatatggctgcaactttatggatttgttgctctgttgcgtaaagcggcgtaaagttgggagcctctttctagaaccaatatatatatatatcccctgctctctgatgttgttaggtaattagtctgttgggctagatagatttatagcaaggcaggttggactgttagtggtacatccacttttcttcggagttcttttacatgatgctttgctagagtgaaatttgacatgtatactatgcttcttgtttttgtcgcggtgtattttgcgcaatcaagaacatatgccatcattggcagatattgtctgctcagttttgctaccctgaagtggaacatttgattgtaatgcatttgcttttagagagtggaaaaatggaacctgtttttcttctttagtcttgtatttacgcattttttcttcttctgatttatagttaaaaggaagcc

SEQ ID NO: 10309 - DNA, 751 bp, Oryza sativa; identical to SEQ ID NO: 9657
  Intron number 1 from transcript LOC_Os03g04930.2 (locus LO C_Os03g04930) derived from phytozome v7.0 (chr-ID Chr3; po s 2376046 to 2376796 reverse strand)

SEQ ID NO: 10310 - DNA, 686 bp, Oryza sativa
  Intron number 1 from transcript LOC_Os07g19160.1 (locus LO C_Os07g19160) derived from phytozome v7.0 (chr-ID Chr7; po s 11339128 to 11339813 reverse strand)
cggccgcaccgctacttccaggccgtcgcgcggaggtatgtcccggtggtgcaggtgcagctcggcagcatccgcacggtggtggtccattcgccggaggcggccaaggacgttctccggacgaacgacctgcagtgctgcagccggccgtcgtcgccaggcaagttaatttgtaaaaaactgggcttttcgctttactaactactttcattatttgatgtttacgatgaaagttcagtttacgaaagaaatatggtatacgtaaatttgcctcagaaagtaatatcatcgtatcataaacctagactagggatttttatgcctgaaaaagttaagtcacagatgcggctacaatcaaatacatacgtagaaaagttaagtcagagatatggataccaaccgaatgaagtgttcatacgcaggtcttccacgcctgcgatatatataaagtctatatcatcaaagacatggttcataaaacgcgcatcttgaaatcacacgggtgtcttattgtgtctgatccacgttaaccctccgattaaccgggatcaacaatttcttcaaatcacgcgggtgtcttattgtgtctgatcaccctgcgattaaccgggatcaataatttcgtggtactgattaacactactacaaaactaatctttctagacgttcaaaaccaatatttgcac

SEQ ID NO: 10311 - DNA, 966 bp, Oryza sativa
  Intron number 3 from transcript LOC_Os04g55290.2 (locus LO C_Os04g55290) derived from phytozome v7.0 (chr-ID Chr4; po s 32683405 to 32684370 reverse strand)
cagaccgtaatctgattgcaaagtggaaaaaggttagtatttgacccatgatttgcgagtgcccatcattccttatactctgtgcaagtttagtaagatgccttatccaccttgtataatctttaagactttaattaacttgtgtacaaagataattcagatgaagccatagaccctggatacactgttaagtttctcactttttttcccatgcttagaatgtaacttaactgaccatactttttgtacttgtactatgaaaaataaaacattaaactaaccgcatcctaccatttcttgcagtaaatccattatattgggttaagctatcacatactgatccagtttgacatgacacatcataaatcttgtttagaatataatctatatgtatgaacctgcgattaatagctgtatgtcaaagttgagtagtgccttattggatttcatgcaatgaaccacaggaaatagtgaaataatgcagcatgagtgacttgtggggatttatggactatatactttcttatatgggtgtaccatgaaaaataagattttgggagcaaaaagaaaaggcagttgactaaagatgtttatgtattttctgctatgtatttttattgccacactagcagctgatgtaaccagaaatcaaatcatggatagacttctaacacccaatggtatatatattttttcctggacatctgataaaagttggcagatttgggagggatgcaatacttatgttccatattactactttatatacttgtctgaacattgataacgaggggcctaaattgccctaagaatactgtgagacatgtacgtgacgaattcaactgtcaaagttttcagtcactttttagatgcaaatgctgaagatgcttttttgtcacaagagtttgtcaggcattcttatatcaaatgtatcattgcttctttttgtgtgttttcagccaggct

SEQ ID NO: 10312 - DNA, 1054 bp, Oryza sativa
  Intron number 2 from transcript LOC_Os05g18090.1 (locus LO C_Os05g18090) derived from phytozome v7.0 (chr-ID Chr5; po s 10404627 to 10405680)
ttcagcaacaacaccctctgccatattaccaaactgtacgtttgttttcatcagttgtgcaacatgtatctcgatgcggtgcctgaaaaatataagcaaaggaacatgtcagattatcgatacgtctgttttcaccagttgtgcaacatgtatctcgatgcatgcagtgcctgaaaatataagcaaaggaacatgtcagattattgattactagtatttccaattcatagagccatcacatcggtttatcctaaattgggtcctccggctccagtgacctttctttaatttgcatcttatttaggcaaaaccaaatatatcccaattagcacaattctcatatataggtattgcatgtctattatgcaggagggtatataaattgggagtagttggtcaaatacctgcagagctacagaatctcacccacctagagtatttgtatggtatctaagtcttttctccttaatcttgataactaattgttacactacagattaaggttttgccgtaaatataaattatattccatgttctttttgtgaaaacagacagcttatgctttttttctgctaattgacctagtgtttctttatgttgtcttcaggaactttaattataattacttgactggtgccattccatcattcattggaaaattcagttcaatgaaatatttgtaggagttacacatcacattctagatttatgtactatatccctttcatattataagtcgttttcagttttccaaatcaaatttctttagctttaatcaagtttgtaaaaaaatgtagcaatatttttctacataaaacaaagaaactattaaaatgttttcaatgttagatttaataaaactaatttggtgctagaaatattgctatattgttttataaacttgatcaaactttaaagaaatttgattttaaaaaagtcaaaacgacttttaatacgaaatggagagagtaccattcaatggttaatgttttttcttaattctgtttcatcatttgaagggcattagcttcaaattcactgtccggacaacttc

SEQ ID NO: 10313 - DNA, 1033 bp, Oryza sativa
  Intron number 1 from transcript LOC_Os03g06770.1 (locus LO C_Os03g06770) derived from phytozome v7.0 (chr-ID Chr3; po s 3442825 to 3443857 reverse strand)
tcatcttgcaggtgctcaagggagggtcgccaccggtaggcaatgattgccaccaaggtcccggaggcggctccggagccacctgctacccgccgtaactagcctcgccggccaccggcgcaccggcgcgccgccggccggccggccaacgcgcatccatgggtggatcgcggccggttttgcttgttcgcgtgcgagccgttaacatgtagacatggagatttggagagccgagtagagatccactgttcattttggttcaattcctttattcttttttttttcttccctgatgtgtgagtgcttcgtctgtccatgcaaaaatgctggagcctctcaaaggtagctgttcatccatgtagaaatggagtagtttagtcgatttaggcgcattgatttggaataattaagggtgatcctgacatctactaggagtctaggtgaaagtctgtgtaattagtcatgttgaatgcttgataattgtatataagaatcatggagtcacaatgaaacaagagatacactcctatatattttacctttcctgttggtttcctttaatacaacagcagatttcgcttttatgcatggtttactccgttgattctcacttaaacacacaattttctctttttataatcacaagaaaaacacacacactactactccacatgcacacacccctacacaaatttactgccaccatcaatatcttcttctagcagagtgtttactaagatcacgaatttattttttgcaaaaacccacattgtgccaccttacctgaaaaacttttttacaaacattaattggtggtgtattagcaaacgatatatatatcggtttacgatgcattgccactcgaaatttactccttaaaccttttaatattaaaaaaacaaatcttaatgtacagccacatataaggtgaatattggcctataactaaaagatagataacatatttcataagaaatatatattttttattttaaataatattataatatattttcttttttatatgtagtaa

SEQ ID NO: 10314 - DNA, 411 bp, Oryza sativa
  Intron number 1 from transcript LOC_Os05g06910.1 (locus LO C_Os05g06910) derived from phytozome v7.0 (chr-ID Chr5; po s 3614959 to 3615369)
gagagactctccaaaatcccacgttagtattcaattcattattatcttccttctctctcgccgttaattatcagatatgaagtagtatactccctccgtttctaaatgtttgacgccggtgattttttttaaacatgtttgatcattcgtcacaaaatttaagtaattattaattctttttctatcatttgattcattgttaaatatacttgtatgcatacatatagttttacatatttcataaatatttttaataagttgatcgatcaaacatgtgtgctaaaaagtcaacggtgtcaaacatttagaaacggagggaggatatgatatgagcagaagaaggggaaaaaaactaacttgtgctctattccttcagttcctccgggtactgtgattccttgcactcgtagg

SEQ ID NO: 10315 - DNA, 872 bp, Oryza sativa
  Intron number 1 from transcript LOC_Os04g21020.1 (locus LO C_Os04g21020) derived from phytozome v7.0 (chr-ID Chr4; po s 11812301 to 11813172)
tgtcctgtccgggaccgatcccaaacggtatatcggtaagtagcatttctgtttttaaaatgactagcaaaaatgtttggtatgtttcaacatgtgaagataattttcatgattcataaaaactctgctaatttaaataacaaaccgagaaaagatgaacaaaacaatggcaaaacaaagttaactcagttgtgctcgcttcctgtgtcatcacacgaaaaatctcttatgtacacatttccttagcctcacaaatcgatcgggtggctattatataagttgacgcatgtgtattttgctatagatgagtgaaagtttgattattcaattagtgaaagttttttacctatagataaaaagcatttgcaaagtaacaaacttgttgtagacacaccttaatgataatttaaaaaaaatatttatgaggaaagaaatttggtagagaaggataataaaaacagaaaatgaggagattagatgtaggtaaaatacaaagtatgtaactgtacggacaaaatcccttattttatactagtataaagtggaaagtacgatgtgtggtggatttttaagttggattcttgtcctagccaagggctttaacgggcacacgtgttgatgagcatgtatcacacaatctctttgattgtgtttggaaaatgggataaagagagtgggaaatggatattatttccagttttgatatttcccttgtttggataggttgggaatgggatatgcaatcatgctggattgagggtaatattgccaggtgaaattaccaaattgccctcgccattttgacccttctataatctgttgattcatctaccacagctcatagcatcaaatctgagggtgctctttggtgt

SEQ ID NO: 10316 - DNA, 876 bp, Oryza sativa
  Intron number 3 from transcript LOC_Os04g41450.1 (locus LO C_Os04g41450) derived from phytozome v7.0 (chr-ID Chr4; po s 24379074 to 24379949 reverse strand)
gaaccatactactctttggtccgttggagtttctggtaatttgcctcatggtctattcaacggtctatatattctgggtatcatccattgaaatttcttgatttcactttctttttatctttactagtgacagcctgccaagagaaggggaaaaaaaacacagtactcgtcgcagttattttaatcacagctaatgaatgtaaactaatagcatcatatagttacatcagatgttgaaagaaacccatgaaaattatttcacatgttgcctctgttttttcttctaacattattctcagctgtaatcacaccgatatcgaaaaagctgcaggttgcctgaaacttcaaaagcttaggttgctaaatcgttttcccaagctcaaagtagctgggaacttgggatacatacaaaacaagattcttacaagttgctaaggaaaacaattttatatctccttcagaattagttaggtgtgaattaagccaaaacaccagatcatattctgttgaacttttttttttttttgaaaggaatatattctgttgaatttttaactatggtttggtcatcacctactgtgggtctgtggcataaccttgatccgaagcctacttgataaagatattaaaggacctctatgtaaaaaagtacatcggcatcttcttgtttgcttgtggttaaattagcattgattttcttcagacaattaacttatagatactttcactagtttaaaacttaatatctggatataagtttctatctttgctcacagccaccgaacaagtagtttctgcttcatactggtttaagttccaaggtaacaatctacttgtgcaggctcttggattgctcgctctgcaagcctacctccc

SEQ ID NO: 10317 - DNA, 915 bp, Oryza sativa
  Intron number 4 from transcript LOC_Os08g13644.1 (locus LO C_Os08g13644) derived from phytozome v7.0 (chr-ID Chr8; po s 8116815 to 8117729 reverse strand)
aattgatttattccattacgagctaaagcccactggtatgtttttgtttctctgccattcaccattgaaatatggaatgccatattctttttttccttcgatgcactcatgcactcttaattgtctgttctaatttcttcgaccactaataatttgcagtttgatattgctttatcccgctgctttgccattagaaccaacaaaaggaggaatgccattagctgaggcagattcaataccaaagttgattgtttgattctaaacgtaattatcatggtttcttctggtcctttaatggtgatattaagatttgggcaaaattagtacaagagctacatgtccaaaataccttggtagcttcccacttctactatctctccaatttactcttaaattgtatgatacaacattatcaagtttcatagtagttattttggactcacctcttcaaagtacttgtcatctgggttgggaggtaatttctaaatctcagctctgctatttgatgatctgacattcatattttactatatacttcttgtcactagaattcctgctgcatacgtactagctaggtatttcctcttacaataatggctgttagaattagcagcatgaaactgatcagctcaactccatgctatgtaatacttgaacaatctgagagtttttctttactccagaacacctgagagttgacatatatgatatatttaacagattgtgttgattgcgcataaagaagtagcccaacatttttctgctatgcacatgaacatattggtacatatttacaattctttatttttacgaggcactatgctactgatattctattgattggttgcagctgaatttatttaaaaaaaaactactgtttttttttcacctacgttgccattcctccgttcctgc

SEQ ID NO: 10318 - DNA, 206 bp, Oryza sativa
  Intron number 3 from transcript LOC_Os08g13644.1 (locus LO C_Os08g13644) derived from phytozome v7.0 (chr-ID Chr8; po s 8117786 to 8117991 reverse strand)
gaaaggattttatcggagaaatcttgattaggaaggtatatgtacgtgtggtcagaaatttatccctttgcaattcaatagatgcattctctattttgctaacaagaattaatttgcatttttttggaaagaaaacagacgatgtgcattgaaagaattattattctttgagatcttgataatatgtttcttgtccaggcattccc

SEQ ID NO: 10319 - DNA, 851 bp, Oryza sativa
  Intron number 1 from transcript LOC_Os04g42270.3 (locus LO C_Os04g42270) derived from phytozome v7.0 (chr-ID Chr4; po s 24824004 to 24824854 reverse strand)
cttcgcgtccgccgccgccgtcccggagaggtaaggtaagcgtcccccgccgcaactaccaccacctccgcccccgccgtcctcgtgctcgtgttcgtcttagtcaagcgcatttctgtgctctgtagccgcgcgggatggagctcgcgtctctcccttaatctgagggcgaggctggatccgctacttgcgcgcgcttttcgtcgatttcttgtagtggatttcaggtcgttgctcatccagtagttggtgcttttcttctggagattcaatttaggatggcgtgttacacagtctagtacggtgaatctttagaactgtgggtgatgtttagggatgctggcgatattagtgtgctcgttatggttgatttgaacttgatgtagttgtttgttgactattaaggtggttttttttttgtgtgagttctgaatctgttgtcttggttagcttttggtggttgattggtttcacatcagaaattaccctgtttggattataatacaggatacattttgattaccacataggatgtatcgttgctgttagcctgttactagtactcttatacttactgaaatggtagggccgaacttttgcctgattgcttatttagatttacttggctaatgtgaaatgtgtgagcaagataccttttcctcctgaagtgtataacgactctactgtgaagcagttctatgcttagttaggtggctttctctttctatattagtaatgtattatgaaatagctgaattcgcaatggtgtattgtttagtttttctgtttcatacttctgatatcactgttctctttgtgtgcagttcaagaggcagccctgtgaagctcca

SEQ ID NO: 10320 - DNA, 863 bp, Oryza sativa
  Intron number 1 from transcript LOC_Os06g35760.1 (locus LO C_Os06g35760) derived from phytozome v7.0 (chr-ID Chr6; po s 20863940 to 20864802)
cactaactacaaaagcaactctaagtatttttaaggtaaaaaaaattactttcacggtgaaaataaaatcgcatcagttatgccaccttgttttcaatgttgattttttttacacatttgcacgacgtttaaccattaatttatcttattaaaaactatacatcatttatgtttgttatgatttatttcaatattaaaggtactacaacaaaacttatattatttttttatggaaccaaaacttatattattacaaatcagacgcataagtaaacgcggtattaaaaatgcggtattaaaaatcaacggtgtcgtatgttacattttacaaagggagaatcaagatcattcatcttcctttagtttgaatcttgatcggttgacctaacttctctgacattgatccacgtctcacgcacgactgtcattttgcaaacaaaaacggctggctagccacgaatctttattcttacctactattttaagtgaagaaaaatggagctgattgagtgaacctgcagggtcctaaacaaaagctgcattttttttttggcatcaaccgaattaattaattaattagcttctctgcctaatggtagtggggatcacacttggaataatcaatcggccacatggaaattaaaagaaaaaaaaagggggcagctagaaaaaaagcgacagcctaactggtcacctccaattaattaggctccaaccccatgctgataaggcagatcgagggcatctttctgcgtgtttcagggccacaaaacgagaataatatcttgcaatttcctttccttttcttcagttgctttggcatcatcgatcgagtcgatatgttttatgctgtgtaggtcagc

SEQ ID NO: 10321 - DNA, 571 bp, Oryza sativa
  Intron number 1 from transcript LOC_Os05g43240.3 (locus LO C_Os05g43240) derived from phytozome v7.0 (chr-ID Chr5; po s 25097447 to 25098017)
tcaagtgtctgggcctatttgggcagcgagatgtacattcttgtttgctcatgatcttgtgtgcttagttgtgtgttaaattttataaacagatgtatgccggttgccaacaatgcaaaagtgaaattctaagaatgcatactatctgcagaaatgctatgatagaattgtccagaatagagctagcctaatactattgtgacaaataggacttggagtaattttcaagcttgcaaagcctcgggcagttgcttaatcatgggatcatagtgacatgtcgaacttttgtttacgaagtttgcaattggacaactctagattcctagagtttcttcggttcaagaacagaacccacacatcattgctatgatgctatctttttttaattgaaaactctgctatgtgaatttcatgacagtgttttggtttatctagcgatgaagtgcagaaatattattttcttgatgaactgtagtttctagaactcaaactcagatgtcatggtctaatgaaactttggtgtccatgtctaatagagtatcaaaagcagcgacgggaagagccccatagt

SEQ ID NO: 10322 - DNA, 447 bp, Oryza sativa
  Intron number 3 from transcript LOC_Os08g38990.2 (locus LO C_Os08g38990) derived from phytozome v7.0 (chr-ID Chr8; po s 24646101 to 24646547 reverse strand)
ggaggcttaattgttgctatcgccctccgcttcaggtgtccatttgaattcttcgtcgtttctttcgtatttaattgccatttgctgatttgcctctttatttcggtgggttttatggtaataaaggtgtggttcctttatcatcaaatttgaggtgttctgggttttctttggttcttttttggagcactggatttgtgtgctcttgtaaatcaaatagagtttgtggtttggttcgtattttacacaatcgagttgtgtttttattttagtttgtatcgaaatatttgcatacttgtttctagttccttcaggcttcagttctcttcattattataaaaaaaaatttggtcctttcgtccataatttttttcacaattccatttttgaatgtatgagcttgaattatgtgacttttcagtttgagcttgggattgtcaccttttc

SEQ ID NO: 10323 - DNA, 775 bp, Oryza sativa
  Intron number 1 from transcript LOC_Os03g10390.1 (locus LO C_Os03g10390) derived from phytozome v7.0 (chr-ID Chr3; po s 5293830 to 5294604)
gccgccaccctcgacctcaaggagtccttccagttgtgcgtaactttgccaccaccttgcccttcacgcttttagttttctcatagccgttgaatgtgctcgtgtgatcggtgatcctattgctccatccgctgcatggttgtggcctccggtagttttattcgaatcatgcatgtgtgtggtgtgatctatggttcatagttattggacactgatgcgtggataagtttattcattatacaatgacttctagcggactataatttcttttgcagtaatgaaaaaaaaagttattcgcatctattggcttttgatgaagtgacgaagcatatattcatagtatttgtagtagagcgttagagtagtattacttgtgatgtttttctccttgtttttagaaataacatatatagagattgttgcaacatgatgtgcctctttgctgttcattcacatgtttattttaaatatgtttaaaagtttttgaatctttctttctcatcactgcttcttaatttgcagtatgtttcgacaatgaatatctccatatatatatatgcgaagtatgcctgagaaaaatgttaacaatatgtagacaaattattttgaagttgttcaaaccgtaaaatcattctattgtgcttttgttattttccttctatataaaggttttatgcttcactgctcttccttgttctttacccccaaaaaaaactgatgacctgttttctcttaaatagtgctaagtctgctcaattggagcctctcccctctg

SEQ ID NO: 10324 - DNA, 722 bp, Oryza sativa
  Intron number 5 from transcript LOC_Os03g29260.2 (locus LO C_Os03g29260) derived from phytozome v7.0 (chr-ID Chr3; po s 16654607 to 16655328)
cgcagctgtcaaggcttctggaaagaagaaagaatgtatgtatttcattgatttatggggtccctgcccattgctgcattgaggcacttacttttaggtagtgacaaatggttgaaggtgattaaaagaggagggttaaggccttgggcttattaattcccagttagttttttgaaaaactcataaaattggctgtaataatttaagaaagtttatagcattcaaatcttcttcagctgcacatttgcttagttgtttttagagtaaaattctgaagttacataataaatactccctccgttccaaaatataagcatttctaggactcaattttttttaccatgatataagcgtttctggggcactgattccaatgcaagggaatctgtacattttcagctaatgacatgcttgggaagggaatttaagcaattcaaaaaaattcaaatttgaccactgaagtgactaaaagagaatttttttccctataacttagcttttgctaaggaacatagaaatgcttatattttgaaacggaggttactcattgttatctctatcactatcatgcttggtgaatttcactctcattcagctgcatttatgctattagccccaaaatttaatattgaggcaatgctatatgatatataaaaaatattgccaaaaatctattactaacttatcctttattttagctgggaaatcatcggttctgctag

SEQ ID NO: 10325 - DNA, 786 bp, Oryza sativa
  Intron number 1 from transcript LOC_Os06g41660.1 (locus LO C_Os06g41660) derived from phytozome v7.0 (chr-ID Chr6; po s 24943406 to 24944191 reverse strand)
gacaaggagattggagttctgatcctgccaatcaggtatggcgtttgtttcccctgtaacctagcttcattaagttatcctaggactcgtcgcgccgccgcgaaatcgtgcttaggtactccagtggcgcaggattcagtccttataatatcctctatttttttttaaatttttcggaggaaatacagatacttcgggttttcgggatagtacttcatacatgaagcaacgaagtttttgagaacttagtttatctggggcagcatgggccatggagagatactccagttgatgcttatttggatttcggagagggatctgctctaattaggaatggaactcctaccagtttggaggcaaataattttggatgcgtgtatgacaaattatcaacccccccccaccccccccacccaaagaacttaagtttcttctctgtttggatatttgtcttttagcctctttaaccgggaaaaaaacgagatagttacatcatttgtactcctacccttattttgcctaggggcctaatgatctgataaaacaaagcagcagaatcagagcataatgggaaatttatgtacttatagttctagtatctctggcagtaatcttacatgcatttgagtaatgcgaaggttatttctgaattgtgctatcaactatatgaaccagcaccaatatgttccacttctacatgttcacgttatgtttttctctttggataattgatctgaccaatacatgataggtagatcagttgaaagctacacggagaaactgaag

SEQ ID NO: 10326 - DNA, 884 bp, Oryza sativa
  Intron number 2 from transcript LOC_Os03g18190.1 (locus LO C_Os03g18190) derived from phytozome v7.0 (chr-ID Chr3; po s 10199857 to 10200740 reverse strand)
gtcacccgctgctggcggaacagcgtcgattccccgtgagttctcatcctgtccaacatttaattctgtgttgatgtgtttaatttgaactaagtgcggttttagtagcgatcaatggtaacttgaaagtgcagcgacgtttcttacttggatgatctcatttgtggcgtttattcaataatgcaagcacagcaaatgcctaagttgctatatgcggaaggaagtctcagctgtaccatcacctgtacggcgtgtctagtggttttggatgatttttgtgctacataggattcttctatgtttgggcattacttgctattgctggttttggtccaacactttatgagctaaaaataagtgttcctgtttatgttttctttgttattttgtgcaataagattcacgatggtagcaaatcagcaaaacactttgtaacttggtacgatagatttttcttgtctccagtgaattgtacactagattagtttagtgggtcttatgtgtgagatttttatattagtagagtggcattaacttctgctggagccatcggcagaaatctcttgattaattcctggtgcttaaatgtccctggtggaaatctaatatcaactacgttgttatgtccaataggctgttactgactttggcctccattttttttgttctgaaacagcaagggctggattggcctacttctgtgtttttgtctatagacggcaccctgcatatttctcacttctggggcatacatatattgtctactttgattttctatgatacttttcatactgttataagccttgtgttctctctgcctttgataattaatgtttgatttctcgatgaatgagtttaaattgtattttgcagtgccatagata

SEQ ID NO: 10327 - DNA, 960 bp, Oryza sativa
  Intron number 1 from transcript LOC_Os04g41950.1 (locus LO C_Os04g41950) derived from phytozome v7.0 (chr-ID Chr4; po s 24667699 to 24668658 reverse strand)
ttccaccgtgcggccgatccgccgccagagccccggtgagcgcgcacgtcccctcccccccagtctcccttctccgcttggcggctggttgaccgctgctgcgccatcgtcccttctcgaggtgcgccgcccttcgtgctccggtggtaaacctccctgttgtttccgtttggctcctgtcctggctggtgattttggcggcgcggatcgcccgccgcaggagagctcgtgggcggcgcgcgagtgcgcctccggggcgaatggcattttggatggttttgattggggtttgatttgttcggtggcggcgtcctatatcagatgcgattagtccttcggccttatcaaatatctgaaatccatccacatatgacatggctttagatggtttggattgggtgggcaactactgggcacattgacatcataccaaatatactgttaatcagctggctctagtgacataaaacaaacacgtacctgccaaataattatagctcggttttattttccctttttcttatgatgctttagttattgtataaacttggtgttctagatgtatagtcacctggcaaccatggaactgttgaaactccttcacaggctagtgtttctgcgagcactgctttctagattcattttgtaaagttctttggagatgttgattcatgcgaggacttctatgtatgtggaatatgcatttactggttgaagtatggctagtgatttagcagcacttagacaatgctgactgtcagacataaaaatagaaggagttttggaattagtactgctgtttgtgaaatattatgacactatgcttttaggttgatgaaaaatttgttacatttcattcttgtcgcacttaaatgtgttattcagatgcatcaatgcccataactataggtttcttgtatttcagggttctacccggaaaggcataaccctgacattctc

SEQ ID NO: 10328 - DNA, 758 bp, Oryza sativa
  Intron number 1 from transcript LOC_Os03g43420.1 (locus LO C_Os03g43420) derived from phytozome v7.0 (chr-ID Chr3; po s 24216399 to 24217156 reverse strand)
ctcgccatctggaagtcggccaccgagaccacgtaatcgccccgtgatatgccgtagcgctcgcctcggttccatctatgcgtctcgttttttcagtttctctgtcgttggattggatgccggcaacgtgttgggccgtgtgcgccagtgtagcatgtggccaatgaactcggcattctggcgatatatgcagaagaggaagattttgtatctgttttgcccaactctccataattaaatggggtttgattttttgcattataaataggttgttgttatacaatgtgcaagagtctgtgtatggttgctagctgcacgtttggtgaaattttactaagaattaattgaactaaattgttatctacaatgacttgaataattgaaattgagttattgaaaagagcactctatttgagcagcagcaaaggtttaagatagatgtcccatttagcattggttttctgtctgtttggttagctgtctaaaggatataggagtaaataacgtcacaagattttgaaacacattggtcaacaaatgagttgtggcctcttgaaaataattagccaactaagcatgagttggaggtttggagctgtacctccttcgtgctatgtaagactagttctttagcagtcgtttcagagtcatacaccttaaatatttgtggttttattacaagtttcattattactataaattgtttccgagtgcttaatgattgtagtgatgctttagggtgactctagcattttggg

SEQ ID NO: 10329 - DNA, 834 bp, Oryza sativa
  Intron number 1 from transcript LOC_Os05g40980.2 (locus LO C_Os05g40980) derived from phytozome v7.0 (chr-ID Chr5; po s 23962656 to 23963489 reverse strand)
ctctatccaatccaatatcccagtccaatcgaaaggttagtcacttcttgatttgaattttccttctgcttagtttgatacaaaaggggattctttttattttcgttccagtgttcgaaatcatggagacgatttctatctttccccctttgatcgcttgtatgttaatctagagatttttctctttaaaaaaagaggaaattttggtgggggaagatgagtcctgcgacgaaattatacggggtgcaatggcgtgaatcttgagcagtgccggaatccggtttcttgttcttctaacccccaaaccaaagacttctgctgcgtttttattcctctttcgggggggatagcatcgtgttctctgaaagaattggaatcgagcacctgattcttggagagggaatcttggctcttgatctctgccttccccttcgcaaagatctatctgtcagtgctgtgcctcatcccccccaagtgggtcttttctctgggacagcttgctgcccctgttgatgaagaacccaaaaaaggctaatttatttcgtgtgttggatgcaaagctaacccttgttctttgttcttgatgctgatctgttgtgagatctgtatgccagcaattgtctttgtgaaatccagtcacggatggatgccgtagtgttcatcttgtttcagttcttcttgattaaacttctggcaagatgctggactctctcgtgtagatgataaaaaatgtgtatgtcgtggttgtttgcttgggaatcttacggattattaacttattatggtgcccggttcacagatttgcgttttgatcgtggtgccgtcaaccgaagg

SEQ ID NO: 10330 - DNA, 302 bp, Oryza sativa
  Intron number 1 from transcript LOC_Os03g02400.1 (locus LO C_Os03g02400) derived from phytozome v7.0 (chr-ID Chr3; po s 849921 to 850222)
caaatccatccacttcgcgctcggcgactccatctgtaagcactggatcatcgcgattagaggcctcgtctttttcttatgtttgtacttatcaaccgaaatttaaatttttcaacttcagatttaaagctgattttaaaatttttttcatcgaaatttatttttcagactttgtttttagctgattataaaaattttactcttaaattatttttcgtttgtaaatacgccgtaactcatcttcttcactgggtatgattcacgcagggtttctgtacccgccgagccaggactcggtggtg

SEQ ID NO: 10331 - DNA, 1024 bp, Oryza sativa
  Intron number 4 from transcript LOC_Os04g49440.3 (locus LO C_Os04g49440) derived from phytozome v7.0 (chr-ID Chr4; po s 29315124 to 29316147)
gggagagtgatctttgtggaggttgcaaggcaaaggtccgaactctgaattaactaggttccaaacgttgcccaattactgaattcaccttgggatgaatgagttactgcacatctactttactaatagtaccttaacacttgaaaacaaacatggcaagtctttccttgtcacagctatcgcctttcctgtggtatcaggaaaaggtttcatttgatttttgatttgtacatttccttacgcaatgctaatatcagccttgggtattccaggcttagactctgtcccccttgaaatctcatcctaacggatgatactgaattttcaattatttgtgatgccaaacttctcagatgatgatgcattcttggtacatttagcggtttcacttgacatggtaattagatctagtcaaacgctatgtctgaattttattgtgtatttgccaatacaagcaacaaaagcaagcgagtgccttttccggtgccaggataccaaccatcctaaaattcacttcattgaggaattccgtagaacacctgtgcaattgatatagtgataacatattgagtcgcatgtagaaatttgaaaagatgtgtcctatgtcctaattcagcaaaaatcagcccaagtaccactgtagcatatggcaatatgcaagcagaatttggttgcactttcacgtcaaaacaagtactgaacaaagctttccaacgttgttttctttagctcgcctgttattgtcttacagataataagttactgtataatttacatcagtacaacccttctacaactctatcaaaatacttgtcattgcatgacagccattgacctctgaacgctcccgcaatgggagcgaaattacaaacacacgacgaggaaaatggaaacatagaatatttgaactgtacatggccagacaagaaccacggccactccctgttttgtggagtactaacgcggtttcaatctgcctcttgtaacaggaaagcagcccctcctgcagtacatcagttcctac

SEQ ID NO: 10332 - DNA, 1011 bp, Oryza sativa
  Intron number 4 from transcript LOC_Os05g09630.1 (locus LO C_Os05g09630) derived from phytozome v7.0 (chr-ID Chr5; po s 5439167 to 5440177)
aacttgttcatattctgcttgcacatccaaaggtaacacatgttaatttagaatatgtttaacttagttgtcttttcatgcctaaacgaaagcatgataagtaacctccagaattttgtgatgactttaaaattaaccttgaaatatcattgatttttaatgctgttttaccttgctttaattgtacctgaatcctttattattttctatttttatcctccttaccggcttgtctataatagtctctctgtggtgcaagatgattttgtacatgataatgccctgttatttttggttttatcgttatgagttatgacaaaatagagccggcaacatgatttgggatgtgagcccttattgttttaaggtcaaatcaaaattcatctgaacattttaccctgtcctgacatggcattttgtggtttaaatcatctatcagcgataaatctccatgtaattttgtgtacagcctactgtatcagaaagccatgctctgtcaaatgcaacttttgctgtgtttactttaaagtttctgttctaacatataattagcacaccaatatattttttcctttgagcattaccactgttcaaacttgtatatttctttgtttggggcatttgattgcagggatacatcttttgcatcattatatcatttcataagatagtgtattacttcagctatcctattgttttccttgaagcaaaaatacaaagtccatactaaagttttagtgacttgtgcccattgcatatttttcttgtactgtaataatatttgactgaattatgtcactcttgtgtttatagatgacaattagaaagattacttaaaaagaaaaaaaaaagagcactgggttactattgcaaattctttgatcatgattcacgaatgtttgccagattgccagcaatacatggatttgacagttaggcaattattcttcgttgtttttatctctttatctatcttaatgtttgatgtttcatggtcaggttgatatcttt

SEQ ID NO: 10333 - DNA, 724 bp, Oryza sativa
  Intron number 5 from transcript LOC_Os04g52760.1 (locus LO C_Os04g52760) derived from phytozome v7.0 (chr-ID Chr4; po s 31228440 to 31229163 reverse strand)
tcaagctcgagaagtaaggatattccaacatattccaacctgcttaatatttgtttattatattattcttctttccattttttcttttacggatagtttttaatctttttctttcttgctgggtaagttgtcattgtagaaggaattgtcaagtaaaccaataatatttgatcctttgtggcacttgctttaatatcgattatatgtggactgtctctgttttgatataatcacttcccatctcacacttctcattaattacaggaagttcttttcatagacctactagcatatctgtgccggtccatttttcctgaacagtttaaccttactactgtgacggttcttgatagatttttacattcaccctttgaatgattagagcctatcaaattgtttaattgttgatgatttccattcttactacaacctttcaagcttgaagttatcgggaatcaataaattgtcattactatgcatggttttatttaattctgcaacaatactaggaggtttcgctgtacgtctgtttattataactattgaggtcaaatgtacctggctttgatgtgctgtttaggcgtacccttttgctctttgcttgcacatgttttcacactttcttctatggttttgctctttgtttgcatgcattactgctaatctcatttctttgctcatttgcatttattcctatctttggcgatctctcacaggtattcag

SEQ ID NO: 10334 - DNA, 862 bp, Oryza sativa
  Intron number 1 from transcript LOC_Os02g52270.2 (locus LO C_Os02g52270) derived from phytozome v7.0 (chr-ID Chr2; po s 31996296 to 31997157 reverse strand)
aagcataccaaggtgagcaatgaagttgtttaattgatctgatacgtctatgtctatgttaacttcaatgtgaaaatagtatgtgccgtactgcagtttacctttgtttttttggtctcttgctaacataataagttgccagcagcaaatcaaaatagatattaatgttcggttgcatgcagatttatctgtattagtgaatttcataactattactcctgagatgcctagacatggaacaattgatgtcatctatgtccaagagaccaagatgttattcttgaatttaaatacaaggaattgctaccacaagactaaaggatgtttggctgttctttcaaattgtttaggtgccaatgattcgtgtgtttcctcatttacaatggattagtagttactaggaatctgggttgtgcttaattaaacaatccaatttctctcggcattcagttggagatagcttcctcgtattcttgtcaagtagattgtcaaatcttctggagactaatgcacttcgaacaggagaaattgctcattgcttaacacaaaaatgctcagataatctatagtcaggctagctctgtgattgaatcattgctaagaaattatgtgaaacatgatcttagttcgttgtcacacttgagccacatttatggtgcaccttgaacatcttggatacattcacgtagctttataaatttatatgcattggtgttactatctgtgctcactgacagggcatcttttcgtaactaatctttcccattgtaaagagtgttcttcagtttgatatatcaggtctcattcatgataccataactgtttttcacagtgctcagtaatccagccaaaaggcgagagt

SEQ ID NO: 10335 - DNA, 564 bp, Oryza sativa
  Intron number 2 from transcript LOC_Os06g21900.1 (locus LO C_Os06g21900) derived from phytozome v7.0 (chr-ID Chr6; po s 12655031 to 12655594)
gcgaggtatttctaaagtaagaaggcatatacctcttcaagaagaggacaaaacctaaaaacatcatattctttttatattatactccctccttccttaaatgtttgacgccgttggcttttttaaatatgtttgaccgttcgtcttattcaaaaacttttatgaaatatataaaactatatatatacataaaagtatatttaacaataaatcaaatgataggaaaagaattaataattacttaaattttttgaataagacaaacggtcaaacatattttaaaaagtcaacggcgtcaaacattttggaatggaggaagtaccaattaagtacctccccaagatgatgtcctttagattgctacttgttacgttgaatattataattgaatatgataggtaacacttcagaatcatttgttctgtttgtacttattatttgtcggcgaattaatcaaaccaagaataaaaactctaaaatttttagtctatccttattactttctagtagagtggtaagtgagttgtgacacctttttcctcaactacttttttttaaaagcca

SEQ ID NO: 10336 - DNA, 438 bp, Oryza sativa
  Intron number 3 from transcript LOC_Os06g21900.1 (locus LO C_Os06g21900) derived from phytozome v7.0 (chr-ID Chr6; po s 12655736 to 12656173)
gcactacttcttggtaaaaatttaatccccacaatctcatcccaactctctcttttttttcgtggttaatagtgtttgatttactaatagtccagtatttataccaatataatgtggagaacaatctatcattttatacaatactagtcataggaccgtgccttgcaaacggatgtgatatggtgaatgtggtttaatttttttttctcttctcccatatttttctctcaattggttagttttttctagtgtttcttatggatagaatgggaataaggatgactgtgcttttaagatatatagtagagataaactaaccagtgttgaacaacactgcaatgcaaaatgggggcatatatagtggtttgatccaaaagaaattaaaatatttattttacctcagtgattaagcagctctacttgacgatgcagtgagct

SEQ ID NO: 10337 - DNA, 780 bp, Oryza sativa
  Intron number 1 from transcript LOC_Os07g10420.2 (locus LO C_Os07g10420) derived from phytozome v7.0 (chr-ID Chr7; po s 5598527 to 5599306)
acaaggttaatttggtgactcatttccagtcctatgtttctactttctaccaaatccatcatcaatcattttcttttgtctatggaagattacttttttttctcatataatttagtagaatcatccaaaatggcgatcactcatccttactttcgaagtcaccgtgactttgtcactgatatgtgacgtgactttgaaggtagaacatcctaaacatcctaatccttctataactatgcgattagtagccagattttacaaaaccgatgaaaaccgatcttctcggaccagctcaagaatacaaaccgtttagcttgttggtcaagttagaaaatattcaaactataattttaatttttgataaaattttatcggtagtcaatggttttcaaacaattttcgtcaaaaccaagaaaaaacattgatttcttggtttttggctctggattggtttggtgaatcttgctagtagcttacttgtgctgttgtgcatatgtatacctaaattaattaattaattcagatgcagcttgagcctttctaatatgaagtttctactagaagcacaagaagaaatcttaatgattttggcacgatgttattatgggctgatacaaatacagaatctaaaaccatcatatcgtttacgttctagtaaaagaaaattggttactgacaccatgttttttcattcaatgtacaactgaacaaaattagctactcaatcttatccatgagaactttgcctgaatcatggtttgatttgttgatctgcagaga

SEQ ID NO: 10338 - DNA, 811 bp, Oryza sativa
  Intron number 1 from transcript LOC_Os08g25090.1 (locus LO C_Os08g25090) derived from phytozome v7.0 (chr-ID Chr8; po s 15232617 to 15233427 reverse strand)
ggcggcacttggccccgccctgctcttcgatcaaggtgggggtgggggtttcgattccctcgtctgagtcggatggagcgatgtgtgtgtgtgtgtcgtcgtgcttttttttcgaagggttaagccgtcgtggggttgctaatcttggtgcgagattagggttttagagatgcatccgtcgattaagttgcttttttttttgttcgggtatcctgtgcgtggaaaactagggggagcattggggttctctaaggtttttgatttaatctaaactcgattcgctattgatgggttttttttaatagaatttaagtttgattttatatacaagttctttgtgctattttgtcctaatgttttctttgttgggcagctgaggtactggttaagatcgattgatgcatgatttgcgctaaacttaaaaacttaatttgctcagtagctcgtgttcatacgttgtgggaatactgcggtgtttcaactggggatacttaataacagtacaaaatttgcgaagtaccaattaatgctcaattctcattagtaacgtgttgctgatgacataacgatttctgatagcctttggcataagctagctattaaaatctaaagctggaagcagcctgttatgttgattcatcggctcattaggtgtttcaggcataataagctgacaccatccattgtatttgtagcattgctcagggtattcttgtttggtcttgtttttcatcttccggactgttggataatttttcccttttttctacgctcaggccttgcctctgctgaatcagccgaggctgtactc

SEQ ID NO: 10339 - DNA, 673 bp, Oryza sativa
  Intron number 2 from transcript LOC_Os06g09850.3 (locus LO C_Os06g09850) derived from phytozome v7.0 (chr-ID Chr6; po s 5013229 to 5013901 reverse strand)
tcaattgagactgggccatactattttcagtatccttatgttctctgtggctattttattctgggtattgttcatgactgttgaatttgtttctgttcttttgcagtccgtgtgatatagcatatctggctgctaaatattgacatctgaatgtgcacagtcattcggatatttttttttatcaagttcacacgttgcatctcattacatttctttgctggtaatgaagatttcaaatatgctggatagttgtatagctacacaggtaaacaagaaaatgggtaggcatttgatgaatctatgtgattggtccaaattatcaatcatgactgtacaatagctagtctatatattctctagtatttctctattttctatagcattcacttaatttttaggatcttacaacttgcaagcacatggtacttatttgatgctcttgttgatcttgctattaatatttgagtccatttatcattactaactttaagatcataagcttatttaacctgagacttacatcgtgttctgttgagaaaaggcagcactcagcacccagctaatgttgttcttgtaatgcatgttttagcttgtattggtttgctaagtttattgcagtgtgatcttgttgaaccttaattcaaataaacagttacatcattgaggggcgagt

SEQ ID NO: 10340 - DNA, 816 bp, Oryza sativa
  Intron number 1 from transcript LOC_Os06g03900.1 (locus LO C_Os06g03900) derived from phytozome v7.0 (chr-ID Chr6; po s 1571469 to 1572284)
ccaaaattgtcgaccaaattgcaagtggcgtcgaggtaattaacatcacatatactctttccgttccagtataagtataatttaatatagatgtgacatatcctatttaagactaaaaatcttgacacgtatatactagcttacacttatattggaacgaagagaatattaattagagtaaattgtatcaagtgcacagatttatatggtgggatactttttttttcgtctttcctccttaattggtctaaataatcttacagatagagggagtagctaagctagaaccggtcataatcaaataattcgtgtggagttaaccttgattaattgatctctgcaaaatatttttgaaatatattttcgtttatatttgaaaaaaaaaatctgccaccaacattttcatattacatactccttccatttcatattataattcggtttgacttttttcttagtcaattattttatgtttaaccaaatttatatatagcaacatctacaacaccaaattagttttaataaacataattgtttgtgttaaaaaattattatatttttatataaacttgatcaaattaaaaaaaattgactatgaaaatagtgaaagcgatctaataaataccaaacagagggagtactatatattacaagatagtcattctataaaccgtggttatctatcatctctaaaatgaagtttatatatctgtagggacgaagtgcatatatctcacatttttccatagtaaagtactgccatttagctagtaatagtaaatcatatggcaatcgcatatgcagaagctgatagcg

SEQ ID NO: 10341 - DNA, 427 bp, Oryza sativa
  Intron number 2 from transcript LOC_Os04g38310.3 (locus LO C_Os04g38310) derived from phytozome v7.0 (chr-ID Chr4; po s 22611578 to 22612004 reverse strand)
tatcaggtatttcttctttcttgttcagaaacatgccaatcttcctcccttttattgagaaatatgtgtttctcttgttcgtgttgctgtggtgtggtaataagcaggattccatataatgtgtgctatggatagagtaacaagcaaagacacttcatacttcagttaagatttaagaaaaaaactactactcttccatgcatgaaacttgacaaaaaaaaagacacatctggagaaatatcttatttcgttttggtttatgtaattttatttttagttgcatcaatgtcccgagatatatctttctcttgggttgattattcaaaatctcaaaacattatattcttccagtaatataattactgatgccctaacgtcttttttcataacagcaaactgtaactggaataagccaaatctcattcag

SEQ ID NO: 10342 - DNA, 722 bp, Oryza sativa
  Intron number 3 from transcript LOC_Os08g34780.1 (locus LO C_Os08g34780) derived from phytozome v7.0 (chr-ID Chr8; po s 21867473 to 21868194)
gcagagttctacagcaataaggtcagtaacttcaactacaagttctgaagtaaaatagcggtacacagctcgtcgtggtctggttctggtaaggcggtaaggtgcttcaaattggaggcaaattacaatggtgtagtattactgtttttaacataaagaagaggattgatgtcagtttgaaacaacattatagatcaagaacagacattcggttaatgcccatgatttttcctttgttcagagatttaaaagaaccaagaaactgagcagtcctttttatttttttcctagagtgaaaagcagaattacagtaacacggcataggcacttcctttgttcaagacttgagaaataaaacattgacaaaaccttttgatgaaaagatgaggatactatgcaagtgtgcattgattcctgcttcatacttaatcgatgacgggcgtatttatacggattacttattgtgggaaattaaaattacatttttaaagtcttgaatagccaagatccaatatctagtgtagtggtaggggtgtgcggcttcaacctcgtggtcccatgttcgactcttgacacgctcacactttcttcttagttagttcctccttggttgtccagtgtgtttcagcccggcgaaaaatcttgaataggcttaatcttactaatatcaaatgaaattaccttcaggtgcttgtggagtacaaaagcaaggaccctgatca

SEQ ID NO: 10343 - DNA, 833 bp, Oryza sativa
  Intron number 3 from transcript LOC_Os03g31706.2 (locus LO C_Os03g31706) derived from phytozome v7.0 (chr-ID Chr3; po s 18108949 to 18109781 reverse strand)
caggtattgacttagctcatgtgtgtctttttatgcaaaatttgttttcctgcaagtgatatcaagatttgaccacatggcattatcaatgtaacagcaaagaatgcgggacaagcttgtggtatatgcatatgtagctgttgagctaatcatatttcactcaaaccggttcaagtagtcttccaaatttctctctatgctgaaacattctgctttatggttgagctcacatattttggtgacagcagaattctgttattctgaagcataaattttatgtcatgtgttcaacgagtccaatgataggaccataggaggctacataaactgaataaattgaatggcatcatagttaactatctccggatggcgctccatccatgcgttcatgtcgttgtgcaagtacttatcattgagtttcttagcaatcatgtcaacatttagctatgctggcaaccatggttgtgtacttgtgttagcctgtaatgtaaagattcatttccttttcatctgaatcaacatgatcaactcttgggtagattctttgtcaaatgtacatatgattggagggaccatgtgtgatttatcattcaatcagactagcaagatgttggtcagttagttctcatgaatactgtcatttagctatatttcttacctcaggaccatattcctgtttatttgtcactacaattcagacttgcatgtcataaaaaaaaactttgatatcatattagactagataagtgagctgtcaggagcaagatgttctctggttatgtatgtgtttgatgtcagggactccacgtccgcccatccgaagaggagcctgg

SEQ ID NO: 10344 - DNA, 588 bp, Oryza sativa
  Intron number 2 from transcript LOC_Os06g12180.1 (locus LO C_Os06g12180) derived from phytozome v7.0 (chr-ID Chr6; po s 6521518 to 6522105)
gggtggtaacggtggacacgctaccacggtacagtgcaaaattctcaatgcttgaataattaagcttctcatattccaaattaactggcctaataactactactaccttcatcacaagataagtacagccgtgggtatccgtatccaacgtttaaccgtccgtcttattaaaaaaaataaaaataaataaaaaaatagttaaacataaagtgatattcatgttttatcatctaataacaataaaaatactaatcataaaaaaatttcaaataaaataaacggtcaaatgttggacatgaacagtgtaaaactgcacttattttaggacagaggatacctccattcaaaaatttaatcaccattagacttgtttgggtgattattgaggccaggcaccattcaaattaatttaattcctttaacaaaattcctattccctctgttttcaaatattaatttgtcactagatactaatatttactactagtcaaatttgaccgctcgtcttttttaagaaattttgtctatatatactcaaaagtatgacaactcaataatttaattactcttcgtttgttcttgcagatc

SEQ ID NO: 10345 - DNA, 884 bp, Oryza sativa
  Intron number 1 from transcript LOC_Os07g02624.1 (locus LO C_Os07g02624) derived from phytozome v7.0 (chr-ID Chr7; po s 948605 to 949488 reverse strand)
tgcctccttgctgtctgtgtctgctcttgatccaggtacttatttttcaaggatatgtagcataacatgaactttttattgtcccagataagtgtattgatcaacgaattgaatttcagaaaagttggcttccgctcaaatggttagccataaatctattgttgaagaaatgtagtacctagtaaactgtttaaggagataacaaccggagttggaaaaacaatttgctgaatgtcacttttccggcctctttgaatcgcaggattgagaaaatgtaggaataggaaaaacataggattttgataggaatgtaagtgcaaaacagatgattgcaaaacacataaatggccgtttgattggaccacaggcaaaacacaggaattagaggagagataaatactcaaagaaaagtttccatgaaaattcctccaaaacttgcatggtattaggcatttcataggaatttcataggattctataagatccatttctttgattcaaaggactatataggaaaaattcctataggaatgggatcctctaaaattgctatgaatttcttttgaatcaaagggggcctaaatcagcaaatagcttggcagagtgataacatggtgctagtgtgctacaagcgacaacaagatcatcagatttttgtttgtctccattgtagatggtgctgactgatcaactgaatctgtacaattctcttgctttcgttgtctccaccacgtggtcagcctcgtaccgttatattaatgcaaactgtagagagaaactgacactttgaactcaaaacagttcacactgaaaaatttccaggctacatagttttctctcagctcccagttcttgttgatccattgagtgatctacagaacttc

SEQ ID NO: 10346 - DNA, 725 bp, Oryza sativa
  Intron number 2 from transcript LOC_Os03g57940.2 (locus LO C_Os03g57940) derived from phytozome v7.0 (chr-ID Chr3; po s 32993690 to 32994414)
aatccactacaacaccagttcctgagcgggtatggaataccttcttccctttgcacttctgtaggtgtactatcatttgtaccgataaagtcattttcttcaagttctttaacatgggatgtttcatcatttttgtttactttgtttggtagtttttgtatggttgctgttccagatgttcatgttacctttcacagatgacttctctgctgtattggtgttattagacacaagacaaccgacatgtctgtttcacataaaatatagtgtaaccaaatttagaagttataaagtataataattgatgatgattcatctgaattgtggcgtaagaaatggtttagttgttatgcttgagaggtgagtgcctatttgcttggcgaagctgagattgaggcactgaatggctggattatagtagttttgttttgtagaggaaacaaacttcagataatcacatagtatcacatcctgatatcacaaaaccgatgaaactccgtggcaagttcatcaaacaacaaagtttaggaatgggaaagttacaatctcttgctctttgacatcaaattttatcactaaaataggagtttgcttctcctggtgacatcttttatctacactttatgtggcagagtttcactgccattaattaacctcctaaaattctaaatagttatatatgttttacaggttcaagtaggcaattccccagagtatataactga

SEQ ID NO: 10347 - DNA, 1008 bp, Oryza sativa
  Intron number 1 from transcript LOC_Os07g46970.1 (locus LO C_Os07g46970) derived from phytozome v7.0 (chr-ID Chr7; po s 28068494 to 28069501)
tgtttactgctgttcttgacaccacaaaacacgtattcgtttctaatttagatacagatttgacctctgtttcattaacactgctaaacggtgtgtttcatataaaagctttctatctagaatttacataaaatatcaaataagtttagctttttacttttataataattaaaacttaagggatactccctccatcaacttttgatagtcatatttcatcttgacacacagaccaaggataagtaattctacttatcatccatttaaacatgctactggtcattcctcgtaaacaagcgattcattaatatttacatttctcgatgcccatgcaaccaatcttgtgtggaagaatgaagagtcatgcattaaatccgagaaagtcattaagatgataggttgttggattgaaatatgcctatcaaaaataaatttttcagatttgaaaatataactatcaaaagtagatgaagggagtattaatcaaacgttaatggctttcttattttatgtgtcgtaactttatcttcatcttcattagaaaacaacaccatctaacttcacctaaataacacactgtacatcgacatggaccttggctctcccctctcactataatagtggagtcgtattataattcaaaccctattataaattggaaatttcttccagacattaaacccactaattattgacctttagcacactaatagtactctatttgtttttatgcttttttttctaatcttcttactatttaaccacaccctatctacagactgctgtctgctgagatctctcgactcctggaagcgaagcagaaattatcatgatgcttaacgcagcagccaaaaaacttgtcaggttcgcatcttctccagtaaaaatcgcagcatcttctccagtaagaaacgttcgtggaaaccgtgaaattttgatgattttaagcatgtttcacgtacactttttgcagggggaagagcatagctgctcacgtattcttctcct

SEQ ID NO: 10348 - DNA, 986 bp, Oryza sativa
  Intron number 1 from transcript LOC_Os04g41200.1 (locus LO C_Os04g41200) derived from phytozome v7.0 (chr-ID Chr4; po s 24253901 to 24254886 reverse strand)
tcgccgctgacgccgttgcgcgccacgagatcagggtgagaactcgagctccttgccggctagcttaggccactttagttgggtgatttgctcggcttaactctgacgtatcgtaaagtcgtgataaattgtgctttgatttcagttggttcaaccgttcaaggataaaccaacgcatttttttgtttgtttgtctaggtatggttacaatacgggattatttgagacacgatcaatctgaacaagtggacttgatttcaccatttatcagaattttgaggcgagttaatgcaaatgcgtgtaactgacgggagttgtcaatggtgctaagatacagcgtattaagcttagatgaactgcgaatacatcttattaagagcttttatctgatgcatatggctggaggacaatgtgcttatagccaaacactatgaagcgactcagtgttacactgtgaccgtgagcttgagcacctttttattagatcacagagacctgacatgagggtttagggttaagatttcgaattggaatctaatatcatatttgtggatttgaattgttttcctgccacttgttggcattctgcattgttcaaattgagttcattaactttgtaatcatatttaatctattgatataggtaatcataaactttttacaataaacaacacgcattaatatcattataaatctggagaatattgttgacgatatatcagtgaggatcatggattcatagttcttaactctctagcatagcattataaatctgtaatctggataccatcctttaagatgtatcagtgaggagggctcagaatattctttatgggtactgatgggatatttgaattctgccatagaagctagagtaggtgtaagaagagtagaatttctactgagcacttatttatcatactgctatttctgttttgttttgctcaacaggtgaggtataaacgctggttgtggtggactagatt

SEQ ID NO: 10349 - DNA, 1024 bp, Oryza sativa
  Intron number 1 from transcript LOC_Os04g51710.1 (locus LO C_Os04g51710) derived from phytozome v7.0 (chr-ID Chr4; po s 30459438 to 30460461 reverse strand)
ctcctccgtgtctcgggctcgactcggtggtgaaggtatccatgccattccttttctctctcgcagccctctcctccctggtggtggagactggccggctggggcgtgggagtgtctgcgcttgggcttcgttgtgtcggtggagcgagattccggtgggatttgggggggcatctgtcgctgtaactcgtaaggggttgggggtttgacacggtttcgttttttttttaagaaatgttgtttccagtgatgttgtcgtgtctcaaaattattcagaaattttttatgtagatttcttggcgtagtcagttgtttcaggggaggcgcgtctccatgaaatctctgcatgttttacggggctttgcctgtagcctgaaatttggggggagtgggaaaaaaatgtttcaacaaaggcatttcatatcaagttgttttatgctactgaagtgatgatggaagatgtgataggcctaccaaggccggaaaattttccgcgtcatgcatttttcgttgcgagcaaggggcattgtgaggttttggtaactcaaacctgcatcgtgtctctgtttaggagttctcccttccccacgccacccgtctttgtttttggtaatgtttaacctgttacagaaatggaaatagtgaaggatcagtcagctgctaattactaccagtagctgttaggatgccgctgtgccataatgcaaagcataaaaagagatacatgatgtactaagaatgaaaataaagatctgtaattttttttaaaaaaaatccaaaccaaagaagccccttagtttaccttttcttttttttttactgtaattagccctctgtgatgtgtggaagggctgttcatctaaaatctccttgatatttcataatcagtatgtgtgattcttacaattgtttttctttgtttctattagcatactatttgttccaagaggcacacataatataccgatatgcatataatgttcattcgcttttctatttgatgtctttgtcaggtcaggtgctg

SEQ ID NO: 10350 - DNA, 899 bp, Oryza sativa
  Intron number 1 from transcript LOC_Os07g42420.1 (locus LO C_Os07g42420) derived from phytozome v7.0 (chr-ID Chr7; po s 25396217 to 25397115 reverse strand)
cggcggcgcgcggcggcgcggcgcggcgcgctctggtgagacaacgcacgcacgcgcgccgcccccccccccccctcatttgcctctgcatttgtgtcctgtttgattccgttggatcatcgcggcgaccgtacgtgcgaatcgcggcgcaattcgcgagcctcggttgtatcgccctggggggtaaagacgtgatttttatcccctccgggttttggcgtcacattgtgcgtgtgcatgtgcaaagaagtggagatgtggggaattattctctggcttatgccaaaggatcttggtctagttgcgagtgatagtttttttttttttttttttttaatatccgtttggggttttggttatctcgtcgccaggttcccttctgcttcatgggatgcatacatttctgctgaattagtctgttcctcatcgctttcgtttagcttagttgtccttggattgtttttactccatctcttgatagcacagaggtttgaccggatgattgagacagaattagcttggattagtatggagtacaaggtgacttgtttaagttaatggtgtgaaagactccaaataggttgaaaaaaaaatatttgagtaggaaacacagctttaaacttgaattgccaatgttgcattccggtttaaattttaatgcatgtttcttgaatcaccaaaaggcattaaactttgtagttttttgaacgaattgttttatatagtgatgggctgatgggcaattgcaagttggtgcttgagaaaacgtctagctaatgtgcatgtttgtggagactgtcactgcttgtttgtttcgtctgctgctggtttatgatatgtgctgactcaagcagacaatgagacaagggtctaaaggaaattcattgccatttgcagga

SEQ ID NO: 10351 - DNA, 939 bp, Oryza sativa
  Intron number 2 from transcript LOC_Os07g34730.1 (locus LO C_Os07g34730) derived from phytozome v7.0 (chr-ID Chr7; po s 20810241 to 20811179 reverse strand)
cggtgctcactgaagcggcgggcgccatcgtcgatgtgagtggcttacccgggtcttaaaatcgccccccccccccccccccgtttcgtgcgttctcaggttattagatggtgatgttctatgagatggcaagagcagataggacgtttataggctttgatctgtgaggtttagcgaaaggagtagagcaatccttttgtggaaacaaggctaggcttgcttcgctcaaatttttgaatttgtacggttttcatatgattactctcatactctgttcttgcgtcaaaatctccgaaaatatgtacaatttcgtcaatattgcatatagttagatttaccttaaatttcctattttatggcctcccttgaggacaatttctggattgtttcgcgctttgaacactctcgtttattactgaggaaaagagtattttgcttgtggtcagtaatcaattttgtataagaatcaaaatataattaatgttgtaatgttaattaaccctaagttcgatgttctttacaaagttgtcatctaagccctgggtatatatcggtggaacaagaaaaggatgtctgtctttgacactattttcaaaacttcaagttaaaggagcagtaaatctcccttagttaaggtttaaaacaggaacatgataacattttctttataatgttgttcgtattagacaagtatatgggtacttccatagcctgttagtgagagtatgccaagataatgacttgacatctcatgcatctttgtttcatatcattttactactgtgcatacgtaacttcagttgtgatgcggtgtgggataaatagcagtcgttcttatggcaattcttcttgttgtgatcgatgttgtctagctttctcattgcttgtgtttacactgatacaggattcattcacacgttgctttaagtcaaattctcc

SEQ ID NO: 10352 - DNA, 450 bp, Oryza sativa
  Intron number 2 from transcript LOC_Os04g34130.1 (locus LO C_Os04g34130) derived from phytozome v7.0 (chr-ID Chr4; po s 20516557 to 20517006 reverse strand)
agtatttgtgatagtaaagcacagagaaagctttggtatgtagtaactctcaaattatacacatatatgaacattaacaggtttgaatttggggaaaaaaacagaaaaaaacatacaaacaattacatattgatatgatgtactagtacagatatgcaactttccgttttgttgggtgtgtacccgcaaaagagcgtgttacaaaaagagggcgtgtgggggggaataccacgaggaagaaagaaaaaagggggggggggggggggatcctcgaacaaaaggaacggtgtcccctcaaggtgcacctcattggagtgagatctgagtgggcggcagcggaggtggtttttttcgcgagttcattttcccgagctggaaaaatacagccaggatctggtgtcttattttcccgcaggtgagagggggggggttttttttttttttttggcc

SEQ ID NO: 10353 - DNA, 947 bp, Oryza sativa
  Intron number 2 from transcript LOC_Os07g48320.1 (locus LO C_Os07g48320) derived from phytozome v7.0 (chr-ID Chr7; po s 28877223 to 28878169)
aggtagacacaataatatactccctccgtttcaaaatgtttgtcaccgttgactttttagctcatgtttaaccattcatcttattaaaaaaaaattgtgaaatatgtaaaactatatgtgtacatgaaaatatatttaagaatgaatcaaatgatattaaaagaataaataattacttaaatttttttaataaaatgaatgaccaaacacgtgctaaaaaatcaacggtgtctaacattttgaaacggataaagtataaaaacatcatcagaaaacataattgggcctaaattaatacatacccatattgggcctaacttagtagtactggatcgaacggcccaaaagaataaaaaaattaaggcccatgttccatatttggcaaacgggggtaagcgtcagtcaccaatcagccagcctaaaaggggacagacatttccatggtgtgtgtacgtcgcactgtacgagatcgatcgtgccagtttctcgtcctcatggccacgacacatttcgtgcaagatcatgataatggaataagaaaacagggagctggataattagcatatattctcaactgcagacaactagtactagaagatatagctgattgctaatttgctttcgacggcacagtgcgtcaaaggatatttttttgtaagtacatcgaatttgtgtggactgcaatctggagtagctcgcagtttcgatgatttgcacgtacgtgtgccaatctcatcagctgtaggtagcctctcaccgtctgcatgcttaataaattttaaagttgattttaagagttaattttgttagtctattttcagtattgacttttaaaccaaatacataattttagtggtttcgtttattttgagcatgataacttgaacaatcaggatattacgttcaaaattaaatctattatatgcagaagcgcggagtaccgggga

SEQ ID NO: 10354 - DNA, 1029 bp, Oryza sativa
  Intron number 1 from transcript LOC_Os03g51190.1 (locus LO C_Os03g51190) derived from phytozome v7.0 (chr-ID Chr3; po s 29283019 to 29284047)
aaaaaatatatttgaaaactatcatatcaaaaagtgtatgttggaaacatgcgtgcgctgaatagcaatcctagtaatggagagtccacataatgtgtaaaaaatgtgcatgttccctgcaaacttaaggttcaactttacttatgcgaaattgcggataggaaaaaaaaactgtttctacggatcgcaagactatgcattatcctcgaaaaacaatttataccttgcattgtagcatttagaatttgttccaacatataacaactttatatttaaaatctcttcccaaccaattacaattttccaccatttatttattttttcatccacttcctctctcccatgtttacttacatatgtttttgataaccatgtccaatctcaaaacttcttatcttttaaaacggaggtagcaaggcacattcttctcatgatgttagatcgtctttcctcatgtaaacaagtaccatggacagtatcctaatgtacaagttgtatatttctcatgtaatttcaaaggtgttagttcttctggtatgtataatgaccattaaaatatctaacatgtaataagacatcgcgttgtaacttgtaagacgtgtatactcttgttacgatatgcgtgtttttattagataatggaattaaatccagcctattgtgagacacgtgtagtctgcttgtactcatgagttgtcatcttagatagatggggaccacaaaaattgggtcaaatggtatatacgcgcgcattacttttgaaatattgtttattgatgttagtattatcccaaaagtgcatttattttaaaatattgtcatgtcaactttattaatgttatcattctcacaaagtacactttattaatgccaatattctcacaaaagtgcacgagtttgtttgcagcattgagaaagatgaaggttagtcccattaacaaggtatttatagtttgaacaaaaaaaatattatgtgcatcatgtttgacagattaacacttaaaaacaattcaaaacaggctttaaaac

SEQ ID NO: 10355 - DNA, 986 bp, Oryza sativa
  Intron number 1 from transcript LOC_Os04g36630.1 (locus LO C_Os04g36630) derived from phytozome v7.0 (chr-ID Chr4; po s 21942850 to 21943835 reverse strand)
cggcggctctgtgcctaccgtcggcggggcggcaggtgagatgagggcctgattggcgctattcctgaatctatatcttcatctaatcaccactcgatttttccttaatttttaggtattggcatagttagatgagatgtacgttttgtgcgtgagatcgttgattctagacatgttttgatcatttgctttgttttgttgttgttgtgtaagtatggattcccaaattgcggaggttcgatcatataccctcctttagattgaaattaagaatttatatttatcgccattccataccagtcaataaccttaaaatgatcccccatgtcagtataagcacataagcttaaatcctcaattttttatctggacggggatttatgatcaattccccttctaatttggttgacaatagaacaatagtggtatatttattttttgtatgcttgagcccctctatgttcattgacaatacatttgattgtatgcgtgcgtgtgcccaacacccattagactcgcacacgcgtgcacattctgcttatcaaatctagaagaagaactaggtatgtaattttaccatgctattttctaattggtcaagtacaccgcgggctggcaaggggcctgagtccccgtgagagcattgataagcagtttaaggcaaagtgccataatcctagctcatccatttgtgttggctggaaacttgaattaaaatcccaacctatacatgcgtatagattagaagcttcatctatcaagtgtttaaaacctgcagttgatcaatcaaattcttaattcgattaatgttagtttgttggcccaccgccctgtacaaatcctccatctgtaaataatttgcttctcttgtccttgtaatcttcctctcttaatgtttagcttggcttgtagggcgtcggagctgcctctgttttgatgataaaagtgagaatgcctggaagtctcgagttggtgtgctttatgtg

SEQ ID NO: 10356 - DNA, 578 bp, Oryza sativa
  Intron number 2 from transcript LOC_Os03g06120.2 (locus LO C_Os03g06120) derived from phytozome v7.0 (chr-ID Chr3; po s 3069051 to 3069628)
cgctcatcaccctcgtcgacaacgcccgcgtcagggtcggtaaaaccatatccctttcagcttctctcatcagtgttcatttgtttaatcgtgtagttgagtgttagactagtagcctgggcatgtaggcttttaagaaatgttggttgcatcattctttgattctaaagtatggtatatggaatgtttgcttttgaaattggatggaaaatgatttgtcttggattcttggtggttttcctgtatggtctcatgggttctttgttttctgttggttggtgtgacccaaaggattctattttagaatctatcttctgaatataaccgacgctgcaaccttttggtgctccatcattttcatcgtctatataatctgatttttttgttggtgtgaatgtgacccaaaggattgtgaaggtatatgtatatgctaggaaactgattttttttttagctccagcacagtgagctcaatcactaatcatgccacttgggactagtgatctgcatcggatatcatgtttatttactcctatacttgtcatctttgcttcacaatccttttttttcaggagcgg

SEQ ID NO: 10357 - DNA, 1007 bp, Oryza sativa
  Intron number 1 from transcript LOC_Os08g07720.1 (locus LO C_Os08g07720) derived from phytozome v7.0 (chr-ID Chr8; po s 4315815 to 4316821 reverse strand)
tgctcaagttggtcgcgcccaagctcccggccgtggtaagctatcgtcactctcccacttcctagctcctttcatttcacatcttaaaaataaaattcttcgatttcaccaatgtttaaccgtaaattgtccaaaattaagaagatttgcatcacttgcattttttgtttattttaactgaaaattttgttatttcatatgtttttttatgtttgaatgcttttacatttagaataatttgttattcaaccttttattgaagaaatataaaattgtgtctaaatagaaaatgtgaacaatcgtatgagttgttagatcattaagcaagatatacgaaaagtgacttcaatttttaaagatataagaattccctatttccgtgatatcgtaattttatctatagatgtttccacacggctatttttcaaaatgtagaaattcaccaggattttcatagaatacataaatttttgggactaaagcaaagttgcaacaacaaaaaaaaaaagagtaggagatgtgcagatatatggtcaacaccaagtcaacaattccacaatgttacactgaggcagggtcatcttccaaaagagaggtcccgaggcagcgagatttgcaaaatggttgtaatgtatttgaattctgaataaaattcaaccaaataaaaaaaacagcccaaaaaatctttctggtagttcaaataaataaacaaaaatcgaagcttccatcatgcatgaagcatgtactgtagtgtagtgtagcctcttcgaagtgtgtatgtgtcgtcaacctttgcttggtacgccatccaaccatggtttccttctccccccaatgttaagcgcatgcggagctcgccgcggtggcgtggcggagcaagcaatggcatgcacgcgtcatgatctctctctcgctcgccgtgaatgcaaatttactgacgagatcaccaccacccgccatggatgcttgcaggcgagcggggatcagcaggacttcagccagcgatt

SEQ ID NO: 10358 - DNA, 1002 bp, Oryza sativa
  Intron number 2 from transcript LOC_Os02g57660.2 (locus LO C_Os02g57660) derived from phytozome v7.0 (chr-ID Chr2; po s 35306286 to 35307287 reverse strand)
atacccatcacccaaagcgagtgaatccaacccccgcttcttatggatccccctcactctactctacacgtttccatcgtttttcccctactcctaaatcagttgcacgttgacgcgtttttttttcctcgtttttgttcctctactatatattttttgtgtggacgatcgtttgctgcgtgtatatgtttagatttaggctgggttaggattagattcattccgagccgtaattcccttctgaatttcgaacaataccctcttctgttttgatttactagatacaatatctctccactcccaaggatttgtctcgaggggactaaccttcagtttttactgactacgcacgattggatcacacacctcctgtcctgctgcctactacttttttcctggttatcaactcactgcaagctccgaatgccactgtgatggatattggatgactcctccatttgctgtgcgtatgagcccaactgccgctcacgtcatttggggcccccaaatttgttgctaaagttttcatgcccgattgattacattcctacagcaaacaattgaggaaacgaccgtgggtggggtcttaccatctgctactactagttagtgctgctgttgattaccattgtccttactgttttgccttcacaaaacgatgtgacgatcaacagaatgatctggacaataatagtcatgatacgattacaggacgtgtactacaacgattttcatctccgattagttaggtttgtagtttcaaggaatataaatttcatctaatttttttgtacacctgatcttgactgtctctcattttctagttaaagctgcacaatcaatttctttgtgaagggtttctttctatgaatattgcaataggataagttgtaacgcagtttatcctcacttggatacgtttccacaggttacattactgatgtgtctcgtgaacttttctttacaggccgtgcttaggagtatcttcctcgcgactgtggg

SEQ ID NO: 10359 - DNA, 861 bp, Oryza sativa
  Intron number 5 from transcript LOC_Os08g01030.1 (locus LO C_Os08g01030) derived from phytozome v7.0 (chr-ID Chr8; po s 21354 to 22214 reverse strand)
aagagtaatctttagtgtcgttgtcacagcaataggtaagtccaaaatgtaccttatgtattttaatagcttgataaagaatatgctataataaactaattgtacatttattgttgatgccatcctagcaaactatgaattgattgcatcaacactttgacacatttatatacagccaaccttgtgagtcacaacaatttatagcatgaaagcaaataaaattttaatgttgaacctaaattaagatgtatacttattgaaccaagattaagatgtacttattcaataaaattataatatttaacctacattaagatatacttaataatgatgaatatatcataacattttccagttttctaacaacacacagatgacatatttctggattgcattatatatataactaacattttagttctgaactccaacatattgactcttaattattcataagagtatgattgctaatattcagcataaaaaaatctgtagcttattggataagaaaaagaaaaaagagtaacatgtagctttatataaacaacagctcagattgaagtattgaacatctagaggcaactcaaaattagtagtttgtttagccgttaatacagaaaatgatatttcacaacttgttcagtacaacaattgatttctatttaaatagcttggattcaagtacacataattttacacagtgaaagaaatgacatataagtaaaatatatgcatacacaactaactgtatgcccttttcctgcatgtttgtttggttttaatggttgcacttatgaacaaaatgttcaattgttcatatcaacagttgctggtgtgagtttgcaaaacttccctgtgggt

SEQ ID NO: 10360 - DNA, 675 bp, Oryza sativa
  Intron number 1 from transcript LOC_Os08g38170.3 (locus LO C_Os08g38170) derived from phytozome v7.0 (chr-ID Chr8; po s 24184430 to 24185104)
cttgcataggtgcagctggatcaccaagaacagtggtaagaaatggttattactactacttgctatatgtttttctttcttctgtgctaattttcatgcagtcatgcagatatgttttttggttttgtatttcatttggtggacagattctgatgaacaatcatctcagcctacttaacaacagtaggcagttaaaaagaatatgtacttgtcacctaaggcaagcatcagtttattgttaggaaaagtgaaggatgtcggataagtgaacatgcaagataaaaaaaacaaattagttaattagtgttggaccaacttatgagtgcaattagtaattaagtatgattcttcttttaaaaaaaagtaggtaacattaccctcagcagaacacaagtttgggactttggatatagcaaaagtcgacatcgacatcactggctgatgaagctctgattttgactaagtttcagtcatcacttgatgatgccttcacgaaaaatattcagttgacaatttcatcagaaagggacttctctccatattcttgtagtagcttttctttttggcacctgcttgcagtttgttgagcaaacataaatccaaaaggggagaaaagaagtacaagagctgaaaactgatcactaactgaaagtctgaaacccgtcaattgtgcag

SEQ ID NO: 10361 - DNA, 705 bp, Oryza sativa
  Intron number 3 from transcript LOC_Os04g11530.1 (locus LO C_Os04g11530) derived from phytozome v7.0 (chr-ID Chr4; po s 6310747 to 6311451)
tacaaggtagcttttgattgtattctatattaactctatactaattcgtctatgtccactagtagtactctaatgagacaatttatcatgaaagcttcaactgttgaatgcaacggtgctaggaaattaaaaacaaaatgacaaaactatttttgcaaatgtcccccttgtattgctcaagtggtccataagttaaatcatatgtgcaatacgccagtagggtgtagttcacagaccgcctctgtacagacaagctcgatggtaaaatgacattcaaactaggacctacctttttacaaattataaaattgtttattttagtatgttgtaacaaagcaaaagattaatttcatagtcactacaatacagggtgccccattcgttgaaccaacatagttcattggttagcgatgagagcttgccatctttaactgttggttacgaatttagttataaagtcacttataacagttgaactgtggcatatgagtgtatcaccaccaactgatattactctgattttatgaatcattactgatgagggtgatcaatgaaaatatactgcaaaacatgtgcacatgtagggttttctcaccatcattgccatgttggctgctcatctggaacaatattgttggaagagagcttgaggctgttcccccaagtgagtgaatatgatcatgttttttcctgtttcgcagttct

SEQ ID NO: 10362 - DNA, 1021 bp, Oryza sativa
  Intron number 2 from transcript LOC_Os03g55150.5 (locus LO C_Os03g55150) derived from phytozome v7.0 (chr-ID Chr3; po s 31381586 to 31382606)
caaggtctggatccccgtttctgtccccctctttttcgcttagatttgttttgagttaggagttgtcctctgtgttcttgtctgctctgtaaactcgaaaggttggcgctgattactgcgggattcggctggtttgttagttccaataataatctattagtagccatttgtaaatttttataccttatatgttcatacgtttagatttatctgtgtagtctgaattgtgcttatgcaattttctggatagtgtcgcaactgtgggtttaattccccttttgcactttctttttttttttgcgtcagcagtgaccagccatttttgttatacagcgctaactagtcaactttttgttgttgaatctattttgttttgtttcgttcatcatggaaatgatgattttgcaattgtggtgtttgtaatgcatggtatttgctgatttggggttgtgctcactatttctcttgccgggtgtattttcatccatatatagtcactgtcattgttgtagtgtggatatgattatgttatctcaaaggcaaaagtactgtttctgcgggtgacttgactattgatgatttcagccaaaaggttgaaatgaaatttgcacgccctttttagctttttgttagtgcaacgctttgcctgttaccaaactaatacctcatttcatcactgcgattcaggccttaatttaaaatactcattttgtcaatgcgacgtgtgctttaatttaaaatgccttaatgtggttatcatattttgtgctatcttcttgcaattattggttggtgaacgactcctgttttcttttctttgatgaatgttatagtggagtgggaaccatgctagtcttcttgttgatacgaaggtttgatgaccacataatgcatttatacaagtatcttatcttctccttccttttgtaggttgttgaggtctccactttttatacaagtatcttatcttctccttccttttgtaggttgttgaggtctccacctccaagactgggaagca

SEQ ID NO: 10363 - DNA, 857 bp, Oryza sativa
  Intron number 1 from transcript LOC_Os06g50100.1 (locus LO C_Os06g50100) derived from phytozome v7.0 (chr-ID Chr6; po s 30347394 to 30348250 reverse strand)
tcgccgtcaagcgcctcaaccagcgcagcctgcaggtcagtacagtatcagttagctgtactcccatctctcctccctctgatttgcatttgctcctctcgaaaattcgccatggtgcatttgattttggctagatttgtcaaaacgtaccgaatttgttcatcaggacgattgaatggcaaaagaagaacttgaagattttgtcttttcagcttgggcactgaccacatggctgcatgttttttcagagtttcaaaaaagaacttcgcttttactttctctagactacattcaagactcgtagcgtacaatcttcacagaagattcagaaagacggcatgcacttaaatatatatttttcggattcacacattttggtatgctaacactacagatttactactgctgaaaatgttcttcaaccagcaatagttaccaacaagcgatcctgatttggatttggatcgagacctaaaatcaaactcaggatattgttcttttgcaccgaaatcatatgaaattcttagcctcgtgacaattccaacaaatagataaacacatcccgtaggacaaggacacccacacatgtcaacttcaaccacagatcacacaccaaaccacgtgaacaatggtccggacagcatcccaagtcaacctactaaattccagaattcagaatcacgttataaacaacgtaccaagcttaatcacgccaaaacttgatgccagattgccagtgcataggacaaaatccatgcaattttcaattgttaaatcaaagattgcatttttttttaaatatcaacagattgaaagttatgtttttctttttttttctgatttcaggggcacaagca

SEQ ID NO: 10364 - DNA, 654 bp, Oryza sativa
  Intron number 1 from transcript LOC_Os04g58550.1 (locus LO C_Os04g58550) derived from phytozome v7.0 (chr-ID Chr4; po s 34627243 to 34627896 reverse strand)
ccgtccgccctcaagctcaaggcccgcgccaagtggtagattcgatccccctgcctccctgatcttttttctcttctggatttagttcaagcatctgttagagtcgggctccgcttaacccccactgtttcagttcgagggtttagggaaatggatcgaaatttatcgttatctaagtttaggttcagttactgctagaattgctgatcacgaaatctggtggtaggttttttgtgctttgcactgaccagaggagactcataaattcctgtgtgttaatcttgtagctatgattcttgttagaaacttaactcattgttattgcctctaggtttacaggtttggttcattggaagtgaaatctcctggtagctcgatgatctcacaaatagtagcattcctcagtcagatgctgcaattcaacttacttttgcattatgttgtttgatttattgtttcctgacttcctttggtggttttgaatttacccttttgaatttggcactggagtctgaattaagatatctactgtttgcagctaacttttattaacatcatactgtttgtcttttgcgctgtctatctctgtcaattttaaagacttaatctagtttacaagtatcctaattttcatatggtgtcaatatccaagga

SEQ ID NO: 10365 - DNA, 599 bp, Oryza sativa
  Intron number 2 from transcript LOC_Os05g34670.1 (locus LO C_Os05g34670) derived from phytozome v7.0 (chr-ID Chr5; po s 20509331 to 20509929 reverse strand)
agttcttccgttttgtaacaggcttttaaaccaaggtttatttcctctgcccttttggattttttctgtgtatttatctattcctatttgtttgtatagtctgaatgtgagtgcctatcagggaagtgcatccaaccatttgctacttttatctattcttctaagctgctactctgttgatcttggataatctgttccttgtcaataagaaatgccatcgatgttcatcacattcacaccaaaatgatattatttatgtaaacataggaatgcacacaagtgatatcattttaaaaagcacagaagatacccattgagatgaaaactaaatactattaaattatttagtcgtatcattcagctgggatgcttcagattcagttctgcatttcaatataagataacacagaatttgagttagtcaatttctacattctagctcctttcgctattgtttctggtgttacacacactgaaaaaaaatatttcctggatattttctccttatttgatgtggcataatcaaactaacaaatcttatattggctccttttgtcaatgcagagattttgagggcatcttctttgccacctaaccca

SEQ ID NO: 10366 - DNA, 617 bp, Oryza sativa
  Intron number 2 from transcript LOC_Os07g01740.2 (locus LO C_Os07g01740) derived from phytozome v7.0 (chr-ID Chr7; po s 437520 to 438136)
tccaataccacgaggctccagggctcctctctcaggtggttttcttgctcaatctgtcaaaaaccacaaatttctataaactataatttacaaaggttttctttcaacataaattattgattttgccgaatcctattctgttaacctttgatctgattgtaaccccaaacaaaaagactagtgattcttatccgggattctaggatgactatttcttctcaccaattccatcagttggatccctgagttcagtaaattatatcaactgttctgtgaagttcttcttcttcttcttttttttgtttccattagataacaaaacagtgatgcttcagaatttagagtatttaccatctttctcatcaatggacgatgccacttgacatgtattaacgagtattgtcatggcatatgtaccctactatttttctactcggtgctatgtagcaaagagtttgcagtttaccgctttacaaacagaaaaggttaaaacaataagatcttgtagtatttatcacccattagcctacatattaattacctatctatgtgtacatgcaaatttgctactaactcttgcagggtgctgtcagggggacttgaactcaaattattat

SEQ ID NO: 10367 - DNA, 351 bp, Oryza sativa
  Intron number 8 from transcript LOC_Os07g08300.2 (locus LO C_Os07g08300) derived from phytozome v7.0 (chr-ID Chr7; po s 4248171 to 4248521)
tggctcccggtatgtgcaacctttctatgttattttgctaaatattcgatgtgatgcacacttatgtatgtttttgcaaatatataaaatagtattactttttctacttgaaaatccataagaagatatatagaattacaatggaaaacaaatgtttgaatatttaagcacgaattttgcaattaacaggagctgttgggtgattaagcaatgaaatgtcacatgtggagtggttgtttgagtatggcatatttttaacttgtatgctttcatcgaagattggaagcataaacaatatatggattagttattaaaagaaattgcatgacataatatttcaggagacactgc

SEQ ID NO: 10368 - DNA, 644 bp, Oryza sativa
  Intron number 1 from transcript LOC_Os03g52500.1 (locus LO C_Os03g52500) derived from phytozome v7.0 (chr-ID Chr3; po s 30118021 to 30118664 reverse strand)
caagtagtcaggtatgacatctgaactttacagtacaaagaagatttgaagataaatctgcacccacacacgttgagtacctcagaatgacagttaaaagaatagcacaatgatatgttatgattacctcaagcattatggggcaattgtctgtcctcgcagttagtgatagagcatgaagcttgtttgctagaaatcagcagcataatcaaaatataagaggggcatcagataagtagaaaatgatcatcataatcataaatagataaggcaccgaagtccttgttgatttgcattgcttggcaaggacaaaaagaaccatagaatttataagtttatttagacagaggcatgaaccatttggctacttaaacactgaccaacttaattaactcacccaagccaacaatatcatctaaattatatatatatatatatatatatatatatatatatatatataaaagaactaacctcacccattataaatcatatggcaaggagctacctcattcaaagaaacgtatccatggcagggaaagagcagggccacacaggcaaacacctctagctgcaactaggagggcagtttggcggtgacggcaccagagcagaggacaacaacgaaggtggaatagagggcg

SEQ ID NO: 10369 - DNA, 771 bp, Oryza sativa
  Intron number 3 from transcript LOC_Os03g22420.1 (locus LO C_Os03g22420) derived from phytozome v7.0 (chr-ID Chr3; po s 12844691 to 12845461 reverse strand)
ctaaggtctggctgcgcggtttgttcttgatgttgtttgggtcaataaaaccgtgaactcgatttgctcattgttaatatattttttattttttatgcttagatgataaattagactcatgaacacttttgttacttgtcaacaacatcatttctactcatcagcttactgcatactacattttcgtaaaacttcttagttcagaatagtcctgctcctccaatctttaataagaaattgtactatgtttttggagcttatcagcgaacagtttaatttcatatataaatacaatttattctataacataatgttcacaaacaactaaaattcgtatattatgccattaagaacctggtagtgttctccaggaatgcctaaattaaagacacattgttaaatatgcttgtatccactaagttactaactgttaaatatgttatgaatccactaagtgttaaatgtgttatgtatcttgcagtcataaatccttttcctctaactaaaccttcactgctatttcagttgggccatcaataggtattgcaatgtgcaggaattgtattactacacaacgaattacataacaattctatcgcaagcatgtataattatgaaacagcgctattgttatttttgctattgcatatattttgccaacattagttagtagctacgtaatacttctagcaaattcataatacactctctgctcttcatttgatttactgcatttctttcttaatgtgcagaatccttccattcctatta

SEQ ID NO: 10370 - DNA, 906 bp, Oryza sativa
  Intron number 1 from transcript LOC_Os04g43040.2 (locus LO C_Os04g43040) derived from phytozome v7.0 (chr-ID Chr4; po s 25285181 to 25286086 reverse strand)
gattcactgtcctccgttctccgcccggtacggctcccgctctccgctcatccacccccgacctctttcttggtttgttgtgattcgtgttttttttcttggatttcctttgctctgcgatgtagttttaactccagatgaagcgatagttattacaggagtagcatgcagttaactatcgggaggggaaaagaaacgagttcgtgatctttgaattctagccaactgcatgtcacttagaatcagctcctaatcctgttctggagaagaatgcttgttcagattattttgctcgtattgcaccaacaaccaccgagtgaagtgccctgaaacttgtgtggatgctgatttttacctttatgttaagaacccacttcttccaactcaatagcaaacatccaccatacaagcaacaagtgttttggggtgaaaagagaagaagaaactagggattacaagttctagaagcttctagaactgagagagagaaggttggaggtaggaggagaggtaggggaaagagatcgacaagggtgcccaccggccgcccaagtcgccgccgccgccgggagcttcagctccgccaatccaattgatcaatcgatgtgtgctgcaggagcagcagccttcactttctttactgttgcttgggctggcttgggcttgctttggagaatggatgacatggcccattagagctcctaacactttagctcgataattttcagtaactgaactcttttggctgccttgttcatgtactgattaggaaagagtgaggtcctttattgctgtttagtctttgtctgatttactgaacagtagcagagttcacagattagcatgaacaatggttttgttttgtctctaggggtggcttgatctggcaagtgcccgtcactcgat

SEQ ID NO: 10371 - DNA, 881 bp, Oryza sativa
  Intron number 2 from transcript LOC_Os07g47090.1 (locus LO C_Os07g47090) derived from phytozome v7.0 (chr-ID Chr7; po s 28146612 to 28147492 reverse strand)
gctaaccaacacgctttcaggttagcttcgatcaagttccacttattaccgcagaattttacatgctgagtccagttgcaatgaaattaattcatgaaccatcctcaatagttaatagcatgcttcagtgtgatttcagctgctcttgccatagaggaattgtttcggcaaaagctactttgtttcttcagttgtcatgaatttccatggttctaaagtttgtcatactccacctgaggtttagatgaaaatttctccatgaaccatggctccaaaatgccacatctttccaatctttttgaaaaaaaaaatctactaagtctatattttcatataacaagtacaggtgtacttatctacattgcctcttgcaggttttgaattatgtagtagctactagttttaaatagttgggactacctatacatttgtcgataaattttctactaaaaatttgacagatgtaattataatacaattatagtgtaattacactgtaacttgtatataattacactgtaacttgcatgtaactacagtgtaacttgtacttaagtttcacgtaattttgaatcgttagatctattacaagatttgttctggtgaggaagaaaaaaaatcacagcacacacatatgtgaaaggatttgttcccacgacctctattttactgaaataacatgttaccgagagattcttgaaagttacatataagttacattatagttacagtgtaattatatgtaagttacagtgtaattacactagattgtactgtaattacatctgacaaatttttggaggaaaaattatcaacaaatatatagcaaattcgtaaatagtttgttaagtacattccctttgattcgattgcagaactag

SEQ ID NO: 10372 - DNA, 1044 bp, Oryza sativa
  Intron number 1 from transcript LOC_Os07g47090.1 (locus LO C_Os07g47090) derived from phytozome v7.0 (chr-ID Chr7; po s 28147563 to 28148606 reverse strand)
agagagagagagagggccgcggccacacgacacaggtgcggtggtttccgtctccgtttctctccgaatcgattactcctctcttcgattcgatccttcgtgttcttggttgctgctgggtatgcttgttcttcatcgtggggtgcgacatggcgatgcgttttcttcttcttcttttttttgttgcgtttgaggaatttcagctttctctgtctccgtttcgatctcgtgtttgcgagagattttcgtcttttttttcctttcccccgcggcttccctttttgcgagatacttacttactacaactctgttcttgataatacggagtaactctgtttctttcttttattactcaagtttttttagttcatgtttgtctcagtgtttaatttgattgacggcaaaggtgttaaaattaaattaaaaacacgctccttctcgtcagtaaatgatgtgctcatgatgttttcattttttttttgactgatttggcgatttcaatctatgctcctaagaaattgaaaagttccgtttttcatattagagatctctggttcagatgcctttttttaataaaaaaaacaagattttctactgtgcacaacatgaatccccgtgcttccgatttccttgcgctgtaatggttaagttttgtgcttgtagttccatgttattcaagaatcaagagaaagtctcagtcagctatcagtccacttcaagtcatcctgtttctcctatatggttgcatttcataaaaattgtctaaactttttttttccttttctaaatcacatatccagagagaattattataaatcagtgtatggtttgtctccgtggtgaaatatctatgtaaaagtaacgcttgatattaagataacctttgtactctccttaggtcttattagctcctaacttgtttatctttgtcatggtcttataaagctagtttttcttttcatatgttgtattatcactaatttttattttgtttcagtgattgctgcaggtattataattaggtaagtgaggaccgaggagaca

SEQ ID NO: 10373 - DNA, 1044 bp, Oryza sativa
  Intron number 1 from transcript LOC_Os03g24184.1 (locus LO C_Os03g24184) derived from phytozome v7.0 (chr-ID Chr3; po s 13745565 to 13746608 reverse strand)
gccgccgccgccgccacatccacctgcgcccactggttcgtgcggcgcgatccccccccccccccgcgccccacctccctctctcggctcggtttgtttgtttgtttgtttgtttgttgcttttccctgtcatgtggcgtgtgcgtatcggtggagggggggaggtgaggctgctgctctgattcgttgtttgatctcgtgtgggagtggatctgagctgaggatgaggatccgatcgattcgatgagcgtttgcgctatcggaatagaatagaggcttctccatcgttgcaatgtaatggatcgaagttcatcagacaattatagtatcgtgttcctaaaaaaaattgaggaataatctattcattggtctacgaaacaaagtacataggctgtaattacgagtgagtgtttttttttcataaagagcaaaatttattgttgctgggacttttatctggaattgttagcactcagcagaagcaactgcatacccttacaattgaactaaggtagcactgattccgttagaaaccaccaatttggtttgaggagaacggagctcattttatgcttggttaatgcgcttacgggaactggggatagtgcttgcactgggtttgcagaccattgtttcatcaaactaacccagtgctatttgcagaaaccaaatggataataatggatcatcgtttggcatatttagtaccagagcacttccgatgcatttcttcgtattaatgcgatatacagtttgcttgcttttacactttctgggtttgtttctaatctcataaaaaaatatgcatgatattagttggagtgctatgggatcagcagcttttagtttcagaatttttctacctgctacccttagtcaaggctagctcaacacaatttatgatatgtggtgcggtgctgatttcatgagcatcatgcccattcttcatttgccatgttggatggtagatacaaattttagttttgtttacgtgttctttctttttcagccagcgagaaattccatcgtcaaacattgacttac

SEQ ID NO: 10374 - DNA, 765 bp, Oryza sativa
  Intron number 2 from transcript LOC_Os05g11130.1 (locus LO C_Os05g11130) derived from phytozome v7.0 (chr-ID Chr5; po s 6268498 to 6269262)
gcgcggccgtgcgcgtccaggacgaggccaagttggtacgtacgtggcatgacacgcgctgctacctacctagctatagctaagctaggctaacccaagagaatatgaggagtagcttgcattggagtggatcgtttgtccgtttataagtgtcttttttcttcaactaatagtgaaattcataggaatttcttcctagagaaacttcaacccctatagaaatggggatcagagcctagttatcatgtttatggtttacctagttcattattagtaatatctacggaagtactagatatcccagtatatataggattctacaacatatggaccgagctcctaacttgatgaaaaagtcttagcctagctagaaatatatccctttatgcaaaaaaaatatctcgataatattgcgtacaataatgcaaactatattaattttcttataaaatttctagtgtgtaagatgattgtatgtgggaaatatgtattctctatattatcttttttttgtttttatatatagtaataaattttattgtctacgtacgtggcacatcttattgacttcgattcaaaaagtcaaaaaataatgccatgcttatactgtacacttaattggcatttttccgtcgaatgtggaattatagaactccttgttctttaatttatttgttctgatgttgactggctaacttaatcattttttttttgttccatcgcttcatagattgtttttgaaatcttagtgagggcactgatagg

SEQ ID NO: 10375 - DNA, 833 bp, Oryza sativa
  Intron number 1 from transcript LOC_Os04g55260.1 (locus LO C_Os04g55260) derived from phytozome v7.0 (chr-ID Chr4; po s 32673992 to 32674824 reverse strand)
ggtcacctccgcggaggtcacgcaggtgacaagatttcttcgggttttccttttatcttttgtgattatttgttttctgggttcttagatcttggccggggatgcatgcttggttgacagcagattaattttattatttaatcaggaatcttggaacattcctcttcgctgatttgtttaatctgttcatgcattctttccagtaattaaaaattgtccaggcaacgttagaatctgacttgagttatagattcttcaattcttttgtcttacgagctttgatgtcttttgcaaccagttacttttttccatatgtcaaattgtgtgctcatggaatttctctagagaattgatgtacatgctccattgattattctcctgtctttcctcgtgtggctggtgtcaaaccctaatttgcttgaggtggttgtgacaattcgcatcatcaatacctggttaattggaggtggttatgacatccttgctcacctgtaatgcgtgattaaatattatatgggaaagtattattctagtttttttgcaaatcaagatgtttttcccttttattatcgaaaaagatgttccccctacccgtgttcaatttttaaaattctattctgaagaaaacaagatattggtttggtacttgcatttaactctcaagaacatgtcagttatagtagcccaccgttaagacgtatgatttatgtcttaaaacataatatgtttttgtttcttatagttttgataaatttgatgttatgcgatgaatataattttatttcattatgtgtgcaggggatattcactaaatacaagcaaccctttgcaat

SEQ ID NO: 10376 - DNA, 789 bp, Oryza sativa
  Intron number 2 from transcript LOC_Os04g40650.1 (locus LO C_Os04g40650) derived from phytozome v7.0 (chr-ID Chr4; po s 23946918 to 23947706 reverse strand)
gttcctacggttcccggataggggtatgcgtctcttccccctctccttcccttttacttcgtattatcctttttcaaagaatcgcgggagggcggcgtctgatgaaaaggcgtgggaattgatgggactttgttctggcgatctgcattgcctaaatgattggaggtttggagctagggagagagagtgtatacgtgttgttggggaggcgtctaaagttgaactaatattttcttcagttgtttggtattgggaatactgaaaaagtgttcgctatactctgctgttttatgtagctagatggagttcatctttgaatatgcaagtatgttaggttcaaatttgtacctcgttttaaaaacagttacaacgaggcccctgattgctgtaatcgatgtgggttattgttcatcaaaacctgttagggttttcgatgggttcatcagttggattgccgtgttacttaaacagttactaacacaccagttcactcaaaaatttcggtaccagcatagcattatctccatgtagtatggtattcttttactagtagaacatcggccgaatcctcacttgaccctgattgtggcaacctaggtctcaatagttatttattcctaatctagattccttgtaaaaaagagaattcttgtcttcattgttttttcatgattggctttaaatctgctctaggttctatttcaagttatctgtcaacaagacttttcctaatattgcaactgtttatgtccagataacggtttgctgtgaagaaatacgatataaaga

SEQ ID NO: 10377 - DNA, 485 bp, Oryza sativa
  Intron number 2 from transcript LOC_Os08g38570.1 (locus LO C_Os08g38570) derived from phytozome v7.0 (chr-ID Chr8; po s 24382150 to 24382634)
tgctccaaagtaagtttatttatttgtttatttatttatttatttatttatttatttatttctttatttctgctgttatattgcttgtgttcatatctgtatattggagtaatttcagtccaaactttgtataatattgttcaaataacttttcttcatatctggatgttagagtaatttcagttcaaactttggataatatggctgaaataactcctttagacatcatgatgtcatattactgagctccattttttttgggaaaattttaaattgcgtttcagcactctgttactgtaattcggaaatggatgtgaggaagtagttcattgaatatttgtaggtgctaagctattggtattgtagattactttagattttagatcaaaggggaaaaatgttctgattctgacagatgagtttttggctgttattctttgtggtttctagtccgctccagggagagacactatctattatcagga

SEQ ID NO: 10378 - DNA, 650 bp, Oryza sativa
  Intron number 1 from transcript LOC_Os04g49310.1 (locus LO C_Os04g49310) derived from phytozome v7.0 (chr-ID Chr4; po s 29248287 to 29248936 reverse strand)
gtcaatcttgtgcggcaatacaaaccaaaggtatgttgtccttttacatgcaaagaaagtccaggatatctaatactttatttacattcaaagtcttaggaattactatatgtacagatgtgctttcagcttcctcattttgctggggcaactttttttttatatggaaaaaatccattctggctctctgtgtagattttccttgaaatttacatttctcatgcaatttgttccatattgtatatgctaataatagaagtcatatattgttgcatatggaatgggatagccgcctgatgttttttcatgtattactcccgctgtttgtttttataaggcctacagtttttttttttgggttgcaaaacataagaagcaaaattattgcatagcctctcactaaccatctcattagctgtttgcacagtatttaagtatgggtggcattgtcattttattttaacctcccttttctcttggttttgtgccctcctacatctttgtgctcacccaaaacgtgcctattttgaatcggagggagtactttactcatttacattattcgttaatcatgatgattgatttatttaccctttgtccaattcccctatgaaggtagtggaagacaactcatcccaagtatctcagtg

SEQ ID NO: 10379 - DNA, 893 bp, Oryza sativa
  Intron number 1 from transcript LOC_Os05g41120.1 (locus LO C_Os05g41120) derived from phytozome v7.0 (chr-ID Chr5; po s 24018854 to 24019746)
ctgctgctgttcgtctccgagacccgtaagtgtgtgtgcgcgaagcagccgccgccgcgcggatgttgtgtgctgttcgcgtactctcccatccgtggccgtaatggctcgatgtggtttggaattcgaggagttggttcttgccaacaagatcaaagtcggatttcgagttgtcgatggggatggggatttagagtaagatttgaattcaatgatgcggtgggcgtgttcctgctgctgctgcatgcttgaatgtttggaatatttccaggggcacctgaccgcgctcttggtaatttctagaagaaggtgcccttttaggtagacaggttttgcggtgtgtcagggtaacgaactaaagatgggcatgttgcgatgggcattgacgctaatggtgatgtatgctgcgcgcgatttttcttttctttttctttttccttttcgggtgtgagattcctgaaaagttcaggaatgcttttggctgagttcctgcgtctctgaggaagataaattagtttatttttttctgctattacttggatttatgtgctgctatcactgttggttcgtgaagggtaagtttttgtgttgttggctctgcatgttggatcatgcgtgcaaaattaggtcgtcacaaggattatgccgttttcaagttaccttttgagtaaagtctgttgttgcaaaggttctgttttatttggccagcatggccttacattactttggagtttggagaacaagaggttacaagttgtcgaatttttatgctctttttgtttggtgcaatttgttagtgtttatttttttaaaaaaattctggtagtgagaaggttctttcataaaatgtttttgcagggtcatatttttattcagcaacagagactaagcta

SEQ ID NO: 10380 - DNA, 879 bp, Oryza sativa
  Intron number 2 from transcript LOC_Os03g31750.1 (locus LO C_Os03g31750) derived from phytozome v7.0 (chr-ID Chr3; po s 18157383 to 18158261 reverse strand)
ttcggcaacgtcgtacgtattattacttatattctcttttttgtgttctacaaatatctatacatactggtttatttattgatttatttactagtattattccatgtttctgttgtatatatacatgttattttattttcatttctaaacagataagtatcaaagaaaatatttgtagaagttgagtactctgtttttagagggaaacaaatataaaaagagtacgcccagtatttgtgggccaaaactaggtgatagccggcccagcccatcctggcccattaatttattgccttgtccagttctcctcccttctccagttgttcttgttcccttctccttttgctcggaaaatttccttctcattttctcttcatgtccgatttttttcgcggcctctcgattgccacaactccggcgagcgagccggccgcctggcgcgacctccttggctgtgtcaccggaggggcaatgtgtcgctctggaggaggaggggcggtcggggcagcagcaccttgtccatgggggtggcatccccggacatggcgaaccgcgtgcgctgaaccggcgtacggcggcggcgcgacgcatttggggccacgcccgaggtccttctgttctttcttagccagatctttctactgctgtaattctacatttctattttgggggtttgatttaattttcatgttggaaaactatgaaaaactggcataaataaataatctagtttagtttagttttcgataatgaaacattctgtacaatttgtgagttacttcgtatgctcgctaatatgaatattgataaaatttgtttcgcaattttattttgtaccaaattcaatattttgatactaaaaggttatcttattaggtt

SEQ ID NO: 10381 - DNA, 563 bp, Oryza sativa
  Intron number 2 from transcript LOC_Os03g44830.1 (locus LO C_Os03g44830) derived from phytozome v7.0 (chr-ID Chr3; po s 25283011 to 25283573 reverse strand)
cttcttgccttctgtagtagcatcacgctttcaaggtctgtctcatgcttacctttccgtttcttttgcagagcataaatcaggattgcttttatgacactgaatatcaattttgttctgagagatgaatatatactttatgagcattcatattttgttagtgctcatatggtttaattgtactgtggcaagtctgaaaagtgtgaaagtcaaaatcacacccatggatttaatatgagaaaacaatctgttacatgacatgaattcattttccatttatatgctcttctgtaaatattaccttataaaatgttcgggagcacttaaaagaacaaaagaagactacaatagaattgcccctcttaaaaaaatatgaatactaaagaacctccagattgtgcatttctcaattcaaaatgtctgatgtgcatgttctatatctttagcttctttcttcccacctgtgaatactatctcatatttttgtttttctttgggatatctagaactaatatagtttgtatctacttcagtgtacaggttctatacatctgttgtatttc

SEQ ID NO: 10382 - DNA, 890 bp, Oryza sativa
  Intron number 3 from transcript LOC_Os08g33670.1 (locus LO C_Os08g33670) derived from phytozome v7.0 (chr-ID Chr8; po s 21023710 to 21024599 reverse strand)
aggcacgtacacataatcttctcgatattatctacgtatgattaattagcttcccttaatcctcatggctcatgcacgaagatgctgtgatacagttcaagttttcaagattcactacttctaagttctaactgtactggtgatattcttctactattggtacgttggtgatcctaagcagtgagttggtcgtgtctgggctccattgatttatcagaatacttgtatatatataaaaaaaagcgtaaatacattaggaatttcaaagatgtcgacacaattggtttccaaaaataatgggtagaatagagtacatatatatcgtgtcgattttgtgcaactcttaatttgtactccctccgtattttaatgtatgacaccgttgactttttaatcaacgttttaccactcgtctcattcaaattttttatgcaaatataaaagtacttatgtcatacttaaagaacatttgatgataaatgaagtcacgataaaataaattataattacataattttttttaataagacgaaaggtcaaacgtttgttaaaaagtcaaagacgtcatacattgaaatacggaggtattaccttacaattcattctaatttatacctttcaactccatcgccaactttatctaattttccttgataacacatgtaaaaagaaataatcgatcgctagcaaacgctctttgtcatcagggctcaacgatgccgctggcttcgatcgccacttgttcgtagtcattgatttaggatggttgtatctcagcaatagaaagtgctcctacggggatcagacgttgatcgatgttcttgacgtgttttcattaatgtttcctcggtgcagagcgagtgggtgatctgcagggtgttcaagaagca

SEQ ID NO: 10383 - DNA, 1014 bp, Oryza sativa
  Intron number 1 from transcript LOC_Os08g33670.1 (locus LO C_Os08g33670) derived from phytozome v7.0 (chr-ID Chr8; po s 21025204 to 21026217 reverse strand)
ccgcgattcaattctctgaatcaatctcacgtacggtaagtctttcattttcctgccatgctcatgaacacaaattaaagaattaattaatgtttaactagatggccttattatctctacatcacacgttatatctatgatcttgcagtatatctacgctagcttagctttcatattcgatcgtttaattaattagtaattacacactcgatcgtccgatcatatgcatgaatgcttgcatattgtactttactgtcacctggtatgtaattcgctctgctttttcatggtgtagtgtttacgtacacgtgtatatgtcatactacctctatttcagaataaaacaacttgtgattatgtacatagacatactcttattcaaatacagagctaaaaattttatattttgaaacgggggtagtagtaggggaaattgttttcatcccttaagatatatccctttgttttttataccacttgaatagctaccaaaagaattgaaaaaaaaataggcatgatagatccataagaaatatgctattctacaaatatgcaaattcaaattcaatatatagaaataaaaacaaaaataacatatttattgcaaatggtgtgtactattcgcagtgaaatttgttattttcgcttctacttatatatgttgagtttgaatttgtatatttatgaaatggcatatttcatattgatctatcatatccattttttttctctttatttatgattttttagcaatatgcacaaaacgagaggatgtatcttcgtatggttcaaatcctctgccttaatgacaccactgcactgacatgcgggggtaataggatggtcagacccatatatcggtgactgtaatggtagtgatatcatggtagatgattctcacccagacacccatctctggtagagtatatatatattgcgtattttgtttgttggttaatcttgtctgccgggtgcatgtatacgtatacggcgggcgcagatagatcgatcgaa

SEQ ID NO: 10384 - DNA, 951 bp, Oryza sativa
  Intron number 1 from transcript LOC_Os04g42090.3 (locus LO C_Os04g42090) derived from phytozome v7.0 (chr-ID Chr4; po s 24730143 to 24731093)
aattgtaagtttcttcgctgaaaccctctccgtaggttggtacttctgatttttttttcctttacagattttgtggtttgtagggcgtattgctatgtgttgctattgtttatgatgggaattttggtttgttggtgtagataagcttatctatgtaaaacaaaaggtcagtaggttacctctttgatcttgcttgtgcagttaggctatcctgtttgagttgttcgtgatttgcagattactgcaaaagctatcctgtaaaatttcttgtcgtggtaaagattgtactaagaatttttgtgtgttcagatcctaagacatagaaaaatagttttttttcgtctccccataggaatataacaaatgttctttttctgtgacaccatgatcgaattttgttttttaatgcaaatgtatggtattatcattaacataggatgggatcagggacgaaacatatgtgaatataggaacatttgcatatgtccaacggaaaagtctcaactctaaatcttaatccaaatgacatcacgattgtaaatccgaccagatcttaaatctgaatccaagtgagactcaattgtaaatctaaatataagaaagaatactgatatatgattcattgtaaaggacgctgtggcttgtaggaattgagtattactggaaaattaggaattgaatcagattgtgagatattaattgacctgtcctgttgtggcatatttactcctagttagaacttggaatctatcatattgttatgtaactgtttactctttggtatcgttttgatagcttcttatctcagttttacttttttgcattaaagactcagatgcttcggtctggcacatatatcttctacaaacatatgcccttattttctctttgggccatatatatttgtctgaacctgatatttaccttgttatatacttgtgcagtaagtgg

SEQ ID NO: 10385 - DNA, 839 bp, Oryza sativa
  Intron number 2 from transcript LOC_Os04g42260.1 (locus LO C_Os04g42260) derived from phytozome v7.0 (chr-ID Chr4; po s 24817630 to 24818468)
actgcagtgttacattgttcggcagttcgtttttggtaaacatctatccatccttagaccatagtagaactgaaatttgggaccgcagagttttctccccctcgtttattcttgttcttgaatgctagattcgagaatctatgattatacttccttttaatcaattccctaaattagtcgttaccatatgttttgattatacttcctcgagtgaatttcttcattcttcagattgtctggtttattcttgcaagatgattgtaatcttgtctactttttgtatgatgcagttgtgtttgttttcacttccctctgttggaatgcactgataaaatttactattatgctgtgctaaatttctatgtattttttactgtatcatcatagttcaccttaggtctaactttcatgctagatcttgggttcaaaatgatggcatttgtgtatcttgaagattataaatgcaagatataaaaagaagaaaaaaaaatcctggaatgcatccgtgggacctgtgtctaccaaaaaattgctttgtatggactgctttagagtcatgagtcatctttgcttgctcgctcatcaacaatatgtgtccaaaatattggagttatgctttgagctttgcaaacagtggcataccgcgtatctattttttgtttctgcaaaatgcagttcaaattcaagctagttaacctttctattcattctgccccaataattcctattcgtattttcaccgttacttctagtatttaggtgatctgtaacctgatcttagtatggaatttaaggatattttattcctattattatgtttcagcgaagcagactccgct

SEQ ID NO: 10386 - DNA, 931 bp, Oryza sativa
  Intron number 1 from transcript LOC_Os08g17760.1 (locus LO C_Os08g17760) derived from phytozome v7.0 (chr-ID Chr8; po s 10877418 to 10878348 reverse strand)
ctgcactgcccaggtacatttgattttctagcttgtttggatgatttgtgctggtctccgtgcactacagatccgatatttcgtttgtgtgattcttttttcttgtcggattcttgtgttgtgtaatccgtggattcttgtggggattcttgagaaaatattggtgtttgttatatgtgttttctatgggagttgtttacaagatgaactttttgttcactcatcatctctttgatatatcttgcttatagtaaatgttttgatcctgggcgggtataaagaggcagtgagtaaactcatctttggccacttcctaataaaatcgaccaacctgtttgatgttcttgctgtgttgattctgcgtatggttttgttcaaaataactacttgaaacactgatcttatagcctttttccatggatgcatgttcttccttgtttcaactgaaattcaaattagtaggttgcgcgcgcttgctttgcgccaaattaaatattcttttaagaaaacttgttctatgaaggattttttatactgtagtgcaattgcaattatacttcactcatctctcagttatatatagacactccaattgtctaattgagatctctccccctccccttcttaaaaaaatccctcttttgggatgcatgtctccctaacttttgtgttacaaacttgcagtcataaaaaattctaaaaacatgtaacagtgtatataatatattgttattgttatatataataatgtatgattttacttaaagtcatttagatcttatataataagtagtaacatcaaactgcttacataaatactcggtaatttaaaaccgtaaaactgacttcttccacataagacaaaacaaaacaaaactcttaactgcatttactccttatcttttctagtggtgtcaacgcacaccactgc

SEQ ID NO: 10387 - DNA, 841 bp, Oryza sativa
  Intron number 1 from transcript LOC_Os05g19970.1 (locus LO C_Os05g19970) derived from phytozome v7.0 (chr-ID Chr5; po s 11660827 to 11661667)
gcaagaccgagtgctcctccgtattcgtcaccaaggttcgtatcgtcgctagggtttcctccgccccggccaggttgtttgatctgtgccgtcgggagcgtcggtggatcttgggtcgtcggctggttagggtttcgatgggcttgaaatatggggctcttgctcgtgaaattgtatggttttatggtggtgaaaatttgttcgatttcacgaactaatgttgttggctaattatgtgaacttagcttattgtatgaattggttcctagggagttgggatttcagctaaaaacctaatgctactgagaagaagacaatgagtttaatcagcacaaatttatttaatcagaaatttgttttgtcaagcgattaggggtcggcaatttgagttcaggtgttaataatgggatgccatggttcctgtacttccttttttgatacatggcattgcaagctactattattcttacacttagtgtgaccgattatgatatttaggcttatgactgagctagaaatttttttatcgagctttattaatgtgagtttgttaggcttccctatctgagttatcagcattttttctgttgtgttttattagtgcaaagacaagcagaaaaaaaatgtgcaagtgttcctttaatgttttatgttttcactatgaatttcctttgctatttaatcgatggctgattgtgtaactcattggttactttctctgtttttttttataataaaattagactgaagtcattgtatagctaaaggattgcatgtgcagtcttcatatgaatttaaaattttaattatggctcattcatctttgatcattcaacaggct

SEQ ID NO: 10388 - DNA, 939 bp, Oryza sativa
  Intron number 3 from transcript LOC_Os02g56360.1 (locus LO C_Os02g56360) derived from phytozome v7.0 (chr-ID Chr2; po s 34495595 to 34496533)
gtggcttcaagaggttggtaattaccataggaagtaatttgatacaaagtttaccttaagtagctgagtacattattaatttgtttatttgtctgtaacaatgatatcttggattatctgcaaagagaaaaccattttttgacatccttgttcattaaagtggatgctaatctacatgtaaatataggtgtttgaactgcgaactgcgaactgctaccctttgataggctgatcaatatcatatgccttcttcaagtcaatttttcctctactttaattggacatgtttagacattttattttgcattaattttttctctattttattttgccccaacccacagctccaaggagtgaatctccatggctaaagaagcccatgcatggagtttcaggctcaactgccatggctagcaccccatggagctcgatgccaccaagcagccattccctgggtaagagcccctattcctacctcctccattttctctactgctactactccttttctattaaaatctaaactaaggtgcttctcggaaaagtacccctaggtaatggtttggtttatgcttgatatactgaaggatgctattgtggtagcatgtaagaaatcacttgatcccttctcctgatttgtgcttcccagatccccacgagctcacaagttagtgaactttatttccaactgttggttcagctctccatgaattggcagctgtgcttgctagctcttcctgtccccttcctagcagaacagatggcggtgctgtacgtcaccttcttgaggttgattgactaaaaaccttgaaaatactccctccgtttcacaatataagtcattctagcatttcccatattcatattgatgttaatgaatctatacatatatatatatctagattcattaacatcaatatgaatatgaaaaatgctaga

SEQ ID NO: 10389 - DNA, 981 bp, Oryza sativa
  Intron number 2 from transcript LOC_Os06g46500.1 (locus LO C_Os06g46500) derived from phytozome v7.0 (chr-ID Chr6; po s 28236002 to 28236982 reverse strand)
ttcaacaacctgccttccccgttcctcctctcgtaattttgcagagctttctcttcatcactctgtttaacgctgtttcacctaactttgcttgctgctccaaagtctgcctggcatgtttcgctccgtacgttgcattttctgtcttgccggagagagtgcttgtcggctcatttccagattatttctccacatttgtagattcgtagatatgtctttgccatgatcagcatgatcttcattaagctgtaattaaaccttgagatgtgtaaactctctctgtctctgtctctgagattgttccccacatgactgcactgttgctgggactgaaacgggctgtgcaagtttgaacatgtgaaaacaacatgccaattctttcaaagtttcaatcgagaacacatgtgtagatcttgattctgtaagtgcttttgcagagcttgtgatgtcactgacgtgtgagctgtcccagggcaaaatctttattgcttccttttacttgctcaactaaaagaacctgatactgtgtgtagcgtctacttacatctttccctttttttttccctttcttttatacttgtgctttcgttctcgttacagatccatgatagaaagagcatgtgtgcaactagtgcctaattgtatcagtggggcctaatatgcttcaagttgagcatgtgcagattgctgtgcttgctgggttacttttggcttcaagtgtacttgttgccaccttgaggaactaatttgagtattagaaaatttctcgtagaaggcgacggcataaaatatgttcatcttctagtagtaaaatgaaacattcatcttctattagtaaaatgaaatatgttcatcaactgttactaaaaaaaaacatctcattgacgtttcatatttggaccgtggaaatgaatacccgtgtctgtaacttacttgggtgttcatacatcgcaggcaaggaattcaacagaggaggagctc

SEQ ID NO: 10390 - DNA, 866 bp, Oryza sativa
  Intron number 1 from transcript LOC_Os07g09625.1 (locus LO C_Os07g09625) derived from phytozome v7.0 (chr-ID Chr7; po s 5113403 to 5114268 reverse strand)
gaccagatccaatccacaacaggtaacttttatagcgtgcaaacatgagatgtactgctctttttcttgttcctcttctccttttttctgtttcaccaaatttagtcagaatgttagcttgagatgtgtcaactacaagtttttttaatggccttttaactaaccttccatggatctctggaaattcttattgataataaaagattaatatagcagaaaagtattgtcgatgcctaatcgtgttatctgaggtgcggtcttgttcaagaacaccttaagttttatactgaaatctttctatcccacttcagtctaatttaaagagcatatatgtttcaaattatgttcatgctttttgtttcatcttgctgagtataagctggattggcttttgaaatctctatttgttcaatataaaatgaactatatctatgtcattccataatatgacttctttatggaattaagcttgcttgccatatcgaaatttaatactgtacaagtttgaaaggcatgacttaaatttgattgcacaatgaaaacaatgtataagatggtcacactatttgtattcactacacaaacagtgctcatgatgatgtatgctaaccttttaataaaggaaaacaattactccacccaatgaacaccctgcatgaaccttatcatatctgaaatgattagccaacatgcatctagcacccttaacgaactactactcatcaatcagagcaatatatgtgtgtcaccttgaacattatacttgcaggctttcaattccttcctttatttactctggttttctaatggtcttcaccttgaattcttcagaggaactggagaatcaggaagatcaccaggccgag

SEQ ID NO: 10391 - DNA, 461 bp, Oryza sativa
  Intron number 1 from transcript LOC_Os04g28010.1 (locus LO C_Os04g28010) derived from phytozome v7.0 (chr-ID Chr4; po s 16364526 to 16364986)
cctccggcctctgggaagcactccccgccgaccaggtagccttagattagggtttctttttttctttaatcctataaatagtatttcttcccttccatgttataagtcgcttaagtcaaacttctccaaatttggccaagtttatagaaaaacatagcagtatttggaacaccaaattagttgtattaaatctaatattgaatacattttgatagtatgatagttttgtgtagaaaatgttgatatgtttttctataaatttggacaaacttaaataagtttaacttagaaaaaaaagtcacagcgacttattatatgtagcagagggagttgctaagattgtagtaatctgtgtggagactctaattgtaatgtatctttctaaaaaatacaattgaatttagctttttgttgaattgggtgcagaaggagcagtggactgggttgttcttctacacaga

SEQ ID NO: 10392 - DNA, 743 bp, Oryza sativa
  Intron number 1 from transcript LOC_Os02g35315.2 (locus LO C_Os02g35315) derived from phytozome v7.0 (chr-ID Chr2; po s 21229479 to 21230221 reverse strand)
cccgccgctgccaccgacgacatcgacgacgcgtagtaggttctttcttttctccctctctccgaaatccggttcgtttccagcgcgtgattgcatatgtgcgtgctgagtacttgagttgactagttgaggtgatttggtcgttcttgagggatgtctgattgcggctaaggtccggatctgtgcgctgtacttggggcaaaagagcaaataatttccctttgcttgtgtaatcttgcttgtgctatctcaaagatcacttgtagattcctcattagttgcgcagtcaatcaatcaaatgcttcgtagcactgccacaccaaaaggggagaaacattttttttgggcccattcaatttgatctaaggtgaattatgtagagagatttatgcttctctgtttcaaatagagagctgtcgacatgttgggaagaatgattcttcagatgtttaatgagatggttcactgcaacagatggcattaatttatactgtaaaaccgtatgtcaccggccatctggagctgggaaatttgcttgaggcgtgtggctgtgagattttcagcttgattagagaggcccatggttgtgccatggaaatttcttgataagcgtgcgtataagtcatgaatgcaatgccttttgctgtatttattccatttgggtgcatatagaattatgggacatttcaccactaatgcgtttgacaatttttgcagtttaagttttccatctatctctggaa

SEQ ID NO: 10393 - DNA, 976 bp, Oryza sativa
  Intron number 1 from transcript LOC_Os07g07040.1 (locus LO C_Os07g07040) derived from phytozome v7.0 (chr-ID Chr7; po s 3468581 to 3469556)
aagatctccgccgaccgccgccgtcacccgacaaggtcaggactaccaccgatcgagtgagaggcattgccgcctcctcctccccctacttgctctagttacttttttcagccttggcttcagagctgatctcaatcttgatcgcgagattcgatgaagatcagttagttcatcaccttagttaagcttgcactagttagtagttacccatttttagccttggcttgagctgatctcgagatttgatgaagatcagttagttcatcatcttagttgttaagcttttgtggtcttagaacaggagacagtttggtcatgtttacgagttccattcttcagcagctgagcctttctagctttcgtccctgggtagacatcagtagagatcttttcttgcctgatctgaggcttcattatgcactgatgaattcatcacttgtggtttttggaaatctctccctacttttcgtgtgattattatctctcctagtgccctacatgaggccaatctatggttatctgggagtataatactaggtgtgtgaattaatcaccaaattaggatactactactctattaatggggttgtttggatctctgatcttatcaaactcaaactttgttaaaaacagattttagtgcttttagtgcctgacaacctaaagttttctttagatcatatgacaatactattctccacaagcttgttatgtgatccatacaaaatttaaagctgttgcactaaaaatatgtttgagaaagtcaagttttggtacaaccagagttccaaacagaatgttgctgcacaaaccactgtgatgaacagatggtgttttatgtcactagttagttactatgatttgtacgaggccatattgtcctctttgttgagtatcttagcaaattcatttgatagtgagactgaactgagaagtggtaattgcaggaacttgaacagcccaggtcatattccag

SEQ ID NO: 10394 - DNA, 396 bp, Oryza sativa
  Intron number 3 from transcript LOC_Os06g10890.1 (locus LO C_Os06g10890) derived from phytozome v7.0 (chr-ID Chr6; po s 5688240 to 5688635)
aacccacagatcgcgttcattcggtgaggagaagaacgaagaagttttatgtttttctttgtactagaaaaaaaatgcccgtgcgttgcaacgggtgaaaattattttaatcttactattgttatacggtataattaagatgaaatttcactgtaaggattcgcttgatatatatattttttagaaaatcaggagctgtaattaggaatccgatcatctcaagttagattgcaaacaaacttaaaaacggactcaaatacggatatgtatttccaaaagcaaatgaatttacaaaccgattcatacacggatgacgtaccaaaataccggcaaaaacatctttaatttttataatagtagagatttgttttcgaatttagcttttgtaggtggctg

SEQ ID NO: 10395 - DNA, 735 bp, Oryza sativa
  Intron number 1 from transcript LOC_Os08g23420.1 (locus LO C_Os08g23420) derived from phytozome v7.0 (chr-ID Chr8; po s 14162226 to 14162960)
gcccgctgagttcgaggagagctcacccgcgccgtgttcgtctgaacaaccataacttgctgccttggatctaggctgcaacatcacctctacagggtatatatgctgctcgttaagtaactaattttatatttttcagtgtttgataaaactgaacctacctgctgtttgggctacccagttgtataacccataattacccatacatgtgaacattttacaactatagaatatggaagttgtaggggatggaatgatgacttattgatggcagtttattggttttagtccgttagttcctttatagaaaagaaaagtgaaagaaaagtgatctttaaaaatagcgttgtagatattgttgagatcatcaaaaattgaaaaattgccatcgtggtcctgctttctttttgtcactgtcttttcaatctgttaacataatttagggtaagaattaactaaattggttcgtgtttaggtgtattaaggtagactaattgggtgattgtaatggtaaggttgagttgctaacttgatagtaccaataattgctgggtgttcattgagtgtttgtacatggacctgattggctagctcttgtgcattgttcattttctagataatatggcatgctttctgattaatggcattcctgaattctcactgtaaacatcaattcatctgaatttagttttttccgagtggtttgattgatttcaaaatgcttgggcacagctg

SEQ ID NO: 10396 - DNA, 294 bp, Oryza sativa
  Intron number 1 from transcript LOC_Os04g06490.1 (locus LO C_Os04g06490) derived from phytozome v7.0 (chr-ID Chr4; po s 3400882 to 3401175 reverse strand)
tctaggctgttttagcattcctggccacgtgtgtaatctactatctaatattgaatctcaatggtgaatccaaggtttattttgatttcacaattattcaattcttctgtggtaatcacgatgtattaaagaaacatatctttcatagtaaaatttgtgtttccaattttcttctggacatccatcttcacatatccatgtattgcatacggtttttctttatctttcatgctttcctagtaaaatattttttatttttcaggtaataatctggattacaccaggagtgccacc

SEQ ID NO: 10397 - DNA, 823 bp, Oryza sativa
  Intron number 1 from transcript LOC_Os08g25624.4 (locus LO C_Os08g25624) derived from phytozome v7.0 (chr-ID Chr8; po s 15590586 to 15591408)
aaagctgcaactaattgtacggtatgaatggtctgtctgttttggtgcaaggtagcgataaggatgttcaatgtgctattttagatctgaaatgaaataaattccaataatttatgatttacttttgttgagatcaagtttctgtcgtccctgtaatttccttgttaattgttctgcacttctgttctaatatacagaaaatgacttagatttgaagttcaatgttatatgttagtccataaggttctcgatgacatgaaatcttgtatcctattttctttcaagtttctcaagatgttctcagatatcgatttgaagttgtttttaagagtcagaaggtggcatctctgtttggaacataatatttgccttttgcagtttgaaacatgacgcaacgttgcacatatgttttgatatgacatcaactttttaggtacttttatcctgcgatagtctggccttctgaccatttcatcattgtaatacttatttatctcctttgattatacattcattcttctatcttattctgccttgcagtcagtacctccagttactagagattatataatcttcctactaaacttccctagatgcatttctgttcatcatacaaatctgatttggtatgcatgggttttcttgattatcatcatacagcctttcttttctaaaagcattttgtattttgattgtgttgttcttcctgcaggatatgctatattgttatattgattattttcgcagataaactattaactcttgttttctgttataatgtttgacaggtcctgaaggttttcccatatccaataaacattac

SEQ ID NO: 10398 - DNA, 1026 bp, Oryza sativa
  Intron number 2 from transcript LOC_Os07g37800.1 (locus LO C_Os07g37800) derived from phytozome v7.0 (chr-ID Chr7; po s 22667018 to 22668043 reverse strand)
cgagtaagtgttgcatcattctttctatgttgtactagcttgtccacatgaattcagtcttataacgtcttgcagtaagtatgtgacgataaattagtaaattgctaaccttgaactttaacctgtgttgagtctcctgtcttggcctattgtatttttcatgcgggaactggatgaactctgaaactgattacacaagatgcataatttgtgtctcatggcacataaaagctaaatagacacgatttataccttatattatttgccttctttaagttggcctatgatttctaggatctacaattagaattacagcaggtgatttttttcctactctctgatatagttttccaattaggacaagtttggtggtaaaatggtgttttgctgtctagcagtgaactggcttagattttagaaattgttgtatgagggcaagggcactggtggatctggggtagagccgtagaggtagggataatactttatgatcaattgatcattgttgagttagctttgggatcatcagcatgagattcaaagaaagaaacagcaagtctctcaagttgggcacagttcgaacagtgcgtattttacaaaaagaaaaaatcttgctatagagaagtattttttaaaaaacaaaataaatccatttttcaagattttaataattaatagtcaatcaatcatgtgctaatgactcgccacgtttcaaatgccaccgataagctcagcctaactcctgatttgaacgtagcctaaagcagtagttgaaatttgaacagtcgattcaactcttaaacatcttttaataagatgtgctgagtttaagttactctcctcatattcagcttttacctagagccaatatacccaagacatttcaactggctgtggtctagtatgcatagtgttttgttctgcagtaaaacaactcacctgttggccattgatagaacatatcatattcattcaacttgcttctttgcagtgcttggtttgaggagctccgtaagcggagagttg

SEQ ID NO: 10399 - DNA, 520 bp, Oryza sativa
  Intron number 1 from transcript LOC_Os06g48000.1 (locus LO C_Os06g48000) derived from phytozome v7.0 (chr-ID Chr6; po s 29021129 to 29021648)
tcttggccctcgccaccagagactccatcttcctggtaactcacactcacttgcctgtatctaccctaccttaccggcccatttttgcgcggtatcgagttacaatctaaaagcctaagttgatgagaaaaaacgaataattcactttatattccaacacgcacaaatggttctggaattcattctctcggagggccgtatgtggtcttccgctgatgttgctattttgaggggtttgttggtagtgtagtgtggctctgccctcctttccgctgattggagttccgtttagctgccacagtagtttttctttttcctagctacagtttttgttttgctttttctttcttcttttaacataggtctgtctgaccaattacgttgtgtagaaaaaaaactcttctccttccaatatattgacgtgcaatctttttgcgcgttcgtgaaaaaagaatggccattgatggcttggctgcatgatgcagagtggagggccgaactacgcggtggagctcggcag

SEQ ID NO: 10400 - DNA, 784 bp, Oryza sativa
  Intron number 3 from transcript LOC_Os04g32350.1 (locus LO C_Os04g32350) derived from phytozome v7.0 (chr-ID Chr4; po s 19228206 to 19228989 reverse strand)
tccctttgtgagaaaatttaagactgagaaaaagggtaagactagttaattgctgttcctttccgtcctttccaatttattcatgatcatctggtaaatgtgtaatcttgtattattcgagcatgaccagtgtctatttccccctgttgttatcggtttatcagttaacttgtcttgccaaatatgcatgtcctcagaggttttaaattttcaacctgcaactgcaatctatgtagttaagaatagtgaaggctgtgaattgagcatgcatgactgatttttcattgctcaatggatttttcctgattcagctggccacatgagtgtttttacttgtatgaccaatcttaatctactaggcaatgcatatccttttttttttcaaaaagaaaagaaaagaacttgtacaccgacccttgaactatatctgctgcacaattgcaagtggtttcttagttggtcaagtacaagtgtgtggttcggttgtatcagaggatgaaaatttgttgcaagcaaaacactggtctgttagaagagtatgatttgattttcatcctattctaagcagtataattgaatgcttaatgcattggaatgccctgagaaatgttatgcgcaaaggatgcatcaaaatagcatttcactgattcattccatgcctaatcattattttgtgtagtaaaaggtcccattaatgtacagagtatttctgatgatgttggccttctctcttgatttacatgcttacttgctactgatgtcgtgctttgttgtcatcgtagaa

SEQ ID NO: 10401 - DNA, 984 bp, Oryza sativa
  Intron number 2 from transcript LOC_Os04g32950.3 (locus LO C_Os04g32950) derived from phytozome v7.0 (chr-ID Chr4; po s 19743469 to 19744452 reverse strand)
gaggtgggttctctccgggaaggacgactacaaaggtatgcttaccgccgcatcgagatctgtgggtttagcgggtgtgcttggggggttgcaggggatgctgatctgttcatgggattcttgctctgctttgcttgcttgtaacatgagacggtttgggtttgtgcgcatccttgcgagaatgatagtgtgtcaatcgcatagttcgcatcgagatccacagatgcacacatggtcgagatccagcagatgcatttcatcttttggtagatcggatctaaccagctagctaatcagtagtagtaacatctgtagtgtaggggactgtgattccgtgaattggctcatgcgattgcggcgtcacgatatgctggtctgtgtcgtggaccctgtgagcgtctgttttttttcccttaggtagtactagtacacacaacgctaataatcaactagccgttgcgatgtggcttactttaattttgttcctgctcttataggattatcgtaaatatgctttaactaaattgcatttaaagtttgtagtatatgttgatcctgtggacgttgccagcttatttatatatgagtagcctcactacctgttcctcgtgtgaacatatcgtaatggcatccgcgtgctcccctggacagcattttgtgtaattccttctgtattgacctgatggtacatgaggttatttgaattttgaaatgaagaaagctgtcatgtatgctgttgccacttgtggcgttttgttctttcatctttacttcaaaaattctccatatgctaagtcgtgaaattgaaaggcatgtctagcttgtacagtttgcagtaaacatatctacttttcattttatctgccagtgtaagattacgctaattttctacctcaattaaaaatttatgttttttcaatcggttctttatagcgcacataagatggcttaaatggtgatgtacttactgtggtttgcaggtgt

SEQ ID NO: 10402 - DNA, 408 bp, Oryza sativa
  Intron number 1 from transcript LOC_Os05g34990.1 (locus LO C_Os05g34990) derived from phytozome v7.0 (chr-ID Chr5; po s 20725785 to 20726192)
ccaagcaaggttggtcctcctatcgatgggaagagatgaaagagggttgacgacaaagagatcatttacatatgggtctcactataatttttattttcattcttgactgtaatggcacgtaagtgccacatccgattttttttaaagaaaaaatttcccgctgatggaaattgtcgtgtgagcatcatgtaggatgaaaccacagtcaaaattactcatgatggcaaactgcaccaacattgattattgagggaagcgttgtattgaggaaggaaattagactcgggctatagtagagggacacagtataaactttatatgtttattatcccctgaatttaacagaaccacattttggcccattatttgtttattcccagattgaataagtttgaaattcgtccctaa

SEQ ID NO: 10403 - DNA, 747 bp, Oryza sativa
  Intron number 3 from transcript LOC_Os05g44330.2 (locus LO C_Os05g44330) derived from phytozome v7.0 (chr-ID Chr5; po s 25735577 to 25736323)
gtgcagaccaggtgttcgacctcgtggctctcccggtaactatccctattctcgtgctgacccatctatttggggaaactattttaatccctcgaggggatatcctctcgttctttgcatgtcactcaaatggttatgaaaaaattgaaaacaattgagaaggtgtattaacatgtgatataacactccacgaacatgcaagttcaaattcaacttctacatctcgtaacgaaaaaaacaaattaaaccgcaactagttaacgtatattcagagtcaaatttgtttttttgttgcaagatttagaagttgaatttttacttgcatgtttgtggagtaatgtatcacatgttaatacatcttctcaaattttttaaattttttcataacaatttgagtgacatgcaaacaacgatgggatatcccctcaagggatcaaaatcctcttcccatctatttgtgtggttagttggttacggatgttgacattagcagtaggaatcaattttcaagatcatttaagtctttctctacgaaacagaattcaagtacatctaagcactatctttagcattgcaaaaagtggtctatcacattttctcagttttccgactgatagtagtatctgacaatttcgtcgctctattccctttcttggacctgtggtgttatatgtttgtcataatgtcacatactgccagtgcccaaaatcttatcttgggttcatggtgtgacgtgttcagggtgga

SEQ ID NO: 10404 - DNA, 543 bp, Oryza sativa
  Intron number 1 from transcript LOC_Os03g38864.1 (locus LO C_Os03g38864) derived from phytozome v7.0 (chr-ID Chr3; po s 21586818 to 21587360 reverse strand)
gacttaagcaggtaagcctattcacaattgttctattggacactattaaacatttttgaaagactttttgtaattaatgtgtaatattgaaagtcaaaaaatataataattatcataattggtttgtgtgtttgatgacattagtaaactttcttctttgattgagagggacttataaatttgtgaagaaaaaatatttgtaataataactaaaatcaataaattttctcaaaagaaaataggaagtgagcttttcaaaaactctatatgaatttaatgtaggctatgctataggagaaatgcctgactcacaattgaagttatcaccgtaagaatatccttcatcctcaacaatcatgttatgcattatgatgctttgcagcaatgactttaataagaaattctcatactaaaagatgagttgtatacgtacaataacaaactgagaacgtcgaacaacaaatgcacatgtgacatctttttcttgccccttctttgtcttgtgcagattacttgtccttcattcgtcggggctactctctc

SEQ ID NO: 10405 - DNA, 845 bp, Oryza sativa
  Intron number 2 from transcript LOC_Os07g46230.1 (locus LO C_Os07g46230) derived from phytozome v7.0 (chr-ID Chr7; po s 27584959 to 27585803)
ggccactggtggagccgtgagaggcttctgcaactgtacgttacaaatattttctttagtataaggccgtgtttagatttcaacttttttcttcaaactttcaacttttccatcacatcaaatatttgaatatatgtatggagaatcaaatgtggacgaaaaaaaccaattgcacagtccgaacgtaaattgcgagacgaattttttgagcctaattacgccatgatttgacaatgtgatgctacagtaaacatttgctaatgacggattaattaggcttaataaattcgtcttgcagtttatagacagaatctataatttgttttgttgttagtctacgtttaatacttcaaatgtgtgtccgtatacttaaaaaaaaatttggcgcacgaactaaacacagcctaaattacactttgcaccgggtagaaatgtagtttcacgttgcatcgggtttgctccatatttttactttgcaccgaaatatgtcaaaataaatttcactttgcattagaccgcgtcatataactaaaggaaaatcttataaactacgagtaaaacctgtaaaaccttttgaaataattttaccatccttgaaaagataccggaaggtaccacacttgctagtgtaaaatttagtatatccaagtactaagtatatcgaggtaaaaaaatttagtgtaaaatttagatacctcgaggtatttttttaaggactataaatatctcaaccttttgggtttagatcacgtttcgtttgaagtgcaatttactctcttctttttcataggactaaccttgtcatgccagacgctgcaatttccaggtaggcaagaagttgattc

SEQ ID NO: 10406 - DNA, 890 bp, Oryza sativa
  Intron number 2 from transcript LOC_Os04g40880.3 (locus LO C_Os04g40880) derived from phytozome v7.0 (chr-ID Chr4; po s 24083861 to 24084750 reverse strand)
gatctgcgccaccgcgcccaagggccccgatcccggtaaatctacagtgccatctatagctcacctctgtttcccatctaatccctttgaccagtgttgttttggcgtttgatcgcagcatgtgatgctttgctccgcggcgtgtcgcttcgatgcttggtttagtttggttttactgcaatcgagtgtgaatttagtggagcatacagcctatgcttgtatgagcatccttttgcagagcctcgtgtcagttgtgtgcaggaaatttcagagtttggtagtcggtagctcatctatagcaaagtcgcatgcttccagcatgtataagtttctgtagtataactggctgtggcattgatgaatttgaagaagtttagattgtgtgagctatgaaaagaaaaaaaaaacagtccggtgtgaagtatgcaaagaacatgagctctccgacaaattcctatttgttggcccatcaaagttggttcctttatttctgaagattatgaactgttgcaaccatggatgtatattggaacatctgcattccaagtcaatttgatcaatggatagaagttctctagttcttaaatgatcaagtgcttagaagaacttataatcgcacttaagattttccatatatctacatgttaagtgaaccactgtttatgaaccttaatgaatgatgctgtatgaactttcaggcgccattacacgtaagcaactgtatttttaattgtaaatgtttttatccaagtgaatgtcctaccatatgtactatccctgtcccaagttattgtgaatttgctatgcctatccatatagtatttgttctttgcgaaacaatcttacaagtggacattttatttccagatctgcttgccatcattgagcga

SEQ ID NO: 10407 - DNA, 549 bp, Oryza sativa
  Intron number 1 from transcript LOC_Os08g29580.1 (locus LO C_Os08g29580) derived from phytozome v7.0 (chr-ID Chr8; po s 18139676 to 18140224 reverse strand)
gcgcggtggcagccgacggtcgggaagtggtagaggtgaaggctacgatggctcatcaagctcttcttttttttttatttattgaatactataagtgtggttataggataagaaccagcacctataattttttaagatgccagctccaaaagtccataaattggtgccagctaggaactaacaccaatggccagttttcccaaccggcttctatagatgtttatgtacagtgtcggtggcaaaattatgatgatgtcgctccagtttctgttttgaccatgcaaattcaaaatatctactacttcggacgacgactaaacagtagcatgcctgccactcatgtgtctaaacattctagaaaatgtcagcatctaggatcagtaatcaaagtatactaactaattatatagttaaaaatgtgccatataagtgcattcaggaccgtttttcttctccccagaaatgtctagctaagaacatggtaaactaagtgggtatgagggtatcatcaacctctcttgttatattgcttgtcaatgttcaggagaa

SEQ ID NO: 10408 - DNA, 950 bp, Oryza sativa
  Intron number 1 from transcript LOC_Os03g22830.1 (locus LO C_Os03g22830) derived from phytozome v7.0 (chr-ID Chr3; po s 13198976 to 13199925 reverse strand)
ccacaaaccgccgccgcctcctcctctcctatctggtatcgtaatcgaaccagcggaaaccgctattcgtgtgcgtgttttttttctattcaatttgtttgctcgggccgcgtaatcttgggagttatctgcaatcagttttcttttctttctttttctttttttttttcattttgaatggagtgaatcgtgtggaaaaggtggctgttgtagagtttttagtcttaccatgaactgattgatctacgggcgagtgggaatttagcctgttcttggattttagcctggttgcagcatctagtgtaattgatccagtttgatttcttttttttttttgggaataaatcagtgtgaggcagcctatgaaccgaacataagtatctagtattagtctgtgagacaaactatccctggctctataagagggaaacctgatgtgtctgaaagaagttgcgagttcaagaattcctatctgaaaaaagcaaagatcaggcaaagatcatcagtttggatcatgtataaatttcccatgttgcagtatgtcttaattaggaggattattcattaacaaatgtcatgcgaaaaatttatatcttcggaaacaatcgctttatcattcatgagcgaattattacttcgattaggcggatttgtgataattgatgaataattctaagtaatccttgacagttcagtgatttggactggtactggatggtaggtgcccatctgtgtgcctttttgacttgtctatatgccttggtaccattgtgaaacttcatgtattcagtcttgttggattttgtaagttgcattggaatgatatgcttatgtaacattactagtggagctgttgccctgatatgttagaaattgtgccattttttgcagtgcggaggaggtataccacacctttggattttggggaagcagtacgttgattggaagaa

SEQ ID NO: 10409 - DNA, 338 bp, Oryza sativa
  Intron number 1 from transcript LOC_Os04g49320.1 (locus LO C_Os04g49320) derived from phytozome v7.0 (chr-ID Chr4; po s 29255891 to 29256228 reverse strand)
gtacattatccactggtacgtacacactgaatggtactgatctgaagacattattatgattgatattttgtccaataatgaacatgaaagggcagtgatcaaagaagggagactattttgaaattactatatacatttttcctttttcttcaagaatatttcattgcaaaagaaaagctccaggttattgcaaaagaaacgatccgagtatattcacttcaaaaccaaactgattattgaaaggttttgggtggttgtacagaagtaggtagtttgattagttccattttctgattttcccaggttgcagacattgttcagaaacagaaaaaggatca

SEQ ID NO: 10410 - DNA, 972 bp, Oryza sativa
  Intron number 2 from transcript LOC_Os05g50030.1 (locus LO C_Os05g50030) derived from phytozome v7.0 (chr-ID Chr5; po s 28619942 to 28620913)
gtgaaataaaagcggctgttaggcgtctgcaagaggtgagtgtgcaccatgtcaatagagagtgtaatagggttgctcatgaacttgctcagcttgcgaaacggacagctcattgcgcggtttggcgtgatcaagctccgtcttgtattttgcatgtgctgcggcaggattgtaatttggtgccctaatcaataaagctctctattcccgcaaaaaaagaaaaaaaaaagaggtatagctatctgtgctcacagttgggaagcttcgcaaattcagggatgtaaaacaagctatttactgaacagaagtaatgctagccgtgcattcttaagtctgaacatgtcacacattttagttcaaagacttcaagctatttcttctgagactacaatctgcaggaaccaaagttgttatgaatctgcaggaactaaaatctcagatgataagatcagaaaggcacacagccaagctcaatcaccagcaaatcatcattcgggcatggagggctcaatattcccattttgcttttcgtgggcgactaaagtttcgccgaccaaattcattaaaatcttgagggagtttgatacaaattacaacaagtatggttgttgcatcagcatttaaacacataagaactagccccggggacccaatgagaacaaacaccacacagggattagtctctgcgtatagtaaacaaagttaaacaggataacatatgtactgcaactctgctagttctagaacaacaaaatgattcagatttctttcagcttgaagacaaattgtagctccatttatccagaaaatgatgcatagtcgtcacaaaaagttaaagcacaaacacagagagctactaggctcatgaattttctgaataccaagtgccaacatatgaatagaggcaaatactgcagtaatgaattgtctgcttcagcttaggggagaaccaaaacgcagacatactaatca

SEQ ID NO: 10411 - DNA, 642 bp, Oryza sativa
  Intron number 1 from transcript LOC_Os03g06190.1 (locus LO C_Os03g06190) derived from phytozome v7.0 (chr-ID Chr3; po s 3103676 to 3104317)
gcagccgccctatccaccctctggttagtgttctatttcgtcttttagtacctagtttttgcttttgagtcttttcctttttctgttgcttggtgtgtttagaatgaggagctaggaagcccttgatcaaatttcaagccatgacatgaccaaacattgttttacctttttttttgtggtgtttttatttgtcaatcaaatattgatgtttcttggctaaagatcgagccttgtatgggtaagaaatgttttggggatggcctacatctactttggagtatgatcttaagacaagaatgcttgggtattgttgaaaaactataagatggcatgtgcagagagaagcggggaaagacaaagatttcttgaatttttttttcggataatcaatgtgttatttttattattatgttgaaactatcaaaaagtaagcatttacatgttgactcaggcctaattggttaacagaattagtaggaatgctgtattttgtttttcgtaatcatatagagttattcaagatttgttggttttcttatgtccttattaatcaatagtggaaggattgacttttttgcatattcaattatccatgcatgggatctgatgtaatatactctcgccttgcaggaaaaactgcca

SEQ ID NO: 10412 - DNA, 1049 bp, Oryza sativa
  Intron number 2 from transcript LOC_Os04g30880.1 (locus LO C_Os04g30880) derived from phytozome v7.0 (chr-ID Chr4; po s 18281358 to 18282406)
ccgacgccgccggcgtgcgccccgtcgtctggaaggtatggtggaatcgtcttgccttcttcttattttactactcttattacttcactatacttcactgtgtgtcaccatgctagagtaaaatgggtattacgaatactaggatttcgcttcgtcacagctcatggatgctgtccttgcattggattcatttgttttttggaaagccgtagacaacccataaatgatggaatttaggatggatgggggtttggcgtgatttgattcggatcaatcatatggtttggtgttgatacttgatacatggtttatgctgcacgcaaggattaggagcatttttttttaccttggtcttttgagatatcatggagtgtgttcggggaatgcggtttcagttatatctattctgaagtgaatgggtctctaatcaagtttttgtttcattgaaatgtttggatttctctaggttcttaagatgttttattcccatacattcagtttttaaggaccaaactatacgattgccatgaggccatgattcataaagataagttcttactagtttcagcaaactgctttgaagccagtggtagaatttcatacgctctataattgtgcattaggattacaaacaactgctcatggcattatttttgttagttgaataaatttaggagaaatcaggattcgtaattgacaaatagaatatgatttgtagtttgtaaatatgtatacaagcatttagtgatttgagcagagcattattacactgaaagcctttcagtattttttgtgttacatgtcattgcacaacttaatttcaactgacataattttatatatgaagagaactgttgtagtaggattaagctaaatgatattatggaattcactgcaagaattttaggttaaatagctatgaatgtgactaaatttagactggcttacaatgtacaaatctttaatctttctccttgtttgctacactacaaatttatttgacttgtttgatagttagcagcttctattgggatacttgccgactgatc

SEQ ID NO: 10413 - DNA, 524 bp, Oryza sativa
  Intron number 1 from transcript LOC_Os03g47550.1 (locus LO C_Os03g47550) derived from phytozome v7.0 (chr-ID Chr3; po s 26880413 to 26880936 reverse strand)
agacaccgcaaccccttcctcccagccctcatcaggttcgtccacctcccctaccttctctatgctaatgcacccaacccctaatttgctgtgtaatccaagtttttttggatctgatatagcctaatcaggtatcttctagggtttgatttagtgcgattttaaggtctattggtaatctagattggtctgagttgtactggggtatatgtgttttgatccttttggaatactcaattgttataattttggccactgacgcaatgcattatttggggagagctcggatggttttgtagctaagttgccaactgcttgtaatgtattgtatgtttttaaggcgttgcaatgcttgtggttttgtgtcaagtgttttctgtttcaggaggccttctaaataaataaaccaattgttgttttagttcacctgcaattgaaattcattagttattttgtatgaatttctggcaatagatagcccaccatgccaatgtgccatactgattaaaatgttgcaggtcaag

SEQ ID NO: 10414 - DNA, 844 bp, Oryza sativa
  Intron number 3 from transcript LOC_Os07g10690.1 (locus LO C_Os07g10690) derived from phytozome v7.0 (chr-ID Chr7; po s 5805694 to 5806537)
tcttattacttcttctgccaagaagaagaagtctggtaaagttctatttttcaagtgtacatgatgtgtatgttaatgcaaaatcaatttcttctaaaccaaattattggtacaggcatgcttaatggttgtttgactttcatttattcaaataaactgacaaaacttactcatatgatgtataggataatttatagatgcttttctttaactactaagatgtattttcatggttcgaaacttgcaataacatattgtgaaatgatacatgcttctagaataaacaaatacattttgtccttgtttaagttgttgactattaatctattcctacacgtaaattgtttgtttaatttactatattggtgtagtgcccatgtgctggaacagttttgaaataaatttatgtcattttctaatcttgaaattccaaaacaaatatttaaatataaacgaaacaaaatctaccagccagctattgacatatatacatgtaaacatgatatatttttctgtaaaaaatatcctgcaaataatgcacacatgtctacatggatccatccacagaagataagcataaagcacaagatcactgtcaccaactctttcttttaaggagtagattttcaatttgagcttaattcttccacctcttatcgcgaaaagaaccaaacaacattctttatgtgcataaccgtttcttatttactatttaatgctgtatatctggtgaagttatgatactgattaggatgtagcaatggctgtatttggttctttgcattttaaaacatttgcttgccatgcagttggagccccttcaaagaaaaaccgagcttctaaa

SEQ ID NO: 10415 - DNA, 1011 bp, Oryza sativa
  Intron number 4 from transcript LOC_Os08g33860.1 (locus LO C_Os08g33860) derived from phytozome v7.0 (chr-ID Chr8; po s 21195050 to 21196060)
aggtgaattaacactttttgaaatgacatctctatattttcttactggattttagtcggcacctagcccggctttacccgacaaggtcttttaaaatgaactttgagcattaatttctcttatatcatataattaatctagaaaaatcatgatcagatggaagtatgttcaactagaaatctaatgtcaccactattatgtgactaaaacatcctagagccaaaagttacaaattttgaattttgaagtatgtgtgcaccttaaaagtgataagatggagtatcaactacgaagccatctaaaaatttccaatattttttttccatattggcttcttattttaagtatgttaaagatgtgaaaaatgtttgtgcaaaaggtggtgttcttgtgttgatcaaggatttaataagtcgtttgattttttttctaatcaaactttattaagtttcaccaagtttatagaaaaaaatgcaacatctaaaatataaaatgagttttattaaatctaacattaaatatattttgataatatgtttattttatgttgaaaacactactatatttttctataaacttggtcaaacttaaaaggtttgactagaaaaaaagtcaaacgactcataatatgaaacatagggagtactgtatattggtagatgattgtagacatctcaatgaagaacataaaactaagggaggcttgagagatcaattatcttatatctgtgaatagtatcatgttcttgtatcaggttgtcttgaagtcgatctcttttaacactagaacgaatggcgataaattcatgaaagcaatggatgacattttaagtgattttaaagtagaagtagactgaacctggagcaaaaataaatggatcaatgtttattttcatatatttcttagttcacatcataatatcattcaaaaatcaagtcatctgagctctgtggctgaaagtttacttgtttgcagccatacaaacacgggtacactgcacttcctagagc

SEQ ID NO: 10416 - DNA, 639 bp, Oryza sativa
  Intron number 1 from transcript LOC_Os05g37190.1 (locus LO C_Os05g37190) derived from phytozome v7.0 (chr-ID Chr5; po s 21675668 to 21676306)
caggtgattgattgcatcgatcgatacactacccatccatgcatgcatcttgattaacttggatgtctcgtccgtgagactccatgtcctcttttcttaattgttttgatcctcttataattaattaactatttcgagttcgagcatctctgtttggaattcttcttttctttttagatgttgcgtcttgcggatgctttcaataattatgcatcttaatattagtgcatatatacatcacgcgcgtgcatgctgtgtgtgtacacatgagaatgctcaattgcttatctccttttgctgttcttcgtcattcccgtttataccaagcaagtatttcatgtagacatgtaccccacatgacccgcaaggaatccaattaatgcatagaaaagcaaagagaaacaaaaccacgcaattcacatgcctttcctctctctctccagcatgatcaaaccaaggacagacacacatacacactaaacattaattagaacctgcctagaaattccatgttgtgcattgcacactgcatggctaattgcaaagcacgtggtaataattttcatatgccatgtacttatccaaagagatcaactaaactaatttggtgtgatacatatgcatgtatatgtattgcag

SEQ ID NO: 10417 - DNA, 955 bp, Oryza sativa
  Intron number 1 from transcript LOC_Os08g16710.1 (locus LO C_Os08g16710) derived from phytozome v7.0 (chr-ID Chr8; po s 10217650 to 10218604 reverse strand)
ctactgtcaataagctctttttcaagagtgataaggtacgacgtcaaaccatttgaatacctcgttggatcccaattttcattacatgcctatcttgcttgcctcattgtctgcttgtgaatcccatgtagcatgttcatccacatttatgaattttagttagctcatttggacaaataatttgcagatttgattgggagtactgctgatccatttatgtctgctatatatgtgtcatcttctgcatttttgctgagtttcaatcactaagactgcaactgctattgtaactcaagagtcattaacctgaactgattatttccagaacttgttaagagagatattcatcatgatctgactcagggtgatctctctcctaaaatttggttgtgatagttgttggaggataattcttttactgcttctagtttcccttgattcctcagattaaagctgttggaatgatcaaacttgtgtttcgatcgatagtagtttttttttactgaattggtccttgtgagaaacttaattacaatttgactgaattgttcaatgtgagactaggagcttgtaccgatggtatgtcatgtttagtcaattaaatagctatatagtagtttactcacggaatgggcctaaaccatgtaatggttgatcgaaggatgaagggtgtggattaaagcaatggcaaactctgcctttggcctcaaaggcagatgatgcgaacctgtcatgtttcggcctcaaagagatgtactctgatacaaacgctaactttcctaacaatatggctcttatcttttctcaaaaggaagcttcaagaacctttctaactacaagatcatggtgtcctaatatttgaatatttgcttaggttagtaggtctatgtaaacttgaatcatggacatatgtcaggcctaactatgttcttatgattttcagttcaacattaat

SEQ ID NO: 10418 - DNA, 762 bp, Oryza sativa
  Intron number 1 from transcript LOC_Os04g04760.1 (locus LO C_Os04g04760) derived from phytozome v7.0 (chr-ID Chr4; po s 2283780 to 2284541 reverse strand)
ccaacactggtaagccatcactaattcactactccctccgtccctaaaaaagacaacctagtactaggatatgatacatcctattacaacgaatctggacaaagagtatatccagattcgttgtcctaggatgtgtcacgtcgtagtatgaggttgagttttttctgggatggagggagtacgctggttcaccgtgatttcctacccagaccacatataaccgtcagtagctagtaaatttcccacccaaaacacatagaacagtcggtggtactagctagttagcactggcagttcgggaggtgaaccgtcaaagattgatgctaccggattagaccaccaaacaacagtgcgtgttcggtattcgataatccactactacggaaaacatcaacggtcctagttaggaaccggtcattagcgctcgagggatagcatttttggtacctatagtacatactagctattttgtgcgttgttgtagtagtgagtgttgctctcaggtaacacggttgccaacctagctactatcaaatcaaaaaccgtcatcattgatacagccattttgaaccccggctgtgttgtcctattttatgatacatatatagtgatggtcttttgcctggaaatttcaaccatgtttgaattgtgcaaaaaacagtttaattcttctctgaaattccctttttattttctgaaatttcggaatttcgacgcacatgcgcaggcacttacacacgcagcatcaaggcggctaaacgt

SEQ ID NO: 10419 - DNA, 698 bp, Oryza sativa
  Intron number 1 from transcript LOC_Os03g43570.1 (locus LO C_Os03g43570) derived from phytozome v7.0 (chr-ID Chr3; po s 24340156 to 24340853)
aacagcagggggttaagaggccggttgatcaccaggtgaggcatgtgattcatcaattgcttgtttcagttactagtaagattatgtgccaatcaaatcaattcaaccgcgtttggctgctcctgatttgcctgttgtatgattttttgaacatactggtgccaaattctgtttcggcaagtacatggttgggctaaaattaattggtactagtagcttgaatagttgaatgtatcatacatacaaattgagacatatgttttgtactaatatctcatgggagtagaagggtagtgctccatccggtcagtattacttgtcgtttccgacaagaaaatactactaaatgggcgcaagtcaattccacactctgaaacgtcatatatatccatccgtagaatcagttatgaataaatagttcttgatgcctggttacatcttagtaaccgtcagcattaatagattttcttttactcaacatgttgcccctagtaattaatgtgagatcgctttcgtggtagtgccatcatgtgttgaagagtaaatattactcagtataactcaagttttaagcttataagactatctgcgcattaatgcgttctattctttctatctattttcgcgaaacggtggcttattgaaatgctatttcaaccacagattcgggtgttcttctctgttgctgcaagttctgt

SEQ ID NO: 10420 - DNA, 842 bp, Oryza sativa
  Intron number 1 from transcript LOC_Os08g28470.1 (locus LO C_Os08g28470) derived from phytozome v7.0 (chr-ID Chr8; po s 17380065 to 17380906 reverse strand)
gggttagggattttagtggggagacgaacagtttagttggtgaaaagaaatttatttttgtcattgaccggatattaaaagatattttcaaatacgaataaaagaactaatttcataactcgcctagaaaccgcgatacgaatttattaagcctaattaatccatcattagcacatgtgggtttatgtagcacttatggctaatcatggactaattaggcttaaaagattcgtcttgtgatttccatgcaaactgtacaactagttttttattttatttatatttaatgctccatgtatgtgttaaagattcgatgtgtctgcattgtactgtgtaattttaaaaaaaaattctcctccactctgtgtgtgtttggtttctggaatagttagaaaagaatggaagtttgaggggtggggttgttaaatacgttgtttggatggtatctacggattgaaggagttctactcggacaagactgggtctttaccatatcgtgaggggtccgatatctccgagtcctacttggagatcaagtgacccgcggtatataagataccccctgggtaggacctaaggcatcgaatatcaccaccaacacatccaccacagcctacggagccggagcacgcaggagccaagccaccgggagatctagtgggaccaactcgactacggtctcgtcggtatcatcgagttctgctattccctttataatctgtggttttcatcatataatcccataccaactggattatggctattacttaccaaggagcctgaaccagtataatccttgtcttttgtttgcttgttgtcgtactatgtagatcctcgtacca

SEQ ID NO: 10421 - DNA, 746 bp, Oryza sativa
  Intron number 1 from transcript LOC_Os07g12890.1 (locus LO C_Os07g12890) derived from phytozome v7.0 (chr-ID Chr7; po s 7394211 to 7394956)
aggagacaactctccggcatcgtgtcatctctcaggtgagaggccacctcctttaattaacgtaacacctagctaattaccatgcattcattcatgacgccagcctggtttaattaacccataggtaagaaacagcagtctcagtaaccttctgttttttttactgtcattttccacactttcattactactctctctctccgtccttaaatataagagattttggttgaatgtgatacattctaagacagcgaatctagatataaatcatgtccaagttcattgtactaggataagtcacatctaatcaaaatcccttatatttagggatagagggagtagtatgtacgtttcaaataaatattgcagaattaaaatggaatttaagtgtattcatttcttttgcacatatattttttttataagagatcccaccatatattataaattggcgttctcgaaaatagcatttataccaaagatcaaattttcggcgtattatggagtgatagaagaaagagccgaatcgcggaaaaacgagggcacatgcgcccaaaggtttcaaattcaatgtgtgtcgtacatatatcattttcggtgatgtaaaatgcaaagaaaaatgcgtgcagaatttaacaaacgagtgcaatattcagaataatatatattgtgtatcattattgacttatacaattgattgattttaattaggttctagagctagggatcgtggtgcactcggtgat

SEQ ID NO: 10422 - DNA, 571 bp, Oryza sativa
  Intron number 4 from transcript LOC_Os04g39280.2 (locus LO C_Os04g39280) derived from phytozome v7.0 (chr-ID Chr4; po s 23183119 to 23183689 reverse strand)
cttctgatattgctggtatggacaattgagcttaactttttagtcagtcttgcatgattgctctgagcttattttgttacatggtgtgaagttctccgatgcatgtgctggttgttatccttctaattgtttgcaaggttctagtatcttctgtgcaggtgctttgaatgctatgatttcctcttccattgactaaatttctgttcactggttaattgaattgcataagaacaaaagaccatgccaatttctctcatctttctttttttttaatgcactaccttttcacagatggtgatatctgtctgctatttctgtttcatcttactatacttcttgttcagtggttaattgcttaagaacaaaaattctagcctactaagtccggccttgccatttcccactccagagagagaaaattcgttttttttttcatgtgctaccattacgaatggtgatctttttgttgtcttgcatttttgccctgattcatgctgattaatgcacttctgttaccaccatctgttgttcccaaacttgccatttgatgttaactcatcaattctgtcag

SEQ ID NO: 10423 - DNA, 415 bp, Oryza sativa
  Intron number 1 from transcript LOC_Os08g25720.1 (locus LO C_Os08g25720) derived from phytozome v7.0 (chr-ID Chr8; po s 15656206 to 15656620)
ctctctaccagcccaccctccctccctgcctccaggtaactcctttcatgccccttctcttctgtgtccctgtttcttggtttcttgggttggatttagtgctggttactccatatgtgctcgattgcaagcggttttggtgacagacatggggggaatgatcagggggctgcaatttcagcgaccgcggttctttgccttcgaattttctgaccaagagtgtttgaacacttgttcttttggtgaagatttgtttggatttgagtctttttcaccttcttccgaattccgttgatgaagattcgtggagtttctgcctgtaatttgaagataaatgcaccaacagatttgattatttttcactgaaaaaaatttctgcttctttcttttcagggcgcaacggtgaaggtggagt

SEQ ID NO: 10424 - DNA, 770 bp, Oryza sativa
  Intron number 1 from transcript LOC_Os04g11130.1 (locus LO C_Os04g11130) derived from phytozome v7.0 (chr-ID Chr4; po s 6049494 to 6050263 reverse strand)
aattgtagttctcctcctgctcgttgtcaccacaggtacagtaggagtatatatatacatatctgagttagctacatgtggtttacatccttttccatgttccagctttttgttcattttcttagataacggaaattgtttacaccatctgctgcctctttatgtttggcacatacctaataagttttgatactgaagaaatataaagagacgacataattagtttgggagaaaccactgaactttgctgaataaacaatagaacaaccaatagttccattctgtcatgtcatcctatatgtatagcactttatgaaattcagtttgcgagttattattctaaatatgatctggttaagtccgaaatcacatatatttagaaccaactacctaatttgaccccttcctttcgattgaaatttttggtgggacaatccatatattcatgtgtatagatcataataccagattttgttttctttcgtctaccaaaaattgaaaggatttttggcctaatattttttggcttctaactttttgcgtcagtgtcacatacattccaacatcattaaatttcaattttgtgacttccgctagtggtagaaatactataacacatattcagttgacatggtgtattattaggacgacttatctggtctggtatatatggatgaaaaaccatgatttcatgttttagccatgttaatattttgttgtttgagatggtaccagctgcacaggcaagggagtgcgagacgccaagcaac

SEQ ID NO: 10425 - DNA, 300 bp, Oryza sativa
  Intron number 2 from transcript LOC_Os07g27670.1 (locus LO C_Os07g27670) derived from phytozome v7.0 (chr-ID Chr7; po s 16147729 to 16148028)
gggcagaaggacattcttggcgccaggtttgcaaggtataacacgacaagtctagattgacggtttcagtaaacctttgaagaacgtttggtttgggttgtgaacttgtgatgacttgtgagaaaccttgcaatctccggctgcaatttttttcataaaacgcaacgcaacttttttcgttgaggatcaataggaatctgtgtttttttttgggtcaaaagcaacaaaataaagaataatcataataaattgagcttgaaagtgatctgaagctgtctgtgcttacaggagctactacag

SEQ ID NO: 10426 - DNA, 358 bp, Oryza sativa; identical to SEQ ID NO: 9865
  Intron number 2 from transcript LOC_Os07g11150.2 (locus LO C_Os07g11150) derived from phytozome v7.0 (chr-ID Chr7; po s 6150603 to 6150960 reverse strand)

SEQ ID NO: 10427 - DNA, 597 bp, Oryza sativa
  Intron number 1 from transcript LOC_Os04g24020.1 (locus LO C_Os04g24020) derived from phytozome v7.0 (chr-ID Chr4; po s 13715948 to 13716544 reverse strand)
actcagcaggttagaccaaatcaactagccacgccagcgaaaatcacccacaaaatcaccgagggagtcattctgcactggtttcaatacttattgggtcaaaacgaacctctatttgaaggagtcaaagtgaactttttccaatctgcccgaaaaaatatctgtgggctttgtagaaagtagaagacacagcccaataattaaaaggactaagttcaccggaggtccctcaacttaactgttggcagttgctaaatgccaattttatgccgccaatatgttatgtggggaattccctttcagcggtgcgggcggacggacgaacaccgtgccggacgaggaatagtatctcgtgccactgaattcggtggattaggatcagcttgataatttgtttctgttatcccttttaattagcaagtttgttagctaaagtttgctagcatgtaaggctacttaagccgtggattgttatggttaaatccaagcaagaaatttaatctcatctactgtctccttcctctgttctctctaatctctccctctctgttccatctcacagcacggcgccggggaggcgaagctattgacctcgtc

SEQ ID NO: 10428 - DNA, 781 bp, Oryza sativa
  Intron number 1 from transcript LOC_Os03g18510.1 (locus LO C_Os03g18510) derived from phytozome v7.0 (chr-ID Chr3; po s 10372400 to 10373180)
acgaggagaaggagaccggcgctgacggacaggaggttgtgttcgttttcttctcaaaccatcaaagacttgctgctcatgcctgcgcttgcttaaatgtgtaattttttttgtgctataccatgaaccatagatatgagaagtagtagtttgtgtgtctagacggcttaggctgatatcttgtgctgaattcacttaaatcttatgtgtttatgcatctgtactactagtctacagtaatctttctggggtaattaggtagtacttccttttttagatgaactttatttggcattattgaatttgccccatatggaacttatttgctgtgggatatagtaagtagttagtggcttatagtatataatgtggagtggttaatcctgtcttggtgggtcttgttttattgatcatgcctatgtagtttgatggttgggcgatttttataccttttacattgtgtatgtagttcaagcattttatattggcttacactctctagagtttacaggagacaatatgtggttgtatagtttagagttggtaaatgtggttaatagctgttcacgcattatacatgacaagaaaaaattggcgcactgacttgtgttctaactatttttgcaattgtatttgaactaacatcataacaatactgtgttgttgaaatgcattctaaaactaactttggcatgattacattttaagtatttttttccttacaatatgcttaaatttactggcaggtgactaaggtggtgcctgctgtcacccctgaggt

SEQ ID NO: 10429 - DNA, 781 bp, Oryza sativa
  Intron number 3 from transcript LOC_Os07g07780.1 (locus LO C_Os07g07780) derived from phytozome v7.0 (chr-ID Chr7; po s 3906513 to 3907293 reverse strand)
aaggcgcagaggttttcttttttactgatttggtctgaatttatcctgttttctagctccaatttgtgttttcatcagactattttgatcaatttgaaattttcggaccttgccaagcaggccctgatgattatttttgaaatataacaatttcgtgtatctcttggagaattataccgctaaagcgaaattccaacctgaattcccctgttccaaaatagtctgtcccaaaagagcatcactgaactgtaaagtacatcaatggcgatgctaacagctttactggtgattcagaaatgaattacaatctcattgaaatggaaataaataaagaaacacgaatattaggtaatgacgtaaaattaaataattagaaggggtgatgcgtcgaacccagatcgtctagcgcaccaccttgtgtagttaaccggaaaagtggaaataaatcaaaacacaactttcacatatctaatgtaacatcgtacacctgtagtttgatatcttcagttcttctgcctcacacattgtagtcagcggcctgaggagtaacctgaacctgacgatggctacgcaagaaacatgagcaaaacggtgagtacaacgcgcgcacgacgtcaggctcgctccgccaccagatgtaccccagtacaactaacgtagccatcataaatatcggcgcgaaaacatgggcagacaatcctgcagccatctgaataaacgggacctccagtatcatgataccaaagatgagggaaactctggctgcaacttttgacaggaa

SEQ ID NO: 10430 - DNA, 988 bp, Oryza sativa
  Intron number 1 from transcript LOC_Os08g12820.1 (locus LO C_Os08g12820) derived from phytozome v7.0 (chr-ID Chr8; po s 7590790 to 7591777)
ttctggcccgagatctccaccagcgtccccgccatgtgagttgctccacccccacccaccttcagctgtagttttccctccccgccggcccgctgcgcccgatgcggcgtttcgcgcgattcggttcgattcgtggagtggggggttggggtttggtgctctatgtatgtgatgatgatgatttggatgagaggtggggttcggctaggaaggtgccgtgtggagggaggattcatgcgattagtgtcgtttggcctggttagattcgatctggcgatttttttggatgaaccctaggttggtttgatctgttaggctggagatttcgggaggggattataatgggcggttagtttcactggtactagaaaacctaggctttgtgtatggattatagataactcaaacttccctaactgttgtggttcattcatgtattattcttcgaggagttgctgtggtcgagaaaaaatattaattttttaaaaataatttgcgtttaggctcggattgccaaggcttttgtttgaagggttctaatgaagcataattttaatctgaaaacgagcaggtggagcctaggttgagacttctttttttctgtttattatggttggtttgaggaatatgcataatccttgactttgaagtgtctgaattgcaagactatacgcaggaacattttgtttgatctttagcgcttgtcctgtcaagtaaaaacattgagctaagacatgtgtcgtctcgtttcttgtttatgatttgttcatgggatttaatgggagctagatacattggaagaggcatgtccattaaatgttttggcagttgcaatttggtattatagtttctggaaattatgttctttattcattgtcacttaataacttggtagaacttaatattttcaaggacttctctattaagcatgaagtgtttctggttacttattttataatgttatatacttgttacagtgagagcttat

SEQ ID NO: 10431 - DNA, 708 bp, Oryza sativa
  Intron number 1 from transcript LOC_Os07g29930.1 (locus LO C_Os07g29930) derived from phytozome v7.0 (chr-ID Chr7; po s 17619632 to 17620339)
cagctgtttcttttcctcaaggtaaatacagactttgtttcaaattatctgtcgttctacttttatcctaactcaaaccatttttgttttttcaaccatcagtttttcgaaatttgtctattctaagaagtgaattatatgtatatttttccaagtcttaaaaccttatgacatcaaactatatgaacttttaacaatcaatgattaaagagtagaacaaacaagtaattttaaacaaagggagtaatataatactcataatccactccttacaatattaatcatccgatgtagtactacctctgcctctagaacacctaccgttttaaccagtcgaaaacatattaagcaggaggttaaaataacagctatcctttcattaatgtgaagaggaataacgaggagaagaaagaagtacaattcaagggtataaaaactagatgacaccccgtaagttgctacggaatatttgcgtgctaaatagtttctatctttgtaaggatgcgcattttaagaacatgttagaaaagaagatgaacgcaatttcgaatttaagttgtcatgcatatattaattgagaaatctcaatatacatgcgtatcaaatagtacagtactatacatttaggttcaatatatgagtgtgctgcaaagaaagagatattagtcactcaaattttctagaaaaaaaaacttcaatgcagagtga

SEQ ID NO: 10432 - DNA, 744 bp, Oryza sativa
  Intron number 2 from transcript LOC_Os08g07340.1 (locus LO C_Os08g07340) derived from phytozome v7.0 (chr-ID Chr8; po s 4111669 to 4112412)
atcaacgaaatcaaggatctagtcgagaaaaagaggtactgatatatattcagttattcaatcatggaaggctggtcgcaaagattgctgcgatagttagttttggtagctttagaatgctttcttaatgcctaactagtgctatgtacacttgtattctactccctccaagtatggtttccaaatttccacaggtaaccacgcaaaaataaaataaattaaaaatccatagataaccttttgccaaaaatatgttatgctccttccctccgaattaacaatttatacttaatcttgcacaaagaccgaatgctagtctaaatggatgtgcctataaagcacaaagtaaaactgttttgagtatggaaggaatgacacacttaaaacaccttggaatatgcaataaaccctctaaaaaatgaggacaaccaaggaggaacttagttgtcaaataattagaacaaattgtgagtctgttgagaattgaacacggaacttggggttgaaaccacacaccccttgccactgtactatcaagcattatgaaaaaaaaaaaacataatgctaacctttacttctcatttcaacatacaagggtaactctcctgcttgctgatggttgataattccttatagctgacatgcttcttccttttatatattctttcactagttttagttactaacttgtggctcttgcattatcattgagatgtacaggtgctttattgttgttgacgacat

SEQ ID NO: 10433 - DNA, 1001 bp, Oryza sativa
  Intron number 2 from transcript LOC_Os04g20270.2 (locus LO C_Os04g20270) derived from phytozome v7.0 (chr-ID Chr4; po s 11317853 to 11318853 reverse strand)
agatcttcgactctcctgaactcctccacaagaaggttggtttcacatgccattaaacttttacctccagtttgtggattctttgcttcagggtggcaagttacgagggaatcatccatgggttttgtattttttttgagctaaattatgtggtcaaattgattcttttaatgggttttaagcatattttactttagatttttggacaaagtgagattagcttgaaatgtagtcactcaattcttttttattcatcagtttgggcattgacatggtccataaccttttccattttatgattgtgaaaacttttaaaagtataatcatgttgaagtacttttggtaagaaatacgctaataccattttcatatgacaaatctaaatagctttactggtaaaaaatatctttgaatgttgattacatgcattctggtatgatgagtagaacataatggagagtatactaaacatgagtgaacttagaagagagaaaacatttagcctttgctgttttttacccttagagctgtatgtgggtataatgcagagcatgtgtgtgatctttgaaagaagagagttctttattgtctactcaaagttgatccctttaatgtcatttcctggtggcaaataagttgacacctactgtctttgtttggtgcctgagttctatcctcatcttataatttgatcatgaacatgttagcataagttatgctcggctccatgacagtactgaagcaaaattgatatcaataatggttatggcatggctccagcgctcaaaatatcctatcgcgctggaaaatatactaaaatgaactaatggctgtgaaatatctggcaggcatttgatctatcctcttgtggctttgtacactccatgttgtagtcaatatttctatatactgataggggtgcgccagtgaatttatttcacattttagacatgttttaatttttttactgggttgttgtccagatagaagagcttgcagtc

SEQ ID NO: 10434 - DNA, 828 bp, Oryza sativa
  Intron number 1 from transcript LOC_Os08g14570.1 (locus LO C_Os08g14570) derived from phytozome v7.0 (chr-ID Chr8; po s 8759549 to 8760376)
gcacgcagaccggcaccgccgagggcttcgccaaggtatccatccatcgattgctaccccatcatgatgatgatgaattgacggtgaattgtttcgaattgtttgcgttcgaaataattccaacaatattgggatgattctaatttctaagtaaatactcctttcaaaataaaaaataaaaaaaaaacgaattctattgtaagggacgcgtagttgttgctgatttgatcgatggagacttttgaagatctttcaatcgttttcctacacggggaccaccttcgcgggagtaatatttctcgagtccatgaaaaattgctctgatgatatttctccagtttgtggtgaatccatggaagaaggacagattttatcacattttctggtgtggtttatgccacgtctaatcacttatttagcgccagaaaaaaaaatgtgtgtacaaaagagagaaagtacaacctcatgggctagcgtcaaggacatctgggaattgagatggcgattttttttttagttgttgaccaaaactaagcactagaagcgtcctggtctggtagggaggacgataggttatcaaagtgtcaactgtcaaggaggttggtggcctaaaacgccttcggctccaccactcatttaccattttcttctttgattgcaatcgtgtctcaccagaaactcatggcgtgtgaataaggaagacaaggaaaaaaaaatgaaaagcaattgccttttttgtattttggtaccctgttgtagctaataatgttcttattgttctcctgacttacaggcactcgctgaggaggctaagtcaagatacgacaa

SEQ ID NO: 10435 - DNA, 960 bp, Oryza sativa
  Intron number 1 from transcript LOC_Os03g61680.1 (locus LO C_Os03g61680) derived from phytozome v7.0 (chr-ID Chr3; po s 34951076 to 34952035 reverse strand)
aggaccgccagctcgattcctcccgcgtccaatccgtacgtttggttcatctccaacctcaatcccttctagattactcatattagcggcctcatcagcgtggaacatgtatagattgattgtcaatccgttcagtggcaagcaacggagtgaagagcagagctggataatttagatgtttggtagactcatgatggttcactaatgtctattggtagactcacctcgtaatagccttgcctagaggaatttcgtgcattttattttttaggtccttgtatttcagttgtcacctaagtattgatccaataattacacatttcacgtgcatctttaacctgagtaagaacagtgtggcattttcagtacaaaagcctctaatcccgtgtcattgctattgtcttcatgcacctactacaagcactgccatcatcacaagacgccaaactgtagcctgtagagcgatgagcttaagacttcaaattctgtttgtgtagaaaagatcctgtaatttgtccatccctgttacagggtatgttctgcacataaaaatcaagacacacggcagatgatcttgaggccagaatgatgaaatcctttttgcacggtggtgtgtgtgagcctgatttttttttcaagttcttggtgggtgataatgttagatagattaatgggtattttgcaggacaaatcaggctgatttgtttttttcatggtttttagctataatttagtcatgcttggcttaaacatgagcttattttgaatctgactattttattggaatgccaataattttccagatataaaggtcctcataaatttctaattatggtatcagtaatccgtgtttagcccttgacacatgatctgcttacaaatatttaagggattatgttgacaccaacttgccaattaagaaaggtgtttgtgcttaatcgtctctttcttttgcaggct

SEQ ID NO: 10436 - DNA, 545 bp, Oryza sativa
  Intron number 3 from transcript LOC_Os08g09210.2 (locus LO C_Os08g09210) derived from phytozome v7.0 (chr-ID Chr8; po s 5341691 to 5342235)
cgataagtacaatattcctacagctaaggtaccttctttttacattagttttcagccctataagtttaatctttctgggacaatgaacatttgctccaatgagagtacggggtgcctaaatttggttgatgtgatatccatgtttaagaaagaaccaaagatgcatcatttcaggcataatcacactgatatttcctttgtattgttacaaggttgctaaccaagttcatatttgacttgcttgatagtatatcagttatagacaatataagtaatcatctcagagttaatgatatatcttcagctttctaggtgaactgtacttaagcattgcccatatgtcctgaaatttcccttgggattgcctgagttttgaaataaagtcattgtgttgtactgtaaacgttctagaaaagatagggaaaaacagagctcctctacataagtctatatgtataatttgagatgttaataataatggtaacataagtgcttatatttcttttatagtatcgcacattcacagatcctgcagaagctaaaca

SEQ ID NO: 10437 - DNA, 792 bp, Oryza sativa
  Intron number 1 from transcript LOC_Os05g04560.3 (locus LO C_Os05g04560) derived from phytozome v7.0 (chr-ID Chr5; po s 2122843 to 2123634)
tgtgaggttggacagccaggcaaccgtgtatacgtgccccacaactaatccacacatctgtttttgtttgtcactaaatattgctcctactgattgaaatcattagccaactatatatatatatatatatatatatatgtggttaatatttgtggccactaatatatacttatgtctcaatattatgattataaacctaatgaataacgacataataaaactatttttcaagacttttttttgcattcatttttgtttaaggaaaaaaaaaaggccagcaggaggaatatatgcaagaagaggagtacatcatactcaaaggaaaaaaatatgagataacaccgataaccctgagaagagattgacactatatccatgcaacccacgttaatggtaccatatatagggatgtaaacatacaatttaactacctggataaaaactcgcttgcttagtttttacttactagtataaaatttaaaagagacaattaataggatctgggaagcaaagaaaaaccgattgctggtcacactttacatatttagtactgcttacactcgaaggattttagctttagacaacctaaaataatactcactttattttgaaacatctagtattccgtcctagaaaaaagcaaatcctatgaatctggacacgcaaatgtctagattcgtagttagaatttgattttctttttttatggaaagatactacatatctatatgacattggttagtttatttttaactaaccaacgtcataaataaaatacgtagcaaagggagt

SEQ ID NO: 10438 - DNA, 789 bp, Oryza sativa
  Intron number 1 from transcript LOC_Os05g51830.1 (locus LO C_Os05g51830) derived from phytozome v7.0 (chr-ID Chr5; po s 29692795 to 29693583 reverse strand)
gagttctggggtaatctcctcctctacctctctctcttcccctccctctctccatccatctatattgcgcagtttcggtttttgtttgatttgatttggacgcgattcgtttgatacggtgtttggttcgtgcgcttctcttcgttacggattagacgcgattcgtttcaccatcgagtgttttgggttcgcgcggaatcgcggccatggctcttccctgtcttcgttagggattaattagggattttagttttcatgggccgcgactatttccatcatacatgcgtaaccgcattggttgccgcctttatgtttgcgagaatcatcattttgttcattctgtttctgtttcagttaacacattctgattatcttcagtctcatagttgttatcatatattactacagtacttaccttgcttcggccccatcgtttggcatatttacgaacgaaaaataatttgtgaataaaacttagcgatctaaaagaaaaggctgaaaaataaacttctgaaaacctccaaaatcaactccaaatttaagattgaaaattcaaattttggctgataagcataagcggaaagataaggtcgcttgtttctatgggccatcctcgttaatttactatgctagttgcttttcaactttactagctaaaggcaaatatgaactgtagtatactgtttcattcatgccttcttggaagggaaggactactctatacatgtgtttttcgctgattagtcaaagttgtgcaggtcttgaagtcaagcctggacagactgtcaa

SEQ ID NO: 10439 - DNA, 786 bp, Oryza sativa
  Intron number 2 from transcript LOC_Os08g17650.1 (locus LO C_Os08g17650) derived from phytozome v7.0 (chr-ID Chr8; po s 10795102 to 10795887 reverse strand)
atattactggactatcaacccttgaaattaataaggtatataaacctttgaatttgaaataatctattccttgttctccatgaaccacactggtcttattaattagttctttgatccttcccttttaaagtaaatgttataactgacttacaattgcctatatataaatgttgaaccacgaaagaactgccaatgagttcggctggtcagcatgcaacccggtttcgatccccagtgtccaaggggacccctcagttaaaaaatcatctagttcaaaataaaagaaaatgtagcaagaattagatattgcaaccatgtggtttatgtagaaattactgagggttgagactaggagctcccaaatttcactttgattaactgtaacattttgcatattgcaagatcttatgcgtatgttacttgcagttgtattttctatcacatggctctctattagcctgtaaaaggtcatgagcggtgtactggctactgctgtttgctaaaatatcataaactcataatgtattatctagacttgttcttggtagtaccagactgataatataatgcggttaatcttactgcgccttatacatgcttgcatttgttttggaactttccaggcttcttctttgcactagcaaagtgtaaaccatgtgtttggtgtttgcacaaggaggaaatgaaataggaatgtatttcttttgatggtatgcaaggaacataatgatcatcatgtatcaaaactctttatgcagcaactttctggagttcgttcatttggct

SEQ ID NO: 10440 - DNA, 969 bp, Oryza sativa
  Intron number 1 from transcript LOC_Os03g29920.1 (locus LO C_Os03g29920) derived from phytozome v7.0 (chr-ID Chr3; po s 17045973 to 17046941)
gcaggcaaggtaggtacctgcaagttaactccctgatgtatattattatgagttggtggttgccttcctcttgtggatttcttgatttaatttgctgcaaatttgcactgtcgtctatcgatcgatcggtttgtgcgttccaaattcagctctgcaatggcggctctgtgtgccagtagtacttgcccagttcatcttcttgttcttccatggatagatgatatacagtagcatacttacagctgaggcagagtgaagacgtacaacctctcgtccaatatataattaattaaatctcttgtgtgttttgtatttcgattcgatcgactcatcttggttgggaattccggcagttatcaacttctgattccacaactagagtatcaggttcagtttgaagtactgtatgtatgaccgtgtgagtgcttttttgtcgggacagcttaaaggataatggcaagtgaagtagagagcaagcaaaccgacacttttttttctttctttctccctctgtttgtgctgcgctttaaagataaattgaccaacaacctaactgcacatcaggggaatggatatgtgtggctcgtgcaatgcaaatcagctgtaatcctcaatcagttttgagttagctatagctaggattaatgctcactgatgtagtgatgtctactcctctgcttctataaccttcaaagaaagggaaaaagaaactcctctgcttttctaaccttccaaaaaaaaattcttctacttatcttaaagaatagtagtaccatcatagaactctatactttcagacaggttaaaagggctaattaaattgtatcttagttagcattgcctactgttgttctctacttctcattggacatgatggtctagtgttcttgttacagtgattaatcacccacatatgtttgtgtcgtcatactaacaagttgtatctctgctttgttgatctcacctcag

SEQ ID NO: 10441 - DNA, 397 bp, Oryza sativa
  Intron number 1 from transcript LOC_Os04g04100.1 (locus LO C_Os04g04100) derived from phytozome v7.0 (chr-ID Chr4; po s 1889056 to 1889452)
aaggtgataaggactacattccccgtgagaaaggggtaggtacaattaagatcgtaattgtgtgagtgataactagtagtgagtagtaattcgaaagtttcatacctactcgtagaaaacggggccacggagatcaaaacggcagccgaaaaagaaagacaaggcacaagaagacgcggtcccagctaagtccaccggctcgaagaagaaagataagacgcaacagccgaagacacaaccatatttcgaagatctgcacaccatatatcatcgggaaaagatggacgtcaactatatcggtgcttagtgcctgtgagtatgagtgtacattaattacacgacggaatctatataatacataaccatgtgattattactaacaaacttcttttgtagg

SEQ ID NO: 10442 - DNA, 974 bp, Oryza sativa
  Intron number 1 from transcript LOC_Os07g31340.2 (locus LO C_Os07g31340) derived from phytozome v7.0 (chr-ID Chr7; po s 18554656 to 18555629)
ggaacacgtccggctcccacatcgttaaccacctggtgcgtgtccctgtctttttctcgtgctaattacggtcataacagcttagggtcataacagcttagtttctttcagttttaagatcaatccatcgatcatatgtgaattcggtaggagtttgccgccaacctaagtaggtgacaagtttgtctcgcagatgatgatctcttgtagcttgataacattttttggtggcctatggtgccaaaaaagtgcatttagttcaggatgcggcaatcaactatattgaagagatgaattattgtgattgttgaattgctttcatctgcttaggttaatcaaatttgattgttttgataaattgctcaaccagtcagttctcccctcatttttggtaaaatttatgagcatgctggatggaaattctgaggattagcttgccagctcatacaatgaaaattttcagtagcgaaacgattttttttatttattggcattttagtgtagaatactcatgtttaaaacttgatagcatgctttgtcccataagggcatttatgtcatcaggatgccttgtccactaaaattatttgttcctaattttgttatctgtggtgcaatacaaaaatttatgataaattgcaatcctacatcttttcttttgaaatcaattgtgctacatggcaatttgctatcatgtctgcgggtggttagtagaattcaactttggttcaaaaaatccagggtcttctataggggatttctcaggcgttcctgaattacctatgctattttttgcagaccagcttaggctttacagactacatagaaatttaatggtagaaattattggtgtcacttatttttagcctgttactgctttcgttcagtttatttcatattttatgacttaatttttacaccgctgtgtattttacacaggttagagcaaaacataaggaagtttgcctacacaa

SEQ ID NO: 10443 - DNA, 969 bp, Oryza sativa
  Intron number 1 from transcript LOC_Os03g01940.2 (locus LO C_Os03g01940) derived from phytozome v7.0 (chr-ID Chr3; po s 578496 to 579464 reverse strand)
cgtcttcgcccaataacgttgccgtaaaaccccaggtaagttcctactgcttgccctaatccctcaccatatctttttctttcgatcattgatccctgtccacactcttttgggcttgggatttgatgctctatgtatgtgatgatttgaatgaggggattcgactaggaaagtaccgtgtgaaggatttatatgatattagtgtcgtttgacctgattagattcaatttggcttttttttttatcaaccctaggtttcatttgttaggctgaagattttgagaacaaattataatgggcggttagtttcaatggtactagaaatttcacctaggttttgtgtatggatgataactcaaacttccctaactgttgtaatccattcatgtattattctttaaggagttgctgtggtcgattttttttaaaaaaaaaactaatttgcatttaggctcgaattagcaaggcttttgtttgaacagttctaatgaagtataattttaattggaaaacgagcaggatagaaactagattgaaacttttttttcctgtttattatggttgtttaagaaatatgcataatccttcacttttaagtgcctgaattgcaaaactatgcgaatgaacattttatttgacctttagtgcttgcttatgatttgttcacgagatttaatgggagctagatacattgaaagagacatgtccattaaatgttttggcagttgcaatttgatattttagtttctggaaattatgttctttatttattgttacttaataacttggtacaacttaatattttcaacaacttctctattaagtgttacgcgtttgtggttacttattttctgtatatacacttttgtcttcatatatgtatctacatacacttgcccatgcacatctaattccaatattaatccattcaatgctcatatttcaggcgatactgaaacagatccattg

SEQ ID NO: 10444 - DNA, 580 bp, Oryza sativa
  Intron number 1 from transcript LOC_Os06g29594.1 (locus LO C_Os06g29594) derived from phytozome v7.0 (chr-ID Chr6; po s 16968368 to 16968947 reverse strand)
cgagaggaagaacaggaaggagaaggcattgacaagtaggccccactgaataataactccctttttcttttatttgttttttaatctttaagagctcatatctcttcaaccacaaatccaattccaagaattctttgatctaaattcatccaatttcaaatcctttattttgataccaaatttcctatttttaaaattttatttaaaattctttatttaaaaaccttttccttatttatttatttatttactttctaattctaaatttattttaattaacctttaaaaaaatatatatattaaatttatttgatttattttatatccctttaattttaaatttcttgtttgaaaaacctttttaaaatttaattttcctttaatttctttaaatgccatttcctttcaaaattcaaatatcttttgaccttttgtatttgcctctcttcatactccaattttgttattttcttttaccatttatttgtagtactttttttttcttataggttttatttgctatcttttacgtatacgtacgttagacaatacagaagatctcatcgacatcacaggagct

SEQ ID NO: 10445 - DNA, 483 bp, Oryza sativa
  Intron number 2 from transcript LOC_Os04g41410.1 (locus LO C_Os04g41410) derived from phytozome v7.0 (chr-ID Chr4; po s 24366930 to 24367412 reverse strand)
gaagtcctctaactagaatattgcaggtaaaaaatcatatgccacaattatatacgtttgtcggtctaatttggtatgcatgttaattataacgaatttgtgtatgattgatttattttgacgccaactggttagtgttgctttatattatccacgatccattttgtggaagtcaaatatatacaagaaggatgctgttatccaagttatgttttatactcttttgtctgatagcattacattgcattattctaccttccatgcttattgctggaaagtcaccatgcctatttctagaaatttcagataacagattaattacaagcaataaagaaattagggcagtccttccacacatcaatctaaaacaaaattgaatgtagcaagacaaagcaaggaaaacagaagatcatattgttttgaagttgtattactggtacctttccaggttcttgtcacatcatcaaagaagaggcaggctgc

SEQ ID NO: 10446 - DNA, 701 bp, Oryza sativa
  Intron number 2 from transcript LOC_Os02g57040.1 (locus LO C_Os02g57040) derived from phytozome v7.0 (chr-ID Chr2; po s 34924826 to 34925526)
tctgccacaccgaccactacacctggagcggcaaggtttctctctctctgtcccaccgactcttactcgccgtgtttcttcgaaatctagatttctcgaactcgccatttacactggtagtagggtagtatactctttccaaccacgtatctggtgatggtagttggtgaccgcactggatggaacccgattcatttttttgtttaattagtggattagtatttaattgtcaagtaacatcgttatgttattgtttcaaggatttaggtgtttcttcagattattatgaatgggaagattaaacaattttgtactagaggactctgggtttcttctaggcttctagctagcgttgcatgagttcgtcctatatttttattttccttgactgcaaaatgggtgtagattgatggcaatcatctgtaggaaatcaaaattactggcagaaacctggaagtgttgagtatttctacagtggtctctactggcaagcagtagaccatcagtattctcgtcagtagtagcatctaaaccgttgacttgagttctactagtataatacaatattctaccgccagtagattactgtaccttgtggcaaatgttggcaacattattatataccaaccaaacaggcccttatcaagtgatttacgtgccatgcaggatcctgagggtctatttccttgcattcttggtca

SEQ ID NO: 10447 - DNA, 686 bp, Oryza sativa
  Intron number 2 from transcript LOC_Os02g21250.2 (locus LO C_Os02g21250) derived from phytozome v7.0 (chr-ID Chr2; po s 12609636 to 12610321)
ggagaattctccaaggtaagtggattatcatttgttaatatgtagttgcttggtaaccggtttttgcaaaatgtactgggtgttaattactagcggtggagatctggtcatcatgaatgagtgaaactattattactgcggcaatgccaaacatgccagagtatggttgtaatgttttgtgtgaagatcaaccttaatattgaatggcaatgttaaatctctcttgtatggagctaaggagcttgagtacatgttagaatgctcgttaatcctgtattacatatttacatgtcgaaactaaaatgtggtaatcgaagctttttgttaagaaacactattatatgagaaatggaacccagtaggattgctattagatatgatatattcaatccatttgcttgggtgttcaagtggcccttatcgatccagtttattgttttttttaaaaaaaaaatacatatcatttatttttatttttgtactctttactgaatcagcattcttatttgattcattctatcaatgtttaactttgtttttccatgcaatgatgcttttgttgatgaacatgaaatgcagcattaagtaactttttctgtcctttgcacaagctcatgtaatgattcatgattgtccattttcgttacacaggaatcttgcccttctgtgaagaacattttgcttct

SEQ ID NO: 10448 - DNA, 855 bp, Oryza sativa
  Intron number 3 from transcript LOC_Os02g21250.2 (locus LO C_Os02g21250) derived from phytozome v7.0 (chr-ID Chr2; po s 12610435 to 12611289)
cacgctcagaaggtatttcattcttagctttgttgcatgtgttatccctccataccatggcacatgcttttgccactttgacaatttggcacatcacacattctgcttcatgaatatagcctaatatgtcgtactgtcattatatagagtggattcatatttgacacctttaactgaaatttcacacacatctagatccagtcttaagttgagcccatcaatcattatactgcttatattactctgtaagacgcttgcatctccttggatgttcattagaactggatgtgctttaagtctcactccaaaacattttagtaggaaactcaaattgttttatccgttgaatgtaatggatcggtcaggttaaccaaatgtagtacaagatacatgtcagttttctgtctttcgacataaacaggagggaagatcccttccctactgaaaatatattaataaaaggatgtatgtacaagggagaagaaagaatatacaaagagcaaaatatagactactcagccatgcttgttaaaaaaaaaacacacctagcatttactcccaaggataactaaagcaaaataccttggattccctttccaagctttcaaggaaagatatccttcatataaaatgatactgtttcaatggtttgaaatcatccagcagtctgttatgattatgttagtttgctgttgctagcaactcatttttatgaacaaaaatcttcatatttatgctcaatgttataattatgtctcgatatatccacttttctgatctttattctttagttgaatttggaattttcctttgatacctgtttttggttctctccagctgagataacattgtttg

SEQ ID NO: 10449 - DNA, 865 bp, Oryza sativa
  Intron number 2 from transcript LOC_Os06g38320.3 (locus LO C_Os06g38320) derived from phytozome v7.0 (chr-ID Chr6; po s 22699037 to 22699901)
tgactgcgatttcggtaattcatttatctctgtgctgtactttgcgccctcttcaccaactagttattttgttacgaaggaagtgtttacaagcagtatgattagaaggaattattttctggagcgtgaagtgaaagcggcagcagtcaattgtttgcatgcattgtacaaaagtgcaatatgttctaccattttttaaatctgttatttacgaataaattcaatgttgccaaaacatatttcataggagatataatgcttggagttagaccttttttttttctgtgtgtactcaattgataaaatgtttgctaaatttgcgaatctggtgaaattttgatttccaccaaacatagttcctgatctgtatgagggaatggtatctaactggttgaagctttaactaaattgcatgacgattgatctcagatatgaaatgatagtagagaagttttgttgtattatctctcttaacatgtattttttttttgtgtgtgtgtgtgtgaagtttggagcttttgctgatatttctgctccaactccaatctgtgtaccactgaaaaactaacagagaattcttttgtgtgtcttatcctaattagctcctttcccctgattaagacaaacaatttctagattccaccttaaatatatacacaaactaaaggatatttggatctgcaagggttgaccactcaaatgctttgctctacatgatataaataatgtaaaagaaaatcattatttatttgtccgcttcatgtatggagatacaattttaaatattatttcatcttgatgtgagctagagatgttcttgcatgttgcagacttgggttatctacaaggaagtaaattggattag

SEQ ID NO: 10450 - DNA, 828 bp, Oryza sativa
  Intron number 3 from transcript LOC_Os07g03140.1 (locus LO C_Os07g03140) derived from phytozome v7.0 (chr-ID Chr7; po s 1203599 to 1204426 reverse strand)
gctcctgccactctcagcctttctcattcttggaggtgattcctttttctctcttcttaggatgcaatgaaaatttctcagattgctcttgttagattactgcatttctttcagaaatcaactttacagagtgttcagaagttttttttttttacacaagaaaatatcagcaggaacttcactgactgttcagtctgtaagaatttctttgataattcatgaaatttgctcagattgcacttgtttgattgctgcatttctttcagcaactaattttacagcttattgttcagaagtactaagattaacaaaagtattagcagaaacttcactgaaactgaatgtgtaaaactagcattcagtattagcactgaattttgttacattgtaagatcctgaattctgatattaactgacagtgcttgtgttcatgagcaggaaggatgccgtgaaatttgcttagattgcacttgttagattattactgcatttctttcagaaattaacttcactgattgtttagtctgcaaacattttttttaaagaaattctgcaagaaattatcttgataattctaggatgccatgggattcagattgcacttgttagattactgcatttctttcagaaactaattttacagtctagtgttcagaagtactaagattaacaaaagtattagcagaaacttcactgaaactgaatatgtaagactagtgttcagtattagcactgtaacattttaagaatctgaattctgctattaactgacagtgtttgtgttcataagcaggaaggagaagcagcaccatcaggagtggtaagctt

SEQ ID NO: 10451 - DNA, 1019 bp, Oryza sativa
  Intron number 2 from transcript LOC_Os06g47460.1 (locus LO C_Os06g47460) derived from phytozome v7.0 (chr-ID Chr6; po s 28742696 to 28743714)
ggacgaaatcgaagagggagggggcgagaggaggtgtaagtcatctccaaggccgtcacggcatcgccggagggcagcgccatctgccgcacgaatgtgcaccacatcgacaacgtgctgccccaagaggtggtgggggtgaagttggatgacaaggcaaaccatacgacttgtgtgtttgtcgacatggccagtgacgacgatcacgccattctcagggtggtgcagatcattaagctatttcacttacatatggatcccacgtggttatttttgcttcttgtcccacgtcagcgccacgtcacccaaaaccactttcaatactgccttaggactatatttgcgctggttttggaagatgagggatgtgttatacccggatttacggtttagggaagttattcagactcaacgtcaagatgagggacctaaagtgaacttattccttcttaccacgcaagtagaacgggcatgggctctatcttgggtagaggcagatctgcttaccggtagcttcacggcaagttgtgcaccgcagctggaacaaggacgtaccaaaatcattatcaaccaaaaacaaacctcagatgcaagagatcacccccaaaccccagattacaagaacaaaacacccccaaaccccaaatcacaaggaaaaatactagtacgccacccaagaaaagagctagagctagtgcatacgtgtaaaaagtatgccgtcgcggctccgttgaaaactcccccgatgggatggacctcgaggactccctccatctacacggcggcgatgagcccgtagcgaggcatggtgagagatgaggcggcgcacgttggagatggggagagaatggagttgaggaggaaaggagcgcaccagacaagaggagctttgagataaatctggggtggtgtttcgcatctgctttatctcacggtgaggagaagcaaattaaaccagtcctgacacaagggcggcgaaaataccacacactactgcattgtacaatgttatggatcag

SEQ ID NO: 10452 - DNA, 440 bp, Oryza sativa
  Intron number 1 from transcript LOC_Os07g07920.1 (locus LO C_Os07g07920) derived from phytozome v7.0 (chr-ID Chr7; po s 3975653 to 3976092)
caaaggtaataaacttcatctccggtttttcatatttgttgttagaacaaaaaaatttaggcaaaagattaatgacaaagatagtatataagtaataatatatgcgcgagaaaggttaaatttaaaatgtggcatttaaaagaaaacaaattgttgttttgcgcgagaaaggttatcttatagaaccctatgttccaaacgagccagatgtgtattttaaaagtttataggatagagaaacgctcaggagtcttccagctagctccacaaggtgatcggctagatgacctgggtttgaagcctcaccccttctaattatttgatattaggtcattctctaatatttgtgtcttttaaatggtttataagatacggttaatttatcaatattgtttttattttcagatacatcagctcagattccagctgcaggagtaccc

SEQ ID NO: 10453 - DNA, 724 bp, Oryza sativa
  Intron number 1 from transcript LOC_Os03g40130.1 (locus LO C_Os03g40130) derived from phytozome v7.0 (chr-ID Chr3; po s 22297400 to 22298123 reverse strand)
tgtgaatcagccagaccagaggtaattaattaacaaacacatcaacttcttagttaacttgtgtaatttaaatctccttgggttcattcgtgctatgcttaaatgatttgactgttcaattagaccccctttttaaaatgccagaatacattttctacagtaagttgtcctctaaaaatatgttacagcaaagtttgagaggttgagtatactcctatttgacaagaaacagtgatcccaacatgtaattagaagtcaaagatgcaattaaatcgtctctccagttcagccacgtgttgattggacggcttacgttgcggccataagtagttcagtcgattatctactaaccattagcattacaataaaagttttttaaaaaaaataaaaagaaaacaaagctttatagccttataggcagtgatccacttagcacatttcgcggaatggaggcgtcaaaagctattctagctaagcatgcagcctccggatccggatatttgcttcatcgtcctccatccctttcaaagcaaagaatattctaaacttaatttttttcagagtttcaattcaataaaataatattcagaatttcaaaaggacttatatatttttcataatttttgtacacttcaaattttactagaaatataagaaattctactagtatttgctaattaagtggcgttgtgcatgtgtgtaggtgaaggtgaaggtgtgcgtg

SEQ ID NO: 10454 - DNA, 654 bp, Oryza sativa
  Intron number 1 from transcript LOC_Os03g21640.2 (locus LO C_Os03g21640) derived from phytozome v7.0 (chr-ID Chr3; po s 12354088 to 12354741)
ctcggtgagttctgttcttgatgcctctctgtttttctttttttttttctgcgatatgcttccactggagttgtacaggtttcagtaattcagtttgtgttgctagtttgtgctactgatagtaatactaaccacgatcatggcagcatttgttctctgatcttagctttctacatactgtagtacagtagttctttgaatttgtccgacaaggttaatcggtcgaggactggtagtattgagacaattgctgatgttctcagttctctgatgacctggatgagcaggggacagacatgtgtgtccttttttagctgttacctattcatgtaaatagctttttaggtggttgtttccctggtcaataaagtccgagtaagttccccttgctctgtgttgctaatatatgactgatcgcacactaatttcagtgcctcaagatgcgttgatcgtgtatttatatttcttaatctcgttcggcatctcttctgattttgatgctgctgaagttagttcatgactttgtccttagtctgtgtcctcattgctcttctatggatgcaagtccagccgagactgctagatagattctgaacatctttttcttgcacattttcaggctcagcgggcgttgtaatattagagctcagagga

SEQ ID NO: 10455 - DNA, 835 bp, Oryza sativa
  Intron number 1 from transcript LOC_Os04g53720.1 (locus LO C_Os04g53720) derived from phytozome v7.0 (chr-ID Chr4; po s 31830322 to 31831156 reverse strand)
ggataatcgccgccgacgacgacgattcggaggaggtaacttctttactactctctcttgcaagactggtttctttctttggggttattagcggttttggttcaaatggatggaatgcttttgtgagatgttttgtttcggggaggtgtgagagggttgttgcgatttgcgggagattttgattgcggcggatcatttttgaggaggagaaggcggtggctttgggcggatttcgcttaggtagggttttggtggattgggcggttttggggggaagttttaagcgatcgtgggcttgattagggttgtgcattcctgtagtcgaattgtttgattgttgtggagttggctttgccgttccttgtcgaaggcgatgcttgcgtgatggcacactcagttcatgttgtgacaattcttccttctttcaaaattttggcccttggattaatagttaatctttcatttgtgattttctttgaatagggtgctgcattttgatcaatacacttagcctaggaatgcattagtgtttacttccttaaatagttttatgtatcagtttattgcacatcactgtgcctggtttaggcaaatattgttcttgatgtaaaaaagtgttttttttaaaaaaatatttttaggtgttatttgcaacccttgtatgcaccaagttgaaattgtatttcctatctgggctattgcagtgccccttgaagaattaaaccacagttactgctgcaaattactgaatgcatcatttgttcagacttctgacttccaattcacaaattattttgcagaagatagtattcaagtgggttcatcaagataattt

SEQ ID NO: 10456 - DNA, 294 bp, Oryza sativa
  Intron number 1 from transcript LOC_Os08g31040.1 (locus LO C_Os08g31040) derived from phytozome v7.0 (chr-ID Chr8; po s 19161470 to 19161763)
accccagcagtttagtgaggtttgtggtctttcaagggaattggtgagaattatttaataatgttggattttcttttcatgtaacagacagttactgtacctgttaagattctgagtgtagtgcatacaattctcagtttatgtgagggtagatctcaacctcttctatgcaattaaatagcttgaaatttgtaggggaccatgagaacctaccagatcattcatacaactggaacccgaaaactttggtttttgtcagcaacttgcccccaaacgtacacagggcacaagcag

SEQ ID NO: 10457 - DNA, 968 bp, Oryza sativa
  Intron number 1 from transcript LOC_Os05g09470.1 (locus LO C_Os05g09470) derived from phytozome v7.0 (chr-ID Chr5; po s 5320870 to 5321837 reverse strand)
accagagtacgtgccccgacaagatcagaaccatcgtcgtcagatctataatttattatggtcacctagagcatgtttttttatacaatatctattgtgtgagtgtttcggatgttaaattgactacggtttaacgctgggggctcgttctattttcttcagtataaatcatgcttgtttacgatttacataatccctgatatttacatctgctcgttatgtcctgataatactagaagatctatgcagttttttgagtacatactcgatattctctgctatatatcttgccttctagaaaatatttttcagaaacaattgagcacttgagtaggttgtggtcaagcacaccccattatcgagaacgttctcgacaaatacggagttgtcgcacccaacctaccaacgaagaccgacgacctatctcatagcgccgaccaaggctgggctattcgagaaaaggttgttaacgaataaattctcgtgaacgttgtcggcttgatcacccgacatgattgcgagcggacatccggatatgctataagttgggtatatgagtcatgctggctacatgagatgcacatgtaacaaaccaaatttagcacccctataggtgattaagaggctcctactcctggttctcaaaccagtaggacgtagcgatctctcgcacctctacttctagtggtcgagttaaggctacacctggttttcgaccagtagtgtagcaatactcccagtggctttacttctcgtggtcgagttaagactactacctggtcctcgaccagaggtgtagcgattctcccactatttctacttcaagtggtcgagttacgactactacctggtccttgaccagaggtgtagcgattctcccactatttccactttaactggtcgagttacggctactacctggtcctcgaccagaggtgtaacgattctcccgctattttcactttaag

SEQ ID NO: 10458 - DNA, 711 bp, Oryza sativa
  Intron number 2 from transcript LOC_Os03g57280.1 (locus LO C_Os03g57280) derived from phytozome v7.0 (chr-ID Chr3; po s 32659206 to 32659916)
aagtgttctacaatcccgtgcaggtattgttgtgtatatgttctgtatgcgatttttttgggggttatttgatgctgtatgatggatttgtcggctcctctatcttcttagaatacgtgcatcattagtggttggtttgtttcgaattgatcgaatggtgtgagctgcgagcttcaccaatcgtgcataggtaggactataagtttgggttttggctatttgatttgtatgtgattgggtcgtttcaagtgagtggtctctggtgtagccactagagtactagttgctttgcttttctttacgacttgtttgcattgtgttggtcatttgtgttagcgcatcacgacacgttataatcagtttaaggttgtagacttgcagttgctaggagaatatatgtgaagcttcaaaacagccactcgggcttgtttatgctgcattctcaacaattagtatctctagccataactttttcaagtcactaacagcctgaacttttgctatggaggaattgagtaaagggtggttatgggaatgtgatatcatcggcaaattactatgagtttattcatagttaatatttcctgtatctatcgcttttaaaagttgcagagtaattatatttggcctaaaattatgtctaatctcctatcagctactgtgcttttctgtaattcaattttattgcttgattaggtccacaatagagat

SEQ ID NO: 10459 - DNA, 490 bp, Oryza sativa
  Intron number 2 from transcript LOC_Os03g45194.1 (locus LO C_Os03g45194) derived from phytozome v7.0 (chr-ID Chr3; po s 25521921 to 25522410 reverse strand)
ttgtaatctgctcaagatcaggtacagaaatgattttgtgctttcaataggtagcgctagttttagtaattatttttgagtgatgacataaataaaattggataaattatcgagcctaagatgcattgcaaattgatttgcatggtcaagtctcgtttacctgtttctttattttcctctcttctcatttggatgatccattgacctaacactaaaatatgcactatccagcttttgtcatttgatgctcattatcgctcattaggtgctctatataggggtcatctgcttgatatgactgacctgttaaattgatctttcatgaaattttaaaatgaataaacaaatggattgctaggattttcttgagcccacttttagtgagagaatgaaaaaaaaaaaagcaaacaagttacagtttagcctttccttgacatgcagtctatcctctacagctgaaagggtagaatctgcggtgactgacttgaaa

SEQ ID NO: 10460 - DNA, 626 bp, Oryza sativa
  Intron number 1 from transcript LOC_Os03g45194.1 (locus LO C_Os03g45194) derived from phytozome v7.0 (chr-ID Chr3; po s 25522450 to 25523075 reverse strand)
ttctaatcaccggttccacgaaaggtgttgttgagttctccccccctcgtcgtcgtgttgcttcgcatgcttgatcttgcttacaagaaagaagtaggatgtctgtggatgctttttgttgggatgcaatttagtaggagcatataggaactggtggtgatcgatatttctgaaattctgaatgcttgtgttggaaataattcagatggtcagggtgtggtgtggtggcgatgttgttttttcgtgccttatgtagccgagaagagagcaacaccaatttggaagtaggggtggaagtgggtagtgccgctaccagcataagaacctgcttaattagttcatttcctactttctagtacacaatttagaagacaaaatgaactagaacatcagtgcattcggcattgaccttttaatcaaacaatgcaaatcagcttgaaactgtgtggagcaattgctttgatactgtattgtggtaaaaaaatatttaaatcctgacatattagatcttttggtcaatggtggtagaggtatatctcctaaacgcttcctttgtggaagcttgtttcaaaaacctttgtagtacaactcaatgacccttgtttgctcttaaacaggtataggat

SEQ ID NO: 10461 - DNA, 958 bp, Oryza sativa
  Intron number 1 from transcript LOC_Os03g42550.1 (locus LO C_Os03g42550) derived from phytozome v7.0 (chr-ID Chr3; po s 23687849 to 23688806)
agggcagtgattccagctgggagctctggaggtgcgtcggaagccaacaggtccactagcggggtgcttatgcgagagggcttgggtccctagcggggagatctgcacgagaatggggtggcaagcgaggagtctaaggcctttggatctgttagagcaggtacaatagcaggctataagctggctataaccatatatcgagaagaaaatagaagagagaagaaagtgggctacagatttgtagccggctgcaacacgaacttcaagatattatatgtgtatgagagatgggaccgggtattaatggtatagtataattttatagttaactattgtatgaataggctattagattggagatgttttggagccagtagttggctatactattgaccttgctcttagatatggtcaccaccgcttgggaacctgcggaagcattggagcaccggatctatcatatcccttaaactagaggttgtgtgggagggaatgattcggatgcacatcgctcgtcatgtcttgtcaacgcattcctgggagctagaagggcggctaccaatttaactcgccctgcttctccgcagcttcatgatacttcctcggcactgtctccaccgccgccaccgccgcttcacataattattctggctggttctagagcaaattacctgatttgtgcttagtgaatgaattcatgattgcattgtttgtttttgcagtttcaaaacatattccatatcagttgtatctcctttcggtggaagttttcatgaatgttttatgaagtgataacatttgttggaatactttcatatttacagcattacaatgtcatgtgtaaatcaaattatatttaaatttttggtaaaatttgtttcataccattgaaatttcacaaccttaatttaaatcatcgaaagattcagtggtgttcctttgtacatcttaccgggtg

SEQ ID NO: 10462 - DNA, 941 bp, Oryza sativa
  Intron number 1 from transcript LOC_Os04g52870.1 (locus LO C_Os04g52870) derived from phytozome v7.0 (chr-ID Chr4; po s 31302375 to 31303315 reverse strand)
gagcgaattcgacgagatcggaggctcggatcgaggtaaattttctcctcgtatttttctttccctgatcgattgtgttgattactggatctggtaatgctctctgttcaagcatgcttgggtaggggacgtagatttgcgcgacgaatcaagtatgttatgcgcgttttttcgcgggatttttcggggttttccatgcgcgttgcgggcgacgcccagcgctgcgttggatttgacttcgaattaagggcggcacggtggtagattcctcgctcgtttagtttttgaagagttagatctcgttccctacgtttcgaatttggtcgcaggttgctaagatttcccggtttgatctgcttattaggtttactttttgtatgtatatgatcatgcaatctcagatttggtgatttgattattgtgcggtgcgaaggttctaggttgacgtgttgtggaggtttctttgatcttattggagccacccttagcttattcggcttgttttgatccgaatttactattaattttggtgcgaattcagagttcaataatccctcttccgtagcatcgactttctcatctctatgaaaaaagtttgtgggagttaatttagaatcactggtttgtttattataaatcgtccccttttctgataggcaagtttgctactgatttatatgaccatgttagtaacaagtaccaacccacctctttgtttgagttggctgtcagattctagatggaattagatctgtgattgggagttagtcttataagccttgtgccatttggctgttccaattatgtttaacatgaaaatttggacttgttcagtttcagctgaagattttgattttttttttcaggtattctccttctgatttgattggattcgggatctgctggcggggatccatctttaggtaggatttcataatttt

SEQ ID NO: 10463 - DNA, 823 bp, Oryza sativa
  Intron number 1 from transcript LOC_Os03g22470.1 (locus LO C_Os03g22470) derived from phytozome v7.0 (chr-ID Chr3; po s 12871032 to 12871854 reverse strand)
gccgagttcgcctaccaggagatcggccacctgaggttacaacaaagaatatgattgaaattcaaattcacatttcaactatagttgtttttggctaggaaagtgtccgtgcattgcaataggaaaaacaagtttaaaactaagatttaacttttcttgatctggacgcttcttccaggaaacatattttaagtgtgatcatatttcaacttagaaaagtaattacacacctgcgagtaaaacctgtttgacatatgaatctaataacctcgtagagttctactaaaacgggcatgtctcgtatgtgtgtacgagcctcattggtttgcctatattccctgtgttgacatacgatttttcaaacttgaatttaaagttgattttaagatatttttgacataatttatttttagcattggcttttaagtcgttatgaacaaatatataaaagttttacctataaggctatgtttagttcacaccaaaattagaaatttggttgaaattggaacgatgtgacggaaaagttgaaaatttatatgtgtagaaaagttttgatgtgatggaaaagttggaagtttgaaaaaaaaatgtgtaactaaatacgacctaaattaatttttattctttaataagccagaccaatcgatgaggctctacgtagttatgcaaaattggaaagatcacagttcatagatcaaaattcatgagttgttaccaagaatatggattctaaaatggcggtgatatatatatatgatcgcacttaaaactaattgacgatgcagggcaatccagaggacagtgggtgggatcccaaggc

SEQ ID NO: 10464 - DNA, 747 bp, Oryza sativa
  Intron number 3 from transcript LOC_Os05g44210.2 (locus LO C_Os05g44210) derived from phytozome v7.0 (chr-ID Chr5; po s 25652468 to 25653214)
ctgcttcgctccgtgctctgtgctgatttagtcgggtgagcatgccctttgtgcttatgcctccgttctgccttctgacgaatttggtactggaagcagatgagttttggttcactatcattctgaatttacacctgcgcttgctgtcagactaggcaaccaagtgacttttgtgactttgatcatgttcagtgtgtttccaagtcctaatcaatcaaaaagaaaaacagtttgttaacgattgtttgccatgtctatataataaagttgcttttatagtagcttagaattcaatcggccaactttatctcgtacgctgacagtaaaggtacatttaaaaggtgacaatggatagtctaatacttgaactgacaatagagacacattacatgtcagttgattaagtttgtaacagaaaaataaacaatactacataattgcaaagtttctttgatgtctttctttcaagaaacacaaatatatcaatgctacagtattgctgatgaatttatccatgttgagatgtttttctggtttctgatctgatcagtctcaattggtgtgctgtttcattttcatttgctgatgatcgtccgagtagttaattcttactaatatttagataatttggcatacaagcgaatcacgtagaacatgatacttttgaatgaatttatcaaagttttatcacttggtgagttgtttcatggttttcctactgatgtctcttcttcagatttcatacat

SEQ ID NO: 10465 - DNA, 567 bp, Oryza sativa
  Intron number 11 from transcript LOC_Os05g44210.2 (locus L OC_Os05g44210) derived from phytozome v7.0 (chr-ID Chr5; p os 25656087 to 25656653)
aatatctgcattccaaaaatcggttgctcatattggtattaccatatttcttctttgctaccttctgttggctgggctgttctgatgcaaaaattgcttgtttattcttatctttttttgacgtaaatatttattcttgtctgatagcaatttctttacatagttgctttgatttgtgctcttatgcacatattgccttcactctgaaatgattggccttaatcttgctgaaatagttgctatgacttatgcaccttttcttgttcaagtaattaaatttaaaatctataaaattgaactatttaatttaaatattactgattgtccgatgatttttttgggaagtccagtgaaagcattttttttttaaaaaaaaactcagctttagtttatttgtttggttgcactttcaagtttcaaccactttaagtcgcatacaagtgatctgttcagctttctcttaaaaaaataataaacttaattgcactttgacagtagcatttgtatttacccttttttttttacaatgtaggggttcaattcaacattgactgagccagttgaatc

SEQ ID NO: 10466 - DNA, 365 bp, Oryza sativa
  Intron number 2 from transcript LOC_Os08g37280.1 (locus LO C_Os08g37280) derived from phytozome v7.0 (chr-ID Chr8; po s 23559633 to 23559997)
gggttaagcacactggctcgtggtggccagcacaggtacgattgcatacatcttccgagctttaactttgaatgcacaaagtatcgttctttcataagatgatgagatattttcagtgaacggtgcattaggcaggctatattctaaatcgtaaaatattaatgttggctgggataatagattgacatttgtagatatatggaattggcatgaacttctttttgaagttcagatgatgcagaagctaagaagtggacttttgctgactgctactttgtccatgatcctagttttcccatgtgtatatttacactggttttgttttgtttttttttttcctctgaattcaaggtcgttgaaaattc

SEQ ID NO: 10467 - DNA, 994 bp, Oryza sativa
  Intron number 4 from transcript LOC_Os08g37280.1 (locus LO C_Os08g37280) derived from phytozome v7.0 (chr-ID Chr8; po s 23560189 to 23561182)
gaattcaaagtatgcacaatatctatttataaggatactgatatattgtcattgctcccgtgccactcattgtagatttagaaagaaagtgcctctgacacagttgaccatgaattccataactcacagtcatcctccctttctcctttgatgttcccctcactttaaacctctcaagtaaaaaacttccaaattgaacaacttgactcccaactgcatttcaaactttgaaccataaaattcccaatattataaaccatggttcaaactttaaactatgaaaataaaacaaatttcaactgcaaataacaactttcaattaaacaacacaattgctttcaaatcaacactttgaatgcttcaggcatgacatcagatctaagggcagcggcagcacgtgctggatccgctagtagcagcatggcagtggagttaaaaaaatgtgccagatcaagtgtgagaatggagtgaatgggggagagaatgaagaagtgaaaggagattttcacatggtcgcaaataacttagctgcctctaaatcatagttggcctgttctaaatttctactccctctgacagatatccaaggcaaccatgatatcactaggtgctttcttggctggttgttggcttataagcaacagccagaatttgaattctagaacttaattttagagttgatttgggtttttgtaattgttttctatttttcagccttgtcttttggactgctaagaaagtaagaatagaaatataaaagtcttaccctaaaattatatttgattgcttcgtttattttcttcggcttaccaggttatcactgcagaatgataacataaaccagtttagaatggttataatacaactgcttgaaaaagctggtttgggctttcaaacttttaaaaaaatctgtgccatttatcttttctcttggaagaaaatgaatcatatcgatattcattttatatttcacatatgagctcatcgcatgcag

SEQ ID NO: 10468 - DNA, 503 bp, Oryza sativa
  Intron number 1 from transcript LOC_Os04g58700.1 (locus LO C_Os04g58700) derived from phytozome v7.0 (chr-ID Chr4; po s 34716938 to 34717440)
cgttgggcagtgacggtgagtgttgtcgcttgcgcggttgcgccgtgtatgtgtgttcttccactgacttggtgtttttctttcctgttttttttggtcggattttagggagttttgtttgaattcgtggtgttttttctaattatgcactgcctgtgaattccatttctgggagacgttttacgggttttttttttacatttttttaccgagtttgaaatggctgttcagatttttggttctgatctatcttcttcgaaatttccacctgttactcggtggaggcgatgcaaatttcgagatttatccgcgaaatttcgtgcctaaaactcgaattccacctccatttctatggtgcatttctgatctgtgaccaacggttttgctgtgtctcgtacactctcgttctgttcctccatgagaaatgtggcgttctgctcacacgcgctttgctacgccttgtgctagtctcggcgctcatcgcgttcaagcgcgcaatcatc

SEQ ID NO: 10469 - DNA, 887 bp, Oryza sativa
  Intron number 1 from transcript LOC_Os05g04340.2 (locus LO C_Os05g04340) derived from phytozome v7.0 (chr-ID Chr5; po s 1976814 to 1977700 reverse strand)
ctctccggcgaccctccgccccgcctgatcccgtggtaaatccctctcgcctctgtttcttggatcccgtggttcttctctctgcttgttcttgcccgattcgacggttgacgcggccgtggttgctcttggatcgtggcttggttggatttttctttttcaaggggtggaagggaaagctggttctttttttttccttctttttcttttttttttttggtgtgtgtgttcgtttgttcttgtgattttcttgggggtggggaagatggtggcggtttccgaggtcggatcggatacttgttcgtcctgctgattttgcattttgatcggtgattctggtggctttcttctatttggatgatgcgtgtgattggagggagatgagttgatgggggaaagatggtttagtttggttgatgcaaaatttggtggtctctggatcggtgaaatgttcccttctcttggctgttatggatagcaagcatgggtggatgaactggttgattcttgaaagctaccgcctcgggataatctcccaatgatcgtggttgaaaatatcatgataaacggggggtaattggtacagattagcattctaatatcttcagattctgtgtttcgattgagctagaaaagtaacactccagttttgataacaactcggcatccatcatggattcccaaagtttcatttcttctttttttttcttttcctgtaccttcaagcctacctgccaattgccaacacaaactgtctgtgaatgtgcttctggcacctaatctcatcacatctttcttaagtaaaaacactgttgtgactttgacttaccattattatgctgttgtttgcaggtggatcaactacaactcatctttaggaaagcctc

SEQ ID NO: 10470 - DNA, 456 bp, Oryza sativa
  Intron number 1 from transcript LOC_Os07g17010.1 (locus LO C_Os07g17010) derived from phytozome v7.0 (chr-ID Chr7; po s 10017992 to 10018447)
cctcactgccctcaaggacaagttcaagcgtatctgtacgtgtaaacacacgacagcctctctccttctactatccaactcttctcagtcgatatattaattttgcatatacaacctccaccgagaatggattttaaaccctcgagaaaacgttcacacgtccactcgttgtttacatatatcacccaaatggttacaaaataaatttgcaaaaaaaaagatgtattagcatgtgatgtatcagtcgataaatatacatgttaaaattcaacttttacaaattacaaattataaaaaatatatacaaattagaactcttacaaactacaaattataaaaaaaaatctacaaattaaaattcaaagtattagggcggatgtagtatatgtttttgcaagtttagtgagtagtgacaatgcgagagcatgctgtccatggtcggtcgcaggtcaggaa

SEQ ID NO: 10471 - DNA, 555 bp, Oryza sativa
  Intron number 1 from transcript LOC_Os03g47490.1 (locus LO C_Os03g47490) derived from phytozome v7.0 (chr-ID Chr3; po s 26852686 to 26853240)
gacaagagcaactcctgaagtgtttgcagcgaccagtacgaccacatcaagcagctcatcaaacaccttcagtgccagcttaagatgaggaaggcatgaaatcaagggaaatttgaaaaaaaaaacaccccaaatatcagcttgagtttgagattcttattataaaacgatttgttgcaaacagcccctttcaatctattttggtttgatgttccttcccaataagcaattaccattttttgtgttttttcttgcatcttttctttgttttttttaaaggagggcaaaagctttgcctcgtatattaatagagatggagaaaaaatagatcaaagtaatatgtacagggcaagcctcgaaagctaaacccgcaagaatccgcgaaaaattccaaactcttgaagctttgaggctccagccttgacccaagctcgagcttcctccttgatcttggcgatgatggaaatcggcgttgaggcggtgttttggaagatttttgtgtttcgtttgcaccaaatttcctaggaaaccaagatcaccaatattcgcaaagga

SEQ ID NO: 10472 - DNA, 709 bp, Oryza sativa
  Intron number 1 from transcript LOC_Os07g04700.1 (locus LO C_Os07g04700) derived from phytozome v7.0 (chr-ID Chr7; po s 2089419 to 2090127 reverse strand)
cgcgatacagcgccggttctcgcactaccactccggtgagttgattcgctctccctttgtttgttcgcggcatatgctctaagataggttccatgtggtgtgctaatcgatttatacattaggacaggaataggatgattttgtatgatacgacctgggaatccgaataactgggataaacttgcaaggtacttgactctttgatcaaaacataaattacccaattcaactcgtcttctataaaatatgctcttgcatcggtatataatgtttttatgggttctctagggtttatacttccttaattgttgtagctgtagaagaaatttaagctatgtaacacacttgctacatatggtgttatcttcatcagaccttacttctaaaacatggaatagaatctgtgcaaactatatttgttccttagagccaccaatataatatatataattgaagaaataatatgatgtaactaagtctctgacgtatagatatatagtaagtaaattacatgtggagaacagccatgtcaagttatttgtgtttgttctttttcagctgtacatatcaatagttcagtacataattgaaaaaaaaacatgtacagtctttgtgtaattcttgatgcagcaaatgagtgtttcattgtactcgaatgagtccttagtattttgatttgcttaatgcaggtacctccagtgggtcagag

SEQ ID NO: 10473 - DNA, 472 bp, Oryza sativa
  Intron number 1 from transcript LOC_Os06g05250.2 (locus LO C_Os06g05250) derived from phytozome v7.0 (chr-ID Chr6; po s 2370309 to 2370780 reverse strand)
gccaacctcagtacctcgacaagttacaggtgtgagaacaaacttgccgttttgaaaaaaatggggacgcgttgagtgagaaattggtagctttgatttgtggtccgtattccataagcttattggataaatgcacataccggaattaatcaattggaagttactccagaatttagttgagttgaacttcgttatgtttggtgaccggtagtaatagcaaagataatccttgtactcactgtgttgacttttgagcatactggatcttaagtgactatttccttaattggcatctcatttcatttgagatgatgacagcactagcataacagatagtgttcattttcagtggatattttcttactgaaattgaaaagaaatatttatactgtgtgcatttgtcataacatttgtatgattgtatctgttctctacaggtagagagagagaggggaatcacagtcaaagcaca

SEQ ID NO: 10474 - DNA, 648 bp, Oryza sativa
  Intron number 4 from transcript LOC_Os03g59430.2 (locus LO C_Os03g59430) derived from phytozome v7.0 (chr-ID Chr3; po s 33823553 to 33824200)
gccaatcccttcgacaccatcacccaagccgtcaagtgcgtgtctcaccttcactgaattctttttctaatcaaatatactactccctttgtttagaacaaatacgttttgactttggtcaaagtcaaactgctttaaatttgattaaatttgtagaagaaagtagtaacattttcaatccaagataaatttattatgaaaatatattcaattattgatttaatgaaacttatttagcattataaatattattatatttgtctataaacttagtcaaacctgaaatcgtttgactttaaccaaaatcaaaacgtcttataacatgaaatggagggagtattaagctttgataaagtttagagaaaaatatcttagcattttaaactcaaaacaagcatataatcaaaattttattcgatgttagatttaatgaaattaatttggtattgtaagtgctggtaaatctttctgtagactcggacatatttataaaagtttgacttagaaaaaagtttaaacaaattataatttgaaatggagggagtagtaaaatttggttgagatccaggtgaaatttgattgtttctctgacgacgacggtgagaaattgcagggtggtggagaggcatctgcagacgttccaccacc

SEQ ID NO: 10475 - DNA, 411 bp, Oryza sativa
  Intron number 1 from transcript LOC_Os04g40330.1 (locus LO C_Os04g40330) derived from phytozome v7.0 (chr-ID Chr4; po s 23793538 to 23793948 reverse strand)
gcggcggcatcgccggccgcaaatccgagcccgctgtaagcttccttcctctctgaacaggaacaactctttcgcccatctttttttctgtcacgtttggctcggtagatgtgtttgtcattgtcagctcataaaaagctgctctttttattgcctaactaataactggctcatctggtttgatgtgagccggatacccatttttcatttgtttggcttcaaatttttcactttggtgaacagctcagattattgcctttccacattcttcgtttgagctcctttttttgtgagatctcaggggattgaagtgcctttttcttgcttttcttcgattcatgtctctgctaccataacaatccctttcgtgtcgcagcagctgggtttattgcctcaacgggtaaaagaaag

SEQ ID NO: 10476 - DNA, 324 bp, Oryza sativa
  Intron number 1 from transcript LOC_Os06g50930.2 (locus LO C_Os06g50930) derived from phytozome v7.0 (chr-ID Chr6; po s 30824023 to 30824346 reverse strand)
ctgcagcaggccggacaccgctatctcgacgtcaggttcggaatcaaattatccatctgcatctgcatctgctaattaacaacctcaacatttgtttttttttttcctcttgacaagaagaatattttttttactcgacgtgtacaagttcagacttcagagccgactaactttgaaactgaactgccgaaagaacaccaataagatcaaaagaatgtgatatattgaatcaagcagctgtctttcgatgaaatttctgcagcttaatcgttgtgctcgatctttgtagaaccgagggtgagtttgcaggtgggcatccagttg

SEQ ID NO: 10477 - DNA, 641 bp, Oryza sativa
  Intron number 3 from transcript LOC_Os05g38730.2 (locus LO C_Os05g38730) derived from phytozome v7.0 (chr-ID Chr5; po s 22669149 to 22669789 reverse strand)
gtaattcaagttcttctattgcgcctcctattcaggtatattccttcctttctatgtatatcgctactaattgtacatagccttcttggtcacaccctggacatttattgatcatgggttttaagctatctggttatgttgctattttgggacaatcatttctttttttcgatcaacagatggtgtttacttattttgtgttgcatatgtgttatgcctagtcagcttatctcaaattcaacttcctccgcttgctgtgcatctgggtgcagcattcttttcgatgagtttcgtgggctataaacacgctctttacgatatggaacatcagaatgcatgatgattgtttccgtactttgttcatgtagatttggttggcactagcacttctctttgtgtttgcatggagaagtttatagcacattgcatactaagaaaatcatctgtaccgtatgaaggttttttgttgcttgtaggtcttgaagtgtcatgtcttttctgtcttgtttgacttgtggcaattttcttgtgttctttagctcgctacatagattgtttcatcatgagaatagaaaataattatatctaaatttcatctacctacaggcttcaggtggtccagggcctcaagatcaatatat

SEQ ID NO: 10478 - DNA, 935 bp, Oryza sativa
  Intron number 3 from transcript LOC_Os03g60750.2 (locus LO C_Os03g60750) derived from phytozome v7.0 (chr-ID Chr3; po s 34522725 to 34523659)
tcgccacaggttcgatagcttgctaatgatcatgatatgattcagcttttactaccgatttccctggcttagttcgtggaaggaatggtacgaagttatacaaattagtttcgtttgatccgaggctgcaatctagtttggtttattctaatttgtgaaatcttagtactaactgaactccatatgtattcgattgagactcatgatctttgcaaaggaaaacagtcttggaaggttcgcaccgaggattattggtgactagtggtacttgcgacaagtgaactactcccctcgtcccaaaatattacaactttcagttctctagatttgtcccaaaatataataacttcttcaccaatattctcttatcaaaccaatcacaacccttcaccattcaatccttatattctgggatagagggagtattagtttgtacaaatgacagatgctactaatgttttaccagaaaatgcatgcctccttttcattccttgggaagagctaggtaccaaaaattcccatgaaattcctttctttcaaagataaaaggtatgtaccctatttgtcggtaggcacgatggaacctgataaagtggttctgctactagctaaataaaatatgatgccaccagttgtggaggtaaacgtgtatttattcagttttgcctccaaatatcaatttgtcaactgggaacactaccacataaggttgtaacttgagaaaagctgagtttactttagtacgcacgctgatagactacgaaacatggtttcatcaatcttcccactaccaagctcgcttcatctgaatatcttatttcctatggttagaaaggctgaagcaaggattaccaattgtattgccctgtaatcgccattggttatttgattcccttattttacaggaacgaggattctctgtaatattgtcagac

SEQ ID NO: 10479 - DNA, 530 bp, Oryza sativa
  Intron number 1 from transcript LOC_Os04g32310.1 (locus LO C_Os04g32310) derived from phytozome v7.0 (chr-ID Chr4; po s 19194308 to 19194837)
acggcggcgccgcgcgtcgagaagatctccgcgtgcgttccgtgcgtgcgtgcgtgcgtcgggccgagccgtgtgtgaatcggtcgccgccgcccccccccccccaccccattcgggttggtaggatcggatccgcgcgtgctcgctcttggcttgatactttgatgctctgctagtactctgttacttctcctcctcttggttggtcacgaactcgcgatgaactggttggtacttggttgatcctcgtgatgggattgagagagagaagaaaaaaaaaagaagacgacattgaaaatagctttggttttgtgagccctttagatctccgagaaatagcgaggggagaaacaacaaacacgaatcttcggacgaactctgcaacctttttagttttagtatagctcattggattggattgtatatatatgtacgcgcaattcttgtttcaatgtttaagtctattattagtcgcttttaaaaagccatgatttgtgtgggattatgtgcaggggctagggggagaggca

SEQ ID NO: 10480 - DNA, 895 bp, Oryza sativa
  Intron number 2 from transcript LOC_Os07g26170.1 (locus LO C_Os07g26170) derived from phytozome v7.0 (chr-ID Chr7; po s 15048429 to 15049323)
tttttgtcatcttcagtgcctcttacttaccattggtttataaatcgaaaaattttatcttcaatgcctcttatttattaattttttatcaataagaaatattttggttaatgagagatatatatttcagtcttttgtcttccttcttaatttactgcttgggatgctacgaattgtattttttatgagggaatagctagattactctcttaaagttgctacttccggtaaaaaaaaaagttacttttaccattcaaaatttatctaaaatatagctacatttcctcctctcatccatagaatacacaatcatctctcgttaaatttctctccaattactttctcatcttaaacaatgataaatttttccatttagttttacccctctgtttagttgctttgaaaaaaaatataaattaaagatagttatattttgtggaaaaaaataggacaaaagaataccgtaggttcataagacataaccacttatatttttagacaactaacatacagacaagtaacatacagttaaatccatataatattatcagaagtttttgttttaacaacattagctactccactttgatatgcccaaaacatacattctacaatggcatattctttcattactggagtgagcaaataatagtattatcatatcacactcaaatagtataaactagctgcataatttgtgaaattatttagagctagtttaaattagaattaaatttgacacaatcttatttgtctgctttattaagtttgtttgttattaatcatctgatattttagttatcttactttgcacaacattaaagattgtaactttgctataacggaattatggttttcaggtgactgaagtcaccttcaaccttacactggtttg

SEQ ID NO: 10481 - DNA, 723 bp, Oryza sativa
  Intron number 3 from transcript LOC_Os06g48534.1 (locus LO C_Os06g48534) derived from phytozome v7.0 (chr-ID Chr6; po s 29367900 to 29368622 reverse strand)
atccggtattctgttcggaaggaagttgcacttaggttggtgctagcttagcattggctgtggatgtttatacgtactgaaatgctatagaattttgttcctatttgaatgctgattgacctgaattaggaagagtcaagcgtgctgtatttgatctgtgagtaatacactctgctaacaatgtacttaatatagtggaagtgaactgaataatataatctaaacttggcaacttatacattgtatttgtaccaaaagcgtgttttagttttgagttgtctggctgcttttattaagctattctccctctgtttcatattgtaagtcgttctgacttttttcgtagtcaaacttcttcaagtttaaccaagtttatagacaaatttagcaacatgtacaacaccaaattagttttgttagaactaacatttacaatattttgataataagtttgttttgtgttgaaaatattgctatatttttatataaacttagtcaaacttaaagatcaaagtatcagtgtcaaagcgacttataatatgaaacggaggtagtacctttttaagtatcagtgtctttcttgtggttactttcagttttgatattaccgtggcagatagtaggatttatattttgctgttattcatgttttctaaattacctctgcttagattatgtacaggaaatcttcatagtttaaaatattttctatgtatgtgtagg

SEQ ID NO: 10482 - DNA, 912 bp, Oryza sativa
  Intron number 1 from transcript LOC_Os03g55560.2 (locus LO C_Os03g55560) derived from phytozome v7.0 (chr-ID Chr3; po s 31610741 to 31611652 reverse strand)
gagatcgggagcgacagagcatcgttgtttccgaggtgatgattttcaagtgtttattacttcagagtttttcaagtgttattactttagattcttccttgcgtagctgaccaagtacgaactctgccaagttaattagttcttgctattgaatcatcaaaaggatagtgtgttaggctgttagctagttagctatgatgtccgctcgcactgatttagcatttctgagccaaattgggattgctgctttgccagccatctaagaaggtataacactgttcattcatgccgcagtagcagtggcatttgaacacttaagatggcagaatctttgttgtggatgagaataatttaagcaaattgtgaaataaaaatgcccagggattcagagaccaaggaggatattctttgccactgttacagggttttgactaaatagagttaaaagggtttaggacttctgctgtacttcatagggtccagctggataacactttactaagttaattttgcttttctatgaacttaatagctagtaggaggatactaggattttgacaataacaaagtcagtgtaacttgatttggttgaactggatttacatgaagttgctaagataaagcaaaaataaagattcaacaagcctgtgaattgttacaaaaacattgtgcacatatctcataccaatagcaatgttacattgatactggagataatgaaaaaaaacattccaatagtgcatctctatgcttttcaactttccctatgcttccttttgaattatctgtaagctccattacacactgattagattattccatgttcagaaaacgtttcatgttccctggaaacgtggtgcagttctgtattactagtgattctgatgattttatgtttctgaatatagagtg

SEQ ID NO: 10483 - DNA, 694 bp, Oryza sativa
  Intron number 2 from transcript LOC_Os07g12430.1 (locus LO C_Os07g12430) derived from phytozome v7.0 (chr-ID Chr7; po s 7091255 to 7091948 reverse strand)
ttgttcccttgttagaggctctgcttagaaggtttctgctccactagtagacgtttggtagttctggagacctcgtgttatgttgtcaaagctgcttgcctttggtaagctcggcaatgacgacttctgtgaggtctcaatagttgctttcttttccttttatgtataggttttgccggtttcctgtctaattaaccgtgcttgttcggttttcgggccctgtttcccttattaactaggtcaattctcttcttctataaattccggcaggagaaactcctgtcgtcggttgctcgaaaaaaaaaatacatgtgtcatactgtcatggatggaaacgggatcagtagtacagtgatttccaattcatttgttgactggtaattttcttccctttttcctaattaactttgattatttcactgtcatctcgttctccaaggctcgatcactcttcatccatgttcatcaattgattcaggatagaatgatagattactgtttttactaactatatgcaggcatgcaacactagtttaatctatctgtcctaactcatcagtttcgaacctgacattagtatgattgaacatgatgagcacggctgactcactagagcaattagtttttctttgttgtttggtctaggggatattattggttctgtacagaccaacgtatatccacaacaaaaaca

SEQ ID NO: 10484 - DNA, 853 bp, Oryza sativa
  Intron number 1 from transcript LOC_Os03g06410.1 (locus LO C_Os03g06410) derived from phytozome v7.0 (chr-ID Chr3; po s 3200925 to 3201777)
cgctctcccgccgctaccgggtgagtcgccatgaccaaggattcgattcgagatggattatatatgctaaactatgcaaccgtgtgactagtgagattttagtttgcattgccatacaacagtagacttattgcgggggaaggattgttttacatgttatgattaccagttactactataatccatgctaccattgttctcgtcgaattcaaattcaaccaatggattggatagtagcttccgtggctatgtctagaccatgtaaatgtgaatcttcaccttggaatggaaaatcacacatagaatagggaagggctcctatctagcatctacatgtattcattcctgtggactggaattacctcctttggtctcttccaggttcccggtgatcaacccattaaaacaattgtattaataaaatacttctacaatatacgttgccatgtttttgctggtgcattgcgatagaatcctacagatcagagtcttgcattggatattgcccaggaataaaggactattgtttctgtggacggcggggaagtagatgatattacaaggcagcgagattttctagactggaggttcttttgcgggcaattgtagctttgtagcttgttggttacatcaatctatgtcttttacatgttgggttgattccattctgttacttagtgagtgatatttcatatttgtagatattttgcttggtagatcacttttttccttccatgatgtgtcaattaagctcaaacatggggatgataagtatatttgcttgctggattgtctgacattctatcactgtgcttctattctgactttcaggactacaactttcttgattacc

SEQ ID NO: 10485 - DNA, 1038 bp, Oryza sativa
  Intron number 1 from transcript LOC_Os03g38590.2 (locus LO C_Os03g38590) derived from phytozome v7.0 (chr-ID Chr3; po s 21417417 to 21418454 reverse strand)
aggagggcggcggcgacgaggtcaaccctttcgcggtaagctcgccggcgagctcgccatgtttttttgtttccccgtcagaaaatattcagacccatcttccgttcctccttgattcctcgagttgctttacttgtatatatagatatgctttacttgtagcaaaattgattcggtgatcatgtctgcttcgaatttagttgcacccataaaaacagctcggcaaaacaaaccaaaaaaagaaaaaggagagagagaatatggttttatgagaaaaaaaaatagcaggaacacaagtgacaaaaaaaaaattgtttgtaccttgactggtatgtgcagagctgcctttgatttaggtcctgtctgggatttttaaggaactacggatgatctaaaagtgattctgtgtcctcttcatgtgttgcaattttgcaactagggactttatttccggattcgactgtggcttgctagttgcttgcgaaccctgtttcttgtgtcatgggagttttatcatttttttagataatatgggagttttttttaacatatatacaatcaactgcatgttgagctcacttcatatattaaggtttgtaattctaattcattttttaaaaattttacttttactggagagaagtgcatctgtccaaaaatgtagagttcctttgaattgagtgaaaatttgctcaaattcagcaaaaatattttcagaatttaaaaattttatgaaagttatttttggtttttcatcacctccaaaatcaattttgcatttcgaaatgtaaaaccctgtatatatttaataactctcacagcagaaacatatgtttgtgcaaatggcaagttaatttttttttcttgcaattcagtatttctgctttgatattaggcggaacgctgtttacaaaattaaaaaaagggactacaaacaaataattcttcaggcaccaatcgcaataatcttactgatttatcttgctcaatgctcatctatcaggataaagcttctaaaggaggatcagcaggtcaatc

SEQ ID NO: 10486 - DNA, 980 bp, Oryza sativa
  Intron number 1 from transcript LOC_Os03g25980.2 (locus LO C_Os03g25980) derived from phytozome v7.0 (chr-ID Chr3; po s 14877734 to 14878713)
tcggcgccaaccgcaaccaggccttcgtcgagttcgtaagccctccccccgttctccctccccttccccacccgcctggcccgcctccatctcccccctctcgtcgctcgatctcattcgagatccgttcggatgaatcggccaccggatgatctgccatgttcaatccacgatctatcgattcggccgtataggtatagcgcagtcctgtaattaggggattttgtctcggatagtatagcgcagtccgtaattaggggacagtgggggtcactggctcacatgccgtcctcacatctgcttggttttagctttttttttttttttttttgctatgccaacacatcgcgaagatggaattgatatgagcttcggtcatcgtaaaggatttgataagatgcggctgcaggatacacgcgggactggatatttgatactagtagtaaagttgtttaacaatgttagtattttggatgggttttcaggtggattgttgggtttgtgattggagttgaccgaggttagtttatgatactggaatgctatatgttgtatcaatctgtctgtcaggaatcgatctgtagcatactcggtaaccgctatctatatggatggctgggcctatgtggttttgtggttttaaaagttccacatgtcactgtttggtttgtgataggatacagttacagggatgtgatttgtggctcttggatatatggtggcgggagctgggagctttgaaatgacagcaaagctgtattctgtgtcattagtaactttagagtatgattctatttgtgagattgattatctaataaaatgtggtgtatctttagacttctaggaaaggctttcagaaactttatcttcctacaaattctattattgtttatacttatgttttatttgtaataaatgctgcgcattacttatgcaaagccattccttctttgcagactgacattaatcaagctatttcg

SEQ ID NO: 10487 - DNA, 538 bp, Oryza sativa
  Intron number 1 from transcript LOC_Os07g38870.1 (locus LO C_Os07g38870) derived from phytozome v7.0 (chr-ID Chr7; po s 23321405 to 23321942 reverse strand)
gcgacggcggcacggtagtgagagcggtgtcggcacccgctcatgccgcaccacctcgaccagcttcgccaggacatcacctttctcatgacgagcagatttgagttattgatctttttttcttccttctggttctcctttgctgtttgccattgagagcaaagctgagttcttgatgtccctacttctagttctcttcacgatctgtgttcttatgccttaatgcctttatgtcgggggaatgtacggtggtgaaaaactgaaaaaaaaacacagcaccatctatagattttagggggcctgtgatgatatatgcctggaacaaaaatactcactttctggactgatttggctttgcttcaccaaaactaggagctttgcttcttctctgaaagcgtgtatgttgtggactcgtcctgccgtcgcaccgccactgccttttggaggatgagctcgtggtgacattcattttgttttgttggatttgctgtgcgttcatgcaggcgaccactcgacaagtcgacatcgactgcataca

SEQ ID NO: 10488 - DNA, 749 bp, Oryza sativa
  Intron number 1 from transcript LOC_Os03g55270.1 (locus LO C_Os03g55270) derived from phytozome v7.0 (chr-ID Chr3; po s 31450658 to 31451406 reverse strand)
aacggccccatcctcaactccgcctcgctccagctgtacgatccactccccatcttaaaccctaacctttttttttctgctctttgttactttgattcgctgggtagaaatttttacattaatattaggtagaacattacagtaaactatttctacttatgtttcaaaatttctgcgtttattatggcactgaattgtgcatacttctaaatggatcatatggaacctgaattctgtatccgccacaatatcttcatcattagctaaaaactggtacttaagctcgtttacttgagtgtaaattgtgtatatatcgaaatactcatgagaaacgagaaggtgaaaactaatcgaactggtgaggaaacagggtggaatgtagagatggaactatgaaagaatgagaatacacacattgggaatattaagtatctgtgaacaaataagtattcgtgaattgagtaaatgagtaatgaataatgctagcctaccattcattctgttggtatgcttggtcagacaatctctgtaacatattccagtttatgttgatttatcatataaaagagtttattctgcataaatacagatattggatctctccactggttgtaaatcattgacttgccagcatagggaagaattttacatgaattaattgagatttagagataaagaaaactggtttgtaatatgctttcttcttttcttcagctttgaagataaacttcagacaacacatttacctg

SEQ ID NO: 10489 - DNA, 989 bp, Oryza sativa
  Intron number 1 from transcript LOC_Os08g09230.1 (locus LO C_Os08g09230) derived from phytozome v7.0 (chr-ID Chr8; po s 5351175 to 5352163)
cagctagcagtgccagcggtggtggcctcgcgcaggtatgattcagtttcaagaagttcatgattccggctgctcttgcttttcttgatttgcttgatccaccaagtgttcgtccttctgaaggggcatgcaagattatttactcagttacatgatctcaaatattaatattttggttgtgtttcctgtggttttgattcatttcatcttgggaacatactctggtgatgaaggggaaattcatgttatggggagttctttcctggactttcttacggttgttgatagatttgattgaaatattttgggaaatatttctgtggtcaatgatcttaattctcaaatttagattaggttaaaacaacgggactgaaagttcctttctggagatcgaaaggtagttaattctactccatttgttaaaatttccccccaagtacttgtatatttaggtctgcataatcattgaaagatttcctcatctgggctaattctgttcagttttgaagtgaagcctaaaagaccttgtcctcttgttttgatttgttgggttcttgttttgtaaggaaaaataccgctcattatgcacccccttttttatctacagttgaacattatgcatttacattaatgtgagagggtatcatccattctaaaccgacatgctaagaaatatggtttcggagtgcaattcagtataattttttaaatatttttctgacaggaattctttcaataattttatattgaggatctgagaggcatagattttttatagtaaaataacctacatatttcaaaacagcaatattgattcaaataattcaatactccctccgtccctttataattgtcgtttgggagttgtgcccccctcacaagcacagattcctagcgactaataaaaggggacagagggagtaagttctttttattgaaacatctcgagctacaatatttactttcttttctttttccagtatttctta

SEQ ID NO: 10490 - DNA, 470 bp, Oryza sativa
  Intron number 1 from transcript LOC_Os06g43520.1 (locus LO C_Os06g43520) derived from phytozome v7.0 (chr-ID Chr6; po s 26162762 to 26163231 reverse strand)
aagatccgcaggtattgcaggattcatccatcgatctttgtttaccttctgttctgttttttctggttgctctgttttttttaagcttcttcaccataggataggagcgctattcgatcacgatgtagatgaaaggattgtgatttatgaatgaatcatcagccgcagaaattagcacgcatctattatttttgtgggattcatgtttgcacttgcacaggcacttaattagtaagtagagggttaagacttaagaatcctgattttactgatgagactttagatgttacatcatattggtattgaatacgattcagcattgatcattgtgtttgatgttgaatatgattcatcattgttcattgtgtttgtatctaatttgatctctgtgccagtttgtctgatactgtattttttttatctctttttgaatttgtagctcctgaagagcttttttgaagcgtccggta

SEQ ID NO: 10491 - DNA, 936 bp, Oryza sativa
  Intron number 1 from transcript LOC_Os03g43590.1 (locus LO C_Os03g43590) derived from phytozome v7.0 (chr-ID Chr3; po s 24354167 to 24355102 reverse strand)
ctgcggggtcgtgatcctcaaaccatttggctctggtaatcttcttctctccctggtaaattaatctgctctattctcttccgtagatagcttgcatgcatcatgaatgcattggttggttgatggttggagttgagaggaagcggttttgctgggctggggtggtggttttggtgggttctgtgttcttgcggcgtgaagcggttggtgctcctgggttgtttttttctttttctttttttttttccaaaagctttggttttttgtttttttgggggtcttttgattttttttgtgtgtttttggcaccgcacacgctgattcttggaggtggttttggtggtgtactgcccatgggatttaatgggctcgcattgttttcgtggttttgacgtgttgtttacctctcttgtgttcatgcggatgaacaagtaatgcccctctttctctctctctttctctcgaggagctcgtgaatttgtttttcttttcacaattgtcttttggacttcgagctgcgtgcttttttggttctgagcaaaaagaaaaaacacttttatcttttccgctggatttgacattttgcaatgttatgcaatgtgttcttcggtttggcattttggggttcagagttccatttcggagaaggggaaaaagcttcagtcttggtcggctattttgtcggaaagcgtgccgcattcgtgtcacatgccgcaattttttctttctcctgagttcacacttttctttctttctttccttgccgtcggcaattttggcaccattttatgtgcggtgaaaatgtgtcggcatttcactgtaaatcttccaaaccccggtccacaatgttaattcccctcttatagtccaactgcaacattattagtatcatgccaatttctcttcaggtaactgcaactgcaaaacggcacagcc

SEQ ID NO: 10492 - DNA, 866 bp, Oryza sativa
  Intron number 2 from transcript LOC_Os03g21550.1 (locus LO C_Os03g21550) derived from phytozome v7.0 (chr-ID Chr3; po s 12314714 to 12315579)
aggagcaggtggagaggaaggaggaggtctccgaggtgaaaagcctgcccttctcgtttttttttctttttttcatttgccctgcacatcggattcagttcggtttttcggcggggaagggaagaaacggcgtagcgatgggctgggtgcggtgccgtgctgtgctgtctgtgtttggtgtatgcgtgatctggtagggtgttttgggcgtgaatccgcgaccatgggcctcttcaggatgtttgatctgtgtgcttggattgaatcagtgaaatctgtaagagcggattaagcttctgagatgagtgggcttcaaaaataataaaaaaaacatctgagatgagtgataggccagattaagcaatgatttgttttgttcatctttttgtagtagcttgtgaggactgaaccagttagcagtgaacacctatggtgatatttgatggtgtttggacttgtgtctgaatatactgtcagtgctagcctggtcattatcagtgttataatggccctgtcaggatatatgcaccacaatgtgggatttttctgttgattgaacggatgtagagctgtagcctgtaaggagatcaacaaattagattcatcatttgtgttttgagcatggcggtcacatgttatgcctaaggattatcatgtgcaacaaagggttaacatcacaatttgataaaaagcaagtgaaatgttactccgtggtggatttcagcattttatttgtttgtaatcagcctttcacaattatttcttgtcagccttctatatcatttttccttgtaccagcggcttgttgacaatgtttgtgatgttttgtagcttactccttttgacccaaccaagaaaaagaagaa

SEQ ID NO: 10493 - DNA, 616 bp, Oryza sativa
  Intron number 2 from transcript LOC_Os03g22730.1 (locus LO C_Os03g22730) derived from phytozome v7.0 (chr-ID Chr3; po s 13127809 to 13128424 reverse strand)
ggaaggagttcacgacgtctgactcggcgagaaaggtttgtgcttttcttccttacagcacaaaattttctctttttttttgtttattaagagcgttaatgcatgatttgacacatgtcgatggagtcagttaaattagcacaaggaccaatggcttctgtaggttggtgagtactacatatgttttagcttagctgattttgccttgctaattggggatatgattttgatagatgcaaagtggttttcgagaaacaaaaaaaaactgactaatcctaccatgttctgaactgtaatttcctttccaatgtgttatggttatcaggggagagagatgtaatggtttagtttgcctcctattgtgcacatattctgtccgtccgatgtctatagattgattcgacaaataaatttgtgcacattgagtttatgacattatgtggagaacattgtcatgtacagaagtcatgttactttacgccgaattgcaatgagtctatccatttgttcctattactgctatttattttgttcttttcagttgattttctttcctgacaaaacaaatcaactatatttaggtggttgagctgaaggctttcaacaagtttgagaa

SEQ ID NO: 10494 - DNA, 622 bp, Oryza sativa
  Intron number 1 from transcript LOC_Os02g57390.1 (locus LO C_Os02g57390) derived from phytozome v7.0 (chr-ID Chr2; po s 35156963 to 35157584)
aggggggagtctctctggtgttcctcctcatcaaggtgaggtttgtttttttgttattattattgctgttcgatcgaatcgttggtagatgaggagggaggcggaggggattctggcgatggtttgtttgttgttttgtgtgatgattcctttagtctggggcataggaaaatgttttggttgttttccttccaccccgtggggattgggtgcgattctttcccggtgtttcaatctgagttgtgactggattcgtctcaaagtttgggtttttcttttttgtttgcctgttttcttcgtgctcccgcaacttgatgctggagtctccttaaaggtgggactttggggggttttttttccgactctgctgagggagaagaattcgtaggaagaaactggtggaatttgtttctttgttctttattactaggttgcagttctgtgaaaggaaggtgtctctgatcgttctttttatgtactagttatctaaacaaaaacttcagatttctccctagattaccatacatatttagtatcaatcagtatatatatatgaatatatgagtcatatattggtgttggtttaggttttgcgaggagaagaaggcgagaaagaaagaag

SEQ ID NO: 10495 - DNA, 721 bp, Oryza sativa
  Intron number 4 from transcript LOC_Os05g51700.1 (locus LO C_Os05g51700) derived from phytozome v7.0 (chr-ID Chr5; po s 29599335 to 29600055 reverse strand)
tcgccatcaagcctgacggcgtccaaaggggcctggtaactactacttgtattgcatcaccaacatgattttttttaatttaataatactaacatgggttctattaagtatcaccgtagcattaacaccagcaaattactagtgcatacatcatactacgatataaaattacggaatcccattacatgctcatgttggtaccatgtacttcctccgattactagtacatctctattactaacatactggagtacatatacttcgatataccactagtaacaactatataatgcatagtaccatctcatctcagttctacatatgactaataatactgagtagtaatcacattcacatgagacaaactttgagatgtgatggcagatctgtcattctgctctcttttcatttcttttctccaattgggctcctcaactctgcactgcacacttggggtcctctcctctcatctcctcttctctcaggtttgtcaaatcaatggtccccagtactactactaacatcctggctagtggcaggccgacatgtaaccaatttcaatcatgcaaccaaacactaaattgtactctactgtttattgtctccatatgcctgctaataatttcctacgggaatactgtatgatggatgttgttcatatccgctttttcctcctctttctacagatttctgagatactgtcccgatttgaaagaaaagg

SEQ ID NO: 10496 - DNA, 1038 bp, Oryza sativa
  Intron number 1 from transcript LOC_Os07g41600.2 (locus LO C_Os07g41600) derived from phytozome v7.0 (chr-ID Chr7; po s 24934840 to 24935877 reverse strand)
gcagacaaggtaagaagagcttttcgccggactttgctgttctagggtgtcctttcatgagctggtctgaagattctgttgttcagtattgattcttgccttgcatctttccttcatttcttcagttgggtgtgtgtgtgtgtgtgtgtgtgcatgtgtagtcagaacaaagttgatgtgtttaagcaaaataaagaaaatcgtttttttttcttcccttggggtagaaatatttttcttggagaacctgagtcaagtttggtagagaagcacttcaggtttattggagaaatggagaatgttgacaacctgatggcgttcacttgtgtagctaaacagagtgtcaggcacgcaagaaaacaagcatggtggtaagcagaaatgaagtgcagagcaagcaaaaatatctctatctctgaccacccaaaactcctttccttgtcgcaagccactttcatgcgaagatcaaggcacacgttctttttttctttcttttcccagctcgtggtttcgttttcaaacaatcttttgaacaaagatacaaaagatacacgctcccagctagtgtccttttcatatttcttttgatgctctcgaaagaagcacccactcgatttcctagttcaagttcgcccactgaatttcttcttcagaaactggcttcatttcatctggttctgcaagagaaaactccaagattcatttttatgctcctaatcttttgttttttttaaggacagaacaaaaactaggtagtagcagaattgtagaatactagtaaatcctttctgaacccacaggttgaagaattaggcaagtcactaatttattctgctatctgcaactctgcagttaactctcaattaagaattgccaagtgaaccacacagtaacaccggaagtaccaacagcttccggatctgctgttaataataccactagctagtaagtactccattagtacagcatttacctatcttttaatccctcgatcacatcgctgcagatctccacggttgtgctcaacgttgacctcga

SEQ ID NO: 10497 - DNA, 1019 bp, Oryza sativa
  Intron number 1 from transcript LOC_Os06g20830.1 (locus LO C_Os06g20830) derived from phytozome v7.0 (chr-ID Chr6; po s 12025239 to 12026257 reverse strand)
ccaaataaaccagtcggcgtcagacaaggcggccggtcagtgaagacggcggcataataggccagccgtgcaggcggagacaccagtcggcggcggcgaaggcaagccggcggtgaagacgtagacgcccaataacgacggcataataagccagccgtgcaggcgaagactctagtcggcggcagcgaaggcaagccggcggtgaagacgtagacacccaacaacggcggcacaagaggccagccgtgtaggcggagacaccagtcggcggcggcaaaggcaagccggtggtgatgttctgactgatcacttttatgcatatctggatctggatcctacagaacaaacatatatgatgagtagtatctgatgtaaatataatactcgagaaaaattcaagtattttaaaatatttataaatatgtatttcttctcttgtcaattttgatttccccgagcagatgactccttacgtttacacactctgcccgactagtcatagcccccgagcactgggagtcggcctaggcacttcccaaacatgcatatgagtgacatgagttcgtcattaatggaacaaagtttcacggatcggagtttactactcaggtacttttgcaattgtttagagcagaaaataaattatcttatctctatgcttttgatttattccgagtaatacttagcaccttgtgttactcggtccatccaacgagcccccaggtgctaggaattggcccaaaggcaactatccatcggcaaaccaaacggaaagcataggaagatagaactccataactcaataggcacttttgtactcagattatgtcgcaagcaatcaagatagatattatgaaaattgttgaaaaaatatgatataacatctgtagcccccgactcactagtcaacggcgaaccagttgacgtagtgaggcagaggaaaaggaaaatatcatataaaggaaattaatgatgacttagctttataatattccccttggtgatggcagaggtggcca

SEQ ID NO: 10498 - DNA, 639 bp, Oryza sativa
  Intron number 2 from transcript LOC_Os08g12780.4 (locus LO C_Os08g12780) derived from phytozome v7.0 (chr-ID Chr8; po s 7571259 to 7571897 reverse strand)
cttcaacgaattcggtgagctctttacctatcttgttttctgtcaccaaatgttataacccactgtccagtgataaccatgagatacttgtaatgctttttgaatatgatgaactacttcctccgtttcatattttaagtcgttttgacttttttcttcatcaaacttctttaaatttgaccaaatttgtagaaaaaattagcaacacctatcacaccaaattagtttcattaaatatagcattgaatatattttgatagtacgtttgttttatgttggaaatgttaccatatttttctataaacttggtcaaactaaaaaaagtttgactggtaaaaaagccaaaacgacgtataatatgaaatagaggtagtactatataatattggagtgcataatatagcaacaaactttaatctttacaccttacaatattatcgaacgctgagggtccattttgatggtaatgattttgcatctggtggctggtgtattttgaccattttgatgattaaaaattaaaaatgttaaaaagtgtagcagcattatattgttatattaagaccctagcaaattggatctaacaaaagaaagtttgcactttcaggccaaatttctagcattattgattgtgattcc

SEQ ID NO: 10499 - DNA, 1012 bp, Oryza sativa
  Intron number 2 from transcript LOC_Os07g43690.1 (locus LO C_Os07g43690) derived from phytozome v7.0 (chr-ID Chr7; po s 26148286 to 26149297)
ttcttctatttagcctccatcgcaccagctctctcgtaagtttcaggacataattgaagagctccagcactgtgcggatgaattaagagctcgtcgatcaatcaaaaaggatgatatggtttgttctaatcatgtactcacacctttttttaaaaaatcttttgctgaactcatactttctatgcatgaattttaattatcatctgctcaagcctggttaatattaaagcacacgaacgagcagcgaaaccggagaatgtgggatatcatgactgtcaccatctatatatggcttaacttatctccaatagaaaacgtcaaccattcattcatatggggattgtagttaattttgactaatcgaaattttgtattgtttgtatatttttcccaaataaaaattcctagcacattatctaagctcaattaacaatagtgaattatttagtgcaaatggcaaacaaagacaacgatggaagctagcatgcactagtaatgtcaggaatcaagaaacctaagtgaaagagcaagtttcactagaaagttcaacaacggaagcagtagtaatgtcggagtagcatcaagaaaccaaatttaaaggagcaagctagctaaatgtatactgctcactctgttttatattataagtcgtttgattttttcttctagttaaaatcctttaggtttgatcaaatctataggaaaaaattaacatctataacacgaaattagttttattaaatttagcattaaatttattttgatacaatgtttgttttgcattgaaaatattatatttttctataaacttgatcaaacttaaagaagtttgactggtaaaaaagtcaaacaatttataataagaaacggagggaatagctactaatatatctaatggaaagcttgcctccttgatataatgtaacgtcaaaactattgcattgttgctttattatttaatttctaatgcccccccttttgctttgcaagcaggacgatacaccattcaatt

SEQ ID NO: 10500 - DNA, 660 bp, Oryza sativa
  Intron number 2 from transcript LOC_Os05g30800.1 (locus LO C_Os05g30800) derived from phytozome v7.0 (chr-ID Chr5; po s 17810028 to 17810687)
ctcaagcagaccgggaggtaataatgcttttgcctttgcctgattgattggcagtgttctttcatcgtttgttgctatatgcctgaatttggaagatctaagacttgcccttatgttttagtggtggtcagttaattgcgcctttactcttttctgtatcatatatcatgtataaaaaagaagaagaatcaaggtctagatttgattctttttgtaataatagtcatagattcctagccgcatataacgtagcgccgataacacgatgtccgtgagaattgtcttacttgtgctgttaaaaaagattgcgctttctcggggagagaaaaaatgataaattttacttgctgttaagagcacttcttcacacatgaaaagctctgtgttcaagtgcatttagatcataactgaaagtaatcatattggaaagaaagaacacctgtcttctcatacagcatatcctgtatcttgttatctctttggttcttctatttcaacttctgttaagttatttggatattggtgttggccataactttagatattttgttgctctgttggtcgacaccttttgcttggttatctagaattatttttactcagcttttctgtgggcaagcaaattaagcttgataatttcgttgcttttacaggccagaa

SEQ ID NO: 10501 - DNA, 609 bp, Oryza sativa
  Intron number 1 from transcript LOC_Os06g21850.1 (locus LO C_Os06g21850) derived from phytozome v7.0 (chr-ID Chr6; po s 12622524 to 12623132)
tttaaaatattcaggatataagtatattcaccaaggtatgtacataataggaatcaaaggaatgacaagaaagaaattaggagctaaagtgttaataaccttattagataaaagatgggacacaataaacaaagcatctttaggctatctagaaggagatatgaatgaaaatatgttgataacctatatagcgcctgatttaatgatgcctgtaaatgaattcatagataaaatgagttttggtttcaaacaaaaggatacgaagagtttaaaggaacaaatttattaataagtatagaatttataggaagattgactaatagaagtgccaccaaatacaaaatcaatgtaaatgatgtgatagaaaaaatgcattctaaaggaataaaattcatgagccctttaacaatagacactgaagaaagagcaggagaaaaatggccaattagtgaatttataaaaaataaaaccttgagtcagcctgaaaacttcataagttaccaagatagcaaagggaatgttagtattagatttacaaattataaaaccagagcttcggatgatttggatgcagaatcaactgacagaaatattatagataatagaaga

SEQ ID NO: 10502 - DNA, 857 bp, Oryza sativa
  Intron number 3 from transcript LOC_Os04g58750.3 (locus LO C_Os04g58750) derived from phytozome v7.0 (chr-ID Chr4; po s 34759002 to 34759858)
gcctgacccgcggcagttcttggtatcctattgtcttcaccttaatccttttgcattgctaacgatgtgcgtttgcttggtgccaatggtagttgggtacgtggtggttattgtgggaatggtagattctgttctatttataagtgcatgaattggtttctaggtttgggttgtctcttatcatggaggttgttgatgtgtacctgttcctgagatgatatgcatgcttgttctttacttatttggcttttgggtggaatatgatggcttgcagttcaaattgtggcatctgccaactgtttgcacaacatatcttttttggtatgattattagattccaatactaaacaagtatcagacagcaatcattacagctagtagcaccatcattttgtggattacatgtttgattgctacatcactccattaattgctatgtgtgagttagtgtctcagtaattataaacttactattacctgttgttaacattatgtatttttgactgcattagttctagctcttcccgtggacaatgctttatatgccttgttattttgctaactgtcacatgttaattcaccaccatgccatttgtttctgattgctattgtacatactattaaaatggcaagtatagaggttttcttccacaactttaagcagcccattttccatattgatggcattttgttgtgtgagtggatggtggaatctacttcctatttgttgacgcaactttttgtttgattacccatatatttttgtggtaaattctctaagatcatctaataatccttttggtggaaacaactatgcttcaggaagaagctaaatcagttggacaacttcggagcaa

SEQ ID NO: 10503 - DNA, 841 bp, Oryza sativa
  Intron number 1 from transcript LOC_Os03g44100.1 (locus LO C_Os03g44100) derived from phytozome v7.0 (chr-ID Chr3; po s 24780073 to 24780913 reverse strand)
gtctcgctcccaccggagcaaaaccccaattacaggtgcgcttgcagtcaatatcctgtggccttcaaaatatatatcgaccagcctgattcagagcatctcctagtgctactgtaacctgtcctgccctttaaggccccgtttgaatcaaagaaaaaccatacgaattctagaggattttatcctataagaaataattctatagagtcctttgaaacaaaggattgtttcctatcaattcctttgaaattcctatggaatgaaccttactagagcaattttagaggaaaataagcatgactctcacctcatgttttcctctttatgtgtcaaggttccagcgtttttcctgtgtgctaatcaaacgacagtttgaagactttcttgtgtttcaaaatctcataggaatccaataagtgtggcattcaattcctatgtttttcctatttctctgttttctcaatcatgcgattcaaaggggctctaagcctttaacccgtctctgttttaagtgtcaatttctcattgttacgctgtcctacataactgaatgcagttatctttaggaaatctgtatcaatccagtaatgctgttggtatgacttcaaagattattattttttagataatgggcagcgcgcggcctctgcatcataaggtgaatgcacacggccaaatgacttcaaagatgctttcaaactagttactgtatcaagaaggacgaaataaaattgcattttttagagtcaccatgatgctaaacaaagccttaatgtgggggagctgaacgttctgttctctttcaggtgtaacacctccctcttgatagattactgccaag

SEQ ID NO: 10504 - DNA, 705 bp, Oryza sativa
  Intron number 1 from transcript LOC_Os03g05390.6 (locus LO C_Os03g05390) derived from phytozome v7.0 (chr-ID Chr3; po s 2653491 to 2654195 reverse strand)
tgtggactctccactctccacgcccctactccgaggtgagcaacccaaaaccgaagttcatttcttctcttttcgtccagagaccaatcatagtcgtagctcacgaaacaatcgaaaaaaatatcttgttcctggggttctttggcaccactgcatgcacgggtttgtgctggatctttcgtttctttttagtcggtaagccaagctccaatccattcgatctgatcaactgcaagaagcgtagaatagggggaacaaaaaatctggatttttagccataactacagtaatttatctgaggaaatctcggtagctctattcatttagtttggtgaagtgtgcgaaggatttttgtattgataagggcttctgttttctcgcttgaatttgtttgcaggatacaccgtgagtaggcgtggtggtgcttgatctcaaatatcaaatatgtgtcctcccgttttcgtgcagtcgatctaacaccgttgtttcttgctaattcgttttcgttcccccggatcaaagaaactttattttacaacaacaacaacaacaacaaaaggatctttacatttccttttttaaatgatcttattaccttctctctcttatttttacagattttagaattaacctgtagcctctgtttgtttgtctgctccaatttctgcaggttcttgagtttgagttgggcaaggaggttgtgaa

SEQ ID NO: 10505 - DNA, 667 bp, Oryza sativa
  Intron number 1 from transcript LOC_Os05g02400.1 (locus LO C_Os05g02400) derived from phytozome v7.0 (chr-ID Chr5; po s 790556 to 791222 reverse strand)
gttggatctgacgatcccgtcttgtcggaggagaggtgagtaatcggtgcttcaaaagattgtgtccttttcgtattccaattcattgtttgtattgccgcttgtatgtcatggcgattggtattgatggtgagatgccgttcttgtcaaaagataagagaaaatagcatagcgcatgtcggtctgatgtgaatgtgagcatgcaaacagtctaataggagtggtgttaattacagttattaataataaattgtttttgtgaaaatatagcatgacatgctgatttgctgtggttgtttgcgtagaaatggtctaataggcaatgtaaaaatctagtggttgttcctagattaccattattttgatttgtcatggcttgaagtataggttgttccacaattcagaataaattatgtgaccgtttgggttggttatgatcaaacaagtctgtttataaaagtatattctttaagaagcccaaccattttttaactctgacatggagctgtaaaatgattgctttggagtttagaaaggtggtttctttgtagcggaatcttcatcgaattgataagaagtgcgatggagctatttaactgcttgctgtctgtcggacttattgagattagctctgtaatggtattgcattcttgtttcagcgagaaaa

SEQ ID NO: 10506 - DNA, 562 bp, Oryza sativa
  Intron number 1 from transcript LOC_Os03g57980.1 (locus LO C_Os03g57980) derived from phytozome v7.0 (chr-ID Chr3; po s 33019360 to 33019921 reverse strand)
tccgtcccactgcagtgcagaggttagcctgttttttttttaaaaaaaataaacatatcccatcattttcatttcataagtcgctttaattttttttcttagttaaacttctaggtttaatgaaatatatatatatatatatatatatatatatatatatatatatatatatatatatatatatatatatattaacatctacaatgctaaattagttatatcaaatactacctccatatttgtatgtatgacgctggttagttaaattttgaactagccagcgtcatataaaataactaagagggagtgtaacattgaatttattttgatactaatatgtttgttttgtgttggaaatgttactatgtttttctataaacttaataaaacttaaagaagtttgacgaaaaaaagttaaaaaaacgaattgtattataatatgaaaaggagtaatttttactgcacctttctttattaactgaagatcagacactgacaactctatgttgcattttggtaatttgcagatactgcaagccaaatcccacctccaggtaattta

SEQ ID NO: 10507 - DNA, 606 bp, Oryza sativa
  Intron number 2 from transcript LOC_Os07g06130.2 (locus LO C_Os07g06130) derived from phytozome v7.0 (chr-ID Chr7; po s 2983990 to 2984595)
gcattggcacggtcaccgggaggagcctcgccgaggtatttcgagatgcttctcacctgatgtttttgttttgtctgattttgtagtggtgaatgattcatcatcatcctcatcatcgtcagtcaattgatcgacatcggtttgtcgtttcgcaaatggtagaaatgatgatgggtttttgatactgaattgagcctctgagcgaattctgatgagtaggaaaagcatcttcataatgaaggtcctaaatctcgtatgtgaattcctgttgataaagaaaatgatggttcacttggaactatacttgtgcaaaagaatcctattcttttttttttggtgcccttatggtgtatatgttgtgatagtaaacaaagaaaggaggtgttttgttttcggaaatggtggaaaaggaacttttgctcatctcaagttccctttctagctggccattttgcggagggggaaaaaccaactttccctgtaaaacagtgtgctttgatccttctatgttattcgttttgttcgtgaaattctttcgaggttgctgacatttttgtgttttccacatggaacaaagatctgccaccaagaatacagcaggccaac

SEQ ID NO: 10508 - DNA, 886 bp, Oryza sativa
  Intron number 1 from transcript LOC_Os08g38990.1 (locus LO C_Os08g38990) derived from phytozome v7.0 (chr-ID Chr8; po s 24646101 to 24646986 reverse strand)
aagaagtagcagcagcagcgagtgaggctaatctggtcagtttcagaacagattctttgttcggtctctatccattgcaagaacaggttttgttttttcttttccctttttttgggatcagagtctctccatttctgatgctgctgctgctgctgatgatgatgatgatgcaaggcttgtggcaacttgtttggtgaaagaacaacgagagggatactgggatagggatcaaaggcaaaggtttttgtttttaccccgtggtaattgttcgttcggtttgtgatgggatagttgctgggactgtgaatcattttgccccttcttatcatacagacaggcgcgtgatttgaccagcttgtcgtctctgctctgcctctatccatccatccattcatacatccaaccttgggggttcttgattctttttctcatttcttggggaggcttaattgttgctatcgccctccgcttcaggtgtccatttgaattcttcgtcgtttctttcgtatttaattgccatttgctgatttgcctctttatttcggtgggttttatggtaataaaggtgtggttcctttatcatcaaatttgaggtgttctgggttttctttggttcttttttggagcactggatttgtgtgctcttgtaaatcaaatagagtttgtggtttggttcgtattttacacaatcgagttgtgtttttattttagtttgtatcgaaatatttgcatacttgtttctagttccttcaggcttcagttctcttcattattataaaaaaaaatttggtcctttcgtccataatttttttcacaattccatttttgaatgtatgagcttgaattatgtgacttttcagtttgagcttgggattgtcaccttttc

SEQ ID NO: 10509 - DNA, 878 bp, Oryza sativa
  Intron number 1 from transcript LOC_Os07g41180.1 (locus LO C_Os07g41180) derived from phytozome v7.0 (chr-ID Chr7; po s 24657876 to 24658753 reverse strand)
gccgccgggagcccctccccctgcaaccgcgcaaggttcgactcctgttcctccgcccccccctctctctctcttgcaatctctgttttgttttgtttcgtgcacgatgatcgcggctggtagggcatgattcgtgcgcgtgcgtcccccccctcgtgttaattagggggttcttttgggtgatgtgtaattagggtttcgtttggttgatgtggtgtagtgataggggttttatgtgtggggaagaggtatccttgggggagatttaggttggggacgagttggttctaagattttgcgtttttggtcgggcgatggtatgagtgggatgtcccttttagtaggatttataatgttatgccttgaaaaaaaacctttttgttgtattgaattcctgtttattgtaggtttaccgtatattcagtgtttctaggtaccgtggtttgtgttaaataagtttttccttaatgtgtttaataagttttcaagttgttttggttattggtattgtcaaaataatcccaggttctgattgtagtgaaaatttgctggtttgtttgtttgtcaaagcgtaagcctttatgattcgaagtggaaagtcaaataatttgcatggattgttgttttttactttggttttcctttgctgtaacagtagttatctgctgcgtatatcatgttgttaccatcgggtttggctcctgagctgtggagctcatacccaggcattcgctgatctgccaattaattcaccttttctgttttattctggacccttactaatagctttaaaaacctctgtatttatgatgctgctattacttatgtattcgcctcaaagctttcggatattaatcagtgctataccttccacaggg

SEQ ID NO: 10510 - DNA, 868 bp, Oryza sativa
  Intron number 1 from transcript LOC_Os03g10940.1 (locus LO C_Os03g10940) derived from phytozome v7.0 (chr-ID Chr3; po s 5618512 to 5619379 reverse strand)
ggggtaagaactgattccttcccacctacgcctcgccgtgctaccgtgtgattgtcccccccccccccccccccactcgtgtcgtcgtcgcctagaataacgtagcgatgcgagatgattgcatctgtgactgtgtgtgtgttgctggagggttggggatagatcgtacgattgaactgcggagattgtgcgagctgcgaactagctgttgtcgatcggtgtgttgttcggcagtggtatcgctcgatgtggctattgggtctggtcatcatcgtgttgccaatttagagttggaccttctgtttttgatactgtatatttcgaaacctttgttaccaagctatgatcatacaattcctttcatctcggtgatagtttgaagtttgacaggaaggattagttgctaaagttttcctaattgtagttggggaggtatatatatattagttgaacaaatgggcactgttcttcaatactattgatggcctttttttttggtgggtcatctgactagatttatcatgtgagctgtgtgtgcattgagggaactacattctacactactaaaatcactcacaaatatattcattgagggaaaccattttatctcaatgtatggccagaggaggttttggtgaaataaactagatttgcaccaaccaatatgcctaactggataatagacagcatttacatgaccatatattgttatcatgattaaaaaatgttcttctaccttgctaatatctatttgactgttttaattgacaacttgggggaatgtgaagtaaaaaaaaatcaaactatttattttcttttagttatgctctgttaccaatggattgttcttctccattcagtgagcagg

SEQ ID NO: 10511 - DNA, 465 bp, Oryza sativa
  Intron number 2 from transcript LOC_Os05g47490.1 (locus LO C_Os05g47490) derived from phytozome v7.0 (chr-ID Chr5; po s 27141328 to 27141792)
cgtggaagtggtagaagcacactggattaacgcacagtgattgaactgaattcatttttactgtgaggaaatttctcctccttcgccacaaagttgtgtggcatgcacgaagaattttgtggcatactcaaattaacgataaaatacaactttgtggcaaaaaattgactatgccacaacactttgtggcaaaggagcagcgattttctcttttactgtttactgtagcatgttccattcccaatcttcactggagtcaagttttacatcagtagttcagttattctggtaaaaatgtactgcacaacaatgtgtagtcatttaaagtgtgatttctaatattgctcatgaaatgtatgaaacattgatgcctatgtgtgtgtggtactgctcatgaattgttttttcatctatctatttatcaaaacagctggaattcggccttagctaatctgacagtgttgt

SEQ ID NO: 10512 - DNA, 803 bp, Oryza sativa
  Intron number 2 from transcript LOC_Os03g07910.1 (locus LO C_Os03g07910) derived from phytozome v7.0 (chr-ID Chr3; po s 4023774 to 4024576)
ccgcggcgggcggcgccaagctcgtgcttctcccggtgagcgctcggttgatcataacgacctctcgttttgtctgctcgtccgatttaaatgggaggcggagaggtgaggattgagtgtgatggagtcatagctcggcaagggttcgcggataggatcataggaccacacgatcttagcgtggttacgtacattgaactgtgaatagcactagcactgttatgcacagtgacagaagacacctctcacttcacatcttagaaccatgaatgtgcctcttggattgtgtttccgcatgatttggtgaccagatggaatagtttgtactgttgcttgatcgggttatctcctagctgtgacaatttggtcttgctcttatgggtggactctgtatatttccaagaaaagtgcaccataagctgaatgcagagaattcagctcctcgaagctgaatcaggagcagattaaaattagaaccaaaaacaatgtcagaacgagtgcaacactaacatgcagtaaactgtagcgtgcatacatatatatatgggacatttaacttcttgccactatagtacagcacttttggtttctcttttttctgaagatcttttgacttggacataatatacttttacactacctatactacatgacttaacatgtatccacttgttcaaatctatgatctgagttgataatgacttggcaaggtcatgttgaggaatgctatttgtacaattgtacttatgcttcttgattacttttcgtctgtagcagttcttgtgtttattcttttaggagat

SEQ ID NO: 10513 - DNA, 1029 bp, Oryza sativa
  Intron number 2 from transcript LOC_Os08g34750.2 (locus LO C_Os08g34750) derived from phytozome v7.0 (chr-ID Chr8; po s 21842589 to 21843617 reverse strand)
ccggaaaaagtgatcgtgcaccgtgagtacccccaatcgatccacaggcaaatctatctcttgcggagttcagttgctctctgaattgtggattgtaaagcaaagtaagatcttttcgtttgtgtgcctattcgcatgtcttgggggtgatatcagggaaaattagaatgttgggaaagttttgacctctcggcataaaaaccgtgttttggtaatctatatagcgtagtcccactttgtggaagaaatcgagttttcgtaatcaacatgctagagtgcaggctacgctgaagaaatatggtttgagcatgcaggatggcaacatgaacatgccattgagacccagtcatttaggaaaaacatattaaccacttgtgccaacttgctaataattgtctagttgggcctgactaaaattaattttctaattgtgtgagaccgtgggagaatcggtagttcacaaattttaatcatacttatacttaagttactatatgagagagaaacataatggtagatccaccaaccagtgtgaccaaatgcatttgattctgttgaaatataattacatccatggattacataacttggagtggggatgaagtaacagaacctgccaaaagaccaccataaagaacactaaggatttatatgacaaaggttgcattgaccaagttagcgccatcagctagttgcagccaaatcttaacaatatactgctgtttgtgtgtgatatctatcatttagaatttcattcttgttgttccagaattatcagtttacatgacctggttctagatagttccattcaaagaaactcttcaagccaatcatcttgctcctcttttttagattgtgcagaggtaaaagtcttttagatttcaggatgatggatatgatgatacatcatttatcattccttctctagttatggttgtttcagtcactatcttgttttcctgtaataagatttagattgccacttcgcatgcaggaagccagtgcaattcggctacacaaacatttgac

SEQ ID NO: 10514 - DNA, 1037 bp, Oryza sativa
  Intron number 1 from transcript LOC_Os05g10370.1 (locus LO C_Os05g10370) derived from phytozome v7.0 (chr-ID Chr5; po s 5653230 to 5654266 reverse strand)
tccaacctcccctactacgccaagcacggattcgggtacgtatactatacgtacacgtacacgtacacaccactttccttgcagtattacctatacatatatatcttgtattatacgtgtattgctgcaggtatatacgcctcatttcagttgggacttacaccgcgcgctgacttggttatacatttatctactggcaacttgctggcaagataatactactatatatgaaaaaaatatctaaaaatctagctgatgtgacataattaattaagtgtcaaaattatgatgaactatttaatgtgcatacaaatatacagtatgtgaacgtattattaaattgagaccggcctgcctagttcacaaattaatataggaaatactggggtattacaaaatgtgaagtcaaagatgaaaagtatatatcatccaattaatgaatataacacagtaaaacattctcaaaatagtaaaaaatagcaaggagatgcgcatctatatatgcttagcaagattccaccggacattccaagacctcgcaaagaactagataactttaagcattatattgattaagaggataaaaagaacactatgcacttgtccatgtggctatttttaggcaaaccactgaaacctttattagattcttcaatcaataatttattactagcctgtaggaagtcagaaccctaaaaaaacagattggaccagcagatcaggtaatgagtgatgcaaacatgcacaggctggcagacagtacattttgtcgggcttatattgtccagcagtcatataagtcagatccaaaattcgttctttcaaaaaaaagatccaaaatttaatcgttatacaaattatgggtggatttatggaccactgcatgatgagggcgttagttagatctttcactaattgttaattttttcaaatatgcacaaaagttggaactttattttgaattcctgtaagttctaaattaatgaagagtttcattaatgattttttactaacacccggcagagctacactgtaca

SEQ ID NO: 10515 - DNA, 909 bp, Oryza sativa
  Intron number 3 from transcript LOC_Os04g57700.4 (locus LO C_Os04g57700) derived from phytozome v7.0 (chr-ID Chr4; po s 34164560 to 34165468 reverse strand)
ttgcattgcggtgttggtgggctacagttaagttactcttttcaaatgtcacattatctcttctgtttccttgttaacatatatgttgattctggtcatgtgcaaattgggtagaagaacttcttaacttcgctaaaaattaagtcagatgtacactgaagaccaaaattgacaccacctagcaccctcaccacattgctcttttgactttttgatagaggtgcttaagcgcttcatatatttaattttactttttataatcctttatttccttttgtgactgatgtgataatttgccatctgccaattacattctagatgtaggctgactttagtcccaaactttttcttcaaacttccaacttttccatcacatcaaaacttccctacacacacaaacttccaacttttccgtcatatcattccaatttcaatcaaactttcaattttggcgtgaactaaacacacccgtattgtaacttggagtatacagcttttaaagttctagcaaacgatcaattccaacaggcatatcaagtatacacagcatttaaggccataataatgacctgccctggctgaaatagacactttgtttgtttgttttattcttaatacaaagctgttcattgtggtttcagactggaaatagatactttgtttactttgtttgtttactcccgttaataccaaaatgtacaaagcttttgtgcctcccgtaaaatttggaaatagccaccatgatgcatgtagttgatatttagctgttgctgcatgcattgttttctcttacattgctcctccaacaggttatttgtttactggcttgcattagtatagcagctcatgcactgtattctgctcacattcgtttactgttacagagtaaagatagaaggaagaaacctg

SEQ ID NO: 10516 - DNA, 506 bp, Oryza sativa
  Intron number 2 from transcript LOC_Os04g57700.4 (locus LO C_Os04g57700) derived from phytozome v7.0 (chr-ID Chr4; po s 34165541 to 34166046 reverse strand)
cgtgagctgaacacactgaaggaagggcttgtgaggtagcaaatccctattccccttttgctttctgaattgctattgcctgtgctgtgctagtgtgacttgttgcttgtgcggttgtggctgatggaattttggttgtgcaacaagccgttttttctcccctcttatgtttaatggagcatcaatccggaacaggaaatctggagctggattcattcaattgaaccctgttaccttttgagttgagagcaatatcaatgaatgttctatagcacttttgtgattatttagcgtacttgtagaatcattgttcttaaccatagaacgtctttttcaccgggccagcgaaaccataaaacgtcttggtagccacacttgagtaccttacgactatatgtttgcactatagctgattaataaagtcactatccggtttgtcaatcttatctggggaccagaccatttcttttcagttcctcataatttcttcaatcttactggcagat

SEQ ID NO: 10517 - DNA, 952 bp, Oryza sativa
  Intron number 1 from transcript LOC_Os07g01600.1 (locus LO C_Os07g01600) derived from phytozome v7.0 (chr-ID Chr7; po s 373434 to 374385)
ctgctgcatctgctcttgctcttgctaccaattaaacgtcaccctcacccctcctcctcatgctgcagcctgcaggtaaccacctataattaataatccttgctacttttgctagcttttctacaagtttcaaactaagaattttatttcgtttgtgtttcaaaattaaatgcatatgttcaaacaattagtaataggagtagatatgatggacaactctcatttcttaattatttggtacttggttttttttaaagataatggaatgaaacattctggcctttgctcatcagagctacagccaattattacaaagtatcactcaaacaaagagtgtagttcaaaatgaaattaaacacacccaacaaaataaaagaccaaaccgagataaagagtacacatttattcaaatctatttgttaatctccatccataggagtagtttgcaaaaagttgcataattgtcgtctcaagcctacgacatacaaccttcataagctctccatcatcttcacacttttgcagctgtgcccaacaccggaaccaatatgttgtcttgaaaattacttgcaaatattagatagatggtgatttgtcaaatatcatatcattcttattcaaccacagagcccaacatatggcaaatgctcctacaagtatgagtttactcttcttgtcaaccctcaaaagccaatcatcaaacatattagatatggttcagtattacatattatacttgaattatatgtcttaaaattaatttattagcaaaatagcatgcttgtcaaatcagtaccatcaacgttaaacaaaaatgcatcttgcgcaatgcaaatccaaatcactactactatattacccgggcccgtgtctgcattattcaattcgtctgaattaatttgcttgcttgtactcactgtacttatcttgctggtgttaattttagttggga

SEQ ID NO: 10518 - DNA, 805 bp, Oryza sativa
  Intron number 2 from transcript LOC_Os04g52606.2 (locus LO C_Os04g52606) derived from phytozome v7.0 (chr-ID Chr4; po s 31109611 to 31110415 reverse strand)
gaagagctgcagaacctcaagcacctaacccatctgtatgacctctcagctttcttaccttagtggtgtaaaagatggaatatggtgttcgaacgaataggatataccgtcaggcaatttatcagaatatggccaacgattaatcggagttatatggtagacattcacactatatttacatattgatagttttcatggttctggacatattggaacacactctgatatcaaaataacaaaaatgtcattatattgctgttttgatcataatcctaaactataatgttgttactaactcatatgtcgtggagtggtcatttcacgcatatgcttgattagttttgggatttttcttttttgtccagaaaccttgggataatttgctgtgtgatagtgcattgtgcatataattctagtttttgccaaaatatagacgttcttgatttactattcccatcaggacttacttcgttagaggatttctacatagtccagttggtgtttacagaatcaccatcatatttcatagtggctataacttaaaaaggttcagcaacgcctttttgtgtttttctcttttttcagagtgtttctttgtgaagcgctctgctgtacatattttctcttcttcttaatgaaatgaaacgcgtggctcttgcattttcgagaaaaaaaaaacttgaaaaggtgttatggaacttacaactcaaccaatcatctatactcaaaactcatctctttcagaaattcaacaaaacatgttgtaaatatctgatttggtcaagtttcaggaatttatcacaaa

SEQ ID NO: 10519 - DNA, 904 bp, Oryza sativa
  Intron number 1 from transcript LOC_Os03g46530.1 (locus LO C_Os03g46530) derived from phytozome v7.0 (chr-ID Chr3; po s 26317913 to 26318816)
gctccgagaatactaaggagaaatataatcacaaggtagaaccaagttaccaaccgaccttaaaataagaaatataatcacaaagtagaactacaatctacaaaacacaatggaaggtatatggtatttgtatattaaaagaaaaataaatatttttaacagcaagaaataacacataaatatgagttatttgttgaaatttattaaaataaatattcttttggaatattttacaaggattacaataatttttataaaattcattatgcagcagcttcttctcctctgtttggaggcacatgtcagattttttggtttatagttgtgcgtaccatatatattatatatatgtccctttgtttcatattatgagtcgctctgactttttatagtcaaactttaaaaagtttgatcaaatttatagtaaaacatagcgacattttcaacataaaataagcatattattgaaatatattaaaagttattttaatgaaaccaaattgttgtaactgttgttgctatatgtttctaataatttgctcatttaaagaagtttgattaagaaagaggttaaagcgatttataatatcaaacggagggaatataatcattgaccgatactaagcgtaatagtgttcttctttcgactactagttcgttacataaacacctgcatcaagtctggtagttctcttatcccatttgtaaagcaaatatacgtagtacttttgttatgttaaggaaacacactgcagatgcctctacgaatttcttgaggatggatgaagcacagatgctgctaatttgcggaggattactagacgatgacaagaagctttcctatcgcttttgtaatgcaatctatttaggtttgtaaaccgcgagtttgtccaggaatttcgag

SEQ ID NO: 10520 - DNA, 679 bp, Oryza sativa
  Intron number 1 from transcript LOC_Os05g11560.1 (locus LO C_Os05g11560) derived from phytozome v7.0 (chr-ID Chr5; po s 6543765 to 6544443 reverse strand)
ttctctgtccaattcgcgcagaaggtatgtgcacatctcagaccaagatggtttcattttgatcaaattcatcttgagtttccctctcatagatatatgtagtatttccctttgatcctggaatgtatagccaagctcaaacaagttctccaatccctatgaccctacaataattctgcagagaacaataaagaattcagtagcataacaacactataacagacaaaggaaagatcaagatcagaatttcccatgtggcttgtttttagaggcgcatgtggtagtagcatccaaaattttcagtaataatatactgttgcggctacggcaaaatcccaaaaaagaattatctgttcttgtttgcgagtcattgtcgccttcatggagccaagtcttcaacatgattgcgtcttggtcatcggcagcaatagtagctttcacagaaattaggattgggttggctactatgacaagcaattgttgtcaatcttgggatcaaacgatgaacacgacattgctgctaatgatagatgatgatgatgaattgctgtttgtaaaatcaaagtgtgtttgattcttattctgcgatgaacaattgtcatctgagattattgtggttttgataaacacaaatgggggggcaggtgatcgcggagatcttggggacgttcttcctcat

SEQ ID NO: 10521 - DNA, 878 bp, Oryza sativa
  Intron number 1 from transcript LOC_Os05g27340.1 (locus LO C_Os05g27340) derived from phytozome v7.0 (chr-ID Chr5; po s 15831537 to 15832414)
ccggtggtgttctcgtcaccgtgaggagcggcgaggtgatggtgtgtgtgtgtcttttttttttggatttatcctcgaaatggatcggaatatcggttgcctagttttgttgcaggattgcatcatggacaggttaatttggtttcttggaccaaattttttcgtttcagctccgtacatctactaaatagtgtcattcagacattcagttagaatgaggatttcaattagcagtacgatggttctagagcttaaatcaaaactaaactagttgttcaattgtttctgcgatctccttgattttagcaagaaatttcaatatccgtactccataggaacgagaggtgaaaatcgaatcgtaaattcaccaaatgaaatactacatatgaagagacatgttagctgaacatggtcctgatgggaagggaagaacacgctatcgaacttgtgatgtgaatggaacagtgaagagtgtaatgtctaagtcgggacagtattttaaagcccataaaattctcttcttaggagatcatagaagaacttacaattagaccatcctagtaaaatgtagggaaaattagaaccatgccattataattttgcaaaatttgagatatgccatcctttcattatctaaaaatgggtgtagaggccgggttctttccattgtctaataaagtttttgtgcattagttattgatgtagcctggtatgtctgatgcatgacaaatattcttttaagttaatgtgcatgtttcttcatagtggtactttgtttgaactttccgaacatgatgtagaatatcttagagtatattattaagtgctaaattgtctttccagggagagtggcaagcattcagaggaaacagtttgga

SEQ ID NO: 10522 - DNA, 634 bp, Oryza sativa
  Intron number 1 from transcript LOC_Os08g16930.1 (locus LO C_Os08g16930) derived from phytozome v7.0 (chr-ID Chr8; po s 10366550 to 10367183)
agaatcttctccaggactacaaggagctcctcgaggtgggtgggtgggtgggtggattcatggcgtttcttggagtcatgccgtcgtggttggcttcgccgatctgatcttgatttttgggggttttgcgatttttcgatcggtttctctccggaagggggttttgtgatgtttgattttcctctcggtatttggggattttgtgattccgattggatcttggcggctttgtttcttgatcgattttattttcggtgttcttggttttctgattattcgaggggttttcttggtgtattttgtggatctggatttttttttacttgtgacaatattttgggttagatctgtggggttctgaaatttattatccttcttctcctaatattgaatgaattagcatgttttgatatgttccaagtcagctaataagtgtatcagttcattctggttcgtagttaaactttcttccaaggatcgcaactctcttaatctaggaggatttccacaaatgtggttcttgcaagtttgatggtgtttagtgtccatctcagttacttctattatgatgtttgctgatgattagctgtgttgggttacccaggaaactgaagcaaagaagaagagattacag

SEQ ID NO: 10523 - DNA, 527 bp, Oryza sativa
  Intron number 3 from transcript LOC_Os04g42360.1 (locus LO C_Os04g42360) derived from phytozome v7.0 (chr-ID Chr4; po s 24879595 to 24880121)
gccgcagattcctgagcccaccgcttcttgttccggtaagcttcgaaaggagttctttgtgtatctttttgttgtttcgaattgtgattttcttcctggttcttgtggatcgatgaatcctttttgcttcgattcccaagtgcttatcttggctctcccgaatcttttgatctttgggttctgcggaatctttcatggttcttgttttcttgttttttttttggctcatcttggctttcctgcataatcaccttcttgttttcttggttctgggttttaactcttcgtgtttatttggaatccttttcttgaaggagacaaaacgtgatatttttttataaaaatgatattagcgatttcactgatgaatctttgagaattttcttggtcctgtatgaaaaaaaatgccatcttttgtttgatgttcggtagtctttcacattttccttgccttagatagtttgctgtcattttatctcgggcagcgattaattatcgtgatatcttgatcagactttcctccggag

SEQ ID NO: 10524 - DNA, 778 bp, Oryza sativa
  Intron number 1 from transcript LOC_Os06g02210.1 (locus LO C_Os06g02210) derived from phytozome v7.0 (chr-ID Chr6; po s 680124 to 680901 reverse strand)
tcctccccttcgttgacctctacggtaactctgggccttccatttccaacccacatgcttgaatggataagtcttggcgtctttcattggcatttccaacatccaataactactgctaaaactgctaagtgaaccaaaataccaaaaacagaacaaatgcacatatggatacataatgctactattgaagtcagtggtagtttcagcattttttttcccgaaggacagtagtttcaacatttaaggacatcgaatacaagttttagatatacctgaatttgtcatatgtgatgaagccagcttgctctgcaaatttaaatgatctgcgctcaatcaagacctgaagaattcaacatgtgatggtttagcctgtcaattagcaatttcataatgtggtttggcacatcgtcccatttacttattgttggatgaacacatcaaagaacggggtacagctgtacaggaactgtaaagccgtaaaccaagatttcacatcatgttgatagatgcactataaaatagaaaactttgccataaggagaacacaaaaggaaaaaatacaataatataccacattttcattgtatcaaatattcattttacaggtttaatgaaattttatattccgctgatatattatattcccattcaatttcgattcagaacatctcatgtagtccttaattcttttacatcttataatggactctcaagaataaaatgctgaactcttcaaatttcaggacgaaggtatcacatcgggagtattagaggtgtc

SEQ ID NO: 10525 - DNA, 737 bp, Oryza sativa
  Intron number 1 from transcript LOC_Os08g36340.1 (locus LO C_Os08g36340) derived from phytozome v7.0 (chr-ID Chr8; po s 22902117 to 22902853)
ttgaagccggacagaaaaacaaagatgtaagtgagagtgattaaccgtagcgctatcattacatctcatcagtcgtacttgttcatcactatcttcatgatcagatcatctcctacgtaatacctagattggatacaaatccttggttaaccactgctaattaacttcatgatggggttaaccactgttaaactaacttcaagaaggaactcaggaaggtagatgattggtaagagcaggagtgctggttcccaaatgtttgggtttcattttttttataaaaaaaatacgcaaaaggaacagtgtatttttgtattaggataaataaggtttacaactaaagaaccaaaataagagagctaagcctattctcgagacatgaatgtggctaccagaatatttgggttgtggacagtaaaaatcagtaaaattaaccatgtagggatgtattggttgagtggttgatactgtttgctgttctcccctagtttcttctgaaaaaaagttttggacattggctaacaaagtgtatattatgtatgaatgaatgattatgctgatgtgtagttaagtgagtttgttgatctgtgcttgatgaaagcacatgtaatctggtgctgacattagtaaaccttgcattcacaaagatacaaatgtttgattctattttctacattatttaccctgctgttattgttgcagaagaaggggatcagccaagatctgatcctggctta

SEQ ID NO: 10526 - DNA, 648 bp, Oryza sativa
  Intron number 3 from transcript LOC_Os05g44810.3 (locus LO C_Os05g44810) derived from phytozome v7.0 (chr-ID Chr5; po s 25991761 to 25992408 reverse strand)
tcagctgcagcgcacagcagcaacccccaggggaggtaacaatacacttactgccttttatcctcttttctaccatggaagccatacttgtttttttcttgtcatcatgcatggtgacagcatgggtaactttgacagattacatatttttaatgttagttcatgctttcctatgaattcagctttcctagggtcccttcttttcttttctttttaattctaaaatgagctaagatctttcaaattgttccacttgttggtcatggctttctgaataaattgtcgtgagcattttgtgatatttattttggcttttgatacttagaatgatggtttaatcgtcaattttgccactcaaaggagaaaccttagtcaatttaaattgccaaaaggttgtcttttaatcaaccacgtagttactttctgtggctagtactcattgtggctcaaaccattgtttattggttaagtaatgatatgctttccatcagtggaacagtgtgttcttttaattatgggtttatgatttacgccacctacatacgcagactcccaatttttccaaaaataaatgaataaacccatcatttaccagtgctttaatttgatgtagaggtgctattcctccagtagtcggttggcctccaa

SEQ ID NO: 10527 - DNA, 497 bp, Oryza sativa
  Intron number 2 from transcript LOC_Os05g03430.3 (locus LO C_Os05g03430) derived from phytozome v7.0 (chr-ID Chr5; po s 1429055 to 1429551)
ccgactgagtcgggcagacccgtatgtctttctactatttgatttttctttgggtggggttaagcaggtaaatctgtggtggaaaccactgcattttttaaagaaaaatcaaaacaaaaacatatttagggaaggtgatagtacatgctcttgtaattccatgtgcaaacttgattttgcttgtgagatatgaaaatggaaaacagtgaacgaaaagacaaacatcaagaattcaagatgtgtggcttttaccttgttgtttctcaatttcatatctcattaatgaaattagttttgatcttctgatttcacacagtttaataatgtatcacctcctctgtgcatgagattacttggggattttttgaaacttgtacaaaatggtttccagtttatcaccatatattctacaaaatgggattaagttttgatttgctgcagctacatgctttgaatttgcagattttgggtcactgctggaaatccattactcccag

SEQ ID NO: 10528 - DNA, 968 bp, Oryza sativa
  Intron number 2 from transcript LOC_Os05g39870.1 (locus LO C_Os05g39870) derived from phytozome v7.0 (chr-ID Chr5; po s 23369700 to 23370667 reverse strand)
cagggtgagaagagggcatatcctccccgaccgtgatgcagagaatcatcgccctccgcttgccgcgcggccggatcgagtcgaatggagtccggtgctcggagcctcggatctgcctcgatcagcagctgagtcggtgagtctaattcgattgtgatctgtcatgctagtctccgttgagggatctgttgttggattgttgccggcttcactcgatttgattcgagttcttgttgattgggaacttctctttagtttttctgttgcgagattaacggtttttctccttgggttgtgtcccataaaatctcacggccaaagtgccaccagaacagaaaacaaactcaaaggaaggtatactcaatatgaaaaaaaaaatgatgcataagcattaaatttcatgccgtatgtgtcgacaaaagaacagtttatttcagtgtttctatcgagcattgcttttcgctgctacttggaaggagccaaaaaacaatatatgcatcccgatgcgattcaattgctcgcatcaaatatttggacatccatttttgtcacaaacacagatatattctcttcagttcttttttccgtcctatgtcagaggagtttctagccatcatagattgcagttgtagctgtctcgttcggtgaagcttcagttctgatatttgatcgcagctacaccccatgtactgaatctatgggaaacctcttcccttcctattgtatcgttagtgattttaaatcaaatgtattgcatttttccgcggatgcgagaaaattggattcttctggaattagatgccatcgatccacaattgtaacgtctaaaaaaatgtcttcttgatgttcccagttcgtataatacctgtgatgcagccatttgcgttatagatgttggactaatcttccattcttggcctgttcattttgcaggtagcatcttggtgaagactgaaagtgattcacct

SEQ ID NO: 10529 - DNA, 924 bp, Oryza sativa
  Intron number 1 from transcript LOC_Os08g19620.1 (locus LO C_Os08g19620) derived from phytozome v7.0 (chr-ID Chr8; po s 11735616 to 11736539)
atcttgtaagtctcgacactcttcctaacaccttgaagatatagatcttgttgatcttgatactcttattgacacctggaagatgtagattcagtagatctcgacactccttttgaaaccttgaagaggcagacgttgtaggtctcggtggggtccaccatgccccgaccatccacgggaaggggaacttagcttttctaaattcttagaagctgactaccaacccacagcttctcaaaatcttaagcttcggaaacatacccataggttttgcaaggaagctaggggatggcatcactgtcattgcgccgttatattggaccatgacgctaatgatgttgatgccataaaaatgatccattctcataataagttatgatggatctatttgtaaaataaaattttaaaaagatcaaaagtgaaaaatctagaagctggactttggttcagaatgttttgaagtaggagacagtggttcgtgctagtttaggagggttgtggtagggccgtagggtactgaaattaggcgagactagcaaagccataactgttgtgtccactacaatgatatcagacaacactatttaattattttactctttcttttcttttttacgctcttggaactatttagcatatccagaaaacatgacaagaagaaacatgaaacttctgttgtggcctaaatgatctgactagtgacgtctcatgcctaccactaggttgggaagttcagtaattaaactacctatatactctccccgttctataaaaacaaaaataatatatacgtgatatggcatatactagtactatatgaatctgaatagcttatttaaatttatagtactagaatatatcatatcttgtacaatatttatttttataggatcgagaaagtagactcatattacaagtggtacg

SEQ ID NO: 10530 - DNA, 669 bp, Oryza sativa
  Intron number 1 from transcript LOC_Os08g07590.1 (locus LO C_Os08g07590) derived from phytozome v7.0 (chr-ID Chr8; po s 4263187 to 4263855)
cgtcgtcgtcatcccgcgagtaccacagcgttgctgtaagtcaattaatgttactgtggatgcatggaattaagtactactcactccgtttcttttttttattattagttatttggatttttttctcagttaatcttctttaaatttaatcaaatttgtagaaaaatataataatatattcaatacaaaataaatatattgtcaaaatatatttgatgttaaattcagtgaaacttaatttggtgttgtagatgctactaatattttaaatatactaagtcaaacaaaaaaaattttgattaaagtcaaatgacttataatataataaaatagagggataataaaatagagggagtactatttccgttcaaaaatcgatgtcattaacatttttacataacattcattttattttgttaaagatttaatataaatatgtaaattataagtttatatcgtagtttctttaatgataaaataaatcagaataaaataaataatatttataattttttaaataactcaaacatatatgaaaatcaacgttatcatatattttaaaataaaagaagtattaattagcatccagctcagttacttatgtacgtgtgtgattgatcgattcattgactgaatgattgcggcggcagcaaacggtggcggcggctg

SEQ ID NO: 10531 - DNA, 955 bp, Oryza sativa
  Intron number 4 from transcript LOC_Os05g11710.1 (locus LO C_Os05g11710) derived from phytozome v7.0 (chr-ID Chr5; po s 6650331 to 6651285)
ttcggtatccaggagcacattgatcttggcatcaagtaggaccatctatctgtcttgcactcatgttaattcatacggtttcagtgtgctttccttctgtttatatggctatgacgaattggttgtggttgtccggtctctggacgtttatttacctgatgccattgcaatctgctttggtggataataggcttggtagatgttcctatgtgaaatataaacacatgtgcattcttgaatgctcagttgctcgttctttacatttgccgttataaatcattattctatcatataccgaatgattttatttgcacatatagcctactagttttgttccttaagtcattgtatgtcatttcataaatgccacaatttgatccttagtcattgtatgtcatttcataaatgccacaatttgacattgcatggaatttctgatgtgtgcgccattgtttatttctacatgaagtggaaatttgtgatgcatgaacgaaatttttgcccctctttggtactgtcctagtttaaatagttttacatagaagttattttatatgaacccaggtgtaactataggggcttatgacctcaagttagataatgttattccaggttaaatatcttaatttaaccatgattaaccaagatcagaacactgttctcatctttatcaaatagtttacttttgattgtttttgtgaccttatattacgatgtttcttgtctacaattaacattctgcaacattccttatgtttcctagtttatattttggtgttactttgcaactcatttgcttgagccacttgtatatctgaaacaccttttctgtgctttgtattgtagataattcgtattgtagacaatcttataccaagcgtaactaggagtactcgtgctaagagaattaacttgtctaatcaatgtttcaggtacgacccgtcaactggtattt

SEQ ID NO: 10532 - DNA, 1006 bp, Oryza sativa
  Intron number 1 from transcript LOC_Os06g13100.2 (locus LO C_Os06g13100) derived from phytozome v7.0 (chr-ID Chr6; po s 7189125 to 7190130 reverse strand)
tggctcgccgcccagaacacgtggggcgtcctcaggttgtccccctcccaattcctttgccttcttcttgctcgtgatcccctactgtttggggggactgattggttgatgcctcggttctttaggagatgacaatgggtggctcgatcgaaattgggggttcttagcgcggccaagtgttggtagtggctagtaatctaatcgcctgaggctgcttagtattgagaaattgttggtgctcttcccttacttgtgtgacattcagtgtcatgatttacaattgaataggtgttttgctaaattgccgtcctactgtgccaattggataacgaaaacttacagttccatcaaaattcctcgcaaagaaaataaataaatatagacaatattcttcaaattggtgtgaagttggaaacctctggccacgttttaatgtctgcatacatcattaggtcaaatataccagacagatttttatctagtaatgaaaagctatggttttagcatcaaggtcaatatagctttttccccccatattatttagagcataagttactcatatgtgtcatgtattacttgaaattaattgtaaaagtcataaaaagtatgaaagtttcttaactaatattttagtacttgttcaggtgaaaacaaggatattcaagattctaaatagtctttgatttctaagaaaacaaatttcaaattaagcaggcaaaataaaactattgataaaaactaattgattgagtagcggtacagcatttagtggatttagcagagttgtcatagctgccttcgctggtttttacatgatactacaatagcgtagcagtcactgtcaaaaaatacttacgcgagtgcagttggctatttaaaacactattgtatattgttttgactttcttttaataatgtatctgctagatgtccactgattgttcactcacatatgcaatttctttttgcagcacaatatcaagtgatctaagtggagctccttttg

SEQ ID NO: 10533 - DNA, 807 bp, Oryza sativa
  Intron number 1 from transcript LOC_Os08g06130.1 (locus LO C_Os08g06130) derived from phytozome v7.0 (chr-ID Chr8; po s 3385048 to 3385854 reverse strand)
ccccgtccgcccggcccgcgcccctctccaaggtaacaacctgccctcctcctcctcctcctcctcctctaccctcttcttgattgtctctcatgccccgccaccgcgcgttcttcggctggtacggcgtgttcttccgctccctgatgatcggcaccgtcgatttggtgcgcggggggggggggggggggggctttgcgaaggatccggtctttgtgtgtggttcattcgcgtcaagtgtgtgaggagtgaggtttttcgattttcagttggtagaatttagttgagattaagtagtacctgaaaccgatcggcgatcatcaaaatttttgttattgttctgcacttttgaatttacttactctctctcggtttcatctgagagatgagtttgttcattgagtatcaaatcattggcgcaataatgtggatgtttatttggggctatttgcgccgcagtctgatttcatgcgattatcctatcttattttcagttagtattacttactccctccagttccataattcttgacgttttagacaagtttaaagttaaacttttgtaactttggttgttaataactttaaaagtatttagtttaaaggaacaacatttatagatttatctttcaaagtactataagaaaagtaaacatgcatttatttattgtatatattataatagaaaaataaaatcaaagatatattttggagattgtgtcattgtccaaaacgtcaagaattatggaacgggagggagtatgcatcatggcattgatttcacgtttgttcttggatgcttaggtg

SEQ ID NO: 10534 - DNA, 685 bp, Oryza sativa
  Intron number 5 from transcript LOC_Os08g05320.3 (locus LO C_Os08g05320) derived from phytozome v7.0 (chr-ID Chr8; po s 2788971 to 2789655 reverse strand)
ctttcttgatcttggacaaggttagtctcatgatattttatgaatgccatcatgcaactggaaaccacccttatacttgtaatgaaggtattatgaaataccatcttatcatgtttttttttttgttttgacactaccatgaatatttgcattcaggtttttcttttttgtgtttgtcataagttataacttatcacaatctcaggagttctattacaaatcagaacataagccaagtgtgtttggtatgacagcatcacctgttataagaaaagggaagtattcagttttctgcaagaactatatagaatgcttcttcttcttttcttttgtgagtgggtgggtaggtgcccggggggctcgatggaggatgggatgttaaacctcatttgtttcaactctggttcagagatgcataagttagagaagatcagcaataaatttcttgtaaacagtagcatttaggatatgtgttaattctgacctgccatcccagagaaatatccaggaacaatgatcacgcacatattctccagtttcactttggccatagagttcataaatgccaatatttctggcagatttgatttattcccatcacttagtaaatcttattggatgatttgagtttttcatggttgtctttgcaggtgtctcttctcatttggattgtgaaggtcagttc

SEQ ID NO: 10535 - DNA, 971 bp, Oryza sativa
  Intron number 2 from transcript LOC_Os04g57190.1 (locus LO C_Os04g57190) derived from phytozome v7.0 (chr-ID Chr4; po s 33890860 to 33891830 reverse strand)
tcgccgtcgtcttctgcttccccgatccaacccaggtgcattcatcactttgctccagaatttgttttctgtttcgcgagttttgagaaaaatcaggggctcgatctccgctcacccatacaaatgcataatgtttcctgatttgccttctacaaccgtgtaactccaatataagtggatgatcaatgatcatcttgcgatgtgtcttaactgaaactatgtatactgctgtgagggtcaagttggagcttatatctgttccttcgcatagccggttaggtcgcgtgtctcaatttttttgacttggcttccgtgtgctcgactaaattcgatgctacacccacgtcagtactcttaaatatcattttcaggagttgttcttctcaaaaaggaccattgaacactatatctctttgtcatcattgaaatctctccagattaatgtacaagttccagacttcagtgcttcatatgctgtatagacatgagatcactgaggtgcttcagtgattgttttaatgttgttactatacccccattgcttcacaagagtgcccaaaaactagttttgtggcatgtttgacctgttgaggagagataaaatggccatgacctttgttatgtatgtttgacatctctaataagctataattggggcagaaggttcactatttaatatctccatttatatattctgtcagatattccctggttgttaggtgcataatcttatataaaagggtaatagaacctctatggctctatgcatttatagttcaactactctgtgatatacgcatctcaaccaataattaaatgtgtttttttatgatgatatatggacatgttgattgtttctgtgaaatgtgtgtaaagaatctctctctttttaatgtacatttactagcttagtactattatgggtttcagcctttacttgatttacacacttagccctacttcggtgcagg

SEQ ID NO: 10536 - DNA, 675 bp, Oryza sativa
  Intron number 4 from transcript LOC_Os04g46930.2 (locus LO C_Os04g46930) derived from phytozome v7.0 (chr-ID Chr4; po s 27639661 to 27640335 reverse strand)
cttgttcacccattcaataataaaaacactatcaggtatgatttctctgttctaagttcttttttattgagttgctctgttgctatgcggaaagtttgttcatatctcaaatcatgaacacattgtacagagactaaaagctgtttgctttaacatatcatacccctagatactggtgctgctaaagtctaagtggattgaacatgtcactagtactctattgtttatctggtagtcccaattcctgagcttactactttgatgcaaaagaagtccatttgggatttgaaatggacagagcggggtgaactttgataggctcttcttcttacgagtatatgaaattacttgatagtagccttggttcactatcaattcatgaaatcagcacttaattcaaactgtatatgatatcattactcttaaatcatatttcatccaggtttcatgattttttttatataccagcctagactaaaaagggcaatatctacttgacatatttcatacagcttgtgtttaacaaccttagtttctttccatgtcttgccactttaaaatgtgtactcttagcttattgaatagcaaacatgaacttttcagtgaatcatgcaaattctgatatgatgttttctttcagtggtcaaggtacagtgtctctcgaacttttggagg

SEQ ID NO: 10537 - DNA, 760 bp, Oryza sativa
  Intron number 3 from transcript LOC_Os06g13780.1 (locus LO C_Os06g13780) derived from phytozome v7.0 (chr-ID Chr6; po s 7641749 to 7642508)
tgttttggtactgttgctgctttcaaatttattggttaactgaacttaaagctgttttgcattgataatacttcactactctttgacatattatattttcctacatggaagcaattgtacgaactagccgactgatatgttctatttttcaaattcaacatcgaaataaaaatagcatatgcttatgttaccatttttctattgtgtggacaagtcatagcaaaaaaatgtgttgcaattctacataaagtcatataattcaaatgggacatttcaaattgcatgatatgtaacgtcagaggagctcttatagataatgtacagataatatgtgttttgatgctctttgtatttcaagcattaggtaggctttcagtcacttactgattagcatttttctttgtatgtttgctctctctgcccacttagttcttaatgtagtttctagatgacttagatttggtactaatagaactagattttaagttaaatggatgatttatatgcaggaagatccgatttgcttcgatactctactatctacatgccattttcagtatttttgttgtacgactgctatacttatcctagcattgctatatatcattggaccaaatggattagatccttctttacacttttaattctcttagctggtagatcattgaatggttaatatgctcaattttgggttgcatgctaatatggtgtatatttgtctgcaggatattttttcccttccatttccctatcatccttc

SEQ ID NO: 10538 - DNA, 1037 bp, Oryza sativa
  Intron number 2 from transcript LOC_Os03g27040.1 (locus LO C_Os03g27040) derived from phytozome v7.0 (chr-ID Chr3; po s 15479244 to 15480280 reverse strand)
gcgccgcgagcgtgaagcggattctcgagagccaggttgttcgaggccctcatccttaattaatttctacagcattttttttctcttcttttgttcctacatagtaggacaacgattgcagatttgtgtttgaatagattggggatttttttccctccacatcaaatgaaggaatttatcaaatgtattcaagcttagttagtgcttgctagagcaaggaccataagaaaaaaagagtcattgttcgatcagattaactactgtggccaggaatgggaacaaacgctttctttgtagtgcagtaaactcctgtcgttaattagtgtaactttttctgctactccaagaatccttaaaagcagtttctctttttcaccgagaggtgaatactgaagacatgttgccgtgatattcttaatgtgggtgtgtgttcacgccaaaattggaagtttgattgaaattggaacgatgtgacggaaaagttggaagtttatgtgtgtaggaaagttttgatgtgatggaaaagttggaagttcgaagaaaaagttgggaactaaaataggccagtatcatgttatcaaactgccaaagctacagggcaatgaaatacatcgtcattggggacaccaaacacctgacattctttgaacttgctgttgcgtagtagttttgtgctttgcttcaaataacgcagatttacagcttttgcatatctggggttctgaatgcatcttctgtctgaatttaagaaaccacacaaacgtttgttagtactacttggtaaaaagagacattctttggatgaacaaattgtaaatttgcttaattcagaactatgtgtttgctattgaattcatgttttagtgtacatattttcctcttatctgttgtgcactacactcaacctttcaccttttataacgcccgctttcacttgttatctctgtttacgtatttaattacatggtgtgcaactgacaatttttttacttacttttgtagcctgaggttacttctgccacagtcgactttgagaa

SEQ ID NO: 10539 - DNA, 557 bp, Oryza sativa
  Intron number 1 from transcript LOC_Os08g04580.1 (locus LO C_Os08g04580) derived from phytozome v7.0 (chr-ID Chr8; po s 2284189 to 2284745 reverse strand)
gtccggcagccgtggttcattcgaggaagtcagtgaggttttttcgtttttccattgagaaaaaattcaacctagaagaggatgtgactctcgtaggagttcaaattcgtcctcctacttctacgttaagttttttcttagacgaagagagtatatgcttatcatgaattgttttctcttcatgtgatgtgcaacgtttcgctgtttatgtttatgcttatcaagcaattactacgatgaaaaaaaaacaatttcaaaatccaaattaaatattgaactttaatttttggctactaactccgtcacaaaatatagtaatttttggctatgaatctagacaaacagttgtctagattggaagctaaaaatgcttatattttgggacggatggagtataaaataaactacgatgaagaaccacgtaatcaatatcagaattaaattctaaaaattcaaatggtttatagacataaggaagcggtggggttgtctgtccggatccggaatactgttaattgtttgttttctactagtacatggacttgttgttgttagtt

SEQ ID NO: 10540 - DNA, 712 bp, Oryza sativa
  Intron number 1 from transcript LOC_Os06g03770.1 (locus LO C_Os06g03770) derived from phytozome v7.0 (chr-ID Chr6; po s 1500356 to 1501067 reverse strand)
tggtaacttgtggttactggcttactgcattgtgcttattgcatttggtttagtttcgatttggggatggttagaggcagtagtggttgattatgtattttgtattgtatcaatacttcagtcaaacaagcgagtttcctagcaaaacagtcggctgtagactgtagtagatgtgattagttactagtttgaccgatacaggaacttaaaaaaggattattaagcattgtggatggcattgctgggcgcatttggttttgtttcagtgttattctcagtccttgcaaaaggataaatttatcagaaatttactatacccttgtttcctttgtcattgctgacattcgtgcgttcaagttgatatttgttatgcttctgatgattttttcagacttaatccatcagatcacaaaataaagtacaaacacgcttactcacattttttcatatatatgattacaagcaataatatttgctacgcttgtgatgattctgtcaagcaattttttggtatttaaaatgcattgttttcatctttattaaatgttcttcaagtatctcacggttgatttcaactctagtaatcaatatccaatacagaaaattgagtctgagtttggttacttggctctgttgttttcctttgtactatgaaaggactcatttgttgagtttgtttttttgtgattcttgccatgtttgcagagaggac

SEQ ID NO: 10541 - DNA, 792 bp, Oryza sativa
  Intron number 1 from transcript LOC_Os05g11460.1 (locus LO C_Os05g11460) derived from phytozome v7.0 (chr-ID Chr5; po s 6485144 to 6485935 reverse strand)
gttgctcgacgcaggcagagaggaggaactcgcgggtagacgagacaaagtcgaggcggaggggaaggcggacagaaaggttgcccatgacggaggaaagagggagacaaggggagtgagtatgggagtggggattaatttatctcgcggcaacggaatcctttgggttagtttttctcaaaaaaaaaagattttgactgaaatccaagtgcaaaacaaataatcgtaaaacataggaataatcatttgcttggaccacagaaaaaacacgctaatcaaataagagaggtagtctcgaaggaaatttttcaagaggttagaactcaggaaatttttcaagaggttagaactattactatgttttctccaaaatctctatagtactgtttatttcatatgaattttaaaggatatgatcgaattaaatcatttatttcaaatatcttcatatggaatttcttataggattgaaatcctccaaaattcctatatttgtttacaaatcaaacggacccatggacagggcccatagtgtccagttatatttgtggatacttaaattatgtttactcccctaaactttttctttggatcccttaccctcagcaaattatttggctcattttacactaacctattaaacatagttcagttaataatatttatcttgttttccactttatacaagttatattttaagctgaaattattttatcgctatagttgacaccatcatggatgttcaaaaatattcttaattttttattaatgtttgctttctttaaaatctag

SEQ ID NO: 10542 - DNA, 679 bp, Oryza sativa
  Intron number 1 from transcript LOC_Os04g56590.1 (locus LO C_Os04g56590) derived from phytozome v7.0 (chr-ID Chr4; po s 33560869 to 33561547 reverse strand)
cggagacggagtacttccccgagaagcggaatctggtgaggaggaggcttccccgattacctgtctcggatgcgtgcttcgcttcgcttcgttatgccccgattaggttggggggtttgattggtctggattcgttttggcgttgtggaccgcgtggtgtatttggttgctgcttctgcggcgagattcgtagtggtcggattagtccaaatgatggtaatggtggttgatgttgaaatacgaatggttaatatgtgactggatttggctggactataggggctccccatttcattaggaatagtttttgtgttgaatgttatgttgtagagtttgagccacatctgcgtgggactgaattgtacagtttatgttcttctaagtcagtgttaggaatagtttttttattgtgaagtgctttgctatatgaaacgattacttgaatttgttatcgtgaagtttgagctattattggaacaatgaaaactcacatgggtttatttaagcagttctagggcaattaattgtttggaaatgtgtttgatggatataaaaggaacgtttgagcataatcagtttgtctttgcaaacaggcaaaatgattacttatagttttatggctaatattgtgttactgtgttcaggaggatctttggctatcagcatttccggttgggac

SEQ ID NO: 10543 - DNA, 960 bp, Oryza sativa
  Intron number 1 from transcript LOC_Os07g06660.1 (locus LO C_Os07g06660) derived from phytozome v7.0 (chr-ID Chr7; po s 3245144 to 3246103 reverse strand)
ggagcaactcgtcacggcgcaggaggcgtcccagggtgagtgagtgagtgagttcttgggtgcttgatgttgcagtggtagctgttcgattgagtgttcctgttaaagatttactggctgatttcgggagtgtttcaagaatcaagatcagtctgaactctgaactgtaccctggagctacatatgaacaagagttagtaaatcttggtgatgtttagtggtaggggaatttgatcacgatgtgcaccaatctatttagctcaacactagtattacttttagtagcaaattcgaagttctaggggggttgcagctttgcctattagagtggaggagagtggataatgtagtgcagactgcagactatgaaattgatactcgctgatttgatggtacagagtataggcatatgtgcaattgtggttaagttgtagaggtgcaaatgttcaatatgcttgtaccgtgcatacatttaattttacagttctatgtagcatacatcgatatgaagaatcacactgaaatatgttctctaaacatgcaaaattcatgttagtttttttacatctaaaaccacaaaccagtagtgctttttattggctggttctgacaaggcaaaatatggaatactaaaactgtttttgtgtagattgttaaacagccatgaccagactgaactgctcaacaatccttactttcttttttgtcttgagcaagagagttaagccactatttccatcaaggaaacaagaatcatcacaataattccaaagttaattaatagtcatataagcacaatgtgcatttgctttgaaattttgggtgctgagatgctgactacattttcctttgtatagcttttgtttggtttttggtactcatattggctatagctagagtaagtgccccttttctctgaaccaaatcaaacatgcatgatttctggtgcagaacctgctt

SEQ ID NO: 10544 - DNA, 1006 bp, Oryza sativa
  Intron number 1 from transcript LOC_Os08g14230.1 (locus LO C_Os08g14230) derived from phytozome v7.0 (chr-ID Chr8; po s 8507598 to 8508603)
attccccgctccgatctccgccgcctccctcccaggtcggtgctctcgatcttccgccgcttgctttttttttttgtttttttttggagatagtttgcttgagctttggtggactaatggtggactcgccgcttatcgcggcggcatgcgcgtggaggtatccggaggtgagcggagggggggaggcggccgtggttagggtaggaggagacggggttcaggagggggtggggggtggggtggagttgcggcggggagcttcgcatttgctggttatttgggaggtatggagccgggttgggtgggggctaatcgcgtgaggttttaagcttggttgctatgaggggaggaatggtttggggggtggtgatgcttcagtgagctgtgttctgtccagcctcgcgcggcgggcggcgcctagtggttgggagactgggagtgctcatttgattgattgatccagattcgtgcctctcggtgcctgcttaaccatttggaattggatcattgttcaattgtgtagacataacccttaggaagcgcaaacttcttagcttgctgcattgctttgacagttctagtcattgtttggggaacttagggtcatgtcccatggtcatgttggttgtgaaatgcaaatgtgctagtcagacttctacaatacattggagtgtgtatttcgatgcggaaatggcgtactgcatatttttcacattctatatggggcatgtagtcaccattagtgatatgatagtatgcctgttttggttcatccttactttaatgttagtagacattgtatcatcaaagctgactttctttatataaccagaatacctaatacttggcatgtcttcggtcgtgtttcttaacaactgaactatctagtttaattttcgtaaaaaaggaaaaccaagtgcattttcgtttgctaattaattactgcccaccttttctacccctgtttacagcatactattagctctcctgtgaaagagaagaattg

SEQ ID NO: 10545 - DNA, 603 bp, Oryza sativa
  Intron number 2 from transcript LOC_Os08g14230.1 (locus LO C_Os08g14230) derived from phytozome v7.0 (chr-ID Chr8; po s 8508647 to 8509249)
ttggatccagcttttcgtggtgctgggcaaaaggagtatccttttttttaatttcaccttagtgtactttcctctattgctttcattatcttcaccttgattgaagtcacttaatttgcaagataacattacttaagtcaaccaggaaaacttctttgtgcatgttgaaactctgaatttgtggtttagttgttttttgtccataagttgagtgaacactatctaccatgttgaattaattggtcctaagaagataatttaattgtacacttctgctaaaacaagtaaaatgcatttgtttgctagatgatcatgaatttgcaatgctactgtgcacacatatgaagtatcctgacaggtgcaagcttcttgacaatatgctagacattagcattagcagagtagaagttaatgagataacaatgatcacagggtctgtagtgatttagcagaagcctttttttctttaaatattcattaaactcttgatcttttttgagtatttacaattgacaatctgttcagttcactattttattggtcctagtccaatcaatgtacaaagccacgattatccttaatacactacagaggcttggaaat

SEQ ID NO: 10546 - DNA, 774 bp, Oryza sativa
  Intron number 3 from transcript LOC_Os08g14230.1 (locus LO C_Os08g14230) derived from phytozome v7.0 (chr-ID Chr8; po s 8509314 to 8510087)
ggtgattcttacatcatcttgaaggtatccaagtacatattatatggtgtcataactcataatccatatatcatcctctcttttgtcctcttattcatatcattagtcttttgcctaaaatagtctatccatgttcagttatagagtataaatttatgcttattctatagcttgctcaaccatataaatgttcgcctgttttacatggcaaaattgtttagcattttcatggtactccctccgtcccacaatataagggattttcagtttttgcttgtaacgtttgaccactcgtcttattcaaattttttttgcaaatataaaaaatgaaaagttgtgcttaaagtactatagataataaagtaagtcacaaataaaataattaataatttcaaaaaattttgaataagacgagtggtcaaacgttacaagcaaaaactcaaaatcccttatattatgggacggagggagtatctagcaagcctcataaaaagctcccaagtgtttgcccccatgttactgcaatatgacagtttcattcatatgtactgttctctcatggttttaggaaactgaaatagtttcttaaattttctctgacaccacagctctaaatctcttattaccatattatgacataaactatcttctgaaatttactgttttgcatctaattctcatggaaaaagggaaatgctttgctgcataattctcaatcaatgtaataatgtttcatcgtgctctttttttcttcctagacaactgccttgaaaa

SEQ ID NO: 10547 - DNA, 757 bp, Oryza sativa
  Intron number 1 from transcript LOC_Os04g12840.1 (locus LO C_Os04g12840) derived from phytozome v7.0 (chr-ID Chr4; po s 7085501 to 7086257)
gccacggtaaaaggactaataaatctaaatcgacataatagccccgatagcgcaagacatcgagacaaattacctcttgtcgagagatcgcagccgatgccccggcattaagcaagaactcaacaaaaagtaaaagaaaagggtggcaacgtgccgaaagttgtattgatttgattgtctcctgcatgacaatggtcaggggtttatatttatatcccgagtacaaaacttgccgattatagacacgactcaaaactttcctaaagataaaatacaaacaagtccacatggcggactcttaccacatctctaactcaaaccgacataaatatcctaattaatagatacaattgccttaaacgagctttttctctaaatggcaataacggttaatctcaatcgtagcccaaaccgagcctaagtcaagccgtatcggctacttgccatatcggctcaattagattccgactctgttttcagccgatatactgctagccgatgcgcaatctgttttggcaagatttaatctcctttgattccgcttcgatatctaactccaaatccgagtctattttgccaaatttcgatgttaacagattgtactatatttatacctgttaaatttttagaaaaaaatttatcgacaaatatatagcaaaatttttatacgtttcttactttaacatcacaaaaatatcttctgatagcttttaaattattgtaaaacaggaatttcgaggggttggaacattaaggg

SEQ ID NO: 10548 - DNA, 586 bp, Oryza sativa
  Intron number 3 from transcript LOC_Os04g20280.1 (locus LO C_Os04g20280) derived from phytozome v7.0 (chr-ID Chr4; po s 11327046 to 11327631)
cgctgcagttcgcgcagaccgccgccttcttggaggtctggtttttctgctattctgtgcgctctgacttatttttgaattttaatcgcagtaaaactgtagattttagcgcaagcttgtataatttgggcagctctgacttaattttgaatttttcgtctacccaattagggttgctggtgttgagcaatggcacagaggaaaaaaatttatccccttttgcgttctaaaaatcaaccaaacatttagcctgagagaaatattaccagtgttatagcaaaatatactgcaattaattcaacttcaatgttattatgtttctgctgcctgatcctctcccccgataattctgctaaaaagaaaagaaaaatttctgctgccctatactttgtgttaaattccttgtagttccctggataaggaagcatttatattctttgcacggagcagctgaacgagtctgcggtgaacacagaatgaacgagtattccatgtttatttcatttctttgcaaattgtgttttgtgaggtactgaacatttttgtgtttgtttggcgatggcgttgctggtggctcagattcttc

SEQ ID NO: 10549 - DNA, 880 bp, Oryza sativa
  Intron number 3 from transcript LOC_Os08g18079.1 (locus LO C_Os08g18079) derived from phytozome v7.0 (chr-ID Chr8; po s 11073606 to 11074485)
acccatcaactcttggactgatcccatatcggtatgcacaacgctgctatccccctgttcataccttcctgtccattcagtttcacatggatgatgtggaaagacaaccccatcttcttgcagttttcacttgctaattgttgtgcttacagctgtgtttctattttgagacatagatgctcttttcctgtcttcactagggtggtgttatatgtggtcattagatttctcatcagattacttaggtttagcttaatggcaatgtactatgtttatgctatgagcagatgatgcgtctcttcagtttcctcagcttccttccatttccaacaaattatatttaaaatttgtgaatttattgcccatcattttttttggtagaattgacagagtaccagtgcattaatggtgttcatttggacaatctttagcaatttttatgcatacaccatcaagcattatttgtaaacctgacaagttacaatcctggcatattaccagttaaccaaatccaaccattgaatttggataggtaccgttcttatacatccaaatcttagttgacttaatctatttaactccatatgcattttgaatagaggttactctaggtccatagatttatagttctctgtttgtttttctactgatttttgcaaaatgttacctccggttcctaaatatgtaacctgttatctttggctatttctttatgatagaatctacaatatttatgtggtctttcttacgcaattactattatatgtgattcacacaagcattttggaacttattgatagtgatggtgcccatcctcacattaaaacatatgttcctaatttcaggtttgccatttataatagtagttgacatcaacaac

SEQ ID NO: 10550 - DNA, 738 bp, Oryza sativa
  Intron number 1 from transcript LOC_Os05g04550.2 (locus LO C_Os05g04550) derived from phytozome v7.0 (chr-ID Chr5; po s 2116066 to 2116803 reverse strand)
tgctcaggcacccccacgtcgtccgcctccacgaggtcaaaattccatttcatccttctctcgcttcgcttccttaataaaccgcctaattcgtccaaattagtttatttagataatggattcgtcgaaattagtttgagttcgcaccggagattcgatcgaaaacacgagttttctttttttttatttatttattagtgatttatttagcttgcaaattgcgtggttcgcctccgccgccgcggccgccggtttctcgccgtcgacggcgccgccgtgtgaaatgccacgtggagcagccgatcccgcagccgcacgtagactaggctcgtgccacgtggcgttggtccacctggcagtgtgggcccacgcggcgcaccgtcgtctggtgggtcccccaattatttttgctggaccacggagactttgtctggtgagaaccggatgcctctcgccggaattgttcgccgtcaacgtcaccgtcttctccatctccggcgggtgctcgtgatcccaaatgtgcccacgcatggccattgccgactagtgggtagcaccgtcgttgtcgaatttatgtcacgttttttttttctttcactacgaaaacgagagaaaattctatggttcagtttcatgtaagcaactaacttaagagagtaatgtcacatcacatgatcacgtcttaatcttgttcttcgactcttgattcaggttgctgctagcaaaactaagatttac

SEQ ID NO: 10551 - DNA, 654 bp, Oryza sativa
  Intron number 1 from transcript LOC_Os05g48290.3 (locus LO C_Os05g48290) derived from phytozome v7.0 (chr-ID Chr5; po s 27621355 to 27622008)
gcttgccgaagctcctcctcctcgccgacgaggtacggccgcccttccctactctatggctcctctgatccttgctctccatctgcggagccttaggtttctgtccgttcgtggctggagcattcttgatttgtggctttatcacaagttccttttccgcgcgatggagatatggtttctcagttagatttgcgaaggttttagcttgtgttgagtgaaatgatgcccgtagtcgtgtggtattccttagatctatgtgtttttttggatttattttttgtgcttgatatggaatgtggcactgtgaaacctgacggagctattacttgtttgaactgttattagaatgctagttactgccgtccgaggtacctgatcactcgctggtattaagtgatactgaaaacttgagcttaagtgtgcattgtcatatagatgcaacaatttaagaacactcgtagtagcatttacgagtggcaatcagtacacatccaatcgtctgatccatcgacatccctgttcaactgctcctccttgtttatgattgaagctaatttatcatgttttctctcttccctctgcacctcacttttgtttgcgtacttgttttgactctatttccacgtatattccaggttgatagactgcttaagg

SEQ ID NO: 10552 - DNA, 428 bp, Oryza sativa
  Intron number 1 from transcript LOC_Os08g25100.1 (locus LO C_Os08g25100) derived from phytozome v7.0 (chr-ID Chr8; po s 15235612 to 15236039)
gctcacaggtgccctcctcccttttcccatggcggcaagcaatgaagagagaagagtgtgctagaggagagagatgaacaattgttttttattccttatggctaggcattagccataagggtagctcaaccaaaagtccgctataaatactactcccacaatgtatatagactacttaggaggcttaagaccccctctatttccacaatgtggtcgctctaagttaaaacttaaatataaagtaattttatattgttttgatcgtagattatttatatcattcgcttttgagtcactaagcactcatacataaaattttacccataaaatatattttgattcctaatagacactatggataagcataagttaaacaatgggatttctaaccagaatcattcaagggctttcaaagtcaactaaaagaa

SEQ ID NO: 10553 - DNA, 860 bp, Oryza sativa
  Intron number 1 from transcript LOC_Os06g47490.1 (locus LO C_Os06g47490) derived from phytozome v7.0 (chr-ID Chr6; po s 28759006 to 28759865)
ataaccgtattgttgcattgataaacttctcaatcgtaagttgatgtaattttgactttgcgtaaaaaaaatgtaattctgactgcatgtagtattggggttgtcaaaatctaacacacaaaatccacatccctataaccgtattgttgcattgataatcttctcaatcgtaatttgatgtaattttgactttgcggatgtatttttgactttgtgtaaaaaactgtaattctgactgcatgtagtattggggttgtcaaaatcaacacacagggccggatgtgtggttccttattgtaagccgaccagaatcgctgaattcaagatttataaattggtaatcatgttgagtcattccgttcattatctgaaaatgtatagtttcttccaactgcagtagctcattcagtatacagtaaagaattaaaaaagggtatgatggcttaaccattatcttcctttatgcagctttttacaactattgtgcactgaaacgattctaaactcttaatggggcatctccttattgtttgcaatataaattagataattaatatgtgatatatctctccataaacatataaattaaagttcgacttctacaacttgcaacaaaaaagataaaattaaactatagccagttaataattctaaactctcgagaggacaacccctaaagagtttaaaatccattcccgctatgcgctgtaattttataaggccattcacagtacgtcctagtcaatgagaagccccgtactgccacctccgcacctcgtcagttgtcaccatctctcatctctgctctccacctatgccgtacaggaggactcgccctgcaccgacctcgccagcagagc

SEQ ID NO: 10554 - DNA, 999 bp, Oryza sativa
  Intron number 2 from transcript LOC_Os05g23610.1 (locus LO C_Os05g23610) derived from phytozome v7.0 (chr-ID Chr5; po s 13480890 to 13481888)
aggtcaattcttgcttcctacctttggacatatttctgctggtttgcataccttaggcccacgcccataacacgttaccaagaagtatgtttggtaaattctgaggattatttgttattttccagttgctatgatatgtaaattaaaaaaacaaaactcggccggcgggggaaagaccgccccctcatcttttcaagctaagaagaaaccacagacaaagctagtcaagaaaggccacgaaccctgggcccttgacaaagaatcaatttaagcagcacctctttgtttacagttgtttttcctttttttttcctttttaccttacaaaagttaaggttccagccaggcagttattaatatgaggtggtgtaaagattcagcagtttcaatgatgatgaaatcagtggttccattccggattacttcagggtcaaatattgtttagatgggactcaatgttgagaatttagagctgtatgattgtatgattgtttagtaaaatcaaatattactataaatactaaaaagttgagaatttagagctgtatgattgttgaagtatgatgtctcaatcttttaggcccagaaatagtagtttgttgatttatgctgcttggatttcagaacctgatacgttaaaactgaagggatgaaagggcaaacagagcttgtcaaagttttgtgttaagaaaaaggtgacacggctccttttgatgatggtaccatggtggaataacttacaataaggccctaagtgcttagacagatacaccatagctgctgatttgtacatgaattttgtttcgaaaaactgtttgatttttagattaaagaactttatggagttttagattcatacaccatctttttttcttttttggtgtggaaatgctggactgttaagagctagttgaaaaaaaactactgcacaagcgtgagtttagagtttacttaatttgattttactgtttttctttagctctcgtcgtgtgaagtgga

SEQ ID NO: 10555 - DNA, 756 bp, Oryza sativa
  Intron number 3 from transcript LOC_Os03g45400.1 (locus LO C_Os03g45400) derived from phytozome v7.0 (chr-ID Chr3; po s 25625963 to 25626718)
agtcagaacgagaaggattcagcaagtaacaacttttttgcaaatgttattctcattgaaactagttctgcatcttgctggatgaaaattggggatatagcactggcacatgatcttacttaactatttcttcaagagctcattaactaatcggctaatcgcaatgactaatcctgcaagttcaatcacttgccattttgcaagagcaaaagtcccctagattaccctaatcctgtccttaatacgaagtcaatgtcacaatcgcaatgctattggttttatggcaatgatattatgcttgccttttataaacatttggaatataatatgtgtttttttgcagtatatttattcaggaaataatgtatccttttttttaaaaaaaaactgtgagtatttttagataatactccctccgtcccataatataagagattttgagtttttccttgtactgtttgaccactcgtcttattcaaaaaaaaaaatggaattactattttgtttgacttactttattatctaaagtacattaagcacaacttttcgttttttatatttgcacaaattttttgaataagacgagtggtcaaacagtacaagcaaaaactcaaaatcccttatattatgggacggagggagtatgttcacaacatgtctctgtagtatattcttgatgaattatttaatttgacacaagattcattgtcttgtaattcagaagcagaagttctttcagctcctccaaagctggtg

SEQ ID NO: 10556 - DNA, 957 bp, Oryza sativa
  Intron number 3 from transcript LOC_Os05g41090.1 (locus LO C_Os05g41090) derived from phytozome v7.0 (chr-ID Chr5; po s 24010495 to 24011451 reverse strand)
caaccaatcgagaaaagcagcaaaggatcctgcaagtaagtttcctgagctaactctggtcaaattgttgcttcaatggtgttcaaaatggtttggaatattctggttcgcatttgacgatacctattaaacacttcgggcaattttagtggaagcagaatcattataagtattctgatcaagatgatttataagtatctttgcattttctaatgaagcagaattattataattctggcccgtgaatgtgagggtgtttttcttgcaaaaaatggaattttggtgagagttacatgtagctgacctcgagtgtgagtcggccatacggttttccagtcccaaattatgtgttgggcatttgattcactctaaaatttcagcatgagtgtgaagttgttagccttttatcagtgggtttgcagcaaatgacattgcatagtttggagatctgcctgccaatcattgctgaaatgtcgtcttttggtagttgttagcacttcagtttatacctgcattgtcctatattttgtccagttctagtagaaaaagttgccctgagatgtcaaatcaatagcagttggccagtagctaactagaccttacattttactgaaaaggtgtaaaagaatgttctcttccacaaaagacacatggattggattgtacattttccaatgaaaaacacgaactgagtcagtatggatatggggctactgggctagtcaaatgttgttcagtaaaccactgaaaaaataaataaactgtgccgtttgtttctgaagaattatgggttccattatcaatagtgcctttgaataacatgactataagaggaggatttgtagtccttgtgttaggcaccaattattcgaaaatgcctgtattaatcaggaacttgctctaatggcatataatttgtgtgcttcttcagggtgaattcagttttcaggaccacac

SEQ ID NO: 10557 - DNA, 965 bp, Oryza sativa
  Intron number 4 from transcript LOC_Os03g12290.1 (locus LO C_Os03g12290) derived from phytozome v7.0 (chr-ID Chr3; po s 6459371 to 6460335 reverse strand)
tcaaggacccgttcaggaggggcgacaacatccttgtaagttcctctcacttctcttgtactttttttttgctttgtagctcatgacatattgacactttatgatggccaaaaggaagggaacgaaaggtcctttgcaaacaaaatttgaatgtgtgagatggtagatttgttgtagaaacatattatttcaggcactgttaagtgttaaccttgttgaattgtagcttggtctgaaaaataaaattatgaatatgttaactagtagttaggttattttttctggctgttggatgtgctcgaaacctttagctgtttatcttgctcttagccagcaaactgcctacaccctgatgtagacatgccaaaattcttacatcattgattggcctgctcgtactttatggaattcaactcttgtgtatagatataaattagcctgttagaaacattggccacgaatagcttccgtactccttccgtatcaaaataaaacaatttctggaatttgaaatttattccaaaataaacaccttctatcttcttaactatcgtcaatccgcaaagcaagaagttttattacctcaatacccccgacctaccagtaaatcaatacaactttcacattaattgagggcattgtggtttctgtttctctccttaaaattttctttggatgttagggtttaagttagggagaaagggggtagatgtacttcattcagcttaaagcagtaactgcatagcccttaattttcaactatgcctaagtttatttccaaactttttttttaaactttcaacttttccatcacatcaaaactttcctacacacacaaactttcaacttttccgtcacatcgttccaatttcaatcaaacttttaattttggcgtgaactaaacataccctatatcgggaagtcgctggtttgcttacttttttaatttaatgttactataggtg

SEQ ID NO: 10558 - DNA, 977 bp, Oryza sativa
  Intron number 1 from transcript LOC_Os06g13210.2 (locus LO C_Os06g13210) derived from phytozome v7.0 (chr-ID Chr6; po s 7247250 to 7248226)
ccaccatcaccgcctcctccctcctctacgtcgtcgtaagctattctgataatctttctcttgttttgattttcataatggaaatggtttacgtatccagactctacgaacaggcgcacagccaatcggtttcaatctcttcttctttttcttctcattccctgttcagttcagggttggaaattttggactggaatttctgaaaattccgaaatttcggtcatttcggacccctccgatacaatattatttcggtcgaaatttttcaatttttttaaaatttttcatgaattttcttaatatttgttcaaattcaactaaattttgtttcagaccgaaattttggatattccggtgtttcggtgatgcccgaacaaatcggctaaaccgaaaagtttaaccctggtttagtttgctgattggccctgtgttcttaacttaacttcttatgttgtttgattttagcctatttcggagttgttttacaatagtctgagactttggttggattaggaaatatgaatcaatctgtccatttctgcaccttgtagttgtagtcaggaaaccttattttgtacaaattattggagcaagagccaattaggacgagatggaggaggttgcaccaatgtggggtacaataattgattcatttttagttactgcttactagtagcatggaacaaaattgcttcaggacaggagctattttgcaaatgcagacagttgctgcagcttctgatgatccaggacagagacatcacaattaaagaacaattcagtagtaagaagtagtaacgtgtaacaaccagcaccatgacacatactcagtaaaaagaatcagccattcaattacaaaacatatcctgatataacacttgaagaaagaaaccaacttagtttacttttactgtagtaactcatcttactgatactgtattactgttcaatcaccaggggctaataggcctaacttt

SEQ ID NO: 10559 - DNA, 843 bp, Oryza sativa
  Intron number 1 from transcript LOC_Os03g43980.1 (locus LO C_Os03g43980) derived from phytozome v7.0 (chr-ID Chr3; po s 24695020 to 24695862 reverse strand)
ctacaccgagttcgccgtcgagatccccgtcgcaggtaaacaaattaatattaaaccatctactccacaagcgtataatttgcatgatcgagcgctacaagtatttattactacctttttaagtcacgatgcttattaatagctagtggtatcaaataatatgtgaataaaacttccatatgtgtgttttttgcgacttaagatccacagctgcaaaattaacttggatgaaaatacattaaaatcaactcgaaacgtaatataaacatttaaaattcaaattcaaaccttggaggctactcaagattgaattgctcttgatttttttttcagtgaaaagagtatctatcatagtactctgttttttcatcatttacttgattgaaaagttctttttcactgagtagtaaggatatgcatcatttcagctggcctagcttcatggaaaacgaggatcatgtaaattggaagtattctaatgcgatgcatttggaacaaaatagcagattttttttaatatctaaaaaaagatgtagtagaagaaacacaaggtactggctggcaacttggcatgcatgcacaatttagtccatatgaatggccaaattaaccaatagagagaaagtataatatcatttattgttctgaggatgactatcaccacatggcagttgatccaatctgcatttgtttatgtatattatagtactgtaccaatacggcaatacagcatgtcactacctgcaatacagtatgataagggggtataattttatttattttatacctgttcgtcttgtaatgataggtcaacggtggaatcaaccaagtgttgctttcttt

SEQ ID NO: 10560 - DNA, 754 bp, Oryza sativa
  Intron number 1 from transcript LOC_Os05g44020.2 (locus LO C_Os05g44020) derived from phytozome v7.0 (chr-ID Chr5; po s 25546207 to 25546960)
acgtcgggctcaccgcgtccgtccacgacgtcgtggtataattttttcctttcttgtgatctcaaatgggcgatgaggtaattgttcctgatggaattctgggatgcagcaattagtttgatccgtatggatacctatgagtatgagcatgggtggtagtgtagtagatcgatttcaatattgattccatctagcaaccaaacactgactaaaaattcaaagtttgttgcaagaaactagagcactctcacagtgtacttctgagagagcaattttatctgcagtaggaatgctgagtgaaaaacaaaccacagaaggcaacatttcaacattggcggtgcagccgtgtgtatttcttgcgaccctaatacgtgaattgtctgttatgttatccaaaatagaaaagaaaaactcaaagaacattgtgcatgtgaaaaagaaatgcaataactgaaagtaaaattttttgtgcactaatatagttgatgtacgttcaaacattttcttcacagcactaggtgcaactgaaatgattgggagggtacttgggccatcaaaatgatgtgcatacctgaactgagtacagtctgttagtctatctacaatctactgataacttactttgatgtgtcctacttatattattttcctgaatcctgaacattgaacaaaaggttgtcgacctattgaattgcatctgttcatatgactttcttcagtgactaacaggtacatccgtcactacagaggagag

SEQ ID NO: 10561 - DNA, 790 bp, Oryza sativa
  Intron number 5 from transcript LOC_Os08g29669.1 (locus LO C_Os08g29669) derived from phytozome v7.0 (chr-ID Chr8; po s 18219407 to 18220196 reverse strand)
ctggtggtgattcgacagaaggattttttgggttggtaactttgtgtctcctctactattctttgtagcatgtgctgtcagtgccatactgccatctgttgattcatataggaaatttgtaattttgtgagtgaggggattcatataggacttgaacagccttgtgtcctctgttcatctgtcagtgccaagggttttatggtgttgaatagttttatctgaagtaaatataatgaaacaattaactgacagtgatgatttcagatttactcctacaacagcaatgatcacttccttatatgttgataattttctattgtgcttataatgtttgctcatgttagatgcaaataatttgctggtttgtttgaggcttatttactgcccataccagagaaaatgtcaatatcattaggaagtacacagaaacatctctggcttacttgctgtaaattctactgccttaagctaaagtaaatgtgatgtaaactgaataaggctggctcaaggttgtttgaatattgcagtaagcttccttttacaaatccaaagtttccaaagaatattgatttggacatggcctatctcctctaaacagcaagttgtgacacaaactgaaataatgatattggtggaccatatatctcgcccttcatatactatgccattttttttaatgcaaatagcatatacatgtacttgttctactaatatcttcatttttctgctactttctgcccttttcaatctgtttattgacattcttacctctgaacctgcagccctcaac

SEQ ID NO: 10562 - DNA, 504 bp, Oryza sativa
  Intron number 2 from transcript LOC_Os02g06725.1 (locus LO C_Os02g06725) derived from phytozome v7.0 (chr-ID Chr2; po s 3384869 to 3385372 reverse strand)
ccattgacaaggtgagtaatcttgcatgctggtttgccaccaaccttttcttcggctatttcctttgatcatgatgtcaaaaacagcttgtatcaagcacatgtgcattaacattacaacataatttcctgatttttgcatgacatgatatgccaataacagatatttgttttacactttttacttatgacttatgagatggctttgttgaagttgaggaatgatttgattgattactttgactagtttcctcatcaacgctcctgtctatgagatacgatgaccaagattatgaatgtatcgactaatttagactacatatagcttagtttaaggaaacaatgtcacatttttatgctgtagtatggcattatttcattctgtagtattttttatggcataaactgtacttttttccccaaaagtttgtgatcatgcttcctcatttctgttgccaacaattccataggctgaaaagaaggaatccttgcaaatatttatcat

SEQ ID NO: 10563 - DNA, 612 bp, Oryza sativa
  Intron number 1 from transcript LOC_Os06g41210.1 (locus LO C_Os06g41210) derived from phytozome v7.0 (chr-ID Chr6; po s 24668028 to 24668639)
tcctagtggcttggagctggcaacaccagagggaggtagtgatggagccggctcaagaagacccaaaacgccggtgtggcgaacaatgcttcagatccgatagtggccagagacgattgtagattaccattaagtaatttgagtacagttgaggaactaccaggtagtagtatttggatttgtaatatggatgcttatgttcagctgaagcatcaacaattgcaacttgctacttctgaatatcaccatgagtttgtcctgattagtgtctgtttcggatgaaggtgtccgaacctttgtgtagacaatagaagggaaattctataaaaaataggaaaatgtgttgtttaattttgatttcatatagtcatccgaatttttaataggattattcttgcatcagagtgagttagtgtcacaatgttaacccctacttatgtaattcgtgagtttctctgcaaagcttgagcatgggtcaaaatgattgcaatatatttgatgtatgtaattttttgtatcaataatttcattaggaagcagcaaattcattgtagccagtaatggctgtcatttgtagatcttttgaacaaagctgaagccatatccagaatt

SEQ ID NO: 10564 - DNA, 858 bp, Oryza sativa
  Intron number 3 from transcript LOC_Os06g05900.1 (locus LO C_Os06g05900) derived from phytozome v7.0 (chr-ID Chr6; po s 2699979 to 2700836)
tgggggtggcattctctcagaggtaccatcatttttttcttataatctgctactttctgacactaaaatatattgaactgtgatctatgtgatacttacataaagggagaatgatataggttcatgtaggtgcgccatatagaaatgggtatcatatgtgtgctcgcgtcttgcttatcatatgctttttgtgacatgtgcatattgtaatttgtaactaatcatatccaggactttgggaacagggacataccattcatctacatgatatgatagcttaggaatatgccacagcataagctcataatcatgctagccttgtaggtttgaatttattttaacctctaacaaccatctttgaatattttgacttactaacctctatattctatattggcttgtccggaatcaaccaaactcccaagtattaatcatattctcctttcgtaatcaagtttatagacgtggagttagtgcatctgttggccacttgtgcttatacttcatggagcattgctgatgcataatgctaggcagaagatggttaattcagtttcagactatgtttaaatagatacatcacttatgctgcatacctcgatgtcttcagtaatggctcaactcagaaacattgcgtacagtaaaaatcaatctgacaatgctactgaataatctcataaaatgtggaaagtagatccacagtccacatgctgcttgactctaaattgtttgtgtttttttacctcatgtcaatgtattctaagtgttgctgtgcatttgtgggctgtaacatatgctttgttctattgtttgattcactggactaattgcatgcttatatggcagcctcttgctcgg

SEQ ID NO: 10565 - DNA, 381 bp, Oryza sativa
  Intron number 1 from transcript LOC_Os06g50880.1 (locus LO C_Os06g50880) derived from phytozome v7.0 (chr-ID Chr6; po s 30778073 to 30778453 reverse strand)
gcctcccaggtcaggtccaatccaaccctctctctctagtttcttccccatcccttttgctcttccgcacggagaccaaatcaccacccagcgctcgcttttctgtttcctccagcgttttaatcctaaaatcgaacagcattaggttacgttagaacaggattaactgtatcctaccgtggaaatcggtgcgttcattaagagaaaccaacttagtactaggttcagagagcacagtcaacgcaacaaaggaggttcagagagaatcacaggtggttgttgcagtagccttgtgatggcttcttttgtttctataaccatggagcatgtttgactgtttgtgcaggactttgtgcggtctctcggtgtccagaagaggct

SEQ ID NO: 10566 - DNA, 727 bp, Oryza sativa
  Intron number 3 from transcript LOC_Os03g46390.1 (locus LO C_Os03g46390) derived from phytozome v7.0 (chr-ID Chr3; po s 26233380 to 26234106)
acatcacgaatccggttagtacaatgcaattggtttccttttgctaaccatagtttttgataataataggcgttccatttttgtcgagttcatgattttcttggcagctgttttgactaatgataactcgtttatgatacaataactccctatagtgttgtgctaccgatatgagcgtgtataagagcataaatgcagttcaaaaaattgatgatcattatgtttgtagtttgtactctgtagtattttcacacctaacagaatcacagccagcaaaacttgatgttgatctcatacagaaagatatagcttagtattcattatgtatgtagtaccaatggtagatctatatggcatgtctatgatgatctatacttcaatatgtgattgataggttatgtagttaaagcttgacaaaataatgcttatgatgttcctctaaatggttttacactaactagatacatatgtatacgtgactctatatgtgtccaactttgagatcttttatatcatgagatgcatattgatgtattttgcagccatattctaaagcatgcattcatccttgttaggttcaattggtctagaaatcagaagcactatagcattctaaacttagtgtaactactctgactgttttatttattgcatagagggaagtgccatttcagatattttaacatgactctttctacttttaggcctctttcacccgtgcaaagaa

SEQ ID NO: 10567 - DNA, 712 bp, Oryza sativa
  Intron number 1 from transcript LOC_Os08g01390.1 (locus LO C_Os08g01390) derived from phytozome v7.0 (chr-ID Chr8; po s 249876 to 250587)
actgaccccttccctgccttgccactttggctgaggtatagatccaacatctctcgcaagctgtttccttttcttgcttcacttgggaaatttgagatttttgatcccccgatgaaactgactgggggttgcaattggattttccggggatccaaagtcgatgatttggaatgaaaaattatcggtttttgatgtgaaatgttcgtcctgtgtcattttttgcgatggtgcgtggttcgtagccgtcaatttgattccccaatgcgtgccagccgctgacttggaccatcccgacgcgccccttgtgttgttgtgtctcttcttttttaaaatttccttctttccgtgtttatttaaattattattattattatatagttgttgtattggatgtagtcgggatggccagcctggactctcggttgtttttccccccaattgctgcaagtttcctctttgtcttcttcttcttcttcctcctccggattcaagttcaatctcctcccctcttttcacattgccacttatcatctgtgtcaaatttgttttgcaaattctcttttgtagctctctacttgtgagcaccgatcgatcgtctctttctttccctcgatttgttggatgtggtaatggaggtttgactgactgactgcctgcttctgcttggtcgtggtcaggtcgtcgattcggagcggtggccgccggcggaggt

SEQ ID NO: 10568 - DNA, 986 bp, Oryza sativa
  Intron number 1 from transcript LOC_Os05g17990.1 (locus LO C_Os05g17990) derived from phytozome v7.0 (chr-ID Chr5; po s 10337364 to 10338349)
cgcccggtaatgacctagacacatgggtgagacaattgccttctactgaaattttgcctcgccttcgggatttcttgggtttctagggaagggaaatgctctgggacgaagcattttgtttctgatatactaggttaattgaatggaaagccactgcgttggatgtgacaattcttagaaaatctgcaaataagtggttgttcggtggctttatcagcaaccaatattacattgcatatgtttgaagatcgattattataatatgtagtgctcaggatgtgcagtagggcctatgagttcgtgtttgatctgaatgggtttggtttatgatgtccaaagtccagacatgaactgttgtgtgcaatgtagttcgttgcgtccattgtatacttgttccaagggaattctaatatagaatcaaaaccatagctgtttaagatctccctaaactgggtttttgttaagatatctggatgttggtaaatgaataacttgtgtgagctaatatagtttatgtcctttgagaacgatctgtaattcttttattagcttgattggaaacatgttgatgagcatcctgcttcacggaaccaatatgatgttgtttgcatttgctactgttctgttaagctaataggcataattatgtaatactccatccgtcccaaaatatgaaattttatataattagtattttcattgttatttgatgataaaacatgaataatactttatgtgcgacttatctttttaaattttttcatatttttttcaaataaaacggacggtcaaaacttgtacacggaaatgcataaataaacttattttgggatggagggagtattagttattcaaaatctctatgtcatgtaaaatcaattcccttttcatgcaaaaacatatgtaataccagtttttctttaattaggtgctgaacttatgccttttgtgttaattacatttcagggtacttggtacttccacgg

SEQ ID NO: 10569 - DNA, 603 bp, Oryza sativa
  Intron number 1 from transcript LOC_Os03g09250.2 (locus LO C_Os03g09250) derived from phytozome v7.0 (chr-ID Chr3; po s 4827670 to 4828272 reverse strand)
aacttccggaccaccaccaccgtccccaagctcgggtacgcacccattaccctcgccgatcgatcgatctgtccaccgatcgctttcgatccggcgtccgtcctgttctcgttttcgttttcgtctcccgtttggtctccgtgtttttcctagctatagctagcgcccgatccagcgagatgtgggatggcaaaaggccaaagagggggactgcgagtctgcggcgccttttgttgccttgctgctcggccaccgtggaaatttgcctgtctctgggattcgatcccgtctgctcaaaacgacatttcttctgagttttttttatatccgctagtttttattattatggctttatcccatggctgcacctgcactgcatgtgaggtttccattaaaattttgcatctgcaagatcgagcagggggacctacctagtaccatatataccactggcaagaactcccaaatttatgactgtttattagcttcttttattagttcaccccatttgttttgtttttttttctgtccatgttggctacgtgccagcacacttgtcgatcatgtttcttgacccagttttatggctgtgggtgcagggtg

SEQ ID NO: 10570 - DNA, 487 bp, Oryza sativa
  Intron number 2 from transcript LOC_Os03g22060.2 (locus LO C_Os03g22060) derived from phytozome v7.0 (chr-ID Chr3; po s 12644629 to 12645115 reverse strand)
aaggcaggtttactctaattcttctttttttctcccgcattgcagagtaatttgcatccatatgtgcaattagaggatccaatttgcttgcaattgttatcgtgtttcaagtaagatgtaagatgtggatcaagatgcggtaactgctagaaattcacaaacatcaacttcctgaaaaaatatacacgcaaacttagtggccattcataagctatcatattattgctgcttactggaacctcccttatgcacaattttttttcttgtacagtcatgttcatagatttgttttttatgggatagagggagtacttaatagcaagctctagttgtttgaatcgtggcagatgcctcttctttgaagtaatactttgctttcgtgttgcaataatcctatcaatcaggaccctttttccttataaacttcctgccgtggtgatttttttcaacagagctatcaattgctctgcgagcgacatccttcatt

SEQ ID NO: 10571 - DNA, 744 bp, Oryza sativa
  Intron number 2 from transcript LOC_Os05g28860.1 (locus LO C_Os05g28860) derived from phytozome v7.0 (chr-ID Chr5; po s 16859627 to 16860370)
tatcttttgaaggactgctacctatgtatacctagttctttttcatgctattcgaaaactactccttccgtttcataataactgatactcatattttttgttgaatatttacaaacctagaaatgataccatgttactaaagtggggtttgccctaaatcaaaactttcgttcactttggtctaacaatttaagggcaattaattgtcaaagtttaattgggaaagtcaaaattgtcagttattaagaaagaggtagtatcatctatgtggcactgttataatttaatatctacatgattggtgtgctaaaatatttctttctgtaagcttcggtgcaactaattctgcttgattatgatatgaaaatgctgtcacacaatcttcccagaaataaacacgtgataggaaaataaataaagttacctacatagtaataattacaggttaaatccatagtagtttgtatggaaccttggttgaggtaaatatcatcaaatatgattttcaaattcggttaatgcaaaatgcaggctcttgaattccttgggtcttcaaactttttgcataaccaactctctgctatgaatttgctacaagcttgctttattattttattttatttgttttcgatatcaatttcatccttgatcttatgcacttattaattgtccatactctgatgttttacaatcttttttgaaaaatcaggaactgacaaagcaaccccaaagttcaagatcctt

SEQ ID NO: 10572 - DNA, 747 bp, Oryza sativa
  Intron number 1 from transcript LOC_Os05g48040.2 (locus LO C_Os05g48040) derived from phytozome v7.0 (chr-ID Chr5; po s 27479837 to 27480583)
cctccctcgccagcgtctccggcttcagcctcctcgtacgtcgtcatcgcatatcctgatttccccactcgttcacgcgtcctcgatttgcttatatccatatttgttgcctgcgtgatttggtctcattggattaactgtttagcactttagccagagaggcacgtttcacggtttcagatattgttcaatgtggcgttcaaatttagcagtaggaggacaggcaaaaagtttagccgtacaagcggctggttagtttggaagggggattttgattggaacagtgcctaaaatttttgctggaatactgtttgaacatttggcgtgttccaaacattctgaaataaatcatggatatagcatagtaagtagcagattttttttttttgggtatacaagtagcagtttgcaaacctacaaaatttaaaatcaacgttctcctaaatatagagataaataacaagttacactactagtctactactccacgctgaatgcttttctaggatgaattttaaattgcctgcacagatggtgagctagtcaattgtcacgatttcaactagctttcagaatctgcgaagtgtgtacagcctagaggactacttcgatactctggcgaaatattctgtaggattttttttttttacttttctcttcagttgtacacggattgcctttttagtttgtgatcttaattttgaaaccacccataatttgaattttgaacttgtaaaacaggttgga

SEQ ID NO: 10573 - DNA, 736 bp, Oryza sativa
  Intron number 1 from transcript LOC_Os03g11790.3 (locus LO C_Os03g11790) derived from phytozome v7.0 (chr-ID Chr3; po s 6166231 to 6166966)
acagcgggagcagcgctgtcgccaaatcgaagccagtaagccgcatgttggatctgtgctactgctatctgcatcttgtgtttccccccctttttttttttatgtgttatataacttctccaatacaattaaagctggttgctacgctttatatcttacagaaagacaggactcagccgccaccagtctgttcttccttacaaaaatcctcttcttgatgtgcttgctgttttttcatggtttttgtgagcttcaaagctaaccttgttacaagcttgttcctttttttcacgatagatgttgtcatagttagaggagctgggattatccacccaaacacaaaatttggcatactgtattttaatagtgtgcgactatatgaggaggttggacacttggacatggaactcacggggggaggagagcagtggtggctgagaaaataggaattccacttgctgtcggctgatgagctccacggtattagagaaaaagtcacaccgttttgcaaaagaatacctctgctcaattggcggagtttttttcccattaatatactgtagtaacaagttgcagcttaaaacagttactaagtaggataatggatcattgaatctgtgtgtatttcagtgctttgatgccttcatctgtttgttttcttccaattatatacacaatgtcataaccattgtgtgttgcagatcgtcttcttgcatccactgataaaagaaagggg

SEQ ID NO: 10574 - DNA, 594 bp, Oryza sativa
  Intron number 2 from transcript LOC_Os04g55730.1 (locus LO C_Os04g55730) derived from phytozome v7.0 (chr-ID Chr4; po s 32992780 to 32993373 reverse strand)
gagaagggactccacaagtactgtatgtttctgaatttctccattttagcattcattttgaatcgtttttccaactattgtgtttgtatgggttctaggtgaaatctattttgcagaagcagaatgtagaggagtcttcatgtaaattatggacatgacaaccatactttgttttagctcactacaagcctattaagtttactattagtaaaatatccatttgtagagatgttagatgcactgaaaactgacttgcctgaaatcaaatttcccaatattttcgaatgtctagtttttcaccactcttctgatttgcgttcttttgtgcatccaaagtgatgctgactattctggccacagcatgttctgctagaatcatgcaccagcttctcatttaactagttaggtccactgtgcggtgcagaggttacatgccattatgctatactagttgaggcttacctacacattatagtggttcccctttttataagattctgctactatttctacatactgaaatcatgagctatacattcctttcatgtatttttgccagtttacttggaacaagtggggtagaaatctctgctg

SEQ ID NO: 10575 - DNA, 1037 bp, Oryza sativa
  Intron number 1 from transcript LOC_Os06g05990.1 (locus LO C_Os06g05990) derived from phytozome v7.0 (chr-ID Chr6; po s 2752463 to 2753499 reverse strand)
aagagcactggatcgaggtcagtgggccccatctaacgtttttcgtccgatattttattcgttcccggacgctcgatatgaagtgttttcgataagattgttgtctagcacatggtctagcttaatatcatatacacgattcatttctttaaaaacataattaataaaaatccgatttctatatacatatatagatatacatagacaaaaaatataggtttttagactcaaaacctaaggaataaggaccaatgcaaacaaaaaagagatagcaaaaagactgagaaacgaagctaaacgacgactaagcttcaatcttcttagacaacaacaaccctttgcatcgctctctgcttagaaacttttgatcttataattgtagtactactagtaaacagtcatctattactgctctatcccatgttgcgtagtgaccacaatgagtcggtcttaaaaaaacctctgcaccaagcaaactcgtcttcccttgatgagttcccgtgagagggatcagagaggatatatgctgatctactccgccacgccgactctcgatcttagggcctgttcactttgatgtcattttcaatcttatcaaattttggtaaagttacaaaaaaagtgactacatttagtttgctgccaaaatttgacaactatataagaaatcctaccaaaatattggcaataatgtcaaaatttggtaaggtttttttggcatcaaagtgataagccccttagtttcctgtcatcctcgaatctggctatgagcctagggaagggaggagtaatctacatatcgtttaggtatgacgcaggataattatatagacaacaatcatctgaaatggtgtttatgcaataagacatgtccaaatcagcgtactaacaatatgtcaatatgcctatatcagattagtatgaatgacagagagacgggtagagagaacagctatccttgcaaccaggtagtaacataatcaatattgtactatgttggaggaacaggaaccgggtcccctgtcttccgaggcacc

SEQ ID NO: 10576 - DNA, 920 bp, Oryza sativa
  Intron number 2 from transcript LOC_Os03g58590.1 (locus LO C_Os03g58590) derived from phytozome v7.0 (chr-ID Chr3; po s 33357354 to 33358273)
tcgaacccctttggcgatcccaacctgaccgagaagtacgcgaattcgtccccctctcctgccacattattcgttccattagtggtgttgcttagctaagtagaaatttgggctgaaatttgtttgaactgtgtcacggatgacataaacaggaggccaaaagttacacttcccttgtttgtttgatgccctaaaattgtgtgcagattgatgattactgtcatttatttacattagtaaggcttgagcttacttattgatcacttcattttgacacctacagccaccaaggatacatatatcttgtatagaaaaaaaaaagaaaatgctcttggttacttgtgtggcccaataaaaaaaaactctaaatgtggtttgtctaagccaactggtaattgtatttggggaagacgtcaagttggttcgttagatataggtagtatttatcagttgcaacattaacacagctaacaacttacaagtaaaatcgaggctataatgtttgtctaactaggtagtgtactggacaaatgtatgaaggattgaattgatagcttagtgaactactgattgagatcatctgactacggtagatgtcttctgacttgtttattcatttgttgcactctctagaatgagttatgaacatttatgagaaatctttctctcaactgtgagaaatctcgtagagcattattttgcatactgttatcagtagacagttttgcagtcaagatttctaatgtttaacaatgttatcatgtgatatgaccatatggaaatgttgttggctgcacttcagatcctaattttatccctacttgttgcgtttgcactgattgcttactttgactgttcaaaagtaatactctcaaccttgtattggtgcagatttgtttggcgaaagaagattgagcgtg

SEQ ID NO: 10577 - DNA, 457 bp, Oryza sativa
  Intron number 1 from transcript LOC_Os08g21630.1 (locus LO C_Os08g21630) derived from phytozome v7.0 (chr-ID Chr8; po s 12881683 to 12882139 reverse strand)
gagtatttgtacactgtaagaatcatttatgcttaccttccattttttccctgtcttgttgcttggacttcctaatgtgctattatgtcgtcaaaacttttaaaataaataaggactctcaaaattttaaactcatagaaagatgttgttaatctgtgttatttaagtttttgcaattacttgttaaaaataataacaataaacagatcaaaaaataattttaagtgacatgggcacttcttgccattcctgcgttggtatgtgctcttggacaacaggaaaccacttatttcaaacaattgttgcgtccttttctctcctttgtacttatttcttccacttcagctgtttctcaggcacagttttgtcatgtaatgagtcaatcggtgactaatatattgcactttgtgtatttgatatagggggttcctgagcaagctgaggcccctgccgcagt

SEQ ID NO: 10578 - DNA, 954 bp, Oryza sativa
  Intron number 1 from transcript LOC_Os05g02030.1 (locus LO C_Os05g02030) derived from phytozome v7.0 (chr-ID Chr5; po s 590437 to 591390)
atccgcgtcctcgactatctctgcatcgacacaaggtgaccgtacaaatccttcttctgctctaattttcactcttatgtacttcctccgtttcacaatgtaagtccgaatgtggaaaatactagaaggatttacattgtgaaacggagggagtatttcatataccagatgcttgcctgctgtctggtcgatctttgcgatccaaattaatcggggagccgctctttgatcatttgatgcgatgtgtcgtgtactcgtgtgtgtgttgaaagggggagattttggtgaagtttttgttttttttctttctgtctgactgctaaggttaacttttgttctgaagttgttatgccgaaattagttttttgggagttctaaactaaacggcgctagggagggactgatgaataacagagccagctctttattactgaaccaggacagaaattatatctgaaaaaataactaaagtccagtctacttttgtatagaacttgcttcttttccaatttatttacatcatgtagcatcctaatacaaagttatgacataaaatggacgatctacttgttactatggataaattaaataatattactatgtattatataaatctaaacaaatatctcggaacaagtggtccaaatgatgcagtataagaaatcttttcacaagtcgtgtttttagaagcatcgagcaaataatccgatggacgctatttcattttgttatttgaacttaagcttccaaatactccaacatatgtcaactgttactgaaaattgtatcaacaactaacttttcgtatcatgtcttgctggtttcttaattcagggttattatcgttgagcaacttgaaatactgcaaattaactgcgcactgatcggaactagcaatactcatgggcgccttacttagcctaacacccattgctgcactgagcccatacaagt

SEQ ID NO: 10579 - DNA, 851 bp, Oryza sativa; identical to SEQ ID NO: 10319
  Intron number 1 from transcript LOC_Os04g42270.1 (locus LO C_Os04g42270) derived from phytozome v7.0 (chr-ID Chr4; po s 24824004 to 24824854 reverse strand)

SEQ ID NO: 10580 - DNA, 605 bp, Oryza sativa
  Intron number 2 from transcript LOC_Os06g33610.1 (locus LO C_Os06g33610) derived from phytozome v7.0 (chr-ID Chr6; po s 19563434 to 19564038)
tgcaggtaaacatatttagcatcattggctatgaattttacaagtcattttcttgatttacgttattattcaagcttttcataatagaacttgcatagcaaatcagaaatatgctaaaattttaagtgtgttatgagtctaatgcctacataatcaattgaagagaacatgaatgctatctactgctgctaaagatatatcctagaataacagagaatatttttatgagtgaattatggaaaactgaactatagttaatcaaattaattatgagaaaaatgagtccaacttattttatctcctagggatatgaaactaaagatatggaaccttgtgccagattcagtccaataccattttgagatacgactagcataatcttggtaggaataagatcatcaaaccttatttgcaacacttgtctttgtacaaaatggttcaggtcttctactacaaagaatgtttaacaggatccctgacattgattgaaattatgtgtttttgctgaatgatgataaatgcgtaattttggtagctaactcatgcttccattttttgtgagttttacagacctatttgaagtcagcccatttgagagaagaaga

SEQ ID NO: 10581 - DNA, 449 bp, Oryza sativa
  Intron number 10 from transcript LOC_Os07g26210.1 (locus L OC_Os07g26210) derived from phytozome v7.0 (chr-ID Chr7; p os 15071844 to 15072292 reverse strand)
catactacaggtaacttatgcaatcttaatttcttatttatggtgataatcatgttaattcaaacaaggatggctacgaatataagtaacagtgtttgatttattaatgaatgcatataaaacattgaactcatattgcacaaccctccatgtatactattgcatggccttaactattttgtatatctatatgcattttatcttgaacatgcaggagatctgcgcatcacccaccaagccacacggcattcttcttgaattgctccctgaatttatttaattttacagaatattccatatgttatcttttttttttttttggtcttctaagctggtccaaatgatgtgcatttatatttctatatcgaaaatatctgtttttttacaaggtccactagttaaataaaattctatttcattccctgctggcaggaggtatacaaaatttt

SEQ ID NO: 10582 - DNA, 419 bp, Oryza sativa
  Intron number 1 from transcript LOC_Os06g02500.1 (locus LO C_Os06g02500) derived from phytozome v7.0 (chr-ID Chr6; po s 865354 to 865772 reverse strand)
gcctcgtcaccccactgagagggagcgcctgcagggtaaactgtcgcctcctcctcctcagcttagcatttctagttggtagctcgagctgactgattggcgctgctcgccgttctttgtttcctgtgtattattttggataagtcacactgttacgtgttaattcaccagacttatcaagcgagtagctcttctttatggattcactgactcaagaaaatgcattttcatttctgtagatatttgatttgtcatgacattttcggttggatgtgtgaaatacatttattatgcaccatttctagaataaaagaatcctctccagttctgtagacgattaatttgatgtggaagaatgcatatatctatgtattatttcaacagggagagagtacgaactcacgtgtactccagtgtgc

SEQ ID NO: 10583 - DNA, 746 bp, Oryza sativa
  Intron number 2 from transcript LOC_Os08g39090.1 (locus LO C_Os08g39090) derived from phytozome v7.0 (chr-ID Chr8; po s 24694530 to 24695275 reverse strand)
cttcttctgcccaagcgagtgccggctcttccaaggtatcgcgaccgtttcttctcggccatgtgattgtacttatgttagtttgcagttctaaaatattttttttggttgtgcatctaattccactgatattatcaaagaaattcgtatagtaggaagatacttggttgatgtgacagggcaaaggtttttcttagtaggaagatacttggttgattcttagtaggatgcgatgcttggttgattcttagtaggatgcgatgctcaaatgtttagctgattgttacaattcttccattatagcaaatgggctgaggttgctagattatgtgctgctgttgtaaacttgtaatatgatttctcatctttgaacttgcagaaaaacgataaaatatttgccttcttacttgtatgcaaaagcaaagtgcctcctactgtctagttgtggatcattgaataagttggaaactgttgtttgtggtatggatataagaagttaattaatctttccttgcttccatggcattttacatttttatgttgtcttttgaattgttttgtgttttagacttttagtcaagggagtataaaagtgtaaaatatcagttatttcatgcgcactatatcacccattggttgtaataaaatatctattcatcactagctattagaagataattgcttattttcttttgtttggaataatttcaggcagctgctccaggtgcattatttgaggataagcc

SEQ ID NO: 10584 - DNA, 866 bp, Oryza sativa
  Intron number 2 from transcript LOC_Os03g26960.1 (locus LO C_Os03g26960) derived from phytozome v7.0 (chr-ID Chr3; po s 15409682 to 15410547)
gcgggttctcaagctaaaggaagaggtttgttttgatgtcaccataattaactctttgcttttccaatgcttaacttgcaattctaaagctgtatagaatatagatggctctctgtaggatggagaagcctaattggggacactatggaatttagtgttggttaattgtgcatctactttgaattattattattattattattattacttggtgggggttgttcagtatggtcaggcactatttgtttagtacgagctcaatgcttgctagcagtcagcatcattcagagctcactatgcttgcgactagtttgctgcagttcctggaactggaaatatattttcactatatttttctcaactaaacaaaatttaagcggtaatggcatgtagttgctactcaacacagttaatggtggtttttgtgtttattatgtgcataagcatgagaagtttttcatgttgaaattgattctgttgggctgatggtgatcccttatattgtcatttggaccaccagttaagtagttgcatggagcagttctttctcagatgcccctgtatggtttattgaaaagattggaatactctaggtgactcagatggactttgtgcgtacttttggagttttgaattgagggaaatcaggcttaatgggtttttgccattgtgttttgcttgctttgttagtttacatttttgagccattcagttttgcagatccattctggaacttctttgttctttcagttgttgcctttggggtgatctcattatgacttacagaagatatcactcagatgtcttgtcatgtttttcataatacgtctcattcttatttcttattgcaggatagggagcttaat

SEQ ID NO: 10585 - DNA, 947 bp, Oryza sativa
  Intron number 3 from transcript LOC_Os04g56654.1 (locus LO C_Os04g56654) derived from phytozome v7.0 (chr-ID Chr4; po s 33597594 to 33598540)
atatactttctgctcgctaagagttacacttctccgtaagcttccattctgaaattatttcgattatcgtcatgtaaatttagtttctgagtattgatatgcaacacaagctaacatcagagtagcatctcacttttatcctttcataattcaatgagttatgcattaacttctaatccaatttaatacagtacataattataaactatggacattacattaccttgcacttaacattacgcacaaccaatttatatctcatcagataagttacatcaaatgtgagcccttgtacatatttaagaagttgggtttgctgtacctgatgaagtgatgagtatgcaaaaacatgagattgcccattaattgctatcttcttggtgaagtagtgcttctgccagatataattgccgtttacatcctgtgattttgttaattatcatggaatgttggaaggttattgttctccattgtacctcactaacttaagttacctaaatgacctatcctgaaaaaaaggaattattcatccttgtttggtctgaattatatgtcctaagatttagaggtattgtaggcatatacttcaaataggtgaaattataggtaaaatgaattattcatccttgcgagtgctgaagttacaggatccaggctaaaattatagacaggcatgtaaacactagaccaaatatacagttaactcctctgtagcctcgtgagactttgcaatcagctttgctcattatctgcttccacctatgcaatcgagataggctgatatttgatgtgcaaagacctcatagatttaggctgctatttcaaatgttatccgcagaagtctatgaatttcatatttacatgttctcctagtccctattaccatagacaatttaacagcatcaacatttgaaacatatgttctgtttttttttttatttgtaggt

SEQ ID NO: 10586 - DNA, 629 bp, Oryza sativa
  Intron number 2 from transcript LOC_Os03g08280.1 (locus LO C_Os03g08280) derived from phytozome v7.0 (chr-ID Chr3; po s 4210772 to 4211400 reverse strand)
caagtacatcggtctgctcgccactggcctcacaggtttgtttgctctgcagctttgcttcactgtatataactagtgttatgtttttgtgcgtgttgatgatgaagaaaaagttgttttttttttgtgtgtgtcttaggtttaagattaagttattccagatatcaattttgagatagatgctgtggaaatagaccacccacagtgattttgccggttaattttgcgatgatgctagagctttatatagggcatggttctcctggttgttttgggttgtacatgaggcactggatggtatatcagtatgtttagctctgtttgttttaactcttagggcaatggtagaaagcactgccctttttcttttggggactgcgaaaacaccacaaaatttggatcaaatgcaagcataccatattaattaagctctttcatatttgccatcagtttccttatgaaggctcttgctttctagtagtatatatgttgtagcattaggttccacataatttgttctgctagtgataatttggcattgagaccatattttcttattttgtttttcctgaataccttcattcttcattgatcataaactttgttttcctttttctgtttttcagctg

SEQ ID NO: 10587 - DNA, 923 bp, Oryza sativa
  Intron number 4 from transcript LOC_Os08g37960.2 (locus LO C_Os08g37960) derived from phytozome v7.0 (chr-ID Chr8; po s 24038970 to 24039892 reverse strand)
cggagccaatgtgagtagggttcctcgttcgatctattgtgatgtcaatatctagttatatatgtgcatgggtaggttcttattgtttgaacatggcaaccatgttatttgtactgtttgtttgatgtgttgttaatggatcttgctttaatgtgtcaagcagtggtatccaatcattggatgttagaattgtatgttaatagggaatattgattggattgatggtgcttaatgaattttatgcttgtagtttggagttaatcacctagtttaactatctatgttatggccagccgtttttttccagtttaattttctcattaaaaaatagctggatatagacaatgcaactctgaactttttttggatattatcatgaagacattatgttcaagaggatcctacaagtaaaagggagtgggagtctgcttctctctttaaattagtgaatgcattaatctgaagcagatcaattagccagatgcttgcaaccaagttcatggggagtggaacacaacatttttttttttgagagagagaggaacattgttttggtttaatgatatgtaacttgtatgtttttgtttgagtttttaacaaaatttcatagagtggacctagttagtacatctgtgatttgcatgtgctatagggatggtggctgtgattgtgaagtgaagaatagatgtgaggcacatctggtgggctctgatgcctcactcagatatgcatggactttttagcaatgtagttatggaacatcaccttttgttcattcttgttttcatttgtgttgaactttaagaaacatttgttttgttattatcctctacttatgtaaatgaagtcatatctttaattttgtttatgttcttccaatctctgtagacgaaaaggaaggatcatagaagaggttgagaaat

SEQ ID NO: 10588 - DNA, 918 bp, Oryza sativa
  Intron number 2 from transcript LOC_Os04g32490.2 (locus LO C_Os04g32490) derived from phytozome v7.0 (chr-ID Chr4; po s 19331447 to 19332364 reverse strand)
ggcctggaacgtcctccaccgcctccgcagcagaggtgcgtgtgcgtccatgtctcttcctcttttaccgtacacaagactcaagtgttagttaatctgagttccagacatgctcgatttcttgtatgggttctgatgatgccccgtggttgcgaacatgcaatcgtttggtggaatcaagcaccaagtagtggaaatgatcactctgtgtccctcgtgtatcgtgtattattcccacggtttatgtggtggggaacataaaccaacatcctgaaaatttctccggtaggaacaggaacatatcgcttcccgtctctggagaaacaaaaaaaaagttacacatgacatttcattcgactgacatctgtaaatctgttgatcaggatttagtgtaaaactgtcatttttatgaatattccttatggccattgtttaaaaaatatttattttgacatatttgttttattgttatatttattgtggtaatttgtagtctattgcaatgcttagatttagtgctagcctgttcttaataagaacaggtgaaatgctgaattattatctgaactgaatttactctgctttatcatcagataccttgcttgctcatcttgttgtaaatttcactaaatatgtctgagaaattgcctgtttatggcaaatattattgcattttactgtattcgatttaaactaccatgttttgtctttcctttttctgaactaggtgcaatcttatattaattgagtatgctatttgattgaactgttttttttttttgtaaaaataaatactctaaggccacagtgataatataagattttgtgttacagctgggctaccgctctttttttttttaaaaaaaggtacttgctgtaatataatatttgatggtttctttcttcattttgcaggat

SEQ ID NO: 10589 - DNA, 680 bp, Oryza sativa
  Intron number 3 from transcript LOC_Os03g37915.1 (locus LO C_Os03g37915) derived from phytozome v7.0 (chr-ID Chr3; po s 21052456 to 21053135 reverse strand)
cagagataagggtaccaatgtttgaattttttatttttccattttattgatcatcttacatattgttatatgatatactatttaatgaatatgtaaaacacacagaataggtccccatcatagcaataagcttctgcgttatgtttaaaaaaacagttctagatgtgtgagtctttgtgatatcataggcaactagagaggtaagtgcacatggtaaacctgggctcttattcatatttttaacattaattttgtattcattttaactttattttaatttgatcttaaaatcaagccatatgcttcactaattctgaatagtttattttgtagaagttttttttaggaatctggacgcggttgcactgggaattcatctagaattttttttggttgattgtgataacagcaaaacatctcaagatgatagaccttcattgaccttcagcaatacattccttaattgaaaaactgaagttttttctaatccattctaaacagtgcagaactttttgaagtttctattggtgtttagctgttgattgtcgttttattagagacatcattgttgattgctagcttgaaccctttacaatcttcatgacatacttatatacgggaccaataaaaagatatgattaatcaggttcttgtctcatggaattcttgtaggaggttca

SEQ ID NO: 10590 - DNA, 584 bp, Oryza sativa
  Intron number 2 from transcript LOC_Os03g09100.1 (locus LO C_Os03g09100) derived from phytozome v7.0 (chr-ID Chr3; po s 4731482 to 4732065 reverse strand)
ccgtattgctcctgaacctccaaataggcctccaagtatgatctccacgagtactgttgtcttataattttttgtcacaaaagtcgcatgtttattatttttaagcagttgacatatacccctgacctaactatgttgtttttggcgggttcattcgttaacttgtactatgctgtttaagaacataaaacgtgggtgtgtgattttcagttatcatgctaccctgcccaaacataaaacatttgccacttgatcaaaagcctatacaccttctcattttttaattgtatttcctggccccttgtgttatcaacttaccatcctttaatctttcaattacactatgctcttttcctttaatcaatccccttttgatcagttatgattttgtggtttgcacatttgatttactactgtcttcactctcaacacctgtgattgcctcaattacgtacacaaaggatttgataaagtgtctataagtaatcagtttaaggctttgtttttgtttttttgtatcttactaatattttgtatccatggctttaggtggttcacttttcttgtttgatcggaaggtcctg

SEQ ID NO: 10591 - DNA, 987 bp, Oryza sativa
  Intron number 1 from transcript LOC_Os03g46910.1 (locus LO C_Os03g46910) derived from phytozome v7.0 (chr-ID Chr3; po s 26522310 to 26523296 reverse strand)
ccgaccacggcggcgccgcctccgtcaaggccgaggtgtgctttctccattttcttgtcgatttggttcccggcattgacgtccggggattatttcatataattgcgcaacaatgccccacaccttcaaatgtgcatcctagaaacatccaatttggtattttggttgtccaaatttgaaataaaaacaattggtgttttcttgggagtaattttgtcaaatttgattgaatttgatctagccggtgaccagatttgaatcataacattcgggtaggatgtccattcatttgggattgttttgctaaatgacaattgttgtacagagacattgttatgactttcatttagcagatggccctttggcatttgatttatttgtatgcatattttatacatcctttatattgcaaaagactaagataaattcagtcttagttagatagtatattccttaataaaaggatagctgctagtgtatttctcgaaagaaggacagtggctagccctttcagcctttgtaatgctaaagcagataagtcttcacttatgttcctccattatgccgaagaagctgaagtaactagattttttgctaacagcattcttaataggacatattcatggttaaaaagttttacggacttggtactactagaagtactagattattatttcgtgcttatagcttaggtttcattagagtatggcactgcaagtaaaaaaagatgaactttggtcatctcgatctttgtaatttacgccttcaaccattcatcaagttattgtgtgaggtagcaaaatttatcgaattagtcctgatctattaccatacactgtttgagttttggttagtatctactcttcattgatactatcatttatctgtaattgtctcagcatctcaatatcattgtgaacatatttttgttactctctttcacacaaatcattccattgtttccttgtttccattaaatattgcagg

SEQ ID NO: 10592 - DNA, 802 bp, Oryza sativa
  Intron number 1 from transcript LOC_Os06g44210.1 (locus LO C_Os06g44210) derived from phytozome v7.0 (chr-ID Chr6; po s 26667554 to 26668355 reverse strand)
ctctcggcagcacgaattgaattggaggtaggtaggtatgtattccgttcttcgctcgtagcgccttcttcgcaccactcgatttcgcctgcgtagagtggagatccgtccggaatttgattggtttcacccccaattagcaccccccgtgtgccccccacgtgaggtggatatactgtactagttgactgctactaggatggacttgctttgaattttcgttgtaaaaatgtaaaatatacatgtataatccgtttactttctatgatggtttatcttcatatcttggctacgctacaaaatgatacatcaaatatggtattgaactagttttgttgtcggcagaatcgattgtactagttataggcggactttgaaacacacatagtatatattggcatggtcgcaaacaaaccaaaccttttcttcgctgatttttgctgcaccctgatatgctttatttgttgttgcatatacactggtgcttttgcaaagtttgggtctagtgctatttctgctgaaaatgctctttaatctttggatgtgtagcagcgtaaaactctggtttttcttgtatgcaggggctttcaagttattgtttaagcatttttttgttgtaatttctgacatataaacttgtcggtatgctagaaagaactttggaactaactttagattgcccgtacaatcatatgcaaagtagatgaatgccgcttcattcaagtgtattctagagggttgttagtgcgcactaggcttcttttcctactgacatattctgttgtcaggcacatttgtaaaa

SEQ ID NO: 10593 - DNA, 679 bp, Oryza sativa
  Intron number 2 from transcript LOC_Os04g31200.1 (locus LO C_Os04g31200) derived from phytozome v7.0 (chr-ID Chr4; po s 18500230 to 18500908 reverse strand)
actgggtgcacgccatcttctaccatatcgcgcaggtgcttctcctccacatctgaggtggctcgctgatcaaaggggatttttctctcttccaccatgggcagaaaagagggagctcggattagggtttcttgttggagctttggatgcggaatgctaggacggatggagggcgcttgtgcgtagcaagatttgggagagatttggtattggattgagtggaaaaggtcaaacctagcttcgacggcgacaggtggtgaacaaaagcgcaaaagttttcaaggaagacaaagcagtggagaagacgacaggtggtgaacaaaggcgctgttacgcattttatttgcaatgcagttggtttagtgctatgcacttgattttataaagtcacgtatacatgttttgtttttcttggactagtatcattggcttaatgctatacagtatatggcattttggttatttaattggcggttggtacttggtaacaccacatatgccgtatttttcgtaatatatgaaatcactcggatgtttaatttcttattcttgactttacgttttgttgctttcaactaatcatgtattcagggctacacctaattaggtgtatctattagttagttttcattattctcatttttttcagataagagctccacatcctcttgcaagcatc

SEQ ID NO: 10594 - DNA, 1028 bp, Oryza sativa
  Intron number 1 from transcript LOC_Os07g08350.1 (locus LO C_Os07g08350) derived from phytozome v7.0 (chr-ID Chr7; po s 4282716 to 4283743)
cgaggagaagagtgaagcctttcaatctcccgttggtacgcttctccgaactctagctacgtcgaaaaagtaatgcttatcatttgattgatctcttattttgtacttgttgtgtatcacctcatgcaaaacgatatatcttggcctcaaaaatagttctttcgcatagaaaggctttatttgccaaggcaaatacctgattcttttacatttacagttataaaactgtcacgatagcggcattagtagacggcataacgctattgaagattcaaacttgacaatactgagacaatttgttaacaagatttagccaaaatctacaacccgaacttgataattataatatataaggaatcaacgagccttaggcctcccagtcgttctcttgtctagccatgcaatcatctcagatggtgcatctcttgtttaaaatagtctaaaataagagtttagctacaaatccaatcactaactgacaatgtaaacatatttaatacaaactctaccttggcgagtatgctacaccaatttgaattagttccgtgtacatttgaatctccgtgcacctgggcttaagctcattcattgctcatgcggagctatctgataagccttcaccaggtcgttcataactagacaaattattttgtggatttgctctaaattggttttttccaattttcctagcaaaactatagttaaaatttgtttgtgttcgtatattgtgaattgtccattttttctcatgtaattcaataaggtatgagagttagatgttttaagttcaagtcctaggtagcacaattaaataaaatcgtataactcatgtatattatattcgacgtttgagatataagggaccattgactaaggaagccttgagcgaggggaagttttccaatatagtgtggggggagtgttggaatataagtattcgctcgtcaatttaattaagcttttagattgaattgattggtgtccgcaactcaatattctcaatatatgccgcagatcacacctagaca

SEQ ID NO: 10595 - DNA, 1030 bp, Oryza sativa
  Intron number 2 from transcript LOC_Os08g37320.1 (locus LO C_Os08g37320) derived from phytozome v7.0 (chr-ID Chr8; po s 23577380 to 23578409 reverse strand)
aaagtaagcattttaggccctgtttagattccaacttttttcttcaaacttccaatttttccgtcacatcgaactttcctacacacacaaacttccaactttttcgtcacatcgttccaatttcttcaaacttccaattttggcgtggaactaaacacggccttactcttcaaacatatcccgtctttcaaggaagtagggttaaatttgagtgtgcttttctttgcacaaacgttagtgtgtctttgtaccattgttctacagtgatgttacaaacttaatgctcagaaatagtgtttgacaatattgattttttttttctaatctattattggaatatgattctataatcacatcaacatatttcaatatttcataaggcgtgggaagtggcaaatatgttctttctagttgatattgttgtttgatgattatgtgggttgattctcttggttgtctcttagcgtgtgctaattttctggtcaatgaccttgttatgccttttcttgttgtcgctcttgtgtatagacctttgaatctttcagatcatatcagtaatatgtatatgctgttttcagttccttctaatgtcaatcaatacgatatcttcgtaccatgttgctgacatgcaattagcacatactacctaccatgttaatgattctaattggctgtacctttttatttcaaaggaacaagttgttttgtaaatccaaatgttaatgctttttgtggcactgtaatatgctcagaaatgcatgttcttctctgtgatttagtcaatagaaggtagtatgtgttatttcacatgcccttttccggatgggaaaaggcaaatttattgttggaatattagtaaaatgctgatcacatcaaccttacactttgaatttgcaattgaccccatgcaagtattacttttgcttaattcttctggtttatatagtttgttccgcctacttgtagtgaagatactaagcatgaaataaatgcaggcattgaaatccccaagtacgttgacaccgtgact

SEQ ID NO: 10596 - DNA, 728 bp, Oryza sativa
  Intron number 1 from transcript LOC_Os08g37320.1 (locus LO C_Os08g37320) derived from phytozome v7.0 (chr-ID Chr8; po s 23578454 to 23579181 reverse strand)
acgtcaaccaccagctccagaccaagttctctcaggtattcaccacccccccccccaccccacacccgccgccgccggatcggacctagggtttccggatctggggggcatcctcccgtatccgatccttctgatcttgtattgaatgcgaagatcccatggtgagatgttagtggaatcgatccatttagttgggtatattctgtattcgtgtgcgttgtaataattttgttggcatgttgatattcagttagatttggactttaccaatatacatcggagataggttaacccatacaaatgtagtcgtcgttatgccaacattctcacatcgttggtgcttacgatcatcagcataagaacgttgttaattatggacatctttattccgttcaccgcgtttgcgcgtttggatttttattatagtctacagactacgttcgatcaccaaggatctgtattgtctttgtggctaataagattaatatggtttgaattaaaatgatcctttgtcttgtcaaattgatgccgtcatgttcctttggtacttttaccttgaaaaatgcctggaagaatctagaactcttggatgcatgcattttctcttgatttgcagcatgcgttttctcaatgctgttaatttctgaggtcccgtattatgtttctaaaagtttctctcttttgacactgcaggagccccaaccgattgactgggagtactacagaaa

SEQ ID NO: 10597 - DNA, 994 bp, Oryza sativa
  Intron number 1 from transcript LOC_Os08g34070.1 (locus LO C_Os08g34070) derived from phytozome v7.0 (chr-ID Chr8; po s 21352895 to 21353888)
gaagtcgtcgtcgtccgccgcggcggccaccgccggtaacgccctcctccgccctcggatcctccgtttcccccctctttctctctcgtatttgttgagatgatcggggctggcgggtcgggccgggcccggggcccgattgctttgcctgctgcgagatttggtcggttctgtgctcttctcctcgggggaagatccaatctcgagttgatgatggatggactctgccctgccatgccctaggtttatgctgcgttgatggcgtgttgattgatgatatattggcctgttggggtttggatcgcgcgtgtacgagattggattggatgggggtcgtgtgtagattggggatgtggaattcgatgtaggcttgctcctgggttaacggatttatttttgtagtgaacttgataaaatttggcagggtggccggccatgctctgaacctgtttgtaagcaagcctagattgagctgtttataaaatattacggtctgcgttatgtttccatgatgcaaatttacaattacgttagtttatgtgaaccacttcaagtgttatgaggtaaaacaaagtgcaaaaactttcttctatctgaagaagctatccctaaataattaaattaatggagatgaacaccaatatcagcgattagttgtgatgccaactgaagattggaagaggctgccaataaaaatgagatgatgtctagaattcactgccttaagagttttcaatgctatgatgttactttaaaagcctgttttgactggttgggtagttgtccgtgcaatcatgtgttagtggaagttcctggtaaaatttgtcactagctctaattgtgtcttagctggctttgattcatgcattttatgggttgacattcttgttggaatttcctgtttttcaaatgcgtgagcttaggaaatcccttgttctctttctgagggtatacatacttgaatgaatactaaacaaacggttatatttaggtg

SEQ ID NO: 10598 - DNA, 1064 bp, Oryza sativa
  Intron number 1 from transcript LOC_Os08g25410.1 (locus LO C_Os08g25410) derived from phytozome v7.0 (chr-ID Chr8; po s 15457535 to 15458598 reverse strand)
gcggaggggctcggggcagcgtacacgcgcgttcggtagtgctacgggtgctagctcaaaagctaagggcacgagagagagagagagagagagagagagagagagagcagggagggagaacggaggaggcactgctgagccaggcgcagtgatgggcggccgacggcgcggggcgagctctccggcctcgggccggggaaggggaaggagaagggtgcccggagtccccatccgctcctatcctcctttgctaatctatttgctaagctcacagaagagcatatgtatgcaattgggtagtgtcgcagtgacactataatacatgcaagaaatgcatcagccatgctctaggggatgtgcagatagtatgtgcatctagaatgcaagccatcatctattataactagcaacttttagattcccagcgtgacgattcagtttgataagactaacatgatacacttgatttctatgcatagcgatatttcctctatcaaaatttggtaaaaagaatttaacaaggctgttaattcactcatcactatggtggaagcaaagcagaagatctgtccgcaagatttcctactggacaagatatattcatagtagatacctacaagacttcgggtttagatattagtatttgatcttaatttctaagttcatgagctctgattagtagagtttaacattgatgattgtagatttgtagctgtcatgggtggatgtaagaagtaaaatgggtggaacgaagagtttattacttaggtagaataagaaaataaaaattgataaggggcatttgcccccgcttggtgtagaactgactaggggccaatgccccccgtctatatctacctgccagttgcccctaacattattagttggcctgactgccatttcctattaactgcacaaatatcatgtattattcatatatttggaaaaaaaatgcctaatagatgttacaaactgctaacactattgtatattctaaattattctattgctcctacattttgtttttaggacaaactacaccaagctcactactcttgttttga

SEQ ID NO: 10599 - DNA, 823 bp, Oryza sativa
  Intron number 1 from transcript LOC_Os05g23740.1 (locus LO C_Os05g23740) derived from phytozome v7.0 (chr-ID Chr5; po s 13564908 to 13565730)
gcaagcagttcgccgccgaggagatctccgcccaggtataggggtggcttacgctttgtgattgtttaccatgtgttggaattgatcatcaattgaggggttctgacggctagaatctagaaagaatgctttggaagatggaatcctgttgcgttgcttagatgtggccagttttgatttctagcttataggatcgtgactgttcatgaagctctatggaataatgggttaatggttaattgcttaatctcgccttgacttctcttgatgccaacaatagcacagcttccataacagtgtttttggtgtctcacaaatagaatcccatcctgtatgctttgtttagcatattcttcacaaaactatagaattctttttttttttttaaaacggcacttcacaaaagggaatgcaggtagtaggatatttgtactgaacagcccttgctctttgtatatatctaaatatgtgcacgtggatttttgatgcagtctatatatatatatggactgagttagacatcttatatgctttgagcttgacagcttatagtgcaaatcctgtgggttcccttcatgtttgctttgttttcatcagtacaatatttcctactggtgttctttcatcaattactaggcctagatgggtaattttggtggagtcgaatgtgccattttcttttggggatctgttggcaaaaactgaaatagcatgtgcatgcaaatgttttatgtatgcctgcaaaataagttttatggttcaaattgtttttaatccgagtgttgatcattttatgttctccaggtgcttagaaagctggtgg

SEQ ID NO: 10600 - DNA, 1041 bp, Oryza sativa
  Intron number 1 from transcript LOC_Os06g22810.1 (locus LO C_Os06g22810) derived from phytozome v7.0 (chr-ID Chr6; po s 13296373 to 13297413)
ccgcgcggcgctccggcggacggcttacggaggaggtgcgcttctttctttcttttctttctttggcccccctcttcttctttgctgggtggaagcttttgctctccagatgagatcttcttggtttctgtctctgcttttctttttatatatatttttcttccgatggatgaactaatttttttactgtagattttttttttggcattctgattctggcgataactctagaaattgtttgagctaaaccaatctatgggatgctagtagtacaacgcaaagctcgtagtagttgaagaaaataatatttgcagtttcttagtattttctttttgtaggaatattattattactactattaaataataaaaatgaaatttaataaagcacctttgccagccttcttcttctactatctcctcctagccccatgtgcatgtggtggtagtccatgctctcctcatcgtcgacttcccccaaatccgccgccgccgcgcacaagcttcccctcctttcgccggagaagactctcgcctcctccgaatccgattcgtcgtctccactgctgtattggcgaggtggtgcggtggagatcgatccgtgtagccgacaggggtaaggacacaagcttttcttggatcgctctctttgccgtgagctctcaaatccgaaatcttcctctttcttggattgatggacgctgcggttcgtcctggcggtgtgaaatgcgtggctccgttcgtcgcttcaagatctcagcgtggtgcggtcccgtagtgtagtgcatcgatcgtgcgcccacgtggggtgattaggactggttcggttcttgatgcccgctgattcattcggtttcgatgttcttgattgatttgctttggttcctaaacattttacagatcctgcttacttgtgctgtctagattctgatgttcttgccatattttttgttagctctagttggaatgcatgggttgtagcttgcaattgtagctgccatctaaaacaatagtgctgatgctttttgtcattcaggtgaac

SEQ ID NO: 10601 - DNA, 784 bp, Oryza sativa
  Intron number 2 from transcript LOC_Os03g26850.1 (locus LO C_Os03g26850) derived from phytozome v7.0 (chr-ID Chr3; po s 15317112 to 15317895)
taattcgattgaccgcgatagtttgcgggagggaggtgggtaatttgtactttttcctataaaagatatactccctccgtcaaaaataagttcggttttacacagttcatgtccggtctttgattgttcagtagcctcagctaggcttaagggaggggagagacaggtggtgcgggctaggagagtgagagagaggagaggccaggggagtgggaaatttgggtccaacaagagtactttgcatgcttattgggttgtttgaggcttatttttttaatacatatgcgaagtataaagtatatatatactcttttctataattcttaggtatacatatgaatacctatgaatcatggtgggctcgcgatcataaactgtaatgtttggataaaaagagaattctgtgggacttgaaaattccactaaagatcaaggtctttatgtggtttcttcacaagaaagtaattctaacgaaagataacctggctaaaagaaaatggggaggagacaaacattgttctttctgctatgcacaagagacaatccaatatcttttctgagtgtcatgtcgctcagtttatttggagatgtgtgttttttgcttttaatacccccaccccgtaacgccaaaaacattttcggtaattggcttagaggtgtatctaggtccattaagaagatgattctaattggagctagtgttgtatgttggtcaatttggcgttgtcgtaatgataaagtttttaatggtaaataattatctaaccctatgcaggttatcttc

SEQ ID NO: 10602 - DNA, 950 bp, Oryza sativa
  Intron number 1 from transcript LOC_Os08g06560.1 (locus LO C_Os08g06560) derived from phytozome v7.0 (chr-ID Chr8; po s 3702301 to 3703250 reverse strand)
gggctgggagaggctttatccttgaggtgctgaaggtgatgtccttgttgtaccactatatttgagtagcccttatcaatctagtgtatcttttggaccctgggggtgtttagatccaggggtgtaaagtttttgtgtgtcacatcgagtattatatagggtgtaaaaaaaactaattacagaatccgtcagtaaactgcgactctacgagacgaatttattaagcctaattaatccgttattagcaaatatttactgtagcaacacattgtcaaatcatggagcaattggcttaaaacgtctcgcaaattagtcacaatatgtgcaattagttatttttatagcctatatttaatacttcatgaaggtgtttaaacgctcgatatgatagggtgaaaaattttgatgtgtgatctgatcagggcctctgtttggttaaatctgaactgtttgcttgtagataatagataagtaactttgtcttgtcagtagattagaaacccccttccccttctctaagtgttgaatgccatttaaatttggattaagattctagtttcattgtctaatgctttgagtgtgttccggccatgattagagcaggtacaatagcatgctataagcgagttataaacatattttaaagagataaaggaagagagagaagagcagcggactacggatctatagccagctgcagcacggactctaagacttaatgtgtgtatgacaagtaggactatgtattaatagtatagtaagcaactattgtatgaattggctattatattggctatagataatttggagctagtagttgactatactattaaacttgctcttatctgtagaaaaaaaatacatttgcatatgtaaatttatatttgtgttgatggtgttctcctataatcataggctgcgaacatcccgaagaagtatactccgaccat

SEQ ID NO: 10603 - DNA, 450 bp, Oryza sativa
  Intron number 1 from transcript LOC_Os04g40530.1 (locus LO C_Os04g40530) derived from phytozome v7.0 (chr-ID Chr4; po s 23888730 to 23889179)
ccgtcagcgtccagtaccttcagtcccctgagaaagtatgcccgccattgctgacattgggaaaactctattcattaagaggataaacatgtcacttaaaaagtcatcgcaaattatttttaaaaaaattagtataataatttaatatgtaatatatcatttcacaactatacatattcaaattcaacttataccgattgaaacaaaaataataaatttgacgaaaagaacacgtatttcatggtcaaatttattgtttttttccagttgtataaatcaaattttaacttgtatatttgtaaaaatatatatcatatattgatttatcttgatttttttaattataacattttgaacgccaatctgccattgctgcattcttctccagatctcttgattgttttgtgtcgtgtaggttttcgcggagatcttccgggtgctgaagccggg

SEQ ID NO: 10604 - DNA, 659 bp, Oryza sativa
  Intron number 1 from transcript LOC_Os07g33670.1 (locus LO C_Os07g33670) derived from phytozome v7.0 (chr-ID Chr7; po s 20120733 to 20121391 reverse strand)
tcgccgtgctcagcctctgcaactgcggcttgctggtgagtccatttctctatctcttccccctccccctgatccgtgcgaaaacattccatcccgtacggcctattgttttaacacatgcctgatcaatgtagaattatgttaccgccgtgattgctcgatgctgtagtgatctaggaggtggcattgtagtgttgtcgtcttttgtgggagaatttgattggatgtgtataaaggaggcttgggcatatgttttggttgcttcacatacctttacttttagctatagagattctgattatcaggtttgaccacacattgtgcatgctacgaccactgaagatttcttagaaatgcttgttctgtggctctgtccaaatgttgttctcttgtcagacagacctcctgggtggcctattttcatgaaattgtgtttggttttgtggagttcgtttgatttcttgatttgtactgatctgtataatacgtcctggtttagtcgtgcaaagatggatatgcttgaattatgcagcaatcacctaataattgtgttttttttttgtttgtttgtcccctaaatctgttgccatgaaaacttagggatggacatgtagatgctataatgatctaaccatgaaatgctatgcaaaacttggcag

SEQ ID NO: 10605 - DNA, 927 bp, Oryza sativa
  Intron number 2 from transcript LOC_Os08g36390.1 (locus LO C_Os08g36390) derived from phytozome v7.0 (chr-ID Chr8; po s 22969987 to 22970913)
ggccacacctgcgactgcggccgcgtcttctccaggtacggccaccgccaccgccaccgccgccgccgcatctccatgcatccattaatctcatattctcacatttaacatgccaattacatatcgctccaaatcttttacacacctagatagtactatacaatcttctcctttgcaataatctttgtcaaatgcgggcgagaaaggcgtgatgatttttttctggagaatttttgcggggtcgctttgccattgtaggcctcatcagcaacaccctttatgagcagtagcatatctatattcattcatgccatcctctggtacgagtatttactcccaggaggggagtagtattgtggcatcaacaggaaagagagagagagaggtagctagcctagctgagagatgtggcaatgtagcgcgagctctgcaggcacaattcccgatgacgccctggctatcaatcgatgtgtgtggctgtggcctggccgtccgtgtgggcgtagcgtatgcatcatacatatactacggcactggccattgctttgatgttagcttggcttgtgttttgcctttgcaggggctccatttaatgcaatgccacggccacgaaacccaggctatgctattgctagcagctggttgcagggcccaaaatttcacgcctgacaaaacccccctgatcgcctccttggcttcttctccgtccgcctcagtatctcacccatgcgcatagaatactagtgtaatccaaagctaagctatagctagagacttttctttctggctgtttatgttgccggttattagtaccacctcgcttgtttggtgccgcgtgggggttgtttttagtggcgctaacgagatgcggcgtgtggatgttgatgcgcagggtggagagcttcatcgagcaccaggacgcgtgca

SEQ ID NO: 10606 - DNA, 853 bp, Oryza sativa
  Intron number 1 from transcript LOC_Os05g02220.1 (locus LO C_Os05g02220) derived from phytozome v7.0 (chr-ID Chr5; po s 701836 to 702688)
catcctcgagttcggcctccgcatcacgcgcggcggtcaggactccctctccctctctccctaccaatcaataatcgctctcgtcttctcctcctgtcttaattagggctgcttgttcgagcctaggttttaccaaaatctgaattgcagtcaaagaattggagacattagattttttatttatttattttagcatgatgtttcgttttttttggggggcttgctggtgttcttgagcgtgagagatttttttttttttgagttttagtgttgcccgactgcttctctttctctgtctttggaatctggatgatcagtttgctctttttatctttttcttttcttttttctgtgcggtgccgtctttctcggaaaagatttccaactttttagctgtttccgttccaagatatatatcgatcagttaaactttttagctgtttccgttccaagatatgtatcgattagttagacacagctcagttccaatttgttttgtttaatctcatcgttatcggatttacctacgccaagtcgccgtctaggttcatgtcgctgttgctgtgtgctcactgcatttcagattcatgtcggccttactaatcattggagcttccatcttaaaacattaattctgtactgcatcataacctgacgaaccactgcaacttgcaactactagtacttactcatgataagtaaacttcttttatttagtttcaaaaaaactatgtactatgtacttgcaagtgctgtgcactgtttcaactgcttcatcaaaactatgttcttcaatccttcttttaatccttccgtcaacatctgaaattcgtttctttggcaattttagcag

SEQ ID NO: 10607 - DNA, 832 bp, Oryza sativa
  Intron number 1 from transcript LOC_Os04g45040.2 (locus LO C_Os04g45040) derived from phytozome v7.0 (chr-ID Chr4; po s 26459367 to 26460198)
aaggcgccgcctgtcgcggacggcatagattcgaggtgagggagacgcttggaaggcttcccgtttggtattgttagattaaggctcggtattcacgcgattggtggacttatttttggattttgttctgctgtgaggggtgaagcctacacttgtcgatcaataggtatctaggcgaagttgcaaaaaattgaagaaaaatttgtgctccttaggcgatgcgctgcgacctgcgagcgtatgtgtttttagacggacaaaagtggtgttatataggggaattagagtgtaaaggtctacttttctggtcagcatgcttggatcacacctcctccgtctgagcgtgctgtattaattcaaaataatcaaaacgtcgtagacttttgcaaagtaatccagaaattggttggagtgaactaatgctgtcaagcagtcaagcagacagtttcctgatgactgctgagcaacttagtccgtaccgtgcattgtgtacattatggatgactagcaaaatacccgtaagttgcagcgggctctcatgaagcaaatagagcttctcactctagtacattgttagacaacaatgatgagcccacaagatagatggtggcccccagttgtcagatagatgggggtggcagaaccaccaccaccactagcatcttctaagatagtatagatatatgtagctgctggtgttaaactagaaaaatactatggatactttaattcctcttcatccgtatatgattaacatcatgaataaagtaaaaagaaataagttcaaccttgtgcagttcacaagactggaaggcccaactgaagctcccac

SEQ ID NO: 10608 - DNA, 642 bp, Oryza sativa
  Intron number 1 from transcript LOC_Os05g25490.1 (locus LO C_Os05g25490) derived from phytozome v7.0 (chr-ID Chr5; po s 14766066 to 14766707 reverse strand)
gcctcgccaacttcaggaaggtacgtgacaacctgacaattgacaaactgctctgttttctaagcagcttgcttgtccacaactagcttgcatgcatggctcccgagtttgacttttacatctggatgattgcatttgtttctcactcgtcaactatcaatctgatggtcgttgactcgttgtgaataatttttgaaatatttgaccaaattcttatttattgtgtacatcctgtaaaaatgctctgtatttggcatgccgagttggacttctacaatttgattgcattttgtttcagcctcctcaactataatcagccaaatagttataaatatttttttgaagaaaaaatgacaacatttatacaataagtcttctaccaccttgtaaaattgtaagtccaaattttatctacaaagagaaataaaataaaatagactaatttggttatgaatgatactaacattgcatttagtcattttttgatgcgtagtgcagataaaatttagtaatgcatatttgcgaaatgatacataatattgtactatatgttacagattttttttttctaaaacaatacaacatgcataagatgggtgaaaatacacaaaaaaaaaaaacaaatctccatgcatgcaggcg

SEQ ID NO: 10609 - DNA, 805 bp, Oryza sativa
  Intron number 5 from transcript LOC_Os06g03676.1 (locus LO C_Os06g03676) derived from phytozome v7.0 (chr-ID Chr6; po s 1442469 to 1443273 reverse strand)
aatcaggaaggtttgtactgatttcgcatcattttccagcgctgctgcaactttatcactatatttctgtatcaagcacacatgcatagtttcttttacattttagtatacacttctgtactggggttctgcgatacatggggattgcaccccaaagtatgatatgaagaatagcttctcatataaagtgatttggggtaacgcatgttccatatcttcatgtgtatgagtgcaccatttgttgtcatctgggatagcgcctatgtttttatttaattttatagaaatgagaatcaccaagatggcaatgctgcactatgagataaattgctacttttattttacagaacatttatgaattttgttgacatggcataggtttaacttataaatacgttagaaatcattttaatgcactgtatactgggctttgtgtacctttgaaatattttgatctgaatattcttttcagccaaccctattaaatgaatattttcttgtgaaggcttctagtgctaagtagagtgtatccagcatgatttttgtttattgattctgtgcgtacttaaaacccatgaatccacaagcaatatcactcaaatattgttctgttatacatctgtatgcccacctaccgagtttgtgatttttactgtctagtatggcaatgatataccaatatggctaattctcatgactccctatcatatgtttactgacaaagaaattcgttttatttaacagtaatactatcaaaatattgtttgcagctcaattgaagtgcggttcgaagacttcctttggt

SEQ ID NO: 10610 - DNA, 646 bp, Oryza sativa
  Intron number 1 from transcript LOC_Os08g29760.1 (locus LO C_Os08g29760) derived from phytozome v7.0 (chr-ID Chr8; po s 18289359 to 18290004)
accttgctctgacggagtattgaggctggcagcaggttcgcactgttatttctttctttattattattttcttttttccgccagattatctagttttgttagtggagcgatgctgccaagtttgcaacgatgcaatgcaagcgcgctcgttcaaaatcctgttaatttagttacttacgagattcaagcgcacgaactcgcactataatctctctaagtttccgcggcgcaaaaaaaaaaaagttaattatactttggtccaccttttattaccaaagaaactttgagccaccctctaactaatattttcactttagactaggtaagattatctttgttgcggtttggaccactccaaattacttttctagttgtatctaccctctaatcttgcgaagaatagtctacatataagtcgggaagattattggtttatgggtgccgatgtggttaaagtcatttatgtgctaaaaaagtttttgggtggttcaaagtgaaacaaatcaaaagtgaaaagatggttttaaaggtagtctaaagtaaaactttggtgataaaaggtggccctaaacgcaatttacttaaaaaaaatgcagtcttttatttttcttttttaaaaaatgtttgggtttcgcaggtccaagaa

SEQ ID NO: 10611 - DNA, 537 bp, Oryza sativa
  Intron number 2 from transcript LOC_Os08g29760.1 (locus LO C_Os08g29760) derived from phytozome v7.0 (chr-ID Chr8; po s 18290183 to 18290719)
gcggcggcgagaactcctaccaccacgtgtggccggtaattaatggctacaaaaaaactctactcgatcttgagttggttttgagttctaggattaattagtctgttcttttgccccagttcaattagttcgtttttttttattttctattaaagattcccatttcctccccgttagcagacctgtggtgccgtagtgtccgactgtttgatttagatgtctggaatttttggaattttttatttttctaattttttcttctgactccattgctaccaattaatcctagcatttggtagatcatttataaacatgctatcacttaatagagtgatcttaccttcagttgtagccatactgagaacctttttttacattatgataatgaggcttactgagaactgcagatttaatttaattcttagaagaacattttgaaccttcctcttcatctttcatatgtgaaccagacggtgatctttgtatagatgtgctgttaatttgttgaatcacacggaccaatttgttttgcagcca

SEQ ID NO: 10612 - DNA, 530 bp, Oryza sativa
  Intron number 1 from transcript LOC_Os08g07940.1 (locus LO C_Os08g07940) derived from phytozome v7.0 (chr-ID Chr8; po s 4474619 to 4475148)
gttgataaactcagaacgtacatccaagataaaaggttagtttatttcttaaaaaaatcaaaatgttagcagaacatatacttaatcctgtagcttattcctataacattagcatttacatgcatattttgtgttacgagagagatgagattggaattaggaattttagtgtatagattgatttaggcaaagaccatatataaagtgcatacaaagaatgtgaaaagactgtccactacacatatatccttaacaccgtcactcaaatgcaacgtctatgtaataacgttgcatttggaaattacaactaaacactaggatagtccaaacgcaatgcttgaagatgttgtcgaagtgtgcaactcttgaatgatgatgaagatgaaaatccatcccctcctcaatgaagaggacctttttttagataataatgaagaggaccttggagccttcgcaaactcttcttcagcccctttggtactttaaatccttcacgaattcgttcttcagccatccactaattcggagat

SEQ ID NO: 10613 - DNA, 803 bp, Oryza sativa
  Intron number 1 from transcript LOC_Os06g33990.1 (locus LO C_Os06g33990) derived from phytozome v7.0 (chr-ID Chr6; po s 19794409 to 19795211)
acgggaaggagcgctgaagccgaggagtgcggcgtgtgagagagggcggagggattagggaacagcgtgagggagtttttttattgattggtgggctttgatgggccatctcctcatttctatccgggcccacgggtcacctgcgggtgaaacacaaaacccgcccccgcccccgcccccggaaacgatcggggccccgtccccggaaacccgtgggtgagaaattcaccctgcccctggccccgtagcggtggggccggccccgtaccccccgacggggtaattgccacccctagcaacatctaggaattgtttggaatttcagtcttgatttcttccagatgattgtattagcaagattgaggtttgggcataagggttttttagaaatattcttcatagtatcttggcatatggaaacagaggaatgggttgatatttcagaatatacaaccggcttttcattcttagagagcattaagtatgaaagaagttcttctgcatatgtgcagaatgaaagatctcttgaaacaactagtttttgattggttacaaactttgtaattcattgtgatctctctgtaattaattctcagtaaatattatttgtcttttcaatgaaaatacacagctgggcaaagacttgacagtgatttcaatcaaaaaaaaataatgatacctatatgtcctctcgtatgttgggagaactcgtctagtagaggtagtctacgtttggtccttgttcagtcgagtaggtttcttgtagtcattctaaagttggtctcacatttttttagtttggg

SEQ ID NO: 10614 - DNA, 927 bp, Oryza sativa
  Intron number 2 from transcript LOC_Os06g04880.1 (locus LO C_Os06g04880) derived from phytozome v7.0 (chr-ID Chr6; po s 2143972 to 2144898 reverse strand)
gtgccaactccaagtgagacatttcttcctcttgattctctgaattttcagttcttgcagtttacagggatggggggaaaaatatgcagtctttggaggcaatgaaccttgttgtgaagtgactagtctcttggatgagttttttttttaatttcctttttcttaaagaggggaatatcaaatactatggtttgttgtttaggaagttttgatcggaggaggtgtcatttgatacatcagagaggggaattaaaatgagaggttttacttggtcattgccaccaaatgtggaattcgtttcacaaagctgcatagactagccaaatacaatgcacattgtcgttgttgcctactactacccaacccaattgatgagtgtgaaacttgagctcttgattattatttttttaaaaaaaatctgatttgcgagaagggactaatggatgataaacaaatattttgctcactgcaactagtggaaagatatatacgtattatgctctgtacccaaggtatctatgtggtatcttttgatgtcatataggaatatactcctagcttcaattaaacggggaggcaggaaattgaagtgctttttatcagttccaaactttcaataattgatctagatctgttcaatagtaccatctaatcatctatgaacaaagttgtgattgtaatgtcacaactaccgagtaccaactaaaatagtttggggtgctgcaatatgaggttgtttgattgtactaattgtggataattagggagagtacgaatcccataacttttgtgtactaattgtggataatttctatttaggagtgcgtttttctgctagttaccatttcgaccatttaatacggagcttttcttttctccctactcctttaagtgggcaatttcattccaatcacacaagtgcgtgaa

SEQ ID NO: 10615 - DNA, 370 bp, Oryza sativa
  Intron number 2 from transcript LOC_Os04g38660.1 (locus LO C_Os04g38660) derived from phytozome v7.0 (chr-ID Chr4; po s 22785487 to 22785856)
aagaggaagtctcagtttccaaaggtatacccgtatacgcatgcgcataacactatgctatttatcagtcgtgattttttcttatccgttagtcaaccaatttgcaaaggtcatttactaaacttgcacactactatatataaaaaaaacactgcaacttttagctttgcttttttaaaaaaatattttctggaccaatttagtgcattattatgtttatatgaagagaaatttccctatgtacccctaaaagttcgtccaatcccttctatattcctgagatttgattatttacttccatactcctaaattttactttgaatcccctctatactccttttgtcagttgaccgttaaattcatatcataa

SEQ ID NO: 10616 - DNA, 802 bp, Oryza sativa
  Intron number 1 from transcript LOC_Os07g12770.1 (locus LO C_Os07g12770) derived from phytozome v7.0 (chr-ID Chr7; po s 7309683 to 7310484)
ctcctcctcgtgagttgcctcaccaccaccaccaccaccaccactactactacttcagtagacttcttcccctttttgcttgattctgtttgtctctgtttgttaatcgaatctctctctctgtttttttttgggtgggggagggaaatggtgttgtgctgtaatcaatcaaaaactctggaactgaaagtataataattgttggttgttgcaattatagtgctagctgtcgcagtcaatcagcgcgtactctggttttggattagcatgcatttttagatgaggttactatgcccaatttttgtttcatttgacatcgcaaatttggttccaataaacacagaagtatctcctattcatagtgattcagtagaaattggaggacctcaaaaccaaagtaaggggcgccagtatatgtatgtcttatcatcatgattcttctctctccatattctattatacttatgtattatttgattttcgtttagcatgttgatctagttcaactgggttttttaatgtgaaatcaaagtgtctataatgttcctttcagtcttgcttaacattgcctggtagaattttgattgtaacatcaataaattataaacaggatgcgtaagtctacaatgttctttctaccttgtgttgaatttggtttaacataagtgaattaaacaggatctgtaattgtaaacgctagtttcataactttattacctgcttcatcttcttacgaaaattacttgcttttctttttcaacatgaaggttgactgcagagataaattggaagagaaagaatc

SEQ ID NO: 10617 - DNA, 269 bp, Oryza sativa
  Intron number 1 from transcript LOC_Os03g53670.2 (locus LO C_Os03g53670) derived from phytozome v7.0 (chr-ID Chr3; po s 30770881 to 30771149)
gcggccgttgctcctggcgctggcgaccgtatcctttttatttttgttttctttgatgtgtttaatctgttttagcagcggggggttgcggtttgtgcggcagttcttcgtaaagatttgaacttctttttttttctggggtgataatttaaacagcctttttttttctttttctcgtgttcgaatcctatggctgtattattgtttagttgctcgcttttgaatcgaagtgtttcttccttgattcgcaagctacagaggctactgac

SEQ ID NO: 10618 - DNA, 616 bp, Oryza sativa
  Intron number 3 from transcript LOC_Os03g56590.1 (locus LO C_Os03g56590) derived from phytozome v7.0 (chr-ID Chr3; po s 32232590 to 32233205 reverse strand)
agaggacgaaggtggatcaggagcacaagaacgaggtattccgattccgcataccgattcaccgctaatttcttcccattatttatcatgactagttcttcgcccttttgaaaatctcactcaagtatcatgccacttgagccagaatttggatgactgacaactagtatccccactgtgattcgtagtcaaccaaggaccttttgatcggttaactatattatattcgtcatttttctataaaacaacaatgatgaaggagcattgttctctaggtggtagatacttacatgttactctaacctcaaaaagaactaatatatcccttgacccttgtggctgttgtttatctgttagaattgtgcgaccagttgtgtttctaaattggaataacaacctgttccattggtcttgaatgtacgatgctgttcataggtcatacccaacctatctacatgagaatttgaatttgttgctgtacattaggcaatacagattacagagtggaggtgtaataacgatttttttatttgttattccttttccagtaggtttgattttggtagacagactgactttcaccggtgtcaacaggtccgtttgctcatacaccgtg

SEQ ID NO: 10619 - DNA, 814 bp, Oryza sativa
  Intron number 1 from transcript LOC_Os06g49460.1 (locus LO C_Os06g49460) derived from phytozome v7.0 (chr-ID Chr6; po s 29967475 to 29968288)
cccttcatccgccgcctccccgagttcaagttctggtatacgatttttcctgattcgcttctgatcctaggcagcaaactggtgtaggtagttggtgatgcgaccgtacaaatgtgatttcttaatgtgaggttttgatcgaaccagctgagatggtttggatcatcaatattcaattcaccgaccaacacatgtgttccactgattaatcggatgatgaggtagtagatggataggcaaaggcttcactatgaatgctaacctacggcttatgcagattccattgggagttactacttaatagggctatagataattttgatatggtaattgcttaggttgtgcatagctggaaagtccgcgatgaatttttctagtggagctattgcattttttgcgtgctcttatcctgtttagttgttggcttgtgatgtactagtacagtaacttttacctgtttgtttttaagttcagatattatattacgtaacatcttcgtcaagcttacaattttttatggaacttagttcatgagctgcttttacacgttgctttattgacacttgttcacaaaacaagaggcacttgctgttttatagcatcgaattttatttcttaaaaagatcaggaatagtaattgcattagtttgtcatgggcacatcatgccactgtaattaaacacttccctatttcgtgttctactgccaatgggtttggtttctttgtgtgcttgtgttggcgtgtctagcaaggcctatttgcgatgcaaatgcaaaatgtcagctatgctaactaatttattttttttcaggt

SEQ ID NO: 10620 - DNA, 854 bp, Oryza sativa
  Intron number 2 from transcript LOC_Os07g33610.1 (locus LO C_Os07g33610) derived from phytozome v7.0 (chr-ID Chr7; po s 20077669 to 20078522)
atatagaactggagttaaccttttctgaccactaagtatgtaatttgcttctaatttttgaaatgtctacctgtttttcttggcagatattctgcataataatatgccaaaaaaaaaggatgtttcctgcatacatggcctgtgccaaggctaaaactatacttgtcgattgagagtcctgcagttatgcagaagaattaaatctagaatattgttcaaaatttcttattacataggataggacatggatcgtttcgttagggatgaccaaattgttgtaaccagatcttttcaatggtttgctttgcttgctttgcaaaatttaattctgttgtatgtagcatctttcctcgagctaatattagatccaaaggaatcagttcttctcattatttgcttgtctatgtacttccctttttagtttttttagggaattcgtttttgtgtctttcatttgaggaggaaatgcaattatttgactagcataaatccagaaattctattggctagcataaatgtgattctttgagctggcttccatttatttccagtaattcacctatgtcgtgctaagctgctcctatcatgtggggtgatagaattgtttacttataaactaatattgtaagttatcatgaatcagactcattactctggtgacaatgaggggttgttcccttatctcaatttgtaatctttgcttgtttgttgtatgacttttgagaaagtgatatattcagctttgccaactaggccatttattgagttctaaagaaaatatcaaatttgttcaatcatactcccttgtctatcatgcagaaagaaaacaactctggtttgcctatatacataca

SEQ ID NO: 10621 - DNA, 928 bp, Oryza sativa
  Intron number 3 from transcript LOC_Os07g07820.1 (locus LO C_Os07g07820) derived from phytozome v7.0 (chr-ID Chr7; po s 3917821 to 3918748)
tgccactaaagcaatcatcgcaaacccggatccatgtatgttccaagtttcagcatattatcaggatagttatgtttctgaactatcttttattacttaacatgtagtcctgttcaagctagttgtaatatacacataattgttgcttcatttcaacttgaaaacttcctcttgtgccaagcattggacgtttatagttgactgatagaaataagcacgataaaatagccgtggagtggacgatggggtttgcaagataggcagttctatctgcatctaagcaagatcactgactctgtaaatgaatatctttggcgtgccctgagatgtaaaatgttgggaaaggaccaatactttttttaggttgagctgtgacataatatgtagcctgtgcattctatattagacaattattatgatggtattgtacttatgaaagctgccctcagtatttcttcagaaccaattcttccaatttatgagtaagtttcttaaatgctatttattggaactgggcattacctcctatcgcgaggtgtcagtgtaatttgttcaaacaaataatttaggttaacgactccagtcaaagcaagtgaagatgtgtcagtactcagtcaaatcttttgcttgaaaccaaatattgctggtcctccgctcttaggtagttgggaatagcttcaaatacacagcaattttctttatttcagaacttttccccttcttcctagcattccttatgctgcgtgattcatatatactgtcatcttgcaaaatacaattttgatgtactagaaccttattatttcagaacaaatattatagatgtctgtgggcttgtggcagaatattgatcacttgtttgctaatactaactttaatttcacttcttgtagggattaaaggctactaggacaggcactgatcttcc

SEQ ID NO: 10622 - DNA, 634 bp, Oryza sativa
  Intron number 2 from transcript LOC_Os07g06970.1 (locus LO C_Os07g06970) derived from phytozome v7.0 (chr-ID Chr7; po s 3432010 to 3432643 reverse strand)
aggttagtattttccacttgatcttggtgttgtgtcattgtagttcagggattaaggtgcacacaacagaaggctacagcaaaaggaagttttcatattcatgatgttacatatttgagtggaatgctatgctctgctggcaattgaggagtgtaatagggatataggatccttatgatgggctgtgtatgtcgtagggttgcatgatcataaccattgcaactcttataattggagttaagaaagactctgtattactggaattaagaggttatgggtatctatgtggtaaagagaccggaccatcgagcttactacaaaaaacatttcccttaaggctttgctttctatgtttctgcagtttcaacctgctttggtacacattcttctttacatagacatgtcacatgatcaccaaataccaatattgaagtctgaatcattttgtgtacacaagaatacaggattatagttgaagcatgcggctatataatcatattattattcagagcatcagatgtaactgaaaaacaattaatttgttctaaccgaccttttctaacatgtctgtcttttttttttcctactcttctattcagaacttcccctcgtcatctcatcctcttattggcca

SEQ ID NO: 10623 - DNA, 573 bp, Oryza sativa
  Intron number 1 from transcript LOC_Os07g06970.1 (locus LO C_Os07g06970) derived from phytozome v7.0 (chr-ID Chr7; po s 3432713 to 3433285 reverse strand)
ccgagcaagccgccgcgcagattgccctcgacaaggtattgatgagcattgtggtggtggcatgcaacttcacctttttttttttgctttacatgtgtagttgcaaaatcatcttccatatacatagagatttatcgtgtagcctttaagtttgtgattagatacggcgatatgcacaatgcacgattcagttagcaattgtgtctcacctatgaggaattgaggaatgtcacaagtgcaaggtggagttctctcaagtctcaaatagtcaaatctcaccttagtttggttattcaattcctgagtgagcacctaattgtgttgctcattgtctttgttgccatttcttttgatagtaccctctgttttctgttctgacaaaccaatgccatcgacgttagtgatcaagctgcacagtaacctagctcctttgtatttctctatcggataagctatgtacctatgatatatgaaatatcattactatgtgaaatgttgttcatgctgtggacctatggtgattaccatttcttttattgtcttcgttgtagcttggtattcagcccactgcaa

SEQ ID NO: 10624 - DNA, 918 bp, Oryza sativa
  Intron number 3 from transcript LOC_Os05g05590.1 (locus LO C_Os05g05590) derived from phytozome v7.0 (chr-ID Chr5; po s 2781678 to 2782595 reverse strand)
ctgggtgagctttctgtgtacctatagctcttctagtgagctcccaaccaaagcggaatttattttgttgttcttctgtacaagaaaagaaggtgccttgtcttagtttaatttggttttggctaatttaatcttgagagcaaaatgcaccgcaataggactcacttgagaaattcatgtatttctgaagtatgcatatgatgatattattattgccattctgtataaaatattacttagattcctctggatgtatcaaacccatgtttctaagacttcctcaaaacctatgtgatttgtgaatgctaaggtacacttattgagctggatgtataaaatagtcaactgcccacccattcccatgaaattatactgaaaaatgaattaaactatcacgtctgtcccaaacaattatttccccccctgaaatacagacttaaaaaggattgtatcacagtagtacatgaagcccttttacaattagaggacttggtgatgattggatccaagtatgtctaatcattcttacattcttactgaacgtgagtaagcttgtgagtcatttagattatttttcctgactgtgcaagtatatatatagtctttatagagaatcagcatccttactctgccctgtttcgaacctaggaaattgcatgcattcctgcagtaactgaattgattaatatgaatttcctgtgtatttctttggattagctaataacattttaagctccagcattatatttttgtgcagaaatacatgtattttcagttctcgctaaaacatttgaccctaacatcaaagtgatagcctgaagttacttacattttatataagtgaagcttttaactgaaatgcatctttgtttataatcatcaggtttcaagtaaagaaaaaacaattcttccgcaatt

SEQ ID NO: 10625 - DNA, 1012 bp, Oryza sativa
  Intron number 3 from transcript LOC_Os03g45320.2 (locus LO C_Os03g45320) derived from phytozome v7.0 (chr-ID Chr3; po s 25585047 to 25586058)
ttgctaatctgaggccagctgcagtgttgcctcaggtatatcctactcccaccttagttcagttcagtgcaattcgcttgatcagtattattcgtttaaatagcgacatctttttagttgctttgagctttatggagttgaaatgatggtagaacatctcctgaagtaatctgtgccaatgccaattttgaacaattaccacgatctggggtatctgaattgactgctgaactgtctcggacattcaaggttgtaactacattagtgcatgcgatgctgctattaatagatagggaaaactatgtcagtaaccttcaaacatccgtatttaatttaaacaaataacaatgcaaatgaagcttgtcttcacaatggcactgtgaaggcatattatggcatattacaccatgatgaatggtaaaatgacagtgatttctttccctgtagtggctagtaatggacacttaccagaaatgggtgtggaaggagtgtttcatattcaaaagaatatgacgggatattccaaaagatttttgtttgtttttttccttctgtaatgtcgttttgaagttagctccagttgcaatgtcattccttcctctaaatatgcatgcttatatagagctggcttaattttctctagttctcctttttcactaaatatgcattgcctgcccattccattatattatgttgtcatcaaccacaaaagaaatctattatgaattatatttttaaattataatccatgatggatgtacagatgtagtataccaacttcatgtaggcaatcttgatttcgtttggaaaattactaatggtgaatataatactgtttgactgcatatattctaggacatatatatttagtgatagggaaagtagttaatatcaatcttcattttttttaatgtttatgtactagctatgctgcccctatattcctatagtattcaagaggactacctgtagttattttttcctttgagctaattatctctttagttagtag

SEQ ID NO: 10626 - DNA, 923 bp, Oryza sativa
  Intron number 2 from transcript LOC_Os07g47100.2 (locus LO C_Os07g47100) derived from phytozome v7.0 (chr-ID Chr7; po s 28164132 to 28165054)
cagggtaagtagaaacgcttcggcgtgttcttgctgtggttagatttcggcttcagttcttttgttggcacatggtggtgtacaaggtttttctggggattggggaatctgtttgctgctggtggtacactgtgtacgcgtggctggtttcttgtttgtttcttctgggcctagctgtctgtccgtcgatgtcttagacatggctgctagttcatactgtgcaggttgtgggtgaattttttttttgttttctctttaagacagagatggatttactctcgtcttactggcataccttgacttgccagctcgaactgctgattggtacagtatggagtagcaactgtaatcttgaccattgcatgaagcattgagaaatgctgaaagattatttgttttttaattttaattattatatattgattgactgtgcaacagcttctgtctcctagagttctactcttggtccatttacagtggttagtagtactggtcatccaacaccatgaaggcatgagagggatatggtcctgtcaagagtgatggcgtgatcaatttctgaaagaacagtggccatgctagtccgaatttggttgagcatttaatccccttttgaaggtttttgggccatccatatagatttgaagtagggttgtaggagtaaagctgaatattatgggcccatgtttgctttcacatttaggaattgcaaagtctctctttgggaaagggcacaagtcctttttgagttcagagttactctattttcgttccttttctgctttgcttgaacttttattttttttattcatataataacacaagttgctgaataattctacgggaaaaaaagcatcgtcctggtcctcacaaatatttttccatcagttttcaggtaaagaaaaagcaattcttccggaatt

SEQ ID NO: 10627 - DNA, 855 bp, Oryza sativa
  Intron number 1 from transcript LOC_Os04g26590.1 (locus LO C_Os04g26590) derived from phytozome v7.0 (chr-ID Chr4; po s 15505910 to 15506764 reverse strand)
ggcggcgcgtggtggatttggcggaggaggcggcggtgcgtgcggtggatggtgagagaggcgcgtgcggtggaagggggcacgaggtggcggcgcctaggttttttttttggcgtcaatttttttttggctggatttttttttgtcgtggaaaaaatttgccacccgagctctcacctcactctatcttaaccatggaaatttgttttcccggtaacaaaattcccggcagattatgtgttgtcttaaattatctatggcatatcaattgacctgttatattagttcattgtcggcacttaatttgctgccctatttttttaattcccggcaaatgagatgatgtctaagattatttccggcacttgatgtattcctggcaaatagttcgccactaacttcattttattgccagcagttaagtgccatgaatactaggtgtagtgtctgctgctctagaattgaatcaattgtactctatggctgcgttcttttcaggctagtcgtcctcgttttccgttagcacgcttttcaaactactaaacggtgcatttttctgtaaaaagtttctatacgaaagttacttaaaaaaatcatattagtccattttttttaaaaagaatagcagatacttaattaatcatgtgctaatggatcgctccgttttccgtaatcactgttgagaagaagaaagaacgcagtatatgatatcagtaggggttgggtgtagttacccagcatcgatcaccagcagggcaacaagtaacaacagccgatgagtggccaacctctcttttgatctgctgcgccgatatgatgtgtttggtactttttcagctctagatataccgaaag

SEQ ID NO: 10628 - DNA, 835 bp, Oryza sativa
  Intron number 2 from transcript LOC_Os04g51070.1 (locus LO C_Os04g51070) derived from phytozome v7.0 (chr-ID Chr4; po s 30051127 to 30051961 reverse strand)
ctcttcccaaatcctaccaaggttagtcttattcatcatcttgcaagttattagttgtttaggctgtaaataacttggtgattctcacattaacagacaaccactcagattttcaataatatttccatttgttactcatgctctgaagataatcaaaattttaaatatcctcatccatttattctcagagaactaatgattcaaaaactgccaacaccaatatagctccggtttagcaaatctctgtttttttacagatcacaaatacctaacagtaaatttataagtctgtgtattcatctaactggtataaattttgaaattatctgtccaaaatttcttcaagttgcgttaccacattttgatgcatatgtatatggaatatgctgtctgatatatcactcaacatgattgttttttgaaaaatagttcatcagtatgatgttctttactgataacagtgccatgttattaagggttgttttggttttaagccaaattatgccctaccaaattgttggcattttgaaaagttatttggcaaagtttggcttgccaccaaagttggtcaagttttggcactaccaatatattgacatggtaacaaatcaaaacacccctaattgtgttcatcctaaccaagtgagttagcccttctagttagctaggagaaagcaatagaagcattcagttcgatatttcctatgttccttgccttttttgtgtgttagcacattccacaatgttatcatcctcatgatgttacccttcaacaagattgtagcacttaaatatcttggttgtggcactaatgtgttacaaactgtgctctaga

SEQ ID NO: 10629 - DNA, 637 bp, Oryza sativa
  Intron number 1 from transcript LOC_Os06g44620.1 (locus LO C_Os06g44620) derived from phytozome v7.0 (chr-ID Chr6; po s 26947483 to 26948119 reverse strand)
cccaccgcagcctcgtcaccagcgtcgcgcagcaggtgagctctagctgctgcttcgccattgttaaccaatttttcttccgcggcgtcgaattttccggggatttctctcactttctgcgcttcggagtggcgtctcccctttccagcttgggatttccccttttttttatctcgtcttttttgtcggcgccaagcgagtgatcattcaattcactcctcctcatcaaaccccctgtcagccacatgggtcccacacatggtcccacctgtcagccacatatccccagctgcgtcaagattcgtgccggtgactggatggcgctgtccgttaatacatgcatcggaaaatgttaagaatatttcgtttcttttttttattattttttgaaagaaatatagttatatttgtagtttttatgtgctaaattattttttatcaaaactcaaacaaccatcttaatgcttattggtggttacatgagagatagttaaattcttgcttgatctaaatgatagtaaaataatctcttttttttttcaacctactagagagtaacttactagtactaataatgttgaaaattgtgaaatttggtgcaggtggacggggagaacccgaacctgtacttcaggag

SEQ ID NO: 10630 - DNA, 972 bp, Oryza sativa
  Intron number 2 from transcript LOC_Os03g61710.1 (locus LO C_Os03g61710) derived from phytozome v7.0 (chr-ID Chr3; po s 34968105 to 34969076)
accccatctgtgtctacccggccgaccccgacaaggttaattttgccagcattctactctgctttgcccctgttcctagattaatcctgctcagtttgagtggattttgttaattttttgctttttcgttcgttggttgagattgattgaagaacgtaggtccttatcagttatcgcggggaatgtttttagttgagattctaaagagaaaaagggagagagttttctgtagcgcatcggattccattttttttcggtggaggtagagacaatctccttactattttaggatgggtgggtggttgcgttattaccccattaattaatttattatcataacaagaagcccgtgatacagtttcgttgccctgcccgtgagcttaatttgttgtccccgcgggcttgtggcccacagagataatggtgtggaagtccatgcttcccctttgttttgttttaggctggtggccttcaaatggattgcaaacattccttgtggactcccattcagcccttcgatgggggcttaatactgcattgcatccagcctcatccagccttatcagccaaaatttgaatttttaatcttaaatttggagttgattttgaggttttttcattgaagtttatttttcagccttagcttttaaatcgctaagaacactaatataaaagttttatttataaattatttttcgttttcaaatatgccgaataagccaaacgatgggggccatcatgttgcagttgcaaatggattttcatatactagtactattgcttcattcttaattctatttgacttggaataatatgaaatggaaaatgctatctctggcttcggaattgtgccatgatccgtctgaagttgctgttttttcttagcttcagttatttgattatttctttgatatattgatttggttgttgataaatatttttcatgcaggaaattgacataaaaaaccacaa

SEQ ID NO: 10631 - DNA, 931 bp, Oryza sativa
  Intron number 1 from transcript LOC_Os03g22570.2 (locus LO C_Os03g22570) derived from phytozome v7.0 (chr-ID Chr3; po s 12974990 to 12975920)
agtacgggggctccgccgaccacaaggagcacatcgtgagcgccccccccccccgtttccctcccctccccgctcgttttgttctctcccccccgggggggcctcccgcgcccgaaccctaggttttcggcgtccggatttggggggcgtgcttgcgttggttcgtgcttgagtgggcgtcgttcctggttgcctgcggtagggggagtgaggcggtagtggtggagctggggagctcaaaaccctagccacctgttaacaattgctgggcgcttggggtttgggtgtgtggagcggagccgtgacggtcttgtccggatgatggagatgaggagagtagtaacaacaggaaggacagaacgacgtgttttgataatttgttctgcataatttctaccatttgaatattggaaaatgtgtgtgtgtgtgtgtgttttaatgatgaaaacagttcaaggtagagagatcaaaattgaaccctgctaaagtacttcacagatgtagtcacaaggcaatgcacatttggaagactgtagtctgtaaatgcacagcaatcttgatgtgctttaagtgttgttattacactatgttccagcttctagttgaaaaggctctttttttagtgaaattgtggcgctatgcatggtagcatggaaggtggtgctgtaatgtgttgatgcaattctgaactttttactcttttatatgctatatgtgttgatggcatgtttatttgagaaccagtgcaaccaatggacaaatattctagtcaactaatttgaccttgcttacattcatgaatcctctgaagattagctcagagcacagcatcaccaccatcaactcttttaagtagtataaattaatatttttattttatgatccttctacacttgttttgaccaagcgttttctttgtaggaaacttgtt

SEQ ID NO: 10632 - DNA, 930 bp, Oryza sativa
  Intron number 1 from transcript LOC_Os08g16030.1 (locus LO C_Os08g16030) derived from phytozome v7.0 (chr-ID Chr8; po s 9779670 to 9780599)
atcctggtatgtatgtaaaaatgttttcctttaagagaatagattaaaactcggtctctatattcaacacggatgtacacgccaaagtttgtagatgtttgtgctgtaacttttttttttcttgtttcactttggtattggtagttgataacttcattcttctgtggaacatgcatgatctagttaggattattatggtttgagagtttttttgtcttgtgaaattcagtgttaaaaactgagagtggtactactcagtaatgatggtactactttctcagtgactgagacattagtacatcactctcttttgcaccaatgttaatgatctggcttatgcatatggtacgtctcatgagtcattgttcaattacttcactccagactgttagagatctcctttttgtttcccttccggtacatgattaattttttttcgtaattcaagatttcattaatttcatttttgtgttctttttaatttttcttggatttttgtttaacaattaaaattgcgtcctgatttgagttcattgaaaatttcgtcacatttgaaatatggatagttttttatgaggattgaatatggtttctcttttaccattccttcatttttggtgctagctatttcttttcagttcagttcaagctgaggtccttgcttcttagtatgcaatactgttccctgaaaaaatagaactttttatcccacaaggccacaacaccttcattttctcattgcttcctcggcaatttgtctttctgaactttccttaatttttttccagagattgttctccctttcttactttgcatttggcaaaaaaaattgtctctcaacagataattcagctacatatccttctggcagttaacattctctgttcttgacacttgacaggcacagcagctgccagactgcatacctgc

SEQ ID NO: 10633 - DNA, 970 bp, Oryza sativa
  Intron number 1 from transcript LOC_Os06g51400.3 (locus LO C_Os06g51400) derived from phytozome v7.0 (chr-ID Chr6; po s 31132191 to 31133160)
ctcatccaaagcttgattccccaaatcaaatccaggtcaatcttctctctaatctttgatgttcgatctacatccttattctgcttttgatagcaattagtctcaattagaaattgctttgattttttagatgaagaggatagaactttaaaataattctaccaagtccagtctagtgagtccactccaacccagaaacatcacaaacaatttgtaacttacttgcatcatttcagcaatgaaatatttaatgtggtacttgatgaaattattgttgatttaaacaatcgctttgctgaaaggtctactcggctattgagatgcattacttgtcttgatccaaggaattcttttaccaattatgatgaagataagctcattgaacttgctaagatatatgcggcagactattttgaatatgattgtatagtcttcagagatcaacttgacacatttatctgtgatgtaagtaatctgatttggatttctcaagctgctctgaccaagatcaacctttctgtgagcctgtgaagatggttaaaagtaatagacacacggtttttccattgttatatcgcttaattgaattagccttaattttgcccgttgctacggcaatggtagaaagagccttctcagctatgaacattattaaaactgagctgcagaacaagatgaatgattaatggatgaatcacttacatatgtaatattattttctggattcaacttcaggttctctacgtagtactgttaatgaatagtgaaaattacgaggatatgttgcgttaggtattgtacttttactgtacttcgttgtatgattagaaatcgtatttcagtcttgcattttttttttcagcactcgcactgtacttcagtgtatgaattgtcatggatagttttagccttcaatttgagccctaggcatgaagagatcctggctccgccactgaaggacgacgagggg

SEQ ID NO: 10634 - DNA, 792 bp, Oryza sativa
  Intron number 1 from transcript LOC_Os06g43890.1 (locus LO C_Os06g43890) derived from phytozome v7.0 (chr-ID Chr6; po s 26440079 to 26440870 reverse strand)
agcggcagaggaagcaggcacggtggctgtcggcggtaagcccatggggacgggagtggaggaggtcgcgcctccacgccgtccgcatctccgtcggtgagaggagggaggagaggggagagaggtgaagataggtgagatgggggagagaggaggtcaggaggaagaagaggaggggattgagaataacatgcagggcccacatgggtcccaccattttttattattgtgtatgtgaagctaacatatggttcccacgggttttactattttttcggatcaaattgccacgtaagggccacgtcaatgccgcgttagatgaagaccgagtcaaattagccacgtaggcaccacgtcagctaaaaccgccgtccaaacctccttatgacctatattgcaccggttttgataattaagggacctattatatctgattttctggttgaaagacgaaaatcggattcgtcgataagttaagggacctcagatgaacttattccgggagaaaacgagaaagaaacaagtccacatatcgcctctcagttttcgtggagtttaattgacatccctaaaccgtaataccaaaaatcttcaccccttatacagacgaaaccggccaagccaagttccatgacagtacggatggttggttttgggctgacgtcatatcttagtcagcaaaaagaaaattaaaaaacatgtggtccacatgtaagtggacctcctcctctcctcaactatcccctctcttccccatctctccacctctcccctctctttcccaggagctca

SEQ ID NO: 10635 - DNA, 862 bp, Oryza sativa
  Intron number 2 from transcript LOC_Os08g13469.1 (locus LO C_Os08g13469) derived from phytozome v7.0 (chr-ID Chr8; po s 8018141 to 8019002)
acccatcaactcttggactgatcccatatcggtatgcacaacgctgctatccccctgtccatagcttcctagcttcctgtacattcagtttcacatggatgatgtggaaagacaaccccatcttgcagttttcacttgctaaatgttgtgcttacagctgtgtttctatttcgagacatagatgctcttttcctgtcttcacttgggtggtgttatatgtggtcattagatttctcatcagattacgtaggtttagcttaatggcaatgtactgtgtttatgctatgagcagatgatgcgtctcttcagtttcctcagctttcttccatttccaacaaatcatatttaaaatttgtgaatttattgcccaccatttttttggtagaattgacagagtaccagtgcattaatggtgttcatttggacaatctttagtaattttgatgcatacactatcaagcattatttgtaaacctggcaagttacaatcttggcttattaccagttaaccaaattgagccattgaatttggctaggtaccattcttatacatccaaatcttaactccatatgcaatttgaatagaggttactctgtcaatagatttatagttctctgtttgtttttctattgatttttccaaaatgttacctccggttcctaaatatgtgacctattatctttagctatttctttatgatacaatctacaatatttatgtggtctcttacgcaattactattatatgtgattcgcacaagcattttggaacttactgatagtgttggtgcctatcctcacattaaaacatatattcctaatttcaggtttgccattcataatagtagttgacattaacagc

SEQ ID NO: 10636 - DNA, 870 bp, Oryza sativa
  Intron number 1 from transcript LOC_Os05g23420.1 (locus LO C_Os05g23420) derived from phytozome v7.0 (chr-ID Chr5; po s 13324283 to 13325152 reverse strand)
aaagtgggcgagattagcgaatagattggtccgaggtgaatgcctgttttatattagctagtctttcattggatgcaccttggttgaaaattaaatacgcgtaacatatgggaaactgagaacaaatccataattcatttgtggtggtaacatttgggatactgagggtggtgttaacatctttttatttgttatgatcatcactcatgctaagttactaatagatgataacaatgcaaaaactgcaaaaaggttttgttttggatcccattcaattcatcattattaggagcatagtctttgaattttcagaaatatgagaatggatcaggtcatgagagcttgttagtaataacttttccaattgctatgcttcagtaccgattcaagaccaaatcgtggtataatcttcaaaagtcaatctttattgttttatggcatcgagcctaaccaattctaagatttctatcaaaatggaaatgtgaattcttctgctattgtattgtcatatgtgaagtttggcaatagtttgtttttagctactagcttattttttggcattttatagaatataagaacactcatcgttagtatgatgatccaaatagaaaatattcatccttaagatttgttatgatcatttgaataatctcctacaatacctctttcccctgtcttttgaacaaatatggttttatgtggtaggttatacaaaatagtaaatacctaataatcttaccttttttgttggcaggtaatttataccatctttcaccatattcatgagaaacttgctgcttcatttctcagacctttcaatatttccttgtgccagcaatcattgataatagaatcacggggaaggattac

SEQ ID NO: 10637 - DNA, 338 bp, Oryza sativa
  Intron number 2 from transcript LOC_Os05g37170.4 (locus LO C_Os05g37170) derived from phytozome v7.0 (chr-ID Chr5; po s 21655961 to 21656298)
caaggtttgatctcttgtgttacctttttgtcgaaaagaatatcttatctttgtgcatagatacacatgcacattgttaggtacttaggtatgtccatgagaaattttggctggaagtgtttgggaatctatagaactttacaaaagtttaccacctcttatgctgtatttaaatatcaaaagtattgtgtctgaacacaattggctggtctgcattatacatttgctgttattatgctcaggttattcatcattatccacaaatatgttttttcttctttgcaaatattctccttttcccagagccgcattggactccaatacaagagtcagagggt

SEQ ID NO: 10638 - DNA, 862 bp, Oryza sativa
  Intron number 4 from transcript LOC_Os05g14550.1 (locus LO C_Os05g14550) derived from phytozome v7.0 (chr-ID Chr5; po s 8278126 to 8278987)
aaacacagcggcaaccaagaagtcatcaagtaagatgctttgttgtttggaaaacattgggacattgggacactatggattctctgtgccattgtgcaatttactaaagttctttttttgttaagtgtagtagtgtgttacgattttttttttttggtaaaattgctttcggacatttggcatttggcaaaaagcatgatgtttttgcattctgaaaatatgaaaaaactgtgagacatgacaatcggatgacattttatttaaccttaattttatttgcaaaaaaaacctataagaatccttgtttgcatagcaacttaaaaagataagcatagtgcagcatagcacaaccaccacaaaccgagcctaattgttattcactgttcagcttggttttagggctccaggctcgtcttagttcataaaaccttctgactttgttgaagtcttcaactatgctttacctgtgaagatctttgatctttttgggaatttcaatcttacccagctgctctgcatagcttattagttctgaacctgcagtaagtgtatttgtttagctgagctgctccctgtatcagttaattatgttttgaaaaatgaacatccaagaagtagcgggtgagttattgtgaagtgtactgttggtcgttttgcctagtttgcatcatattcgataactgttactcttaagttcctgtgcgccccttgtccacacctaaaataaactacatatttaataggaggggatatcctctaatattttctttcatgtattaataccctgcattttcatttacttgtaatattaaaagttggtttgttcttttttaacattaaggattttgacttctacaggtca

SEQ ID NO: 10639 - DNA, 931 bp, Oryza sativa
  Intron number 1 from transcript LOC_Os08g25210.1 (locus LO C_Os08g25210) derived from phytozome v7.0 (chr-ID Chr8; po s 15313485 to 15314415)
gaggttggaggagagtacgctcgtgagtcgcagcggtgggcatgaggcaacggctcacgggcacagtgggtactcgttgggcatgcctgtggttgacaggcatgggcacggtcacggggttttgcccgatagactttacgggtgtgggtcgtgcatgggcacatgggtctcgggctgggtatggatttgctctgcccgtgcctgacctgactcgttgccatccctagggatggggcctatttttggccacaccctcatatctgcccgaaaatcaccagagagcaaaattaactttcagaaatttctaccgtgattttcagaagttgctatagtgttttcgcaagtttccaaaaagtgtaaaaaattcagcatgagcatagtagaaaactgggcaaattagcatgttggaaattctgaaaatattttcgaaaagaaatccaaaaatcaccagataaataaactttcggaaatttctactgtgattttctaaaaattccgaaatcaccagagagcaaatttgttggtcatatcaattttggaaattcagaaaggaacttttggaaatttccaaaaattcagcgaggacgagggcgaggctgaggccgcaagggcgtgaccagcggtgaggcagtgaccacgccgaggcaagtgccgctgccgagctagcagctgccggctggggcctgcctggatcatctattcatctctgcatcatcaagtaatttgacgaactagactgtcatctcatctctgttattagtctgtaaaagtattttgattcttgaatgattgattggttggattgattattgaatcaaatacatatgtgatatgtcttttcttttgtttataaaaggaagtttttgtttcctcaattgcttcaattcctcatcatgtcttccagcaatagaaaatatgattcactgactag

SEQ ID NO: 10640 - DNA, 538 bp, Oryza sativa
  Intron number 1 from transcript LOC_Os03g41050.1 (locus LO C_Os03g41050) derived from phytozome v7.0 (chr-ID Chr3; po s 22814184 to 22814721 reverse strand)
ctcccctcctccagatctggtcaggggaggcggcggtagtggcagcgccctctccttcgccagatctagcgagaggggaggcaatgggctccccacaacggcgattctcctcctctccgtccctcgcctcttctctctctccccggcgtcccactgctgctcttcccctctccaccgcggtggggcgcaacctcctgtccgtcgctggctgacatgacgatagggacaactcaactagattgacggcacgacaatggggaagccaggggattctagtgactgtgattgtgtttggatgattttgctgatgattttgattgtgtttggttgatggggatgatgttgatcttagaaatgataaagatggagagagcttcatcgagccagctttttttttattcatagaatctcaaaggatgggtgtcggttgggaaaactagcacctatagctgttttttagtgtgatgtttgaccatattatgataacaatccggcccatatagggttagccgaggcccaacaaattaaggttgcccgg

SEQ ID NO: 10641 - DNA, 924 bp, Oryza sativa
  Intron number 2 from transcript LOC_Os03g50130.2 (locus LO C_Os03g50130) derived from phytozome v7.0 (chr-ID Chr3; po s 28587835 to 28588758 reverse strand)
gccaccggcatcccggacaaccgcctcaagattgggtacgtttctttttgcgaattttcctactggagatttattctgtgtgctgtgctggtaattaaactgtcgctctaacgaaagatgattcgtatgcatagctagttcaaacttaaccttgatttctagaatgctagtcctgttcgtttcttgggtagcaataaccaatcagccaacactctgaagtctgaactttgacttcatttatgaatggttccccaagtactgatggtattaagtggggtaggtggtcaatgctcaattaagtggaggatacagtaggtgtagtacaccaaagaaaaatgtcaaaggtgcgtgtttaattggtgatatgtcaagattgaggagtgggtgacaacgtggagtagctttgaagtggatcatacagtatactattcaacatggtacggatcgtgcaaatgtccccatctcttcattttataatctgtcaaagatcgcagctacttgttggcacgacgttgatgaaacttccaaagtttacatatttagtatttcattactcatttcaagaggtatatataaggtgtgtccagacttcagacttcagacttcagactgctcgagtcgttgctaaatcgctattaattatgggttgactcgtacgtcagtgggtaatgcagattgcaaccctgcaccaatcaccacagttatgatagtctagtctatcggtgtcctttgcattgagtagcaaagaaaggatcacttgaactgaagtttcatctgaatttgcaccaaatggcacacctatcactttgtcaaccatctcatatcttggtttctgatcgatcatagtggttctaacctggtcggattaattttttggcaaatgcttcagggggctgaacttcttggcgatctttgggttgatca

SEQ ID NO: 10642 - DNA, 965 bp, Oryza sativa
  Intron number 1 from transcript LOC_Os07g03160.1 (locus LO C_Os07g03160) derived from phytozome v7.0 (chr-ID Chr7; po s 1236123 to 1237087 reverse strand)
acgtaagcgtcccctcctccctccctcccgcacctctcggcgtcgcttctcgcctcgtctccgctttgcttctcccgcaagtctgcgcgattccgccgtcgttccccgatccgagcgctcgccggtggggggctcgggtccgctcgcggacgccgcgggctgcggtatcgatctgctatagtagggcgatggcgcgttttgttgcggggacggcggtgctgcttgcggctccgaattgggggtagctcgacctagcttggttgcgctcgctgttctagctctcgcgctctcctcctgtttgttcggtgccttacttgggttcgtagatttcaaacgctcgtgcattgctagtttagtttagttcggtcggcaagcttgcttagtgtcagagccaactgctgttttgattgctagttcggtcggcaagttctacccaatctatcgcatgtgaattcactgtgttactgtggattttgggggtttagtggagggttatcgtggatgtcctcgccagtgattattgtactttgggtaattagtagattggtgaactcgtgagtgatcagttgcttggtctcaaatttgatgtgattctcttcatttcgtatcacagtagaacttcctgttccctgctccacccgatctcagtaattcagtcccatccagaatgttccttgtcaatttgacaacattttcgtcctttttttttcattacaaagcatgttttgttatgcatgtctgtgcctgtagaatgcgtatcttatatgacatgagctaattgcagcttttctttgtgcgatcctcaggtttttcaatttcagcgcaatatagttcaattatgcttattgtgcccttccacattaacaacacattcttctaattttacatttgcaagcacacttgtttcatggtctgcttattgcgatttactcctcaacaggttcgtggcatttgtatctgtgggg

SEQ ID NO: 10643 - DNA, 915 bp, Oryza sativa
  Intron number 3 from transcript LOC_Os05g06440.1 (locus LO C_Os05g06440) derived from phytozome v7.0 (chr-ID Chr5; po s 3304222 to 3305136)
aacattcaggacatctttagcaggtgaggccaatgtgctatctactccatccgttccaaaatggatggtgttttggttttgtcataagtatggtgttccaaatcctgactttgactaggtttatggaaaattgtgccaacatcaaattagtttcattaaaatccaccatgaaatatgtctcagtagtgtacttcctccgtttcatattataagactttctagcattacccatattcatatagatattaatgaatctagacatatatgtgtctaaattcattaaaatctatatgaatgtgggtaatgctatgtctagattcattaatatctatatgaatatgggtaatgctagaaagtcttataatatgaaacggagggggtaattatttggtattgtagatattaattaggtttctatatacttgattaaagtctttgacttgggacaaaactaaaacaacttacattttggaatggagggggtagcatttattgttttagccttctctgagctataactgtacatgtgagctacttttataggtggtagtaacaaattgagtctgaagataaatgcctgtacgcctccatatatcaatatatatctgatttaagaggtcttttcatgtaaatatctagctctttgttcgacaataacacaaacccctccattgtggaacaaaattctaaatgtgttggtgatgtgctcaccaggaactaactgaatatataaagtttaagatcaggaaatctaatgtcaacagtctgcatgtaaacacattagacagtagtatcttagctagatgcaattcaacctaattggcatttacttttattgtatcattttgttcttaatcatcgctttactgttttgttcctgaactctgtagcttcttcggtggtggtggtggtggg

SEQ ID NO: 10644 - DNA, 446 bp, Oryza sativa
  Intron number 3 from transcript LOC_Os07g36080.3 (locus LO C_Os07g36080) derived from phytozome v7.0 (chr-ID Chr7; po s 21574254 to 21574699)
acctcaccggcaagctcttcgccaccattgacggggtaactaaatttagcttcacttagtttcaaaaaaaaactaatttagcttcacttcactacagagtcttctcttaaaatttattattccctctatttcattttatattataaatcgtttgattttttttcttcgtcaaacttcttcaagttttatcaagtttttttaaaaatatactaatattttcaatacaaaataaacatattattaaaatatattcaatgttaaatttaataaaattaatttatatcccatatgttactatttttttctataaacttagtcaaagctaaaaactttgattaagaaaatagacaaacaatttataatatgaaatgaaacggaaaaagtattactgttgctcagctgagttgttgacaagaatccccctttgtgatttgtgcagcttgacc

SEQ ID NO: 10645 - DNA, 654 bp, Oryza sativa
  Intron number 2 from transcript LOC_Os07g41620.1 (locus LO C_Os07g41620) derived from phytozome v7.0 (chr-ID Chr7; po s 24951770 to 24952423 reverse strand)
attacagagcagccttgggcctggtaagtctcgatctcagatgttaatctagattaatctggttcatgctgtaatactagattactagtccctcgagatatagatgagcagtgggaattataagcaacagaggagtaatatgataactaatgatactacctccgtttcaggttctaagactttctagcattgcccatatttatataaatgttaatgaatctagacataaaatagattcattaacatctatataaatgtaggtaatgctagaaagtcttataacctgaaacggaggaagtagatgttttggcatttgccaatgtttgatttcttcttgtaaaccagagtgttacaaatgaaagtcccaagcttatgatgtcaaccatcagctgtatgagttctaaaattgcttttaagttcagaagtttttttttttctaaaaacagtggtcccaatgtaaatttaaacttcaattggaattttgaaagcaatctactactgtgttagttttattactctagggacagaggtaaccgagatcattttctttataaggtgagtcagtgattattagcaaactttcctgcggttagatttatatttgttgttcctaatgcctctaattttgatcttttgaagcgtacgccccctgat

SEQ ID NO: 10646 - DNA, 805 bp, Oryza sativa
  Intron number 2 from transcript LOC_Os05g45420.3 (locus LO C_Os05g45420) derived from phytozome v7.0 (chr-ID Chr5; po s 26287272 to 26288076 reverse strand)
gaagagaaaggttggtactgatccctttgacccttttgttcaagatgtttgtagaatatatacgaaatgatagatacttgggtaaatatttaagatccatcacatgtttctctaaatgacatacactgctgctgatcccccaaaagcactcccattcccaaaacaagtttcatcttaggttccttgtttccagttagagggcatacatgagtaggtgcagctgggttttgcaaaaaggtgtcagggaagtaggagggcatgcatgaatcgctggtgctggtggtggtaaatttcaggtgggaagatgactgatgtggaaaaaaagggctcaaatcgtatctgggtggttgaggacagaactgtgagcctcatgttgctccatttgacaaactatgagcaaccttaggtggcacgattggttggatcaggcattaatattacaatccaaagacgtacccaaatttagcaaaaagacattatatcttgtaatttgtagtatgcaggagcacatttagttgaataacgacacaatcatatttctagagtaagacaaaaactattcattccttttgtgtaacaatgccttgtcgatcaccattcacttagcaatattctttgactatgggtctaaaatactgaatgattggtcacagttgaccagccatgatttgctgtgtaaagtgaagtctttgaaccatgttattcagtatacagtctgttgccaaacactttctatcattgatgaataatcgtgtcgtgttattcctttgcagttaaaagagaaatcaagatacttagattattt

SEQ ID NO: 10647 - DNA, 922 bp, Oryza sativa
  Intron number 1 from transcript LOC_Os05g42330.2 (locus LO C_Os05g42330) derived from phytozome v7.0 (chr-ID Chr5; po s 24704115 to 24705036 reverse strand)
acggcttcgaggacgacgacgtcaatcccttcgcggtgagtgctcgctccccctcgttccacccccgcgctagtatattcgagaaggttcgctgttcgcgtagatctcggggtgggttctcctgatctgatctacgtaggaggtggccgcatttgggatccgtcgttgcttgggttccggcgcggctggatctggcgcgtgggaggagggtgcgatggcgagatgcgtttttttcttttggtggttggagtaggcgagattacgctgtttaggcctgtgtaggttaattgcttgcggagtgattgttcaactatggatctgggtgtggtgggtgaattggagaatgtatgtggtagtagtacagttctttgctggaactcggaattcggatttgtagcatgctagagcaatgtggtggtacctttggtgtgctgcaacctgcaagtacaacctggaactagtttggtttacacagaattgtttgcgctcgttgcctcggtaccatgccttgtttagtctattagtgtaattacgaaattattcaggaaggatctccaattttgatttccattaactgctattttgaaaatgcaatgcgatgacaagtgctctaccttctgtatcgttttaagactaaacttgtaagacactattttcgcaggcatgtgtcatcaaaacttttgatgtttctgcattagtagttctttgatatactattatatgttggcacttcttatttacgtggaaaattgtacctcacttcaggtcagttgtagttgtaactcataaaaatcgtgttgtaactggttgcacacaagcctataatgttcatgttattttctactactttgtgatttatttgccttgcaattcctcctatattgcagggaggaagtgttcctcctgccaacaattctcgact

SEQ ID NO: 10648 - DNA, 1034 bp, Oryza sativa
  Intron number 1 from transcript LOC_Os07g07270.1 (locus LO C_Os07g07270) derived from phytozome v7.0 (chr-ID Chr7; po s 3611833 to 3612866 reverse strand)
tggtaagcaaatcttctgcctcgatttggattcggtcgtgaggttggtgagttgcgttttatccattcgaatgtctagtttggatcggttagtgctgaattgcggatcgatgttggtagccaatgtgctatgtgtgattcagttgtgattgtcctgcaatggcgatttgagtattggcattatagttttcatgagattattgaggttcattcatgtgaataccatcatatcatatataatacttggcatttgcagctttacatttttagcagctcagaataccaatatatgtttctacaattatttgagttgggaggtgttagtgcccttgcaatagtttgttgtatgccatacagcttatatagtcacttttttagcggagttgatgcaaccatcagaactgcataatagaatttatagcccttgtgtttcagaagaaggaatcttaaaccttgtcttgaaactgtcaccttcttatgctttatattcattggttaggataagtttccttcttctattggactggccagtagccacccctaaaaatatttcatactgccaacatgcaatttgtgatttggttttgccgaattcatgcaaccactgtgttgtttgatttacctggctttcatgctttgggattgcttcattggaacattatgcattagctactgtcaagggattttggaatggttttaaacttttaatgcaatctgttgtcagcgattttttttgaactgttttgttagtttagatgcgtaccaatagcttattgttgtttcagattcgtacatttgaatctaactgaagtgacagataccattttactgaaatacggaaggtgagactcctattctgtactggtatgttagatataaatggcaaagacttctatctgacaatcgatatgcttaatgagtgtccattcttgtgttttgaaatatacagttaactatcttatcagtttctgataatcaattttattctcctttctttcaggggttacaaaaggttctttcggcgaaccgctcttg

SEQ ID NO: 10649 - DNA, 1046 bp, Oryza sativa
  Intron number 3 from transcript LOC_Os03g53770.1 (locus LO C_Os03g53770) derived from phytozome v7.0 (chr-ID Chr3; po s 30818700 to 30819745)
atcccaaggccctagagatcgcgctgctgctgtcggtatggctctgtgcattgattggctatgtttgtggatgggacttttcgctattggttgtggtggttacacaattggtgtgcctaatgaatgatttagtattttagcatactgccattgtgaatagtgtagttggtatgtgtagctacaagcctattatggcttgtttaggcgctgaagaagccaaattttgtgtcggttgctatcaatattgtagcgtgtagcgataaaaaggaaaatatgtattatataaacggtattttgtcgttattataatatgtcacacttcctatagaacttgttggcatgcatgtacatattagagagcacataaatgtttatgtactaaatattcagttgtgttccttgtggagctctttcatattagatggatgacctaaaagtaagtgaggatcattatgtgaatcgaaggcatttttgatgcaaaaaaacattgaatcttgaatgctttatattcttcctatgattacacataaccgtgtgctttatggtttcatgcactggcaagcaaatgattgaaaggcggtgctttcttccgttgtcggtaaaatcttagaagccattgaccatggactataataaacaaaaacaaaatagatttatattaatgcctgctttgattggcatggaagtgagcagcatattatatggtgttactactgtgatcatttgactttgttattctgttttgccatttaagaaatctgctcccagttatatttctttatgtgcagcatgtgtgcaaatctgataaatgtgcatcaatttcaactgagattgtcataatgaaacacagtgcacagataacaatccagtgaatcttctaattagggtatattcagtttaaatctcattacgctacctaggtcttgcagcactgaaaagaaatagatgtttgataagcttcccctttcagtatggattatggcttattatcttctaagttccctttttcagggagcaacaattgtggatcgggttgtcaacataac

SEQ ID NO: 10650 - DNA, 722 bp, Oryza sativa
  Intron number 1 from transcript LOC_Os07g37640.1 (locus LO C_Os07g37640) derived from phytozome v7.0 (chr-ID Chr7; po s 22565026 to 22565747)
tcctctactccgtcgacctccccgcccccacccaggtacggttcctctgctcaccaatttgttatactgcttgaaatcttcgttttattgtttgcctcgcaacgtagcaatagtagtaccacgctcagtacaagagggatacacatattatatggtgttaatttaccatgcgtatgattctcagattccagttttttgggtcaatacacccgtttatactgctaactaaatttgggcagaacactatgattttttttttttgtacaacgaaacaaacaaacacatcatcatcttcaatttgctatggtagcactgagcgtgtaccttctaacctaaatatttgatatttaggacaagatctttttcaaacttttaaaattccaaccatcaataatttctcaaattcttagtttaaaacaaaagtaatggtgtttgtagattttccttggaaagtacttcctgcttctgtttatatacgacgtcgtcatatataaatggaaggagagtaatatcataaacttgctatattttataaactttttctagtataaattttatggttggaattttgaaagtttgatcaaatcttgtcctaaacgtcaaatatttatggccgaagggagtatataatctgtttttttagtcgatatgattattaccttttcttttgctagtatttctgttttgctgattgcctattttgtctttcagcaatcactgca

SEQ ID NO: 10651 - DNA, 781 bp, Oryza sativa
  Intron number 1 from transcript LOC_Os04g54570.1 (locus LO C_Os04g54570) derived from phytozome v7.0 (chr-ID Chr4; po s 32268820 to 32269600 reverse strand)
gccaggtggtgaggagatcgccaggagcgtgttgcgtaagtacgcgccaaacttgcctgaggtatgttacttcatgccggaaattattttgatctcgaggtaacgttcttgtcacttaaatagttgaatttttttaaaaaagatatatataaacatgtgatatatcactccacaaatatacaagatcaaatttaacttttacatctcgaaaaaaaaaccaattaaactataactagttgatatatatttatagtcaaatttgttttttttagatgtagaagttgatatcttgttgtttgcatggcacttaagtagttataaaaaaaattaagaagatgtattaatatgtgatatatcacttcacaaaaataattaagaagatgtattaatatgtgatatatcacttcacaaaaatacaaggttaaattcaacttctatatcttgcaacgaaaaaacaagttaaacttgattatttggttaaatttgttttttggtaagttgtagaagttgaatttgagcttgtatatttatggagtgatatattacatattaatatatatatatatatatatatatatatatatatatatatatatatatatatatatatatatattataaccatttaagtgacatgcaagtaaccctttcgtggtggaggttgctcactttttttttcttttcgatgggaaagtcataatgcattggttagcttaaaattaagaacacgtgcaatggcgtcgcaggtgtccgagctggacttgcttgtagaggaacgcaa

SEQ ID NO: 10652 - DNA, 939 bp, Oryza sativa
  Intron number 1 from transcript LOC_Os07g40730.3 (locus LO C_Os07g40730) derived from phytozome v7.0 (chr-ID Chr7; po s 24402713 to 24403651)
agtgcctccgcgccgtccaagattgcatctcttcggtacggttcatccgttcttcatccctttcttgataatatatatgctgctcgacaaactcggtgctttcttggatacctcggagcgtttctttctcaagatttcgttaatttttccccgtgtttcttggcgacagcttagcaagtccgtggatatttgcaagcatttcttgaaatatcactccgagaattcggtgactcgataaagatagtctctccacacacaaacgatgaaccctagtcccatttggattactttcgtcgggagtttgttgggtgaaccctagttctaaatgtttaaagtccctaaaactggtaaatccaaatcgacttgttctcatgtctacttgtacccatcaacgggctttcccctttcacatacttgaccaattatctcgatatatagatgcattatgcacttaaacatgttcacaggcagcatatgtagtcgaacactgaaagcgttacttactggcttctagcaaggccattaaaatatacacctaagttttatgggtaattaaggccttattggtgccatttgagtctttattatgaataacagaaatttatgcgtcttctttatttctattcgatcttttttcaataataatgaccatgccactaatttttctgagcaagatgaagagccttcaaactcaatggttataagcacaaaatggggatgcattatgatgtgagcgatattacaattcagagctatttttttctaggtgtaaagtaatgagtagatttcaagcataaaagaacaaatatttactgttctatttaacctattttgattggctttctgggatgttatgttcttgatctagaattaaaactgatccttcccctgtattgttggtaaggctgcaccattctctacaacacaaagtcaaagtgg

SEQ ID NO: 10653 - DNA, 603 bp, Oryza sativa
  Intron number 1 from transcript LOC_Os07g43440.1 (locus LO C_Os07g43440) derived from phytozome v7.0 (chr-ID Chr7; po s 26008474 to 26009076 reverse strand)
ctggcctgcctgaagctccggccgccggagccgcggtaaatctcactctcatcatccactgtcatgtcaatcctactcaggtcatgtcgatgaaatagcgttattggtttttgatttcttaaaacatgtttaatcattcggcatatttagcgaaaaaggcatatagcctagtggttatagtgacctgagtagcacccccaagtttataagttcaaatattcataggggccaatttcaaattgggttatttaagggctagttcttcttcattcgataggctaattttctatttaaaaaagctggatatatccggttggatatagaagccggctaaaaaatacatttctctaaataaaaaaaataaaaagtttatgtaattattaattattttattataattattttattattaaaatactttaaacgtacttatacaaaatttttaaataagataaattggtgaaacatgtgtttaaacgttaacctttaaaaaacgaagggattatgtatatattttgcaactagtacatgtatacatgttgtgttgcttgtgtgttttttgggccagtgagaaagtggcgtggtgctgttcgaggaacggcg

SEQ ID NO: 10654 - DNA, 917 bp, Oryza sativa
  Intron number 1 from transcript LOC_Os05g49680.1 (locus LO C_Os05g49680) derived from phytozome v7.0 (chr-ID Chr5; po s 28430005 to 28430921 reverse strand)
gcggcagcgccgtcgtcgccaaatccaagcccgtagtaagccaaatcaactctatgctatcgtattatttggtatttgtacagcgctcactacaagatccccttcttttgcattaaaaagtaacttctttttccgtcagagatgttctgtggatcgtttccctctggggaaaatcttgtatgtgtgcgcgttgggggatggacggcggcttactgatttttgttttatctaagcagtagtttacttagttttcactcttcgtgtaaatttcacaaaactaccaaattatctcaaacctacagatttgaagtgttatcacaaaactaggggtttaacactaaatttatcacaaaactacatatatatggcaaagtatcgtaaaactacagatttaatattgatgttatcacaaactataggttttagagtttaatcctcagcactactgttatttttgggctataaacgttgctgttttgtgattaaattggaactaaacctgtagttttgtgattcttctttttttttttactaaatagttctgatatatacttagcctcaaatctgtagtttcgtggtacaacaccttcaatctgtaaatttgtgatagtttgatcaaaatatctgcagttttgagcgtatagtatttgtaaccattttttctgtttgtagaaattttgtgttttgttctgcttggttgaacaaattttcataaaattcgggggcaatcctttgcaaaaaatatctatggtcttgcaaaattgctctgttgtgttgtgttctgcttgtttcttgtgcacaacaaacagtggtttgatgagagaaccaaatttgattgtctgcctattattgtgtttgagctttgtattatttggttatgcggtgcattatattcacaaccattcatggtgttgcag

SEQ ID NO: 10655 - DNA, 898 bp, Oryza sativa
  Intron number 1 from transcript LOC_Os04g57590.2 (locus LO C_Os04g57590) derived from phytozome v7.0 (chr-ID Chr4; po s 34084556 to 34085453 reverse strand)
gccgcaccgccgtccatcaggggattggccaccaggtacttggaatgattcgattccgctcgatttggatagggtttagtataactagttagggcttggtctgatgaattgaacatggcggattcccattctagagtggtcaggaatatcttcgctttcttgcctttgagtaattttaggatgtaatttctaggattaatacacatctgctcatcgcaattggcagaagggggaaagaaaaggagagtacacacagtcacacaacgggacagggaaaacatatgtgcaactaggtttatttttgagagctcataatgaaatgacagatttcttggtatgattgatccattagctttatctgttattctttctattctccaaatatctggtttagcattgcgagataagtttgacggaataatcagtcatgagcagaaatattccttaactgtctacaaaatgggatagctcttctgcatgattgaatggaaaaatcatttgaacattttggatactgaatatacttagacagccattcttatttctttcgtcacttaagtgaactgttgattggttcatgatttgggggttaactgttgctgtagagatttcttataaattcatatccttgtctgtttcccatattattgcattagttcctgcttctctttagatggtgttgcttctttcaaaactaatttgggggtcctctttgtctactggactactactccctttagtaatggaatctttgttttctctgaagcactcgattataaggatcgtctgtattgttggttcttttaggtgtgatagtatggtggtacttttcgtctttctaacataagtttgctttgacaaattaaattagattcattttgattcatcatgcagacat

SEQ ID NO: 10656 - DNA, 796 bp, Oryza sativa
  Intron number 1 from transcript LOC_Os06g02340.1 (locus LO C_Os06g02340) derived from phytozome v7.0 (chr-ID Chr6; po s 779121 to 779916)
ccgccgccaacggagctgagcgctctcggccacaggtaatttggtttccgttcttgcttcaattttgcttagttttgtagatttctagttgattataggtatatagttccaagaagtttatggtacctgacattcttgtatggtagcatttgacactgaatcactgatggctgaagctgcgttggctgccaaaggaaccaaccagatctattaataaattattaatcaaatgcactatcttttttccagataaatagggtgtattgccgcatattcatactgtcaaaataaacattttcattaattttgggagggtggaatacgaagtaccattttgtcttattttgaagggaagggaggaaaaaaacaaaaataggtttggcacaatataaacagattattacaattgtggtattgttcaagatatcaaagctgtaggtggttctggcgtatattgttttggttggcatctaggacgttgatgcacatcttattctgggaatcgttagttcgttacagacttacagttcaatgaaatggtcagttttatttgcctcaatgtgtcataactcataagggtcactgtaatgactcaagaagctgtaggtgaagttactgctttatattgcttcactgaaacaacacagttggatcaatatcactccactctatctctcaatctttactagtaggaagtagtaattttatcttcgaatgttttctctgctccagtaatctctgaatttttctttgtttgacagggaagttgctgctgcagaaaggccctttaagaaaa

SEQ ID NO: 10657 - DNA, 590 bp, Oryza sativa
  Intron number 1 from transcript LOC_Os06g20430.2 (locus LO C_Os06g20430) derived from phytozome v7.0 (chr-ID Chr6; po s 11738112 to 11738701 reverse strand)
gtggagcatcttggttttatcaggggtatgtatctcttgtgttaaagaatccataaatgttactttttaaattatggcaagtcgattttccatctgagcctttgctttgaagtttaagatctgaaatacttgttttgatgattcgaggcctcctttaacccatgatttcttcctacactgggtcctttgtcgaggaaattacatattgcaatgttcagacttctgtacaaaattggcatatatctgtgcattctgacagtgatggcaacctttcctttgcatctgcttcattatttctactaaacatgaattttggagtcgtggcatgtttgtcaagtcagagctaatattatcaaataaaacgtctcttctgtttggtgctttggtggttttgtttgagtctttcctttggggtcgattgacagagataagatttcattcactatattactatttgctggtacacatgtatattcagataaatgatcccgtgttattctttttaattctgaagcatgtcaagagccaaatgtctatactcctagattaatcactgtgccttattcccctccttccttgaaggttaataa

SEQ ID NO: 10658 - DNA, 1005 bp, Oryza sativa
  Intron number 1 from transcript LOC_Os04g45670.1 (locus LO C_Os04g45670) derived from phytozome v7.0 (chr-ID Chr4; po s 26833181 to 26834185 reverse strand)
aggcctccaggctcaaggagcaggtctcccgccaggtgacgctctcccatccccctcgatctctttgaactcctgtgttagtacggttctcgatcgatccgagtttgtgattgcgcaaccggggtgggtcgatgtcgatccctctcaggtgtctgtcttgttcgatccggtctctatataagtttgatttgatgtctatgctgatgggttttgagaggctaccgtactcgtctatggttaggcgtctcaggttgattttcattcatgctggcgagtggtgaaatgaattgtgagggggaggtccaagcttttgctctcgaaaaaaacaattgtgagggttgggaccgcgatgcgcgtgtttgcaatccctgagatgagaaacatcaggttatgattttacgacagggttgatcaatctggttaagctattagcaacctgtggcttttctatttaaaagcgttgctcgtgattcctgttcgaaatatagaaccatgtaaacatgacctacccgaatttgctgttttgagtaataccgccttgattattttcatccatcttgcacaaacataggagggttggccgaaaggagttacactgccttaggaagacagctaagattagcagtctacacaacaaagtagggaacaatatctggtatctattcaggtgttctggtttcgtactgtaggcctatactactatttccttgctatgagttttgcctggaatatatagtctttgaaaacggatgttccaatgttaggagttgttattactaatgtctgcgatttgcaaagtaactggaaactctagggctgttaaatgccagctacatatctgccttcacatggaatatatactgcattatctttatatgttgtgggatattttcttggtatttaactgcatcgaaaagtcagctctttttaatcttggtatgaaccatgtaacattgtacctgtctacaccattgcagggcgtgtttaagccatttggagctgcct

SEQ ID NO: 10659 - DNA, 951 bp, Oryza sativa
  Intron number 1 from transcript LOC_Os03g56540.3 (locus LO C_Os03g56540) derived from phytozome v7.0 (chr-ID Chr3; po s 32201976 to 32202926)
cgcggatacagttgtccccggtcggtgtcgatgtacgcctcctcctcctcctcctcctcctcctcctcttctctccctcatcatccgaggaatttccagcctcggtgtcccgcacggtctggtccccgggccgggtgttcatcaatgcgaggcacaaagttttccagacctgtcaccagtgtagaatcgagaggcgctgtacaatacgatgatattagttagtagcgtgtgttcgagaatcgagaggaggtgctgtacaatacgatgataaaaacgttgggggattttttttttctgccatggttgtctccgcgcgtccttttgcgatgtggagaggtctctgacttggggagctaggaggaatcgggcattaagtcccgggtggtgtttgtgtggtcaggggaagagcagcagacgccggactgcactgccttgcacctgcggtttatattcttttattggttcatgtgctgaaatctccaattgagttgttcacctttgttgtaatgtcgttgattagtcaggaagtcatgtctagttgctcctttttttggttgaaccaaactgtcctttttatacagaaaagtaaactatgttagtgtggttagtgatcttcaaatgcaaagatgttaaattgttcagatcagatttttagtacgttttgtttgattaaacctgcatcagcagcttatcgttaaagtaaagtttaagaatacgagtctcatgaccggtttcagggtgattgtgggtaacataatgaattccactgtaggggtttggttatattcaatcgtgcttcctaaaaaagtagtcatgtcgcaaattgctcatttagattgttgtgcgactgtaagggatatgatctgagaactgtatcgccttgctcatatagtttgttgttatgtaaggtgttcagtctgagaactgcatcgccttgcatctccagaacaa

SEQ ID NO: 10660 - DNA, 561 bp, Oryza sativa
  Intron number 1 from transcript LOC_Os04g42500.1 (locus LO C_Os04g42500) derived from phytozome v7.0 (chr-ID Chr4; po s 24965276 to 24965836)
aggcagaagtcggatctgcaccgaaagtatgtattccacgcctcattacttctatgaatttaattaattgcattatgttgctgtttatagtgccttgtgttcaggtcacaatgtcaacattttggttttgttgatataaaagcgacactaatatggaaatggataatcccctctctcaaaaagaaagaaagaaacaggtgttggttgaacataaatcatgttgaatcagactcttgattcccatgaagatgcccaatggaatagttgagttttgtataaaactggatatagatggtttgctacctttctacagcgtagtgatttttgttgttgccattgttttcctccctcccttgtctccattgttttctaggatattgattcatatgtaatagtgtaaagttgctaattgatattcagtaatataatggagccttcatgggatgagaatttttttccttaggtaacatcatactgaattactaatgtgcatgtctaatcttctgacattcacttactgtggcagaaagaagatctggcttatcagcaccagttcattct

SEQ ID NO: 10661 - DNA, 698 bp, Oryza sativa
  Intron number 2 from transcript LOC_Os04g56480.1 (locus LO C_Os04g56480) derived from phytozome v7.0 (chr-ID Chr4; po s 33480340 to 33481037)
gttccgggggataccctccagtccgtcactgtgaggtgagttcctccgttttatgtagtgattgtgtagtgttggttcagttagtaaccagagtaatttatttcggtttagcaattttgagctgttaatttcgaactatcctcgatgtcctagtcctaccctggtagaggaattagggcacttagatttaggccgagtttagttccaaactttttcttcaaacttccaacttttccgtcacatcgttccaatttcaaccaaacttccaattttggcgtaaacttagggaaggcatggttcactacgtgataaatagtttttggctcttggactgggacttaagaattgggattgcgggaagaaaaggaagtgctggaattagtgttactgtttcgtttactttaaacatccattttattaaaaaaactaaacctaacaatttctcaatgccattatgcttttatgtgattatagaaaaattagatatgtaaaattacttgaaaggctttgatcatactcatacttcaaccttggtggtaatgtagtttgtgttacttgaagattctgtcccctttattcttgtgaacttctatgtttctccatcaaaatatatctagatccttcagtgcacagtgagaactcataatccccttaaacatatttttatcctgttgattcccaggaaagttctgagagag

SEQ ID NO: 10662 - DNA, 827 bp, Oryza sativa
  Intron number 1 from transcript LOC_Os05g02670.1 (locus LO C_Os05g02670) derived from phytozome v7.0 (chr-ID Chr5; po s 940540 to 941366)
tttggatcgcactgactcgctgaccatcactgtgagtgagtgccctgttctttctttttttgaacgaattttttttttgaacgaagtgccctgttctttcgatttgcgcttgttcttgcgtttcttgctctgctggtgctgggtggaggcgattcggtgttgtctcggatcttctttttattttatttctgcaactcttgagttctgatgctttctgaagttcgtttttttttttggttgttgttcttcttcgtcagttcagttcatggttcctgcgagaggtttttgcggaacaagatctcgttttgaacttttgatagcttattaatcgatgagtggttgcagaaggtaatccttgaatacgattgctgccgtgatattgtttctccgatcttgttttgattggttgaataatttcttgctttaccccgtttatgtgattgcttgcttaccatttcaatgacatagcgatgaaagaaataaataaataaaagatctcgttttgatttgtgaaaacagccgctaatcctaatcttaattcgttctgaatgaagatcccatccacgatacctcaagatttgcatctgcttctcccttgtacttgccctcttgtctctttctgcatttgctccgccggcattttggctcttcttgctactctgatctggccaaatttgacacctgctgtcacattcagttataaagctagtagtagtggttgggatttttttttccagttcaattcttggagcaatttgaatctgcatttgaagaatcggtgctcctttgcagaattgggagctgtgggcagaaagactaggccttgt

SEQ ID NO: 10663 - DNA, 746 bp, Oryza sativa
  Intron number 2 from transcript LOC_Os11g03670.1 (locus LO C_Os11g03670) derived from phytozome v7.0 (chr-ID Chr11; p os 1430437 to 1431182 reverse strand)
ccgtcctaaccctgaccggagacctcatctgccaggtgacttgcagttgttttctacttcccgcattttcacatccatccattgcaaccctagtggattacttagtactacttaattggttgacgaacaatgaaccagtagtctccctctcttcttgtagagggcttcctgtcactctgcaatagcacattgccaggcgtgcttagatgggtattagcatcaaatggtcaaatcataccaattttccttcaaaacaacattgaaatgttatccattgctaataccacttggaaatcaatttaccgagttatggttcttttctgccttagctgcactcttttagtttccttgttttctaaatatgacatgatgtgaaattcttaactggctaggctattatggtcttatcaaatttcaggtccatatctttttatccaatcttgcgtcaaccataatctgaatatattgtctttactcaactgtgtcagtctttagcctatgctaatccgtaactcatatgattcctcaacggattttactccagcaacagtgtcctattccattattaaaaaacaatgtatattcctactgggttgcatccatggattgggcaaaatatttgatatttcatctgttcttgttattgtggtatcttgttacggtttcttacaagatatttactgttaccattgttgtttgctactgctccagcttgcaattgataaagtgccaaagctagatttgaa

SEQ ID NO: 10664 - DNA, 835 bp, Oryza sativa
  Intron number 4 from transcript LOC_Os12g03470.4 (locus LO C_Os12g03470) derived from phytozome v7.0 (chr-ID Chr12; p os 1359753 to 1360587)
ggctgaacttgttagtaacagaggtacttcaattattctttaatgcaagatatgcacttattttgttccatcgtccagataaaacataatttgcttctggatgaacatgaataacttattctgcaatccgatggaacacaaacacatggctttaaaaaaatccttttgttatttttttttgctgggccggcaaaaaccggcagagttgtatattaagaagaaaagaaagttttacaagtacaccctaagccaggggtggcttaggctacagtgaatcgtctcagcgatttagcctacagacaaacttaggctacagtgaatcgtctcagcgatttagccagcatcgatcgcgctcaacaggccggcggccttccatgtttcccactcatcagcgatggtagcacagaggtgtaccgccgatgtggtttttccatcaaacgcgtgcatttcgttccttccaaactaaccacgttaccaggataaccccggcgtcgaaggtcttccgatccgtcttatgaaccgatttgtgcgcctcgcaccaccagcacagtaggaaatccttttgttattgtctttactcgaaaattctccctactatcttattaactaaattatgtttttcccatgaacttaaaaaaagagtttaattttttttagcataactgtaattctgtaaacttggaacacaaaactttgattaggagcataaactggatgggatgcaaaataatatgccctttcatggaagctatattgacatgtagggcttagtataaccagcttatgagttttatgcacaggttttgaagctggaggccctcataccccatcaaac

SEQ ID NO: 10665 - DNA, 549 bp, Oryza sativa
  Intron number 1 from transcript LOC_Os11g37944.1 (locus LO C_Os11g37944) derived from phytozome v7.0 (chr-ID Chr11; p os 22034421 to 22034969 reverse strand)
ttgactggttcagctgcaggtgtgcatcgagaagctctggagagacaacgagttttgttatcttatcggctgtagttaaaatacaatctaaaaaatcatttttgtttttttatcgtaattatttttcagcattgatttttaagcatagcatggatataaaaattctactaataaatcataaattatttattcttgttgatttgttgattttttttccactgcttgaacggcagtatgttgttgcatcatgcaaataatgggaaattttgattgtgatatatactctctctggtcaaatttattcgagttgtttttctatattgaatcgtaacaatattgatcgagtagtatatgttggagtacttaggaagtaaaatggaaaagatgaatccttatacgcagatgcggttgaatgtcagtgttgtaatatttcgtacagacgtacaggtgtccgttccatacggatcacaaactcatttcttttccgaaattttaccagtgcaatatttgtatttaatatttctatcagaaaaacctctgtttctctca

SEQ ID NO: 10666 - DNA, 919 bp, Oryza sativa
  Intron number 1 from transcript LOC_Os12g38920.1 (locus LO C_Os12g38920) derived from phytozome v7.0 (chr-ID Chr12; p os 23898069 to 23898987)
cttgggacattcttgggttggggtttgattcccaggtaatggaactcttcttggtttctcttggattccgtgcagtatttctgctgtttttagtatataaatctgtggcaaattacgctgcgcctgtgttggctttggttgtggttgcttcatttggtttcagtttgttcgagccttcgaggatttgattctgtttaggtgcagttttggaggaagttgggttagcgtgttccatcagccagtttgagaagtttttgttaattcgatgttcagattctgctgggtttattttgggttttgctgaactttattctatgtcagagaaactttgatcttcagctttctcgaatttgagcagaaatggcgtgctcaggtcgatcgtttgcatgttgaaaaggattcctttcttcaagtttcagggtcctctttgcagtttgggatgattttgccaactgcagaatttcaccctgctcaactgataaactttcccctttcttcaatgaaatatcctttctttctttctttcttttttttttttgcattttgttgtttagtgctagttcatggatgatttcctcaaatgttaaaagaattatatttctctggatactgcatttggagatgcctaagttgctccaataattgagatagtaacatagttgtttacttgcatggaaacaaagtttaaactgttcgtttgtaattgatttgacctgttaaacatgtaaatataggacatatagaagatgatgatagggcaggtgtcactttcatccatgttgataaaattaaaacttaaggccttctccttagtccttaccaactagtagttgccttatttaattagcacaataaatctgagacatttctggttgtcttttgggttgggtggacaacaccatttgcaggggaagaaagc

SEQ ID NO: 10667 - DNA, 483 bp, Oryza sativa
  Intron number 3 from transcript LOC_Os12g38920.1 (locus LO C_Os12g38920) derived from phytozome v7.0 (chr-ID Chr12; p os 23899296 to 23899778)
cttgactaatcctttgctagctaaagctatccaaggtgaatattatacctattttctgcgaacaattttctactgtaactaaaaaaaatggacaacagtagggaatttccatactaaattgcaaataggattaaagttacaaagtcaaagactcaaagaattcttgtcaaagatttatctgttcctttgcaactacatatgccagcaactgtgatcaatttcattctaccgtgtggaggtttacttgttacactgactaatataagatattagagggtaaatcccgttttaagaaacatattgacatttgtggttcattctgtacctttatttattaagcttggaatttgtttagagctactttccacaaaatgtatttgccttcttatggttttctacactttcccatgattcatggactttttttcccatttatttgtttttgtagcctttagccctctacgtatcagacttggaggttcc

SEQ ID NO: 10668 - DNA, 861 bp, Oryza sativa
  Intron number 1 from transcript LOC_Os09g38060.1 (locus LO C_Os09g38060) derived from phytozome v7.0 (chr-ID Chr9; po s 21930799 to 21931659)
caacctcgccctatccgaggacgccggcgaccgaggtacgcaacgtagatagcagtcgtgtatgccgtgacaccacaagcaaatcctgttcctgtagtggtgtagtgtagtgtaggcacaattaagtactaacatttgttttttggtattcatttctggtctgtaagatcactttgttaaggctctctttgtttaggcttataagccaacttataagctgaaaagtctaagcctaaacaaacaagcggcttattcatttgacttttctaaagttataagccactctaacattattaaaccaaaaactaggttggagaagttttttttgacctatttgagatagatgtatgactccaccactaaatttagcacattaaatccaccagcttataaaccataaaagccaataagctgacttaaaagtctaaactaataagcctaagcttaaacaaagagggcctaagtttcgcggtggtctgtaaattgcaatcccatatatgcaatcaatttgtttggggtacatttatatctgttgttttttctcttcagttctttaacagttactagcatagtcatgaacgtagacactgcggttgtattagcaaaataagtttatcatcattggagattcctacaaatatgattaactctattggagctaaaggaacatattcaggtgggctgctctgctttagccctctgtagtctcctaaatagtactagtaacaatctagtatggtaatgctacttaagttcttctatctttgacattgaactattgctgtgctttgaacttatttgcagttctcatctttcagtatgagtctgacactcttggcatcatatttacaccttcagggg

SEQ ID NO: 10669 - DNA, 766 bp, Oryza sativa
  Intron number 1 from transcript LOC_Os11g43340.1 (locus LO C_Os11g43340) derived from phytozome v7.0 (chr-ID Chr11; p os 25688450 to 25689215)
gcgcagggctggtgggaggtgggcgacgaccgaaggtagagaagaagatgaggagaggggctgacgggtggggtcctttccacgctggcacgccacgtaggcaaaagtggcaaatagttaagaaattacctctctcaagtggcaaattattaagtacaaatctaagaggggcatttggataattggcagatctaaaagtggcaaatagttaatttccccgccaccgggacactatagtccttggagaaattggcccacaaacagttggacggtctaagtttaaagcccaagtacgtcacttgtatggcctaaatagtttgcaattatatatccttgcgatattttagtttattataataaaaaaattaatttcttaagagacattttgatcacaatatgaagagattttatttgggggcatctaggaatcgggcgcccgattcccaggtgcagtagactcgaatcctcctcctcccatgcgccaatcaaaaatcaactaagtaaagccactgctatgcccagccggaacaagatatttctacgtcagagggacgtccgtgccggatcgtcgtccgtttcacatccgacggtagcatcattttcagaccgtgctcctccatcgaccatcgtctccgtccagttgcagaccaagggaaaaaacgaggttccgctcgtccgcccgccatggccacgatgtcggcgaggcgcttctccgtggatgccatgaccaggcagcagaggttgacggagctgagtacgacgagca

SEQ ID NO: 10670 - DNA, 668 bp, Oryza sativa
  Intron number 2 from transcript LOC_Os12g39370.3 (locus LO C_Os12g39370) derived from phytozome v7.0 (chr-ID Chr12; p os 24182226 to 24182893)
cgctgtgggaagcttgctatctgcagagcacaaaggtctttaacttctaatctatgatgtttgtattcttcaggcaaagtattttttgagtctggatgtagagctaagctactcctagttttatagtctctagatagatatagcatttcatggtagagactagagaatgaatgacaggagtgccctcttaacataataataatagtattattacctaagtggatttgcagtatagttgaattggagtcataaactcaagtgattctatatccccatgtcctatttctaatcacagttgagtcgaacaccgccacaatggaacagaattactgtgatctttatcgaagatggatatggccattggtttgatgcatcatattcttcagtagaaaatgattgctgcaactctaccattgcaagtaggctgattggttactttgtaacttttagatagtggagtctggggagctgcttcattaaatggcatattctccttcatgcacttctttggataggtcttgttacatttggacaatcttgtaatcaaatattcttctataatatgttttcagctgcatgattatagtatttgtcagaatgtcctgtgacagttgatgtgatttgcttgtacagtgaagattctaaaggtgggggaggattcttgactg

SEQ ID NO: 10671 - DNA, 875 bp, Oryza sativa
  Intron number 1 from transcript LOC_Os12g08740.2 (locus LO C_Os12g08740) derived from phytozome v7.0 (chr-ID Chr12; p os 4469021 to 4469895)
cctcctccacgtactacgacgtctacggacccgacgtatgttctctctcccaatctttctgttcttcttttaatcgtttccccttttgatttcgggatttcggggtcttaagagtgataaaaacaggggggaggaattggcaatcgattatttgttggtaaatgttgcggttttattattttcgggtggtttttgctggtgggaacatatcgcattttgtgatttccgtggcgtcggaagtgggaagcaactgtgctcttctatgttgttaacgcgttattatgattagatttttttttcttgtaaagctaaattcttgctaggattaaaacggagggcatccctgtttgtgtaatgatggtctctgcgattcttattgttaatggcaaaatctgagtgttactactgatagcgctgcgcttttgctggatactttgttcagaggggtgaagcgcggatatactactgtaacatacaaagatcctagttttgaagaacacactctcatggaagcatacatgcagttcattccttgattcattttattttaacagaggaagcattcgctactaaacaagtgacccgtcctgatttttgcactccaaattcctaatgtgaatatccctgctaaagataagacagaccagatcaatagaataatatactgctgctgtccttgttcatatcatcatttgtgcaaaatcaaaatactcccaaagtatcggtggactattaagtgaagcagcaaccaatttatctagatagatagttggctatttgttctgctgaatttactgatctatatttcctccttggctctaatgaaccaaaattctcataccaccgattctttcatcatgtccaggctaaacctg

SEQ ID NO: 10672 - DNA, 749 bp, Oryza sativa
  Intron number 3 from transcript LOC_Os12g08740.2 (locus LO C_Os12g08740) derived from phytozome v7.0 (chr-ID Chr12; p os 4470069 to 4470817)
ctgccttcttgggtgtttgttaaagtacatattctcttccctatttcctcctaagtttcaatgtttagcacgtggtttacttttccttatctttgtccttctcaatgaaaattgttagtcttttttggggtccatatcttactgcatacttcctctgattctaaatataagtcattttagacttgtgaacaacaattaagaaaatagtttaaataactttttttgccctttatttattcatattggaaatatgattcattcatttgtgtgagaatttagttgccaaggataaaaagaaagaaaatatgaaaaagtgcccagaaattccaatatgatttatatgtatgaaagagttaaaaggctagagtattgccgaatatgttgttcttaaccactcagtttgatgttagaacatgcatagtatacctgacagcaagtgctttttcctgcaactgaaagaaaggtctgtactttgtttctaattttatggggtgtggcaattaactctgtctgctctacaacctggactacccaccatgaattttaaaacttgtaaaatactttatgtatttcatatctagagagatgttgattcacagtgagcactgatttttgtttgacgcatgtttgtcttatgttccaattttagattatttaattaatgcttcaagaaagatccccttatcactaaatttgttattcttttctgcgcagaacaagcctcttataccaaaagtcgtccttctata

SEQ ID NO: 10673 - DNA, 968 bp, Oryza sativa
  Intron number 3 from transcript LOC_Os08g42290.1 (locus LO C_Os08g42290) derived from phytozome v7.0 (chr-ID Chr8; po s 26695051 to 26696018)
ctaggatcagaaactactctagaagggatatcaaggtattcattcatgttttatttgttctctatagcactacacatatctttgggaatatcgacatgttggctgtagtataatcttcagtctgtgacccagctataatctgttgagcatccatacttaaaaagcactccagttagtatatgacaaggcaaaaaccaccaaatctctgatccaatataaaactgttataggtgaatctgatctctagatcctacactgtatttcatgacactaatatgaccaattcagtgaattgttttttttgttaaaagactactggatgctaattttgtttacatgatgctgctagtttgctttggtggatggtgtgttcatactttcaacctctgtacatgaatgaatcaggcataatctactgtaatactattcaatgagcgcaaaaatttgatgcactaactacttagctacacgtatcttaagttagttcctagtcaataattgatcttcttctactagtataattctttagtatgcaccatgctttcccacatgataaatactctgtgggagagcattgcatattttgtagctctgttttcatttggtagcagttgttcttgaaaatctcaatactcctttaaagatatgcttttctgtgcgtgcgaaaagaacagttatatgaatgtttacaacgtaaattttagtcaccttccttcattttgatgaacctcagtttattatgtagattcctggatttttgctaccttttccattagcaatcttataccttgtttaattgtcctgttacccagtggagcagagcaagcatttacctacattgagttttcttttttttttttgtgttacttgtgtaatataatatttttccccatgatcaaacgatgttcattcatgaatttcttctttgtccagtgtatcaaaagctaagacaagtgagtattcagaaa

SEQ ID NO: 10674 - DNA, 967 bp, Oryza sativa
  Intron number 3 from transcript LOC_Os08g42210.1 (locus LO C_Os08g42210) derived from phytozome v7.0 (chr-ID Chr8; po s 26656735 to 26657701)
ctaggatcagaaactactctagaagggatatcaaggtattcattcatgttttatttgttctctatagcactacacatatctttgggaatatcgacatgttggctgtagtataatcttcagtctgtgacccagctataatctgttgagcatccatacttaaaaagcactccagttagtatatgacaaggcaaaaaccaccaaatctctgatccaatataaaactgttataggtgaatctgatctctagatcctacactgtatttcatgacactaatatgaccaattcagtgaattgttttttttgttaaaagactactggatgctaattttgtttacatgatgctgctagtttgctttggtggatggtgtgttcatactttcaacctctgtacatgaatgaatcaggcataatctactgtaatactattcaatgagcgcaaaaatttgatgcactaactacttagctacacgtatcttaagttagttcctagtcaataattgatcttcttctactagtataattctttagtatgcaccatgctttcccacatgataaatactctgtgggagagcattgcatattttgtagctctgttttcatttggtagcagttgttcttgaaaatctcaatactcctttaaagatatgcttttctgtgcgtgagaaaagaacagttatatgaatgtttacaacgtaaattttagtcaccttccttcattttgatgaacctcagtttattatgtagattcctggatttttgctaccttttccattagcaatcttataccttgtttaattgtcctgttacccagtggagcagagcaagcatttacctacattgagttttctttttttttttgtgttacttgtgtaatataatatttttccccatgatcaaacgatgttcattcatgaatttcttctttgtccagtgtatcaaaagctaagacaagtgagtattcagaaa

SEQ ID NO: 10675 - DNA, 749 bp, Oryza sativa
  Intron number 1 from transcript LOC_Os09g30150.2 (locus LO C_Os09g30150) derived from phytozome v7.0 (chr-ID Chr9; po s 18339198 to 18339946)
tggaggtgaggaaacaccacatgtgtctgtgtgtgtgtgctcatacgactcctgcttcttcttcttctcctttttgtgggggaggaggggtgtcatggtgtgctgcttcttgtgagcttgcagctgtgctgtgctgttccaggttgcatgctgcaatgtatagtaggagtaggaggaggagcagcagtgtgtgtgctgtgctgtgctgtgctgtggctgcctcctcctttagccgaggagaggggattatcttaaagattccagcttttgttattaatctcctcttcttctggcccactgctccccccctcccctccccaccaccccctatttctgtgggaaatgccgggggcctcgtgatttcatcttcttcttcctcctagcaagcactctcttgttcttgttcttcttcccctttttggagagtggcgatgtggcggggctggatctgtcgaatccgtaggtgtttctttgatcctgaatcgcggaaagttttttttttccctttctgtttttttttgggttctctctttgttcgaaaggttcaggtgggtttctgctcgatttgaccggctggttcatcggtgccgctttgtttttatctcttctttttttttggttggattcttgatcccctcgagttgtttgtttgtgtgaatgaaatcggagtgactgtggaacaaaccctagttgttatgttggtaacatggtaatgctaatggggaaatttttctctccttttttttcag

SEQ ID NO: 10676 - DNA, 496 bp, Oryza sativa
  Intron number 2 from transcript LOC_Os09g15480.1 (locus LO C_Os09g15480) derived from phytozome v7.0 (chr-ID Chr9; po s 9476907 to 9477402 reverse strand)
gcacaaggggagatctccccctcaggttcctgcaggtaatagcaaaaacacatcagtcaaaaagcttcttccagatcattcaagttcatctgtcattttagcttagtgtttgtttgagtcgaaaaacagtcaatacattgaagataaggacagagaaaagaagggtgtattatattcccattttgcacaacccaatttggtctgaaattctccctttgttttcatgtcgcaatcactctttagaagctagtatataaggttgacatctaacaagtgtctattccctttttggatttgttgtacagcttacgtaagacaaggctttaatgtttatatagaaaaaaaaatctatagtagtcccttctgttacaactgctgtaaaccacagattcagttattaataaacaatacctttgacttagcattgtgcaatagtaacccacagaatatgacctgtgcagagcaacaagagcccacttgaagttgcaactgaggt

SEQ ID NO: 10677 - DNA, 960 bp, Oryza sativa
  Intron number 2 from transcript LOC_Os08g41950.1 (locus LO C_Os08g41950) derived from phytozome v7.0 (chr-ID Chr8; po s 26505427 to 26506386)
cgcggcaagctctacgagttctgcagcacccagaggttcatttcatttcctagctactctaatccatccatcaaacccacatcacatcacacttcaatttcgcaagcttaattagccaccctttcgattggatctgtcctgtccagatctgttcatgcatcatcaaaagctagctgcatctgccttttgcccggaattccagctgcatgctatgccggcttgatttctgcatacgatcttttgacaagaaacgagctgtggcgtgttcaaccgcacgctacctagctagctagattgctcttgcttccgtgggttttcacgccgggatagatctgggcaatatcctgggtttagggttttgcttcctggtccgtgtggtagatcggtgcacatctttagtttgccagttggtttccttctccgatctgtccgtcttacgtgcgatttcttcatgtgtggtctcggaactcgcaaaggaactgaaaagtttgcttatttacgaccttttcttctggatctgcaaggttctttgtttcccttagctaaatccttaaaagaagtagtccaatatatacttccatgcataatattgcaaaataaatgatggtttgttgataaccaaagtaaagagacataaaaactaactagagactttttttttcaaaaaaaaaaaagaagaatcttgtctactgtgttatatatcagtagtatatatacagagatcaacggcttcagtctactaatcaaacaatataatctcatagggggacttgcaagaaccatatgttccatttctgaatgtattttaagctagaatgcatgacaacgaaaaaagggcattgtggtagtaaatgtgccatgcccctattgtagatcttaatcatcgttaatctctccttcttgtgatcccatgcatgcactaattttaattaattcctcatgtcttttgaactttgtagc

SEQ ID NO: 10678 - DNA, 585 bp, Oryza sativa
  Intron number 1 from transcript LOC_Os09g27160.1 (locus LO C_Os09g27160) derived from phytozome v7.0 (chr-ID Chr9; po s 16515160 to 16515744)
cccattccataagtttaagggtgtgtttagttcaggtaaaaattgaaagtttgattgaaattgaaacgatatgatggaaaagttagaagtttgtgtgtgtagaaaaattttgatgtgatgaaaaagctagaagtttgaagaaaaagttagaaactaaatcaggccttaactggttttggaagttctcttgagaccctgacagtctgacagaatccaggtacagagttctagtcaagctcgtccgtcaattgcatctttcaccaagaaaacgacgcgatctcacaacttctctcaagtgataatagcaagccactcactgccaataattcgcggcaggttggtgacgaacgagtgagatccacgggacggaagtgcacatgccaacgcatgcagctgcagctgccaccaccgctccactcccccctgcagcttgtgtttatataatcctccacctccgcgcacgtcttgatctcctcggcgtatatagaatttcttgcctgatccctttgtcgcgcgcgccatttggtgatattttgctgagatttgggtggtttttgttactttgtttggtatggagcggcggca

SEQ ID NO: 10679 - DNA, 592 bp, Oryza sativa
  Intron number 2 from transcript LOC_Os09g13000.1 (locus LO C_Os09g13000) derived from phytozome v7.0 (chr-ID Chr9; po s 7506493 to 7507084)
ttttatactcactcttgtgttttatttggttttaggtacgtattgagaccgacatgcacgggcgggaagtagtacccttatatacacattacttgcacactatcaaactatatttcttaggtccataatgacacttaaattatattctggtttggtcttgtaataatcttttagatttctaatagtttcttccccatggattataaggatagatcgtattgtgggaatgatatttttattagtttaacttataattgcctgtcgtggatgtccgtatttacatgggagactctgccgaaatttctaataattctggaatttagtggtttgagtgtttttttgtgtggcactctaggtacgtggttacctggggtgttacacatattccatatataaacttaattaaaaggaacatgatggaaggaatggaaattgcaaggaaaaatatattctgatagaagaaaatatgtagtactaaggttgacacgttcggcccagcactgttcaaaccgccaggcgaagaggcgctgggtggccaaatctactccttcctaatctccgatttatgtttccttctctctcagcgaagctc

SEQ ID NO: 10680 - DNA, 748 bp, Oryza sativa
  Intron number 1 from transcript LOC_Os11g40370.1 (locus LO C_Os11g40370) derived from phytozome v7.0 (chr-ID Chr11; p os 23602782 to 23603529 reverse strand)
tttattgcgactcgtcagcagtaaaaggtacaaactcctccatgatcactgactcaagcttatgctattattcttactactactactactcagtttattataacgaaaatgaaactacaatcagtagtacaatttagcaagttgagaatttaatataatcatcagtatattattagcaagttgatagggggatgccatttctgacgcgtgatactagattggtaggactatgtaatgtctatcaataccattctactcgtctttttttagacaatgactattctaccagataaccactccaacatccaaatcatctcacgcgtttagccccagtattataaccaaagacacagatcaagttgacggaaagcaatgcacaggagactcctgacgtgtatgccttccatcacccactacaaaaactaatttaaaagtgaaacagcatgctgcattgatcaacttcaacctgaagaatgtgccgtataccactgcagaaacacgaacaaaaagacctcgtacctcccatcagtcaagctgctttggcagcgcctgttgtttatcacggacaaccttctggttctggcttctgcccatggcatatatataaccagcgaccggcaacaccagcattgctcgctcataaccagttacttttcatctcatacctgcagtcatttgattgacctgctatccagttactcaatctaaaatctgcagagatcaagcgtttgcaacctgtttaccagcc

SEQ ID NO: 10681 - DNA, 901 bp, Oryza sativa
  Intron number 1 from transcript LOC_Os09g09370.1 (locus LO C_Os09g09370) derived from phytozome v7.0 (chr-ID Chr9; po s 5027381 to 5028281 reverse strand)
agagcttccttatcaaggtgatttctctctctctctctccctcttgaggctctgattactgactctgatcatcatttgcatggatccatgcatgatgatttcttcagaaattcattaaactgtataagcatatatgctgagcatcaagctttatattgcagttcattctttcgatgccttgtgtcacaagggaatttctcagttcttccatcctaatttctagtgaatcatatatgttttttttaaaaaaaaattgttgtggtttgttttatttttattggagcctttattgtgcatgggcacaatccaaggcacatgctgctttcttttggtcattttgagatatataaaaaaaatgatcaaggggatttgtacttcacacccatactgcaaaaagtgcaatcatgtttacttatatcactcacatctagtaactacctcctttcttgtgtttgtgtttttttgcatatatttcctttttcattcatggaaaacgtttttctctttgtacttctttgctcatcaacaattagctataaatacattgaataccagttgtactaattttgcaaggcaccagctgcaaacattaaatccctgtgttgcatggtccttttccatcatgcaattctcttccagggcaccaacccccactcttcattgaatctggcacatgctgtgcatttcatgctagctgcacttgatgcttcagtccacatcccacttagctagtgagtttcattcagaattatgggaaaccgaataagcgcgtcgcagtctgaaaactcgcaactactattcacatatggatttttgttttaaaagaaacagagccagagaagaattttgtccatcaatatcatcaattatatatcaaactcaatatatataggtgctgatc

SEQ ID NO: 10682 - DNA, 773 bp, Oryza sativa
  Intron number 2 from transcript LOC_Os09g30412.1 (locus LO C_Os09g30412) derived from phytozome v7.0 (chr-ID Chr9; po s 18515475 to 18516247 reverse strand)
atcaggtataagattcagcacatttctcttgtgaattcctattacttgtgtgatatatgttgctgtccatgtgatgttttttttgtcagaactttagatgttctgtacatatgacaattggatgagttcgggcctgtatggttgagttggcatgctaccagtgtacatgatctttcttgactgttagcatgttctgaagaaatattcttgctactttaataagaggttgtcttgatgacatggtgctcattttgtagtacaataaatgaactgtatagattaggggtgtacagcagtttttggaatagtggtatcttgttctcttggttacatttactgaaaatcaacattgctgataaaccgtaattctgaactagtgatatgggtttctttggtagtaatcacttaattaaacaatagtattagttgtaacaatatatatttggtgtagtatacatcttactgttttccgttaacatgaaatgaattttgagatttactgctttcagcttgtctttctgttcttttgtgctgtagttgtgacttccttgtatgctacattgttatgatctgtgactcttttgttgtattctgcaaatcagtttatatattgtttgttccaatgttcttatcagaatgcataatggcataacaccttgttccaataattagctgtatcgttttttttgttcttattgtttgttgtttataataaactgttgcaatttttacttgcagctggaataccttgaggaacgtcgcctcaaggatct

SEQ ID NO: 10683 - DNA, 592 bp, Oryza sativa
  Intron number 3 from transcript LOC_Os10g34180.2 (locus LO C_Os10g34180) derived from phytozome v7.0 (chr-ID Chr10; p os 18170376 to 18170967 reverse strand)
gctgtgcgcaccggggggaagggtagcgtgcgcaggtgtgtattattattatatttgcaaccagcatacggcatattgatggttacatgtggctgcccattgtgtttgattcatttttctttatgttgggctagtggtgtatatgtttaatgcttttgttgtgcattttgatgcatgtgtagtgatatgcatggtagcactatattctttttgtattacgataagacgaacattaataaatatatatccaattctatatgcttgctatttccttccataaattcatttgctcgctataatttcactctatattaaatatgaggggacttgaggctatttaacttggtaattatctatgggttaaagataagaaacactgttagataacatatgaccactactaatggtttaccgataataatcttgcgggataattgtcatctaagcatgcattgtcagaaaggatgtatattactcactactcactagtcatgatgtttcatactagtgctgttaggattctaattatgatatgataagttttgtgttggtgacagaaagaagaaggcagtccataagactacaaccacag

SEQ ID NO: 10684 - DNA, 623 bp, Oryza sativa
  Intron number 1 from transcript LOC_Os09g16000.1 (locus LO C_Os09g16000) derived from phytozome v7.0 (chr-ID Chr9; po s 9776752 to 9777374)
aggatctgctcgacgacctcgacgagcacgccggcgtcaggcgccgacccaaattttgttcatcatttggtactgcgatatgatattgtcgattggccgccccacgtggaaggttagttggatttaagaatttgctagaaaaccttcgcacgtttttttaccccctaaaacttttagatttgtgactattagatcgtctcaagattttttcatgaagagaaaaaagttgctagaaaaaaaaaatttacaagtgtcatgcttaagatcccagtgctaagttttaataagtttattgtagttgcagttacagtaattctacttcaatcatgttatagttacatctgaaaatttttgaccaaaaaacttgtgacgttttttaagcccctttctcccctccacttcacatgacaaaaaaaattggcgtactttttagcatttcactatcaaattacatattgggaactcaaagtatttcaactgataggagcaatttttgcaggagacattattctggttatcaagtccactactcttgcattcaactgtagcccatagattgaatatagtcagtacaaaattgaattttgtggctggaagtttttccttgtttttgaagcgaaata

SEQ ID NO: 10685 - DNA, 980 bp, Oryza sativa
  Intron number 2 from transcript LOC_Os11g28500.1 (locus LO C_Os11g28500) derived from phytozome v7.0 (chr-ID Chr11; p os 15946131 to 15947110 reverse strand)
caggtactaccaacatattataatgtggcacacatggttatgtacatatacatctatccatggttgagttcattattctggtgaacgcagcacatagatgaattgcgggcgatagtgaggaagcagttgcagggagttaagttatcaccatcttcatacgacacagcatgggtggccatggtgccagtgcacggttctcctcagtctccatgcttcccacagtgtgttgagtggatacttcaaaaccaacaggaggacggatcttggggccagccaggggcagtgaactaagatgctctcttgtctacgttggcatgtgttcttgcactcaacacatggaatgttggtccagatcacatcaggagaggtataataatatatactatctatctcttcacgtttgagtttgagccagaatatacttaacggcgccatggattcaactggcagggcttaattttattggaagaaatttcttggttgccatggatggggaaagtgtcgctcctgtggattataacattactttttctagtatgcttagccttgccactcgaatgagcttggaaatccctgttatcaaaacaaatatcggtggtattttttaccttcgggaggtcgaattggaaatgttagtgcatggaaaagctcgaggacaaaaatctgcattatattacttttcttttctattaatgctacaactaagttattgcatgtgtattccttttttacttagcattttgaacaccgacattaattgtctccaatgcatgggtcatcattacttttttcatctgtttataaattgtataactgtatgaaagatttaatatgttatatggaaaatctattaatataattttatatgattttatatggaaagattttatatgttatatgattagatttgctctaagattcgtgctagcaagtatgagtaaaaaataaattggcaagtgcagctgctgcgatttgacctc

SEQ ID NO: 10686 - DNA, 907 bp, Oryza sativa
  Intron number 3 from transcript LOC_Os12g26060.1 (locus LO C_Os12g26060) derived from phytozome v7.0 (chr-ID Chr12; p os 15132660 to 15133566)
acttaaggaggaactttccattgctcacaacgaaggtattttatactgtattctttttgaactgtatacactactaagcacactgctctttaaagtcttaatacattgatatgcatagcttttgcatattcctggaaaaaaaggcactaccgagtataaacaaagctatggtcagtgcatggtcctagaactgaaagaaaaccttatttctgataattcgtttttggtaaagtttttctttcagggaagaaagtaaagggaactgtcatataataaacaaatacacctttatctggtgttaaaaatttaagctgcttctagcctgttgaagaatgacttagatgaatatcagtgatacctgcaaaaaggatgtcaatcatgttctgctgagggatttgcactgcatttttatttttatttaatttgtaccttcttttatggttaatttcttggttaaatgggcctcatttgtattttgtactctgcaagatggatttgcaatttactgactgcatcaattattcttaattctgttgaaatgagcatttcactattgcatagcttggtccttaataaggttaaattaagatatttttaccacaaatgccctaaaatattatgagactgatttatgtgacaaactatgtgaatttcctttttgatagttttcaagaattgtaaaatttggcaaagtcatcttatttatcttaatcaggacttgcctgtttgtctgaactttgaactatggatgaaaaatcttgggacattgtaccccttgtgtatttactaatcctcaaacagcataacatttatttttatttattatcctggactacttttgaaaagtgaaatgttctctttgcctttaccagagggtattttggcgtggtgttcttgaagagctatt

SEQ ID NO: 10687 - DNA, 955 bp, Oryza sativa
  Intron number 1 from transcript LOC_Os11g37890.1 (locus LO C_Os11g37890) derived from phytozome v7.0 (chr-ID Chr11; p os 21997559 to 21998513 reverse strand)
tcgctcccacgcctcttccttccgacttgtgacaggtaatgccccgatcccccgcggaaaaagaagttctttttattggttattattaattaatcccgtgtgttcatggtcctagaagttgattgaacggattggtaatggttctttcttgtttattaatccgccggatttctgctgttcttggcttgttcgattttggcctggccattttggatcggtggctttaggatttctttttttttggccaaagactccagatttgttttggggaagagaagaggatttgttaagcttggacgcttggttggttggtggggagttaagcaagtagtattagccaagctggagatagctgctgtaaatttctatcttttaatctgtgattttgtggattaaacttgcccaaggatccatttctaccgtctactgcgttccatatcatgttgctccccccaaaagggacctacttgctttggtgttggattggagcaggggatcacatttcttactatcttttcctgaaattgaggagatcgcacatggcattccgtaacttcgtattcgatgaattattgtgtgtgggattgctgccagatgcagtttgtacaatttagtatgagctaagttaagggtttagctttaatagtggcttgtcctttgagggtttcatggcaacacttggttttgactacaaagtttggctgattcatgtgttattgattgaatatacatggtcaaaacatatccttgttgtggtttttcatatcaaattctgtgattttagtagtagtagtctttgactgtgtctagaaacatgtttggcaatcagaacttttgtttggtagccagagcagattggttgtttgctttagaagtttataatctcagcaaggacaatgtatacctcttgaacggtttgtcgtcttaaagcttgatgaatatgtgttactgcaga

SEQ ID NO: 10688 - DNA, 1013 bp, Oryza sativa
  Intron number 1 from transcript LOC_Os11g31800.1 (locus LO C_Os11g31800) derived from phytozome v7.0 (chr-ID Chr11; p os 18199197 to 18200209 reverse strand)
ccaagtctgattcagtactgtaagttgttccctttcctctaagttttgtattttttttcttctacttaggaaaattgaccttccacccgaagttagttgtccaagtggcttttgccccacggtggatatattggacttatgatttactccaaactgtagtgaaaactagtcgttttggcatattttaagcttttaccttccatagatgccaaatttgcccttgtatatttctcttagttctccacatgcacatctattggtggtgtcccacataggcacataatttactgttcattagtaggaatggatgtgttttgctctgaaggtaacctatcatgagcattgggccatccatggtccaactgtccaagattcacacagtcaaaccaacgagactgatcagagcgctgccaaggaggcccgcacgaagggttgtacatgagggacatgttagagaggttttcttacaaataggatatatgttaaattggattgttaggtgtggagaggttttcttagaactggggtatatgttaaattggattgttaggtgtggagtttaattagtaatactaagcaacctatcaaaactaaattattgttttcctcaagtagtatggggcaaatcatcaaaacaatttgcattttgggttggggtggaacctaggttaaaactaaattattggttagttccttgtggtggaacttaccatggaaagaataaatagctggtaggtgacattcttgttgacaatgagacgtccgtggtgggtgtacgtatgtatgctcatatgggtgagtgtgcgcgttgtgaacgtctgcgtttgtattgtgtttcttgaaaaaaaattgctttgggggcaaaaattgggtgacctacttactttggcctggtcaacagaccgcattttccaagtgcaaaagttatttcttctgtcaatttttatatgctctcaaatgttgctttttgtttcttagggcacatatcgtgggtaatttaccagtgggacagg

SEQ ID NO: 10689 - DNA, 965 bp, Oryza sativa
  Intron number 4 from transcript LOC_Os09g02729.2 (locus LO C_Os09g02729) derived from phytozome v7.0 (chr-ID Chr9; po s 1235601 to 1236565 reverse strand)
ctacaacttcactgcttttgtaagttctattcattgcccatactagaactagatatgtgccatttcatatctatttaggaaaagccaaattcaaatataattcgggcgggccttgcttcagtagttcagtacacctattttaaaatctttgtgcatcctaaagcaaaagtagttagtttagagggaaatatggagaaacaatagttagttggatttgctaagatttttctgaatgcccagctcaaattttgcccagccctataaactgcacaattgaaaactggtgagtatatgcttgttgtagaattgaggtgcatcttctacctgttttcttgtcagatagctctgatacctaaacactatcttaatctagtcttgaatgccgatactctgtcagaaagaagacatcacgcattaattagcccctacaaggcctactgcctgatcatcattggtacttcttcaaaccctaccaaagcgtgggtaaatctgtaattgcacacttcttatctaaaagttgaaaggcccttgccatgtaaaatctaaaggcagtggaactatgctggactaacaactaaaaatgttggacaaggataaattcgtctcagtacaaaactatcctttatcattactaaccaaagttgctttaagatcgaatgtttcttaaaatagatttgtgctaaagattaaagaaaggcgcgtgcaatttagataagaagtcctgcactggttgctttgttattccaatcgtctcctgtatttggggacaacattttcaataagatttcctttgaggtaatcaattgtattggataagtttagtaaacatgagttggttattgttttgctttttggaatctattcatcgttatctttgctaacagtctgtttacactctaaaactaatgtttaaatgaaatattatgttagcaaccagcaattgacacattgaaagaggtggaagc

SEQ ID NO: 10690 - DNA, 893 bp, Oryza sativa
  Intron number 1 from transcript LOC_Os11g06290.1 (locus LO C_Os11g06290) derived from phytozome v7.0 (chr-ID Chr11; p os 3015716 to 3016608)
agcttgctgctgcggcggaggccactcgcttcaaggttcgctcctttctctctcatatacaaatttgtgcttgtgtttatttgcgcaagcactaggaggagtgcgatctgttagtgcctaatttaatttcagtccctttcatcagttccatcgttgttgattgctcgtaaaatattctccgttccattcttactaattaaattgaccggacaaaatatggtgttttaggtgactggcataaatttgacctgctaaaattttattgtctgaagattattgtgataattttgactgcatactggagcgtgtaccagctagccccccaagtcaaatcagtctcaagcttcattccactcgtatctggactgctgcccaaaatccattggtgcatctacttttgagttcacatgaaaatccattggtgcatctactttgagttcacatggttcacatggtgattacaagttcatgtctgataatcttatgtgctttctgatgttgactaatcggctttggctctgtagaaagtaatgaaggtagaaacacataaacgtgggaatccttcgtcttactttttgagaagaaaattctggtttaggaagagttacctcatgtagacgtctttctctctgctcatgtaaattcatgtaaatcgctttcaatactagatcagaaaattcatgtaaattgctttcaatacctgcacaaatttcttgtagacgtgtttctctctgcttcgttccttctttatcatctctagaatcctggctcactatgcaaaatcccatcttgaccacttgctcctgagtcctgatagagcttggcttggtatggagattctgatttctgctgtggcaggtgaacttatcagccggttcatctcttcgctacaa

SEQ ID NO: 10691 - DNA, 1002 bp, Oryza sativa
  Intron number 2 from transcript LOC_Os11g45740.1 (locus LO C_Os11g45740) derived from phytozome v7.0 (chr-ID Chr11; p os 27199653 to 27200654 reverse strand)
gggcaaccggtaataatcaattaattaattagctcactcgtcattaattaatcttatagaatctagtattcatgcatagatcagaaatgttctcagctacttcctctgtatttttaatatatgacggcattaattcttattataacctttgatcattcatcttattaaaaaaattatacaaatcttaaaaatataagtaatagttaaagttcattaccgataaatcaagccacacggccacaacaaaagaaaatatatttgcttaaatttttactgataaatcaaacataatgtaaaaagtgaacaacataatatattagaagacggaggcactatcgttctaatctaattggctgacttcagtgaagctttcattaacttatagtagtcattaactaattaaatcccttcttaagacctgctaattaaccaccatgctcaccatccagcaaacctcgaggcgacacgtgtcctacactgtagagaagaatgaagactagcttagcttagcttagattaattagctgggagcttaatttgacgcctcgtgatgcagattagactcgtgtagacgccgctagcaagctaagctaaaagtaaaggaaggacatgtcacggtcgtacagacttgtgacgtggacgtgacgtggacttggccgctctcaacacatgtcaactcgtccctgccatgtacaaacgcacgtacgtgacgtgacacactaattcacacactttcagaattttaatcagccaacaatggccggctaattttattcccctgtgcacaaagaaacgcatgcatcgctgacactgaaagatgtaccaccagtttggaatttgcacgcctcctctcttctcatttctacacttgtatgtttgtgtccacccatccatcttaattccttttttttgctcttagcatatttgcactttggttcacaccttggtaacataattagatgtgtgggtttctcatttggtcaattattattgaaactacag

SEQ ID NO: 10692 - DNA, 908 bp, Oryza sativa
  Intron number 3 from transcript LOC_Os10g29850.1 (locus LO C_Os10g29850) derived from phytozome v7.0 (chr-ID Chr10; p os 15444656 to 15445563 reverse strand)
ctggtaaaatcgctttgtactaacttatttcttttcgccgtagcttagcttgttagtttgtttaaatggttatgtagccatcttaaattatcattttaatacgtcaactacactacttaagggggctcttcacactttttctttcttttttcttaaaacaaaaactattgcacaaccatggcactatcctaacatttgcctaccaatcaactactgtatcaattctcttagatctcacaaaaactctttagatatagagggatatggagttcttgtggtccatatttagcatactagcatatgctacaaaattttcatcgtgaattgcaaatatgaaagtatttttttacctgaagatgttgagttcgatgcttaatccttatacagaatacatcaatcccctctaaaaatattgaactcaccatttctttttgctgttttcatcattatctagcaccgattcaatacttttctatttcctcccaactggaactgatattctctccaccttttactctgtagaggagtttctcagaccatcagtaccaactgccagccggacgagttcacccagcacgattagtgtgagggcctgcgacggcgatcaagatgcgagaagtctgtgaccacgaacgacggcgagatggcactaacaccggcgaccagttggaattggattctaacacttgtcctacgagaagcaggcgtcccgtctggtagtagcttgctagaaatcaaatcttttctcttttcccagcaaccagttggaattggattctaacactggtcctacaagaagcaggcgtgcagtctggtagtagctaggaaatcaaatcttttccgcaagagatcggtctaccaacacaagactggaaaagagatcggtctaccaacacaagaccgcaggc

SEQ ID NO: 10693 - DNA, 484 bp, Oryza sativa
  Intron number 5 from transcript LOC_Os10g26140.1 (locus LO C_Os10g26140) derived from phytozome v7.0 (chr-ID Chr10; p os 13475423 to 13475906)
tcataataataaaaacaaggtactacctctgttattttttacttggtgcttagggcatcgacacagtctccagttgtacatgtttgatccttactttttctaatcatatatcttgtaaaaaatataaccacatgaaagtgtttcacataataaatctattaatgccattttcacataccaaatcttaacatttttgtacatattaatgatttaatattttgaggtttgactacgcacattctaaaacgtcatctattttggaatggagagatatggaatgtgttgctgctgcattatcaatagcactaacttgtcatatagggtcacttgtactatgtgctggctattaataggctgataactttaggaaattgaactgtatttgctgctttagtcctgtacttctgtgtaaaagatcgcagtcatgttcttcagttcatttacaatgtgggtttctattgcagtggcctggatctgtttgctt

SEQ ID NO: 10694 - DNA, 881 bp, Oryza sativa
  Intron number 1 from transcript LOC_Os10g22560.3 (locus LO C_Os10g22560) derived from phytozome v7.0 (chr-ID Chr10; p os 11622875 to 11623755 reverse strand)
tccctctccaatcgtccatcgctcactctcctcaggtctcatctctctctctctctctctccacctggtacttttgctggaatcgatggcttacatatgtttttagaggattttagggatagatataagcatgcttgttgcaggccaaatctttcttcatttttggaattaatactgcacctgaactttttttggataaaaaagaaagtgtatcagctttgaatgaagcctactagttctttatgagtagtgtgtggtcattttcccctggttaaattgtgggatggatgtttgcttcaaagaaataaaagaaattgtgggatggacctgatggttcaaggctaattttgttttgacacttcatttcttaggtttttggtgtgtttgtgttcaagattgaataggacaagacataggggttagctctcaatttaaatgcccaagttaaaaagattgtaataattgtcaaaaaaatttgcatggaatgcttccttctctagaaagtaggaagtctgacggtctgaccccccaaaaaaaggtcagtttgtcctcttctgtttttatgataattactttcctaatttcccagctgacagaagggtgttgcttgcaagaaatagttgtttacagaattatgtagtcaatagagttcatatataacttccagtaccaaaattgcgtgattgtgctaatcaaaatgcagaattggatatgagtaatcaatcagaaaaagtgcgagtgatatgctagtggcctaatgtcactgaattttcagaagaccaagacagcacaaatgggtgttgtcgggtatgtgatgcaatttgttagataatttcttatttatcttctaacaatttcttatctcatcattgcccacatag

SEQ ID NO: 10695 - DNA, 819 bp, Oryza sativa
  Intron number 1 from transcript LOC_Os12g33194.1 (locus LO C_Os12g33194) derived from phytozome v7.0 (chr-ID Chr12; p os 20053936 to 20054754 reverse strand)
tcgccggcgacggcgacggcgagctccggttcttggtcagtgcctggtttctttgctctgctgcttgtcctgctgccgtctcgccttcttggtgtgtattcatctcgaattcagttcgattcatcgtcctgtgtcaggatacaagcgttttggttgtaaacttcctcgttttcaattttgagcctgggaagaagcaaacaacccatcaaaggaaattaactgaaccaggattggttgaaatttgatggagccacttctttgtggggcttctgttttcttgcaatgtgctgctagaaatttcgttcacaatgtttttctgataaattccgttaagtcatgctcttctttgatgaactttgagatgttcaagatctataattcgtcaaaagttcgaagcctcgttcggagtgcgcggtcttgtttatttttcctgaccttgaaactgcagcactttgtgactagaatataattaattctggtcatttaaggtgtgagcttttgagtctgcaaagctgaacttgccaccatccagcttcagcctcacctgcctatgcagccaatcacctgcaactctttaattctaattaggaagatgtttatgccttcccaaccgatcacaactgctgtttactgctttgatctctactctgtaccaaacttaccgcatgcattcttcttgaaaaacaagcaccaatttttttttgttaatgttaggtgaggtagcattaatctgaactcaccttttttttttacttattgtctacattcttcttgtatgatgcagctgcctgattgcctgaccaaacagaattcagagaa

SEQ ID NO: 10696 - DNA, 831 bp, Oryza sativa
  Intron number 1 from transcript LOC_Os11g37850.1 (locus LO C_Os11g37850) derived from phytozome v7.0 (chr-ID Chr11; p os 21953932 to 21954762)
aactccgagaatatcttggaaatagaaggtatttatgcagtaccaccaaattagttgttcttcatgacaatcttatgctgatgggagttttattagctactagctgaaaagtattttataagtttctagttgcagtagtttgtacattaagtaaatctgtattggtcttatgtagacatttatccatatgcccttacttttaatgcattttatatattataaatggtagatgtatatgtttaaatgatgtggagataatgatttaacattgcttgcatattgagttctaaaaatatatcaaaattgtaaatgatacgtcatatttgcatgatgtttaaaatactctatgtaataattgctagtggatgatgatgtggcacacttatatgtcgagctttaggacttagtgggcatcaactttatagtaagatgagtctcctttaaaaacctttagcttctagcgttacatgagagaaacataaaatgcaaagaattctagtgtttattgcagaggaagagaagatatattttaccatctaacatccaactcgatccaaaatgtactgatgattcataaacttctagagtaataaaatgataattcacatatacatatttgttttaggcactcaaattgactcgatttgagactgaaaaaatgatattgaactagtgatttattccccatattgaacaacttgtgttgacgattgtttatgccactttggatccttgatactcatatgtcttagttacagagatatacactatattgttttactaatccgttcccctttttttccattgtggataggtacttgattgttgttg

SEQ ID NO: 10697 - DNA, 944 bp, Oryza sativa
  Intron number 1 from transcript LOC_Os12g42760.1 (locus LO C_Os12g42760) derived from phytozome v7.0 (chr-ID Chr12; p os 26544469 to 26545412)
tgacgctgcggcctcttcccgaccgcgcagcaaaggtgaatctcctcccttcctttgttcatcctgcggtttcctctctccctcttggctcttgctctcttctctacggttttgatgtgcgcgtgccctgtggtccatttgggtgattttgaatcgggcacgtttggatccttggcaaaccaaatcctagccttgcttcatctccagcgcagtgccttgtgatccgctgggctgctgccttgtcagatcccgccaacattgcgccgctgttctgccagatcttgccgtcgctgccacattgcgcaaagaagccgaaagcccttccaatctggccggccacatgctgttgcatgaagcaactggcagaagatatttgtgtttggaattttggggatacttcaaccgaatgagcgagctatcgactgtcttggactaatgagagaattaaacacattttttaccctacacattgttttgtgactattaatcttcctcaggcacatttagtttcaggtcttcaaccaaacagaaccaactcagatatgcctcatcaggcaacaaacatcaaaatatcacgaaactctcaggcagcactttttctcaggcatagctcagggtagcaatcaaaatcagtaacgaagtaattttcatgtaggcccatgataagtgataagtttttagatcaaaggctcaccagcccggcttttatagaaagccaaaatggcaacatgtcatcccgataagtgccaagtgcttatacgggtgcttagaaaatgatcaaagttaacttatccttacctggctaagcaaggtgggagaaagatccaaacgtacacatctccctattgctccatatgaaattggagtattttttaaatcttgcctatctttttttccctatctaatatctattgtttgcttacgatgcagatttgaggtcacca

SEQ ID NO: 10698 - DNA, 801 bp, Oryza sativa
  Intron number 4 from transcript LOC_Os11g34770.1 (locus LO C_Os11g34770) derived from phytozome v7.0 (chr-ID Chr11; p os 19908282 to 19909082 reverse strand)
gcgacaggccaacactcctgatcacttctgacatagtatgccttgatttcctttgctatgctattttacgtggaacttggatgctttattaatcacaaaatactatgtttgaaatttgaccatgcctcaatttcagttctcctttgatgtttttttcttagctaggagttccatggattgtacatcaatttaagtatgactattttggtgccatgtttttgttattacacatttgtgtagataggccttttcgatatcaccaaatccaaatgtcatacagataaattagtcaattggaatcaatcctgaatatgaaattttaaattcctgagatgtgcattgtcaatgctgaatagatcaatacattcgcttatttaagaatgatgtcctgtgtgaaccataagtttggtaatgatgcatagcgcaagtcattcctgtttcaactttttgttcggcatgttctcttcgttctagagttcatgggcatgtggttgaacatatctgctttaggacccccatcatttgcattatccggggaataagccaaacgtcatatttgcaaacaaaaaataatttgtgaataaaacttttatatacatgttcttacgatctaaaagcaaaggctgaaaaataaactttgatgaaaaaaaccctaaaatcaactccaaatttgaggttggaaattcaaattttggttgataagcataagcataagcgaaaagatgaggttgttatttactagaatgttgtcattcgcattactgtcatactgaactgaagttgaccttgaggtggtcgtcc

SEQ ID NO: 10699 - DNA, 177 bp, Oryza sativa
  Intron number 2 from transcript LOC_Os12g06335.1 (locus LO C_Os12g06335) derived from phytozome v7.0 (chr-ID Chr12; p os 3024038 to 3024214)
ttgttggagaagggtaagcaaaagaatatgatcgtttctttggtttgagtattaatggggttaagtacagtattagctaatgcaatcttgttggtttattgttttcattaattggatggattcttcacttgttgtccttcagtaccattggccgtgctgcattcactgggaatcatc

SEQ ID NO: 10700 - DNA, 680 bp, Oryza sativa
  Intron number 1 from transcript LOC_Os10g01540.1 (locus LO C_Os10g01540) derived from phytozome v7.0 (chr-ID Chr10; p os 356069 to 356748 reverse strand)
agctgcaggagatcgtcaaccatcttctccacaacgtaccactatctcttcctccttactcttcttcttcttgcctgcctgcttgcctgcctgataccttttttttttaatttcatattgatattggcttagggaccaattttatttcttctcctttttttcttttcttttataaagaaagaaagaaagaaacattacaatgtatcaatctgcctatctagacaacacataagctgtctgtactcgttcctagggcccatttgaatcgcaggattgagaaaacgcaggaataggaaaaacgtaggattttaataagaatgaagtgtaaaacagatgattgcaaaacgcaggaaaaatacaggaatgaccgtttgattgaaccgcaggaaaaacgcaggaattagatgagagagatagactcaaacgaaagttattttttcttgcacaactctttggtgagagaggaaatccctttaatgtttaacaagggaaaaaatacaaggttacaattcattatgacaagtttaattataatatagtaaaggggaaatatttgagctaattgtcacgttgcatttatcttcacctatgtaatgtactcccatttggcagttgtcctgcatacttacttgtgtgacctcatcactctaaacatttactttaggaggacaagctgccat

SEQ ID NO: 10701 - DNA, 1038 bp, Oryza sativa
  Intron number 1 from transcript LOC_Os12g02760.1 (locus LO C_Os12g02760) derived from phytozome v7.0 (chr-ID Chr12; p os 974712 to 975749 reverse strand)
gctcgcctctcctcgccctcaccccacaggtacacttgtctctgatcttctagtcattcatgattcatccactgcaaaaatcttgcatttgcatctcagattaattaattaattaattaattacctcctataggctatattcatgcatctttgtctttgtgattgtatactagtattacctaacacctgacaatcagtataatatttacgtacggtttcggtcgatatattgagttagctattagcattcatgaacgatcgtcgatcgatcatcaattcttcatacattcaaccagcaatcgtttatattctgctcgtcaatcatcctcatccgaatgtagacttcattttacatatcttctctcaagatatagaacgatcaccaagtttgcttccaaaacttcactgaagacttctaaatactgcaaatcctgctttgccgagagccccgagactagtgtttcgtccatctacccgatctttcatcttctcgatttttttaaaaaatgtatctccaggctttcactgtttcctcaaaatattcaccaaatcacaagtatatatgtttgtcttgtctatttgtctcacaaatactaaaagataccatagctcaccaaaaagatttaaggcaaattatcatgcatgccgacggtttttaggcaaatgctatcaactacctccactaatacatctagctaggaaaataattagtctaaacacttgcagacaaaatcagctgaccaaagattaaaattcattgctttcatcgttccagcctcggttattttgatgctgttctgctttaatttgcccaaaatcccatacagagttaaaaacaaaacttaaaaaatggagaagttacatacagagtttgatttatccgctagttcattctactttccgactgaagttcttttacctcttgttacaagtgcagcagatgggccaaaagaacagaaaccattaatagaacccatggggagtaagtaagaactaagatttttattttcctttctgctgttgcaacagattatcagc

SEQ ID NO: 10702 - DNA, 531 bp, Oryza sativa
  Intron number 1 from transcript LOC_Os12g15680.1 (locus LO C_Os12g15680) derived from phytozome v7.0 (chr-ID Chr12; p os 8958314 to 8958844)
ttgctcaagctgctgttgtggagtacactttcaatgtaatattctatctagttttcatatacttccatttatgcatgcagttttttttcttctattttatcgcatatatatcgcaacatgcatgaacactgttatctttaattcatgagatagggcttttggctcaagacgtagacatggcataaaaaaaactctcctggaatcaaatacataaattttaatactatttcctgcagtttccaaatatggactattattaatatgtttaagaattttagtttgaaactgcaaaactggtgtgacaagattcttcacattaacatattagattttatgtactcgttagttgttacgataaaaaaaatgggtgcaaaattgcacaagaaaaaaaaatatattcttttgaccggagggagtagaacttcatttgtgttcaaggaggggttacttgtcaaaggtgatcgaactaaaccatgtcttaatcttacatttttgaactgagcaggtaggtaacctctccattagtcagct

SEQ ID NO: 10703 - DNA, 1022 bp, Oryza sativa
  Intron number 3 from transcript LOC_Os10g19140.1 (locus LO C_Os10g19140) derived from phytozome v7.0 (chr-ID Chr10; p os 9674094 to 9675115)
ttcatataaaaggtaaaaacacgctacaacaaaaatctcatgtagttgcattcttgtagaggtaatttttaaaatggctttaaaatcaagagttataaagtgtagagacagtgttagaggcacgttaaatattgcctaaaaacttttaatctagagacacttttagcacaatttgttaaatttaccttgtagaggcacttttaccgcactttaaaatttgcttgatatataaaggcatttttttaagacatttcaatctccattggggcacttactggaattttaatctcagctaattaactcaataaaagaaacacgaagcacatatgtacaagtaataacatgaggttgatatggttaaaacattcaagtagaaaatgaaatattcaagaggtctagagttcaaggatggacaattgcaagggaagttatatttttttttaaatttttacattggtttactatggttgtggcagagttaatgccttccgaaaatgcctatactctcttatagacaaaaaaaaaatgcctctgtaaaagtgtccaagagcatacaaacattttgtaaagtgcctcttcatttatatagagataattcactagaacatctttatagtattagagaaatgtctctacaaggtatttttgttgtagccgttgcttttcacatgtagtacaacgcgatgtaaaagatgtatatatcctgtctgttccacattatattataagaagtttgacaggtttattgaaaaacataacacattggatttatttattaaataaagcactgaaaatatatttataatatatttgttttgtcttggaaatgctgccacatttttttatgaagttggttaacttgaagaaatttgacttagctaggaaaaaatccgaatatcatattataatatggacatatagggaatagtagaaaatttgtaaaagaatattttacaatgtttcttcttaaatatatttgtataatttgtgcaggttttgctattccaaaagaatcaaaaatt

SEQ ID NO: 10704 - DNA, 824 bp, Oryza sativa
  Intron number 1 from transcript LOC_Os08g16480.2 (locus LO C_Os08g16480) derived from phytozome v7.0 (chr-ID Chr8; po s 10097396 to 10098219)
aatcttctcttccgcgtccgggatttccggctcaggtgaggacggtggctgcgtctttcgttggaattcgctgcttttgcttattgggaagaagaatcctgttttcctgggtgttcttggtcacctcgtccgctcccaaatttatggaccatatggaattcctcgatctttgttcttcttttgctatattgggacttggagcatgcggattcaaattggttttgcttcgaccagagatttcgagccgcggaaaagctccaatcttgagacgcgcccggttgtcttgtccgccatcggaaaatcgtggctgatagtagtattccgataaccttggagcttctaacctcagctcgctgtcctaaaatttgttgatatcccgctttcgatttggcgacttagggcaaaatattccatgtttctgtcaattttgttgctcgatcaaaggatatgtgatgaatctccaagtaaagtttaggctcactttttttttattaattgaatttgattggtgggtattggaggctagctcatgtgtagtggtgctgtctcatttcattattggccactcgttcctaccatcacttttctagtagccttacatgcttacagattccaaagcacatgctccctcccccatttttctttactttatttgtttgctttgaggtttccctgtttatgctactgcacgaatcatgtgtgtttcatcacatggtcagtactgtcatattcttggagatgtcctcattatggtttctttaatgtgttcttgttttgctatgtttgtagcttcaagaaaatacttgctgagctttccctagaaa

SEQ ID NO: 10705 - DNA, 594 bp, Oryza sativa
  Intron number 2 from transcript LOC_Os08g42420.3 (locus LO C_Os08g42420) derived from phytozome v7.0 (chr-ID Chr8; po s 26783523 to 26784116)
gtactcgtagtaggttctggcgtgacgttttgaaggtgagaaatcacaaaccaaaaattaatttgagattgtattgttcttttgcactgattaattgcatgaaaccctaattaggtagattgtgggtttattggtatgtattgtgttgtcctgcatgcaacacattgacaccatgtgttggcacaggcaggctctgccatggcgctggagcgaccagctgcatataaagattctgtattgagagcccaagggtagtttggtcactccatgaaagaaactgaggagaaaagaaaataaaatagataaaactctccaaagtggcaatctatcctgagatcaacatatagagtggcattttatcctatacatcctagtgagtggcattttgttgaaaccaacgatatagagtggcatatatattgtcctttttctcggcagcagcttcacaagtggatgcctcccatttcctgagctaaaacgtagagtagtactcgtgatcattagcacatcggataattttttttgagcttttgtttcatcggtgtaattaagtgttaattgtccattgattgattttgcttgtgcaggactgtg

SEQ ID NO: 10706 - DNA, 930 bp, Oryza sativa
  Intron number 1 from transcript LOC_Os12g44310.2 (locus LO C_Os12g44310) derived from phytozome v7.0 (chr-ID Chr12; p os 27431608 to 27432537)
cggccccggccctccccgtccgcggccacctccccgtacacctcccctatcctatcctcctccttttcttttcattcataaacactactacttccatctgcttgccttgccgagatatttaaccatttgccacatttagatgtgacaattaactttttgccattagactcacatgtcatagacatatgtggactcacatgtcatataggggtggcaaatagttatttgccaaatctctaacagtggcaaatagttaaaagcccctgccttgtctgcttcttattatgtagcactccactctgaaagaaacgaaaaaaaggaggagaagaaatttctccccctttcttcctcctgtactgcccatagctcaaatctttgtcgcctcaacaaaagagattaaaatacactccagattgtcctttccaatggtttgtttgggtatcatatatacgatgaacagtctcactagtcaacgccaattaatgcaccacaccacatactagtactagtcaacgccaatttatgtacactaccaacactaattttttccatctctccttctcatcactatgcatgtagtaacactcaaactgacatcttccattacccctgctctccccttctcttctcctgtaccctattcattcattcattcattcattcatgttttttcttcgcctattcatctctgcactaagatgacacctaggaaccattttgaccaccaaaatctctttatcaaaaattatgcaacaacaacctctatggtggaagcgatcaaacattctgtcgttcacaatgataactgtgtttcaacactacctctacaaactgttcattaggcactcatcaagatcatgtatgcggcctcctcttttttgctttcaccttctcactgacccgtctttggttttccacaggagtgcttga

SEQ ID NO: 10707 - DNA, 1032 bp, Oryza sativa
  Intron number 3 from transcript LOC_Os12g13570.1 (locus LO C_Os12g13570) derived from phytozome v7.0 (chr-ID Chr12; p os 7615491 to 7616522 reverse strand)
tcagacatataaagggaagaattggaaaaaaataggtacgttctttggattgatgcttatatgtggaaagtcatgcaatgattctatttttctatttgcttagtcctactctttaccttagtccttactcttgcccggcgagtccttactctttatcattgcatttctacaatatcctttagctgtcatacttttctttttctttatcttcaatatagttattttttttatgatggaacatataaacgaaagagccttctaaaatccaatccccacccattgcactatttttttgagagaggaaataacatagggaagcaccttcaaaagtgtgtcctttggtatctacattactctacattttatagcctactccctccgtttcaggttataagacattttgactttggtcaaagtcaaactattttaagtttgactaattttatagaaaaaagtagtaatatttttaacccaagaccaatgtattatgaaaatttattcaattatagatttaatgaaactatgctggcattgtaaatattactacatttttctatagagttagtcaaatttagattagtttgactttgaccaaagtcaaaaagtcttataacctgaaatagagggtgtattatgcatgtctgcttccctttggtttttcttttggtcacatttgctctttgattacatactgttgtacggcaatgcatgtcaggttgtaacaggaacaatatattatttcacaatattatccactatccagggtttacaattcatttttaccatattgttctcaagcctcttttgtcctacaattgtttagtgcagtaggatatcataaaccatgcagcatattttatattttttcttcgatgttatgggaactcgtgtgcaggaaagcattgtgctgtttcattaacttacactcaagtcatgctcttctggcattgtttttcctactttgttgatgagattcttgtatatcgttaaaaatccaagctttgacagagatccttctaattttccagcgga

SEQ ID NO: 10708 - DNA, 635 bp, Oryza sativa
  Intron number 2 from transcript LOC_Os12g13570.1 (locus LO C_Os12g13570) derived from phytozome v7.0 (chr-ID Chr12; p os 7616511 to 7617145 reverse strand)
ggcgttccacgaaaggaaattggacccctgaagaggtataacatgtgaatgtcagcttgtgtttctgttgatgaagagtcctttcatgtacacataattaaatgatgattgaaaaatcttgttttatgtaactgtgaaacatctaatgtgtttactggtaaagactggacttgtttaatatgaaaaaaatatttcacttcatttggtgttttattcctcctacaaacaaagttgaatctgataatttactaatttctctagcatccaagggagccatgggcaactttaactctttaaaagtcaacaaatgcatgtattctgaggcgaatcataaacttcacttttctaccttgggattaccttctttgttctgtttctgtcatatagtcatgtgcaattctgttctagttccatgctttgtacaaaattgtaacagcagcattttggttctattttgtatgtctcaatgaaatgtgagccaagatccatattatcatccacacaatgcaaaatttcaaatttcttagatgcatatttttttttgtgcttattatctacttacactgtttaacgttgcacttatgtgctattcaaatgtaggattccatattgtccagagctgttcagacatataa

SEQ ID NO: 10709 - DNA, 821 bp, Oryza sativa
  Intron number 3 from transcript LOC_Os11g31770.3 (locus LO C_Os11g31770) derived from phytozome v7.0 (chr-ID Chr11; p os 18171188 to 18172008)
caagaatatcggtaagcacattattgttccatttgctctcagtagtctgcactttgtctgatattggtctgtattaatacttgaagaaaataagttctctctagcatgctttgaaatgcggggacatgcccaattctaacacttagattaggacacttaaatcaactttgaaattttccaaatattttactgagataggatccaaaatcattgtgtaacgataaaaaagaggagaaatttgttgtgaacagttattttctctcttccattttaaatatcaatcatactttttactcatttctttttgcacaagttgttttgagcatgaattttctactcttgccgatgactgttaggtgtactaatggctgtctcgttagtttttcttttgaattgtatgttacatcctattattgctgaaaccacttattggtcctggatcgaaacacagcatctatgaaacttaggccccatggtcatagtagtaatcatcatctagtgcctcatatttgcataagtgattacatgttatgttgcatgtggatatggttccttgaacttaatatgaaccagatcaaactttccagcatgcacttgtgcaagtttatggatgctcatgttgagttatcaagttcataaaccaaacagaacatcgtgcaaacttaataacctagtgtacaatccaataaattttagtatctggaatctttttgtttgggagactttgattagtcatatttttttatgcatatctcctattttgaaggtgttctgttcattacacaggttactggtgggggttattttcatcagctgcttgc

SEQ ID NO: 10710 - DNA, 967 bp, Oryza sativa
  Intron number 1 from transcript LOC_Os10g28665.2 (locus LO C_Os10g28665) derived from phytozome v7.0 (chr-ID Chr10; p os 14887443 to 14888409 reverse strand)
tgcgcgggcacctagcctgtgcttgccccctactcgtatgcggtttactctcaattcccatcgtactttcagccatttattttccggtggtaatctgcagctaattaattagctgttgtctcactgttgtggagtatctgtcaatatgtgtgtacattttttaatttgtttggcgcagattgtattgtgtaaaatcaatctttgttgagtcgttgtgacacgcactcaatgaaaatttcatggctcctctactgctgtgtggtgctagaatgctggaatcgcttagggcgctggtggtggtggaggttttatgttgaggaaaagggaattagatgggaactaatataatagaatgctgggtagtgagaaacagaagagtttaggagtgctgttagagcaaatttgcggtttgtagagtagcattgtttgcaagcttgttctagaggaacactatgagagaaactttatgacattttcttttagattttcttctctatgtacattgcaattgagcttctctgcgaaatgtcactcaattatctagtctgagtggcattccgccctgcttagcggacagcactggggctggtttatcaggctgaaggacaatcttccctaattagtggacatgcactggggtggtttgattaacccagactgatgattctggctgtggttattgtacccttgcaagctccctttagttgcaacaatgttccacaataacagatctttatagtttgcattgcatatctcttttgggttctgttgtgattgccttgttgtaattgggcagaggatgggaggagtaacactgaataatgcatcaaccatgtgtccaatacattatttgcttgctagttattttgttgaatccagctaacacgatgcagaattctaacatttgctatattagtctgagttctttttgttctgttgtgtgatcctccttgtccatggcaggcaa

SEQ ID NO: 10711 - DNA, 587 bp, Oryza sativa
  Intron number 2 from transcript LOC_Os10g35530.1 (locus LO C_Os10g35530) derived from phytozome v7.0 (chr-ID Chr10; p os 18931216 to 18931802)
tcctcgccatcctcgacgccctcgccgtgcccaaggtacgtaagctcctcagtttaatcgatccttttacgaatttttttagcaggtttccagttttgagtcctactcgtgcatgcagactgtgaagctgtgtaaggccttcttgctataaaacttgcaaacggaaggcataattcaaaacagaatttttcacttcttgtgtgcatcctggttagcaatttgtaacgaaacatataaacttccactgtcatacacagcaagggagatatttggagaggataatttgttttctgtcgttaactagtactgtagtctagtattcagttggtaccacgtcggtaagcaccaagccaccaacaatcaagattcaagagtatgttagaggcatgaaaaatgagtgcaagatattaaggtgccctttttctgagtaaaagataaaagataagggtttcaatttctccataatgaaaccagctgcttataaatgtcttgccttcagtaaaaaaatcctttagtttgttgtttgctcctgatagtttatatgtttcttctgtcaggcctttcttgttgggaaggactttggggcc

SEQ ID NO: 10712 - DNA, 946 bp, Oryza sativa
  Intron number 2 from transcript LOC_Os10g33840.3 (locus LO C_Os10g33840) derived from phytozome v7.0 (chr-ID Chr10; p os 17890806 to 17891751 reverse strand)
tttggctgattctactaaatttctgtttggtataggtaatttctttcataatgattaccccttacaaatagtgcaaatatatactccgtgggtcaatcttcgcactgttgtagaatctgatgtttaaaattgcctgcatccggtttgcaaatcaagaaaaaaaaatgccctgattactgtgccaaccatattttcttcgagggattgaccaaatctttttcttgtaaaagcttaaccctgttccaaatgtaatactgcaattttgctcaatttcacatgcacaccacagtgtagtcatgcattaatgattttgatttcacagtgtgacatgcacatcacattgtgaacaagtatattgacagatcaacattttgatttcacatatatgcttccctgttaaagcccggttatcctaatcgatctgggatctaagaagttgatggtatatgcagtaccatttgtttttcttgcaattgactctaaattcttatgtcgttcagttcatataaatggctatattctacagaagatagatgaacctatttttctttctctagggcaaataactgaagagtgttggtatttgagttaaccactttttacgagcctaacctgctgcacttccacaaccatggatttaaatagattgttcatgtagttcctattttttctgaacaaagtgaaaaatacgtcgcctatgataaaatggcaacttactgtgtgcaatgcagtacactaatttattttttatagatcttttttttgttggtgattgatagcgtggctgctctccatagacggcttcttattttcttttcatgccatatcaataaaagtaatatatttttccatccgggtgaaatttgatctcttaaccattcggcacttatcttctttcacagatcatttattaaattttccctgtatcctacgtttacagtgttgc

SEQ ID NO: 10713 - DNA, 1058 bp, Oryza sativa
  Intron number 1 from transcript LOC_Os10g21396.1 (locus LO C_Os10g21396) derived from phytozome v7.0 (chr-ID Chr10; p os 10838833 to 10839890)
cccattaactttttgtgtactagcaatatctctacgtgcgattcgttaaaataggatctttttcctctgaaattcattgaatatttatcctccttttcttattctatattcaggttagtaagttaaactagatagctatatgagtgaaacaaaactgcttattaatttgtagtaaaaagaaaaaatctcatttcctatgtacaagaaaaaatggaagtaaacataagcggtgtaaattctttaccccaaggttgagattttttgattagtcatcatatcttgaagcgggcaataataagggattcccgatacagaaagttgtaatcataagggaatccatcaaaagttagtgagggattagaaacactaaagtacataaaggattagtaatgagggaatctaaagcattagatatttttcctcgtaaaaggaatcataataaggacttgaaattggtggaaatgagcaagtagtactttcttcggattccgatccagagtatgttcccattcacttgttaaggaaatggctatcaagaacgaattaaccctttattccttttttctttttaaatacccctcggggaaagaagaataggacaaaagatatggaatgcaatacaaaaaaaaagatctttatttattctttccgtcgtttatccatattcatacagaattcttcatgaactaatacccaactcttttcgtttattaattgttataacgagtgttttattccaagattaagttattgctgaacaaagaaaaagtaccattatattataaaggatgagatgaattccgaagcgttttttattattctagcagacagaattcctttggtctaatttaggacgttgaaatcgattttatcttagataattctaactacgcccaagaagataataacgaaatgaaacagtactttccttttttctgatcatagaggagccgtatgaaactaaggtttcatgtacggttttggaatagcggtgggaactgtgatgttatcgtcgactatgattatccaacagttcaagtacagttgatatagttgaa

SEQ ID NO: 10714 - DNA, 955 bp, Oryza sativa
  Intron number 2 from transcript LOC_Os11g18947.3 (locus LO C_Os11g18947) derived from phytozome v7.0 (chr-ID Chr11; p os 10783472 to 10784426 reverse strand)
gatctgagacagatagagcaccagttcatatctatgtatgtagatcctgaattatcttagatacattatcttaattcaaatgttctattattaccaagagccacactcctggagttgatcgtcaaggaccttttttacccactttggatggcaggctactaataggattcatgcctaatatgcttttacttagtgcatcatgctttatgtgcttctatttactgcatgctttgcttattctcatgggggtttccatcccttattgagactgtttcttaaaactcaaacttgatggttgtgtgcatcctagatgcagagactggggatgtaaccatcttccttatctaaaaaaaaaagagaaaaacttgtgcgacattatgcagtaccatgcaacctgaaattaatcttaggtatatctaacatctgttctacttttccagtagaaaggtatacctgaaagtggtagtttttttcttgttcttgtcattaactgcagtttagtgttggtgcatttcgttaacaccaaatcgatccatttcaagattttgacatatttctaattttatattttggtttctctatgcttctgcctattaatacgtgatttagttatctatcatctgtcatatgagagtggcccagattgtgcttctgttacttgcacatattaataacatcgtggtgctaggagtttacagataactttgtagtttcagtgcaacaggagaatttatttctcttttagtgtgactctccaatttgagtattcacttgagattcagcaatatcaagttgaaaactctagaaagtgtgcagcttgtttaagctttaaacaagtgtagccagttaattgataatataacttggtatttgtactgtttgcattgtccaacgctttatttggcttatgttatttggcttttctttgttcagcgtcagcaaaatcaagaggagc

SEQ ID NO: 10715 - DNA, 748 bp, Oryza sativa
  Intron number 1 from transcript LOC_Os12g39970.4 (locus LO C_Os12g39970) derived from phytozome v7.0 (chr-ID Chr12; p os 24665055 to 24665802 reverse strand)
ttcccctcttatttgaaaggtggcgacaccacaaggtttgctatgttttcttttatttgtgatacaaaaacatttaccatttgtgtgatgtgttcaaatatgaaaataataccagttggaatatccattcaattgctttagccactgtttaggaattaacaagcagataactggatagttaaatggctaagcagttagcatattggaatagagcatatctttattagctaaatgactttgacgattggtttgctatgttgtaacatgagcatatttgatcgaatgccctgccaatcctgcgaatagtgattcaagcaataacttgtaattattcttctgtactcctcttctatacttggacattgcctcttaattaaatttcattacattcatttttcttttcgcacagttaaactagtagagcctttcatttggtgaaagttttactgatttgccagcacataaccttaagtaatttggttagctaagttcttggtctcatcaattaccaactgtaaacatcatagcttgatttgaaggaacatcgggattgcaggatcaaaaactacagcatcaacagttactgtttctctgctggaaagcaaatataatattaggcattaagacagccgacagaacagttccctgtttcttaactagtgtgtcgcatttgcttattttctcaccatctgtatctagtttgcattgatcgccttgtgacttcttttccattttttggtgcagtcgg

SEQ ID NO: 10716 - DNA, 510 bp, Oryza sativa
  Intron number 1 from transcript LOC_Os11g41820.1 (locus LO C_Os11g41820) derived from phytozome v7.0 (chr-ID Chr11; p os 24686561 to 24687070 reverse strand)
gcgccaccgacggcggccgttctcaggtgcgcgcgtcgcggatctgtagggggggaatttggcccatgttttgggatggggggcggtttggttttgggattgtttcatgggttgggtgcaaggggatttcatctggttgcctgagatttagggatttaggtggtttactttgcttgcaatgttatgctctccaaatcgatggaactattaggttgttaggttgattgtaattgctttgtgctgttttaatttcctctggagaccacgattcaaataaaacatagaactaggaaatttttaggcgattttcggattagatctgtttgaatttaattgttgtgcaaatttcaacattcaccttatgctgattgtatcaccttggactcttagagagtagtttctggtcgttgacagcttattggggctaaacaataattgaatcttctcttttgaagataagaggactgactgataactcttgttcttttattcagcacgagacacagccac

SEQ ID NO: 10717 - DNA, 941 bp, Oryza sativa
  Intron number 2 from transcript LOC_Os09g18550.1 (locus LO C_Os09g18550) derived from phytozome v7.0 (chr-ID Chr9; po s 11369322 to 11370262 reverse strand)
ggcgcaaacaacttcctcaggtctgcctctgtcctgtatttttttagatactagcaaaaatgcccgtgcgttgcaacgggtaaaaaaaataatccaatgacaatagacatttttcaagcgtacccatatcaatgataatgtttctatggatcgttgtagctaacacaattagaaaattagagcatctttatgtaataacccaaactcgatgatggcaatctttttaccaatgcttgctttaactaaaataattggattattcatataacaatatacatataataaaaaaatattctttcaatattattcttgcaaccaataataggttaatcaaatcctacactcaggatcaagtctacacaaaatagtcaccgtgcactcttctctaaataacaattaaaaatatgtttatttttaatactattttcatataatatgttattaaaaaaagtctgataatgataattgcatacaaaaagtgcagggattagatgaggaaacaaatgatgtgtaggaaatgatgtgtaggagatggaaaaatatcgatggatcttatccgacccaagcgtccatcaattttatctcgctctgagtcggacggtttctcggagcggttctttttataaacggcggtttttttctcgcattgagttggatggtttcctctattttttttttcgaaatgatggtttttttctcgcattaagtcggacggttttctcgaaccttattttgaaacatcggtttttttcgcgtgttgagtccgtttgttttttttggatctgttattttataaacagtgtttcatcggttagttttttcagagcggcttttttttataaacagtttttttttcttgtgtggttttttgaaaccatttttttagaaatggtgtatttctttctgatagtttttaatagcattttttttgtttttttcag

SEQ ID NO: 10718 - DNA, 958 bp, Oryza sativa
  Intron number 2 from transcript LOC_Os12g17910.1 (locus LO C_Os12g17910) derived from phytozome v7.0 (chr-ID Chr12; p os 10291514 to 10292471)
cgccaacgccgttggcgtcaccctcggcccacgaggtgatgcatcttgctcacttcacttcacttcccttatcttctttcccttttttttggggagagaaagttccttggctagaattagcaccctttaatccattgtggctacgcctattgcgagtaatgtttttgtagataatggaattcatcgacttgaaagattacagcggttgcaggacgaatgattgcgaattacagaattacggcttaattattgtgacttgtgttaatcagataatgtcagctaatggctgaaagtgctaatttgtgctacccattcataactgcaagttgcattgcgttatttggtgccataacaacataaggctatgaaaaagctttgtatattcagcagtatcttcaggcttcatatatagctgatgaagtgtcgtttagttcgctgatttcatcagcagcggcacctgcgggcagttccgtgatacagttttagccttttagcagtcttgttatgagttgtttaggtgagacataaaaccgcataaagttgtaaactttattgaatctgatttggcatttttcatcatttagtgatgacggccaaggtgcagatatggcttgactttagtcacacagtacaatatatgtagttgacttacatagctgtgtccatggtgatatttgatcattggttgattattgttgtcatatttagaggtatgcgcattgtgcacccatgatggagaggcccaatgtatctcacactcctcctttatctagtaaaatgatttgggtgtcacctcgtctggtttctctactctctatactttgcatacggagtacttcttttgtcagtttagttttttaatactagcatgttccatcaataaaacaactgtagtgttttctttcatgatgcaagctctgatcttagggatgttttacagggagaaacgtagtgcttg

SEQ ID NO: 10719 - DNA, 954 bp, Oryza sativa
  Intron number 1 from transcript LOC_Os12g32530.1 (locus LO C_Os12g32530) derived from phytozome v7.0 (chr-ID Chr12; p os 19604702 to 19605655)
gcggcggtggcgcggtgcggcggcggccctagcggcggctagaggcggccagagtagtagaagaggcggcagcgggtgggtgcacggtgcgggagcggtggagagctcgggagaggccggcgagtgagggaaacgagagagggggttgcggggaagctttataggggctcaggaggggtggacacggccgggaaacccccgatttggccggcgacgtgggaaagtggggatagagagttggggggggggattcaaatcaaatcccgcccttgcggggacgcgtgcgtgcgggagaggagggggaagcgggcggcgacgtgggcgcggcgacgtgggcgtggggtggggcgcggatgcggagtggaggaggtggggcgccggcggttggagctccggctccaattgctagaggaggaagacgaccgacaggtgggccccacctgtcggcgcccgaaggagagagggagggagggagggaggacttcggggaggggaagaaaaggaatgggcaggcggcccatgatgaaaggaaagggaggaaaaagaaagaaaaagaagggaaaaagaaaaaggggattttcttgggattaaatattgcactttgatgaattttaattggttaaaattattcccggggctttggaaattccactaaaaatcctgtcaatgtattgtgacatggggaactcaagaaaaattctccatgccgattccgattattatttgcatttattaatttgagtaattagctctaggttaaattgaacaatttcttcggacgatttattttatgaatttaaagaagggaggggaaattcatggcgtgacatgaaatcaggtcttttaagatcgaagaactctacagtgaatctataacttagcttttggaaaagaattcaagaatatacatttttttctaaacaatttatgtttatatacatgcatggtgagaaa

SEQ ID NO: 10720 - DNA, 920 bp, Oryza sativa
  Intron number 1 from transcript LOC_Os12g37540.1 (locus LO C_Os12g37540) derived from phytozome v7.0 (chr-ID Chr12; p os 23003235 to 23004154)
tggttacaacaaggtagggatagttactttcctctgtgagtctattacatagattttagacacatggatgtaaaccagtggaacaaattatcagatgtactataacaattgaatttagtaggtcatcaggggagaatatcaaatcaactatagctttgaaccaatctgatttaagaaatactccctatgtttcacaatgtaagttattctagtattttccatattcatattaacattaatatgaatatggaaaatactagaatgacttatattgggaaacggaggaggtatcttctagtggttaattaagtgaatacaaccggttgctaacgaagtataactcgttggtcaccacctgcatcttcatattcatattctcatagctaagcctcatcgggatcctcatcaccacaattatgtatgttcttttcaaacacatcaatagccatgcatgaggatttttgtttgtgctagataattgtaccgactctctattaaacatgaaaatatcaaaacacataaagttcgatgctgcatatatatgtatatatatatacatatatatatatatgtatatatatacgtatgtatatatatatatacgtatgtatatatatgtatatatgtatgtatatatgtatatgtatatatgtatatatgtatatatgtatatgtatatatgtatatatatatgtatatgtacatatatatatatatatatatgtacatatgtatatatatgtatacatatatatatatgtacatatgtacatatgtatatatatgtacatatgtagatatatatatgtatatatatatatacatatgcatatatatatatacatatatatatttgaacatattaaggggaaagataataatttgcctgacatgctttctcgtttacctgaattgcaggt

SEQ ID NO: 10721 - DNA, 809 bp, Oryza sativa
  Intron number 1 from transcript LOC_Os11g26890.1 (locus LO C_Os11g26890) derived from phytozome v7.0 (chr-ID Chr11; p os 14985473 to 14986281 reverse strand)
gcggcgtctcctcctcatcccgctggaagctgcaggtcccccccccccacctcccgcctctctacgttctcggttcctctcttgcccgtgatgtgtaaatccactaggggggatgcgtggagtctcgtggttcctgccttcattgatcgttggtgttcatggcggatgatgattatgatgatgatgacgtggtattttatatttaggggcggtgctttgcataccggagtgattgatttgagatgaggtgtagcaaacgacctcctgcgctgcaattcttcccactcttgtttttggaagttaggagctttggttacgacgtacctgtactgcctaaatgagaggttttacttctcaagtaggctgtttcaaactggattcgagctctttacttaaactgagatgtgtgaaaggagataaatttctaatgtctgtttctattaagttttagtgtttccttgttactgctcaatagtagtcttagtttttatagctttagagtgtatgtttatgtgaagtaaaacttatactttagtttctcttttttttttatttgtcagttgtcgtctttcttctatcagtatcctatccactgcaccgtcaaaattgttttccagacaagatatttcaaaaattcactagtccacagccacaacatgcatctttgattcttaccgaatttagtctgatttattcatgccctctgcattagtttaatctagttgttgcatcattgatttgtgcgtgtgtttcgcctagaatattgtcataacaattgctgccctatcaactttgcaacacagggaagt

SEQ ID NO: 10722 - DNA, 683 bp, Oryza sativa
  Intron number 1 from transcript LOC_Os11g07020.1 (locus LO C_Os11g07020) derived from phytozome v7.0 (chr-ID Chr11; p os 3486606 to 3487288 reverse strand)
agcttgtcaagaccgcggtatgctttctgaatatcatccgtactgttctatggtttttggcatgcatttgtttcctctttatatcaatgacaagtgaaggaactttatgtagttttatgatagatataagcactttatcgtcaggaaatcaaataggatgtgcagtcaagctaagttatatatagcagaattcagtgaacataaaacacttgttttgatataacatgattcaaatatactggcatctctagttcaaatctactcttcaaagttatataatgcatttgaaggaaaatttctatcttcaacttcacagaaagcaaaatagatatgatttgtgtataccaaatgaacttagagactcaaaatatactagtaatacatttgtaaactcgacatctgcatcaagacatgacatgggttaaccactagcagttgtaaggataaagcatgaagcattcatgtgtcctgcttatgttctatgaaccatctgcaggtcataattcagaagaaaagtttggaacttctaatcctacaacataacaagcatacttttatcaactttggataataaattcttaagatgagtttttcattcaattatggttcagaactagaagattaaaaactttatccttcttgctgtagaaaaccattgcatcaccaggaaggggtatccttgc

SEQ ID NO: 10723 - DNA, 525 bp, Oryza sativa
  Intron number 2 from transcript LOC_Os11g07440.4 (locus LO C_Os11g07440) derived from phytozome v7.0 (chr-ID Chr11; p os 3738110 to 3738634 reverse strand)
atcaggtgaaatcggaatcctctgcttgttcatatggtttctgaaaactgaatctcgtttttatgttcttgttgtatgatgtattgaatgtttggtttatacatgttgaaatcagtacctgagtaatctggtgtgtttaggatctttgtagtgtttgatgcttagcctttgtttgatgttgatatatatgattatgtcgattatcgagcaatataatagctttactgaatatattatgtaggctgttaaatggtaactatatccatcatcactggcatggagtcctgcagagcaaattcgtttgttttactagcacttatgatgacctgttcagtttgattatctaagcagtatggctttgaaaactttgcttgctttctagctaggattcttctgcatgcttgttttttcaatgtttttttccccctgaatcaaatgaatagttcagttatgcttcacctctttcctgatgttatccttacaatggcaggtttttgtgcgagatttttttccaagtgcattggc

SEQ ID NO: 10724 - DNA, 369 bp, Oryza sativa
  Intron number 1 from transcript LOC_Os11g15510.1 (locus LO C_Os11g15510) derived from phytozome v7.0 (chr-ID Chr11; p os 8779529 to 8779897 reverse strand)
gtgcttcagacaaggagtggcattatactccggttcatcagccatgtctttatgattgcggcatttgtgcttttcctaattgcaagcaacaaacattagtacaaaagagttgacattgcgatcacctatgtattattcatcggtggctttgttctcgatgtttgctccttcttcctcgttgcgatgtcaccatggacatgggcatttttcagagctcaaaactgtaataggctagtccacatatcttggctaattctgtgtagttgtattggttggccggagaagaagccactgtggtcgagttccatgggatagtacaacttcttgagctcctccataggatttgatgagtcaaggtcatcatccaag

SEQ ID NO: 10725 - DNA, 769 bp, Oryza sativa
  Intron number 1 from transcript LOC_Os11g43620.1 (locus LO C_Os11g43620) derived from phytozome v7.0 (chr-ID Chr11; p os 25841576 to 25842344)
gcggtaataccctctaatctctccctctctcgctctcgatatttcgtcgcgtgatttggtgtcggctgttccggtagtttctggttcgcgtggtagatcgctgtaggctgaaatgtaataaggggcataataattcagctcaatattgtgataaatagttgaagaaatcgacaaactcgccgctttacatcaggattggctgagctttgactagaattggagcttgagaaattagctaatatatagggcttttttttttttttgcggggagctaatatatagggctttaacatagtcaaacaaagtcagcagtgtgtttttatactgcatggtatacttaatccggaagaaatttggcttgatacggacattgcatactgtgcttgattatttagtcctttttttttccttctgattttcttgatggtgaattggtgattattcaattgtattcagttccaagtggtgcctccgcgtatttagtatctttacgccatgttgttgatgtcttgtttaattgagcccaatgttgttgatagcttgatattgtgccatccaatgaaataatgaaaataggaatattgtgctgtgcatgctattcctgtgttccatgctggcaaactgccatgcgcatacaatgtacacattgaatttgcttgtaacagatggaatttcgttctttttatacatctttcctgttctgctcttaatggatggattgtttcttaatgcagactgttccagttaacccaaaacctttcttgaacaa

SEQ ID NO: 10726 - DNA, 544 bp, Oryza sativa
  Intron number 1 from transcript LOC_Os12g16120.1 (locus LO C_Os12g16120) derived from phytozome v7.0 (chr-ID Chr12; p os 9203690 to 9204233 reverse strand)
ctccaaagtaagcaggagtagtgtaataaatctctgtgtctttaacttgtgtgataactagatgataccctgtgcattgctgtgggatttcaaaggattcaatcaaaaaaacttcaaacgttttgcaattcaatgaactataaccatggaagagaaaaaaaagggaagataggtatacacacatcacagtatcttgtattcttttgatgcgcaatacagaaatatggacaaaataaactgtgacataaacaatccattttgctagaaagcaaaattttatatcatagaaaaatatccaaattgtacagttattaagaattgggaataaaataatggctgtatgagcatcattgaacaccgtaagaaggcttctgttataaaacatggtagcaacaaataaaacattgccagaggtagaaagggaaaatactcattaaataaatcaacagacgaacagcaaccacatgcttgcttgctttgttgcttgccaaaatgaatgcaatgtgcaaaaatgtagctcgccactcacgtactcttaaaatca

SEQ ID NO: 10727 - DNA, 721 bp, Oryza sativa
  Intron number 2 from transcript LOC_Os11g48090.2 (locus LO C_Os11g48090) derived from phytozome v7.0 (chr-ID Chr11; p os 28476204 to 28476924 reverse strand)
acatccaaggtcaccgctaatcatgcatattctgcaatatgtgctatccctttgattcataaacgttcctcggatgagatcaagtgattaacccttctgtgtaatacataaatgggaggcaggggtttctagctcaccatatctaagtgcagttgaattaaattatagcaagtacaacaattttcgggggttagattggcatctcctgctccgtttttctcattgatgaatattttatcactgtctatattacatcacaaatactaattgttataaatccataggtactttcatacaaataatacaaaaccacatccctctttagtctttaatttttgccgggattcataatatttttgccgggactatttagtctttaatttacatgaagtctaattatcaccttacactatgatgaaacaaatcaactatgcctatataaatatgctgctaatgtcattatgtatcttcacttgcattaatttacatgaagtctaattatcaccttacactatgatgaaacaaagcaactatgcctatataaataggctgctaatgtcattatgtatcttcacttgcattatgatcagcagtggccaccttttcctttgtggtgctagtgctctgttatttcctcatattacaaattatcctttcattttctcacttaaattcatgtttctcagggcaaattagtgcactgattgatcgtcaagaggag

SEQ ID NO: 10728 - DNA, 568 bp, Oryza sativa
  Intron number 7 from transcript LOC_Os09g08390.3 (locus LO C_Os09g08390) derived from phytozome v7.0 (chr-ID Chr9; po s 4350108 to 4350675 reverse strand)
cggggctgaagctttctgccttgaaccaaataaaggtaggctgtctttcgcatttgctaaaatcttctctctttccggtgtaacctctcagatatgcaagataactgacagtgggcttattttgtatgtggtaaaatgtttgatgtcaattcaaatttgaattcaagtgtcataaatcataaaaagagactctgtggtgcaaggggtcataaatcatgaacatgcctagaatcgagttaattggctttctgatctgcctaatacctaagagcagcttgtaatggattaattaaagtaatgcatttgatctccctcattttgttatctattctgcaactggatgtggatcacagattaatagtatcttctatgctgctgccaaactacttcattgtttagattatggaaagctaacaatattggtttattcattatactgatagcttaactttatgtgtgatgtttttggtttcaaggtttttgtatgctgaccttatgctataccaggctttcagttttcagtgaaaataaacttttcaatatgcttatcgacttcttcatgatgcag

SEQ ID NO: 10729 - DNA, 474 bp, Oryza sativa
  Intron number 3 from transcript LOC_Os09g19550.1 (locus LO C_Os09g19550) derived from phytozome v7.0 (chr-ID Chr9; po s 11700118 to 11700591)
tcgattcttcaggttttgttgttttccttaagttggtatttgtcttccatccttggtactagtaaacaaagaatcctcctatgaatttggcaagaatttgttataagaacagtaaataatgtgacaagaattaatggcacattaacattttctgaactgattatcttcagggtttgaactaaatttgtgcttgtcttgtactcatgtggtgttgattaaaatgtagctgaaaatttggacgaggcgtacttccaaaccaccgaagaatcggaggagttcagaagagagtacgaaatgcggcgaaccaaacaggcaagtttgtgcctgtccatggaaccgaatattctcttgatcaaacacatttctggactgaactcgcatatcaaaataaatcacctgaaaacacgattcagtttattcatttcacttttaaaagaacttgtgacagctgagctgaaaattttaatgcacagg

SEQ ID NO: 10730 - DNA, 686 bp, Oryza sativa
  Intron number 1 from transcript LOC_Os10g26680.2 (locus LO C_Os10g26680) derived from phytozome v7.0 (chr-ID Chr10; p os 13863036 to 13863721 reverse strand)
gggacaacaccgccacccgcatcaagcactcccaggttagtacgctcgcctcctgctcgatgaaatgccaaactcggagatggccttgaacaattttagtgattctcttcccgattattgacaggtcccgagaaattgttggtgtatgtagcatgcgttgcgtaaattatttggagagcttttagaatggtttgtttgtttgattcgttcatcccgtcattggctatagctaggatggtgaggcactgacgcattaagaaatgtctggtgtgcgttttatttatgtatatccctgtgtactgagcacactggtttcggatgacacccccatatcgatccatttggagtatgttaatatgaatggataggtggtttgagcaaattgtatgttaaattattgtacctctgtagtttattatgtgtttatgaggaaggggtaggtgcagagaacttccaactgaggtttacaagacttcttctccaaaagcaatgaaaggaactttacatttgagcttgttagaaaaacatttgacgttttagtagacgagtccgtaactgccccctaattttgactgcagatgttaagtgctgtgtactttgaatagttatgcttatctttttaatttaatcattctgtccttttctcttgtaaagtcgtccagggttattgggacaggaacgtttgg

SEQ ID NO: 10731 - DNA, 664 bp, Oryza sativa
  Intron number 3 from transcript LOC_Os08g02950.2 (locus LO C_Os08g02950) derived from phytozome v7.0 (chr-ID Chr8; po s 1283128 to 1283791 reverse strand)
cctccacaacttctggtacttttgccaattttcctagctacttttgatttatctcaaaattctgattggtgcttattcctgtattccttttaagcaatggctgcttctttgagtggttaagaaggtcttcagctaattcgcgtgataaaagttagagtgctgcctgtccacaatgtaggacgacagtgcaattagttggtgggaatcacttcctacataatattgaagaggtgtgatagttgggtgtgatgacttaactcctcaatactgtttaagtgctacatattgtacagctgagatgtttatttatagttctgcttttgtaggctatactgtaagttttttcatcgctacagcggtctgatgaggagattgcattgttggagtcatatgccccggtcaagacaaatattgtgagttcaaaatcttactaagaaattgttgattcccaccattttctcaatggattgtatcaagtgttgtgccagtctcatatttgccagcactgatatttgtccctgttatctgccataaaatcgaatattgttttaaaatcatcatctttttttcaacttgtaaaccttattttttttcctacaaactttgcccatgttactgtattactgtttaatcaacagctaatcaaggccatctacaccatccg

SEQ ID NO: 10732 - DNA, 406 bp, Oryza sativa
  Intron number 3 from transcript LOC_Os11g06910.3 (locus LO C_Os11g06910) derived from phytozome v7.0 (chr-ID Chr11; p os 3388086 to 3388491 reverse strand)
gcagcatacaaaggttgcagaagaggctgttgcaggtaatctttcttttcactatgattttagacattttgcattattgtgatcccatgcatttattgagtctgtggcttcccttcattattcaaaattaattttatatgtgaggacatcaatagaactaagaaagaggaaactcattcaaatagttctttggcaaagttaaaatagtagtatcaaccaataattctgtttgtctgcacatgcgtgttagtgtgtgtggagtgagtgtgtcgtctgtctcctcagttgtaccttctcaagaaaatcatagttttatttattccaatatggaaccaaattcatattgaactttatttttgacttacttgtaggttgggaacaagctgaagctgaagttagtaccctg

SEQ ID NO: 10733 - DNA, 429 bp, Oryza sativa
  Intron number 1 from transcript LOC_Os10g36000.2 (locus LO C_Os10g36000) derived from phytozome v7.0 (chr-ID Chr10; p os 19174666 to 19175094 reverse strand)
accgtcgtcggtaagtaaggtcaccatgaaaaccatgttttccattgacaaccttgcttattactagttttgttgctgtaataatccaccaagcagagaacatgtttttgttgctctgagctattccaggtgcaacttgtgaaatctcttgttaatttcttcagaaagaaacatgatgaacatatttcaccagagtgtataatatatgaagaaactaattagcaccaacatctctgcaactaccagttaatttgaatctgttaatatgaaccagatagcactatgaagtctgaatcttttcttcttgtttttgaatgctaccctctgaatgtttcatgtttacacaaggagatgtgacatatagtcaggaaaacttctaggacaaaattcatccaaaatatcaaaattgttcccttttttttttgccag

SEQ ID NO: 10734 - DNA, 690 bp, Oryza sativa
  Intron number 1 from transcript LOC_Os12g37530.2 (locus LO C_Os12g37530) derived from phytozome v7.0 (chr-ID Chr12; p os 23000980 to 23001669 reverse strand)
agctcatctcctccccacgccgccccgccgctcaggtgagtggctgcctgcctgccttgcttgcttgctagttactactgtcttagcgtagcctggatgcgtcagttaagttttatgcaacagcacgcaatatggtggggattttgcctgagaatttttgttccggggaagattggtggttcggaaagttctttcttgagattcatgtgttgttgttgttggtggtggtgaagaagagataggagttgggataggttgcgcttctttgggagctatgaagtgcagtggtgttggtattttgatttttttttcttatcattggtttgttcagacctttgtgatggtgaccttatgatatagggtaaaattagctaataacaagtgtggttggtatgtctgtgattggtcactcatgctgcttaacagatttagttttaagtgttgattgtgaatgtgaatcagttcagcattaaaccctttattggattttgatgtatgttaggttagtggactgagcttgtgacaatgtatgttgcttttgttctggtcttgtgatgattaaaccagcgtggaaatcgcaaaacaatgtttacttggagtgcctcttaattttaggatttggcaaaatatcaatgactggttactattttgccaggttaagcaattttgtcccaaggtgttacatcacaa

SEQ ID NO: 10735 - DNA, 894 bp, Oryza sativa
  Intron number 1 from transcript LOC_Os11g08440.1 (locus LO C_Os11g08440) derived from phytozome v7.0 (chr-ID Chr11; p os 4439316 to 4440209)
tcaggccgcgctcaaccccaccaacaccatcttcggtcagaaaaacattcactcctttatactgctatgctagcttcttgttatttttcttccatcttccaagaactagcacgaactagtactgctatgtgcagggcctctgaatttctctcgctgcctgttcatgcttctgcggttttttttttaccttttgttaatggaatgctccggccaagaaaaaccttccttttaaactaaggttgtgtttggtttggtggatgaggttggatgtgagatgcccgtgcagatttttcatatgttcgattaatttgtgggcttgcaaaagatatggcggccgaaaaagaattactacctgaatataccagatgaatggatctggctgattttttttccaaattattagtattgcttatattgtacacacatctactcgatccacttcaaaaccaggcctattttgatttcggtcatttcggttcttccaaaattcctgaaatttcggtcttttcggcacttctttggtcagaaattttaaaagagggtgtgtttagttcacgccgaaattggaagtttagttgaaattgaaatgatacgatggaaaagttgaaagtttgtgtgtgtacaaaagttttgatgtgatggaaaaattgaaagtttgaagaaaaaatttggatctaaactcggccaaagtttaactgaatttgactaattgaccaaaaatagctcctatcttttctatactataaacattataaattactggaactaggctatttatgtttcactcaattgcttaacatgacttaaattattgatttatgtttcacccaaattcttaacatgacttgaattattgcagaagtgaagcgactgatcggccgccggttcagcgat

SEQ ID NO: 10736 - DNA, 945 bp, Oryza sativa
  Intron number 3 from transcript LOC_Os11g34300.3 (locus LO C_Os11g34300) derived from phytozome v7.0 (chr-ID Chr11; p os 19636460 to 19637404 reverse strand)
ggaagaaacgcaaaagtcagcctggtgggactgaggtgtctctcactttcaaatatgttttattgtgaagtatttgatttccatgaagttcattttccatcaattatgatactgcaatttgccttttgagatatcatttctaaactactgatattaagcatatttctgctcctttgaactaataatacttttttattaattctctttttatttctagtactactccctccgtttcacaatgtaagtcattctagcatttctcacattcatattgatgtcaatgaatctagacatatatatctgtctagattcattaacatcaatatgaatataggaaatgctaaaatgacttacattgtgaaacggaggaagtacatgatttggcagttatgttcatttttcatcatacatgtggaaaatgggaacattctatggtccatatggacctttcttctctttttacaatataagtataacacttaaagttcttgaccttttgttgtatgatgatgactatttcattttctcaacatttctaaaattgtaatgatgaattttaggaaatcttgctgcttcggtgcttcgtttagttctttacacaacaatccgatttctggactacatgatgtttgcttaccagcaaaaataatctagctgtgtaagaattgttagtatggataaatttagaacacatgttaaatttaaattggtagtttggaactatgaactaatgttttacattgtgcgaagagaattcgttacctacctattatggttatggagactgacaaacttaacattttgaagctttcagctatatttggcaagcatgtggtagatcattttatctatcaagttgttttgtggtatatttgtaaacataatgacaactctgccctggttgatccaggagaaagaaagaaaatcatctgagagtctcttcat

SEQ ID NO: 10737 - DNA, 728 bp, Oryza sativa
  Intron number 1 from transcript LOC_Os12g36100.2 (locus LO C_Os12g36100) derived from phytozome v7.0 (chr-ID Chr12; p os 22093488 to 22094215)
gacgtggcgtcacgcagggccgaggaggaaggtgggttctctctctcgggcggcatttcgtagaacactctgggtgtgtgtgtgggtgggtgatttcttgatttgtttgctctgctgttcttggttgacccgtttcgggtttcagcttcattttttgggttttttatggtttagatggttgatcgaactggggagaatctcgtattgggggctctgatggttttgattttgacgtttcaacttttttttggtcagattcagtttagtatcgattcggctttttcaaattttgttggtgcgattcgggttgatgatttagttgggtggtggtgattaaaggtttcatttaatagcctcgcttgaaattgagctagtgttgagctcacagttgtgtcggtttcacgagatctttgtgtggggagaagggtttatgctttatgcctttcttggttcagactaagaagtggtagctgtaccatactggtataccttgatgtgtccagataatagtagcactatgaaaattagtatacattgatgtgtccagattataatgccactgaaaattatgtagtgatgtaatgaattatgaatcgtgttatcataattttgtggtaagcaaaaatgttgggcatgtttaggacacttcttagcagagatttttagcagtatttacagtacatctagtcagtgtgagatgatggtttactgggttgacaattgcagca

SEQ ID NO: 10738 - DNA, 1005 bp, Oryza sativa
  Intron number 1 from transcript LOC_Os10g39200.4 (locus LO C_Os10g39200) derived from phytozome v7.0 (chr-ID Chr10; p os 20861763 to 20862767 reverse strand)
cgccgctgccacccccccgccgccggcgtataaaggtactcgcgtttgcctaatttagaggtcgattcctagtggatatgtggtcgatcgttgcgagaatgcgttgatagggtcagatgttactgtctcgtggttcgtggtctgtataggattcgtttgatccgctcatgatgctggtgttacttgcataagccaaactttttacgcttttggatacttgtatgcatgtgtggttcatcctatttagcttattatggagattttgtgttccagggtttgtcatatcaagtgatcagagcgaattaaactttttacactattgaatacctgtgtgcatgtgtggttcatcctatttagctccttatggagattttgtgttccagggtttgtcatataagtgatcaaagtgaattaatttctattttatattttgggataaataattgaaggcatctagctcctcgactagaatctgttttttcatttatgtgcatgagaggcctatctagactagccacatatgcacaaattataagaggcatgcttgcaaatatctgttgtgcgtaactactagctagatgattgctgtctcaaaatggaatttcgtgtcaagctgagaacacatccgagcaatggctggatataatgaattaagctgtttctggcatctgttttctcctcttcttctctagatttcttctttgtttatactttctgtccttttctttttagtgtttctttttttttttgcctcttggtaatataactctttgactctccagtaatgcaatggacataaggcagactctcctctgccttttgcgtaaaaaacacacacaatgagcttatgtgtacataagctctatctttgttaataggagcttttggtgagtgtataatttgattgggatattgctgcctggcttaaccaaagcatgccatgcctaataattttttggtgacttcaaacatattatataggtgaagctcctgaaactgcaccat

SEQ ID NO: 10739 - DNA, 1001 bp, Oryza sativa
  Intron number 2 from transcript LOC_Os12g01620.1 (locus LO C_Os12g01620) derived from phytozome v7.0 (chr-ID Chr12; p os 374739 to 375739 reverse strand)
aattctcctccaatatcttctctgcactcagaagggtatgtcccgccccacccacctcaaacaatcccccccctgcccctctgacctctgaagactagtgttgaataggtttacccccaacttgaattagagtcagggtacttttcactagagatttttcatgctacaagggtacttcccactacagattttacattgaacagggttagatccctgctctgctatagaggtttggacaattggaaatgcttgccatcatttggaaaagcaggaaaagaacttggtgcagataattgggaaggcttaccggttcctacattggtattgaaagtagtagtacaagcatcagatacttttttgagtgcagtgtatcaaaagttcaccaagttatacaagtccaactgaacttacaattgaaattatattcaattacttggtgcatgcgcgtgtgttgttaagaagttggaatagcacaaactttcctgtgacgtgttcctttccttgctttggagctctaggaatcagccctgtaaaatctggaagcaacaaagtcacagatcactactaaacctagaagaaaagagtaattaacttaaaagatcttatgctattgtgtgttaaagactcattaagtttgattacgcaatatccacttgcacatagcataggtagatccatttactgtcaatgaaaggtttcccttgagagttgcaagccaaacaaaatgccatctcgttttgatgtagtgccccttctctttcaaatgaagaactgctgtctctccagcatggaaatcattcatatcaactctgctttgttggcctgtgtctatgttgtaacttcagcttgtgagtctctgacatctgcagtttgtgaaaccgatggcagtttcatacatgagacttgtattattttccatacaccaattgaacaaataactgatcaatcaaatttctccaattgcattggatgcagggagcgtgacttcttcatcattatcc

SEQ ID NO: 10740 - DNA, 822 bp, Oryza sativa
  Intron number 1 from transcript LOC_Os12g06670.1 (locus LO C_Os12g06670) derived from phytozome v7.0 (chr-ID Chr12; p os 3241400 to 3242221 reverse strand)
cggcttccacataggtgatttggtttgattggttaatttctgctcctcctgttcgtttgcttcctctcgttgaaaccctgttcggtgtcgcggctcacgtaggtggtggaatcgttttgggtttgggtgctctcatgaagcttctgggtgatgcatgtgtaactggtgtgaaattgtagttgcggtgacattccagttaagttttatctggtgcttggtttggtaggaatgctgtttgagtcgaccaaggaattagaattcagtatggttgaattcagtgcttttcttctactgtgatgaatggaacagtgcgtgatttattgagtagagctggatctcttcgatttttgactggtatgttctgggattgtagttaagcttggaattgaattagtgattaacccatttatgtttgttttggggtgggatcactcacttccaaaaagtacttttatttggttctgattccgaattcttatccattggcttgactaatagcccattctgattctggaggcaatggtttttttcctatacttgcatagattttttttaaatggaatgattggttcagccgtggagttgtccttgtagctatcctgtgtaattgcttgtttggataatcctgtgtagttatcctgagtatgttttatggtgtgtcataactgaaaaaggaaggtggtgtaactgcaatcgtcttttttctggatttagtattgataggctattatctattccattattctgccctttgtgcaatgataaagttaaatattggttcctgttttgttttctcactatgtagctatcaactggatatca

SEQ ID NO: 10741 - DNA, 688 bp, Oryza sativa
  Intron number 2 from transcript LOC_Os10g21740.1 (locus LO C_Os10g21740) derived from phytozome v7.0 (chr-ID Chr10; p os 11087913 to 11088600)
cgagcccaacttacaaaaagttggatagagttttggtaagtaccgagtgggaaataagaaatccggacagtacatgctttctgtagcgatcttttggatcacacaccattggtgctagacacaggaaaagggacacatagaaatgctcaacctttgtttgaatttcaattgggatggttattaagggatgactttcaaaatcttttggtagaaatttggtcaaaggatattcaaggggcaacgaatatagaaagatgacaaaataagatatgcaggcttcgtcaattcctgagaggatgggtggagaatttaagtagtgcatatacaaaaagagaaagctcaacttatagcaaaggcagatgagttggacaaattagctgatcttgactagtcaagaactggatctaaaaaaatcatgtaaaaatgccttagcccagttgttaagagaagaagaagctaaatagtatcaatgaacaaaaacaaaaagaatagtacaaggggacaggagcaccaaatactaccatatcatcgcgaatggagaacacggagagacagatttttcaattagaacaagaagaaggggtgattaagggagatgcacaactcaagaaatacgctaccaattactataaggatctttttggagctccggatgtaaattgtttctccatgtttgaatcccaaaagg

SEQ ID NO: 10742 - DNA, 673 bp, Oryza sativa
  Intron number 4 from transcript LOC_Os11g40249.1 (locus LO C_Os11g40249) derived from phytozome v7.0 (chr-ID Chr11; p os 23540499 to 23541171)
ggcgcagattccttctgggccggcgagccatccaggtgcggctcctgatctactgaaacaatgtacctactgagtactgattactgtactgccatggtatctccgcatattggagagaaaagttttggatgtgatctcaaaatgatgctggctagtattatgattcatagtttgatttttatctgcgcttatctgcaatttagtgcagcctgtaggatagttgggtttgtagtttgtctctctttccagaaatgcttgcagaatccatacacagtttgggaaccacaagcatgtggcaataaggcatttgacacccaaatgatttgtgcaaccaagaatgtggcaaccatagacatccaaacaaaattcttgaacgaaaacctgaggagaattgtgaaacattcatggctgcagtattactgtcgacagaacataaacgctgtcgaaagataaactgaacacaaaaactctctttttttttccttgaacataaatactctgcaaacaaaattgaacataagcacaatgtacaaagaaagttatatatttgtaaagtacgttgctgcacgcattcgggagacggaagatatcacactgcatgagttgaataatcttctagttttttcttgcttttgcagacaaggctttcacagtttcactcaagtactcaacc

SEQ ID NO: 10743 - DNA, 766 bp, Oryza sativa
  Intron number 2 from transcript LOC_Os10g02920.1 (locus LO C_Os10g02920) derived from phytozome v7.0 (chr-ID Chr10; p os 1189686 to 1190451 reverse strand)
gtgattggccttgtcatctgcacgggagaaggtaaattaattattatcagctaatgaactagtaatccacgggcatagggagtaggagtatacattactatctccttgtcaaaagtataaaacctatttcattatttgattttttccaaaagtctaagtcctatttgtagttattatgtgctaaattaaattgttgatagaaacccaagaagctattttagtgcttattgattgcatgctcattggttttgtcacatagaaacaaattaattgcttcttggttttggtgaaaaaagaaataggacttagccttttggaaggagggagtatttttgaggttggcacgggaattaaaaaaatactacctccatcccaaaataattgtatttctaggattcaaaattcgtcccaaaataattgtaattctagagtactaattgccccatcaatcatatctcattcaaatttctccctattttaccctcaaccatcttcccactctcacataaacaccatttaatgaggggcaccgtagtctttctttcaaaccttaatatatgctaaataacatagaattgcaattattttgggacggaggtagtagatgagaataattagatgaagtgtgtgattcgttgagaagacaaagtaaatgaaagaaaatggctgtgattgatcgagaggagatatgtgaagaaatagctttagtagtactgattagctgtgcagtgatggaagtacttcatgatggttgctcgcagcgata

SEQ ID NO: 10744 - DNA, 1063 bp, Oryza sativa
  Intron number 1 from transcript LOC_Os11g09740.1 (locus LO C_Os11g09740) derived from phytozome v7.0 (chr-ID Chr11; p os 5194537 to 5195599 reverse strand)
cgcggatccgtcaccaagggcagcgggggcagccggtccggtgcccgccatcccctccttatcgccgctccccgccctccttactgcccctccccccttctcaccactgcggcggcgagggaggctctgccgcctcaggtggccccgccccgcgtggatctggcgcggcgggggcggccgatccggcgcggcaggcggcaggcggtgggggtggccgatccggtggcggcgggaggcggaggcggccgatccgttgccggcgacgacagcgagcggcgggggcgacggatccagtgccggcgacaggaacaggggcaggtggcggcgggagcggccgacgagcttgggtggcggtgccgccgcctatggctagggtttctttttttggcgattttttctcatatgtgacgggctataatttagacccgattaagatgagagtcatccatgatagactatagtttaggcccgtttgagatgaaagtcatccgtgacgggcttttgtgttggcccgattgagatgtgtatcatccgtaacggccggatgcccgattgcagcggcggatctaggatttaggttatgggtggtccgacccaatttttttttaaacaccgtaaatctaacaatgctaatatatagataatataatagattataagtgtacccatgatttattaataaaacaacctaaaatatataaaattggcaattgagtaaaattttaacttaaagaaacttatatgccgataaaagtttaaagaagattaccatgctaggagtactctttatttttgtcgggtcatcgccttctaatgaccacgaaaatgtttattatatcttctcatccacttcgaagaatacatcgctcgctgctgcctcgctgtccatgaggccctggcacctgacggcctgacattgtgaggatcaaagcacacatcaaactttcacctgatacacatacggtaataataaaactatacaaataaaactttaaagttgtgacagaccccgtcggttgctgtcgcagccgagggccgaggcgcaggcggccgagcaccgctg

SEQ ID NO: 10745 - DNA, 1033 bp, Oryza sativa
  Intron number 1 from transcript LOC_Os09g14520.1 (locus LO C_Os09g14520) derived from phytozome v7.0 (chr-ID Chr9; po s 8590850 to 8591882 reverse strand)
tccatctcgcatctgctgcctcctaatttgcttcggttcgtcctctctctgttcctgatctgaagctgctgtccttttcttttcttttcttttcttttttctgtcactgctgtcgttttgggttctttcttgttgaggcgagctcgaggaaaaaaaatgaaaatctgtggggaaattccgtggaatcgggggggttcgtagggtttcttggatgggttctttttgccgaaaaataggatcttttgccgccattctttcttgtgggttgatagtttccttttttctctttgctattgtgcggcttgtcggcagtggtaaaatgtgccaattttggagattttctgcggtttccaatggctgtaactagtgggttattctttctacagttctgattgatgcaatgaagggaacaaaaccgaattgtgtgcattaatttgagtagttggggtttgtgttcatcttggtgtttaatactgtctaccagtacaagatgagttatttggatcttcttcacaagggaaatgaagtgattagtgtggagttgttgttttgttacacggcatcgctgtgttcattcatgtggatgtgagctctagacagaaaaaatttcttctcaactctgcagctgccaagcaatatgacatgttctgatttacttttgattttaatgccttagatttgctagtcctacatgcagaagcaaagtgaaatagcatggcccatcctaaatttattttatcaatcagttgtaaacaatctttatctaattcgcatatattggatatcttgagagtttgcagtagccaggtagtcatttcacatcatcacatgtccttgcctgtttataattactagtcaagaatgacttacttgaaagcatatacatatactcttgtttttattttctttaggagccagatcgaccacaaaatacttggaaaatatagcacattcaaacatcctgcattagtaattgcaggtttacgaatattttgctgatatttacgcaattgcaggttttcactctactctt

SEQ ID NO: 10746 - DNA, 912 bp, Oryza sativa
  Intron number 1 from transcript LOC_Os12g38430.1 (locus LO C_Os12g38430) derived from phytozome v7.0 (chr-ID Chr12; p os 23558988 to 23559899 reverse strand)
gcggcggcgcacggcttctccgggagctctacgcggtaactctcgccgcgctctcgctctctctctccaccccatcctctattcacgcttgttcccgtgcgtgttcgtgtggtggtcatgcggtttccgcttgtcgccgcaaaccctagattcagaggtggctcggatgggtcgcatgattggctcgcgttgattcgggtagcttgacctaattggttatttagtggtaaatatgtgaattgactgaattcctttggtttggggatgctggttggtggttatttattcgtacgcacaggtttaagggttagatttatatataacttagatgtggagaacgtatagcttcgtttgttgacgttctgtacgtgggttagttttggagtgcatgagaaacttgcgttagagatttccgttgggaggggaatattttttttatctaatatatcgatcattctcttactcctagatatattgtattgttttttcctatggataaagtagtacgggaatgtcatggcatgaaaatcgtgtttggcaatttggcatgctactactatgattgtaaactttggttagttttgcaatgcatgaggaacttgctttacgcatatctgatgacctgaatgtatataaactgtgcggtgtgttaaagtaagattttaattgacgtagttttttttttctggacttgaaaagctctgcaatgtagtcttatgcttgcaatagttggcccaacatattttctgattatatttccgcttttctctttgactctacacttaacactttcaagggcagtaattttctaaatcttgtgcctatacgctaattgattcgctaatttctctcattttgttccatccgtcttctttctgttaacattttctgttatgtgcttcagacaaaaca

SEQ ID NO: 10747 - DNA, 351 bp, Oryza sativa
  Intron number 3 from transcript LOC_Os11g01880.1 (locus LO C_Os11g01880) derived from phytozome v7.0 (chr-ID Chr11; p os 482435 to 482785 reverse strand)
ttttgcactctcttctggtaataatcattttcttttccttgcttgttaaatttgtctagtcttctacaatttggtttcctcgcatatggcataatcagttcagttaatgtgtcattactcatcagcatctgagtatatctcctgttattacttttcagggagttatatagacaatagagctcagtatttgatcttgaacaattttttgattgacttatggagaccaacattatgcaactaaattatcttttgaaaaaaaaagtattgcgagctgtactttaccttatgtaccataagagttgaacagtggatcacaattactccattttactttgtagcattctgacttgg

SEQ ID NO: 10748 - DNA, 998 bp, Oryza sativa
  Intron number 1 from transcript LOC_Os10g42190.2 (locus LO C_Os10g42190) derived from phytozome v7.0 (chr-ID Chr10; p os 22619887 to 22620884)
tctctgcaggtaatttgctttcaagtacagtattattttgtcggaatcacgaaatcctaaaaatctttgtactactatatatccatgtgtgatggtttcgatgctgccgtgttctatggacccgacataattttgcagtatctgtttttttttccggttaaatttcactaccttgcacgaattggatgctcatgtcatgcatatgggcgtaatatttccattacgatgtggttgctaccttttatatagaaagaatcactagaaataattgtcaactgacgtaatggcgtactgatttgttagtgttgctttgattttcttcaactagttgccatttaattgcacactgtttataaattgcctattcttgtttcactagtactataattggaaacatagaggagcggtctcgtagtttgtgatgattctgtatttctgcttgttggtttagcaaattacacgattgatgtctacaaggtaccagtgtaccgcaactgatttttcacctttcgctatgagttagcgtttgatgtgaacaaccacctctgcagccaattgtcacatcacatccatttcttcaaaggaatttcgtgctattttgtgatttcttttttcttgacataatgcattagtcgtttgttggtcccagctttaatttttaattttcttgcggtagttggaggaccattcccttgttggtcactgctggacctggtgtatcatttgtctcttgtgcctggtgatctgatattgttaattcatttgttaccagttaggcaatagcataattatttgtctgaatacgatatgaatcatgagcaattagtcattttgctttgttgactttggaggtgctatctaatgtaggccttaatcatgcttaggcaagtagtgatcatcaaatttgtaacggtaccataaatgtgatcagcatttttgagatgtcagtacttgtgttatcctaagttccacttgtcaatatccctgcaggtactgac

SEQ ID NO: 10749 - DNA, 930 bp, Oryza sativa
  Intron number 2 from transcript LOC_Os11g39670.1 (locus LO C_Os11g39670) derived from phytozome v7.0 (chr-ID Chr11; p os 23162542 to 23163471)
tccagctctacgacgagtacctcgccttgcagaaggtacaggagcctgttaattaattgtcatttgctactgctgctgtttgtagtttctgagatgctgctcttgcgtgactgcctgcaatacaagttggatggataagatttaagcttgcgctgtaaaattataatgcaaagctcgtgattcgcaagacttttaaactgttggataagacttttatggagcttgtcattgactcattgctgctgctgctgtttgtagtttctgattctgctcttgcgtgactgcctgcaatagaagttggatgaattaagattaagcttgcactgtgaaattatattgctttagtttgtgatttccaagagttcaataactgttcgagatgattgatagaaaaatttgcaactttcgtgtgaacttagacatgaactggttcttaactggcctattcatatggttaattcattggcatgtgttatgttactttctgactattagtgagttgtgcctattgcaaccttgtaattttgggggtagcaaaatattaggaagaaccaaaaattgaaactagaaactactctttttggccagtagtcatggctattaattggttatttcgttgattatattggatcactgattgattctgctttactgatcttgtgaactcaaaattactcatggcttcatggacttatccttgcctggacgacacttttgtttatggcgtaaatatgatactgtgttactgcgatttaacctattttggcatcaatgtctcattgttctaccgaagacacgtgtgtatctgcttgtgtgtatgcttgcagtgattgaacatagttggttatttaattctggactgagatatggtggcaacaattcctaattatgacagatggcaggaagttgaacggctccgagctgaaagaa

SEQ ID NO: 10750 - DNA, 720 bp, Oryza sativa
  Intron number 5 from transcript LOC_Os10g33420.1 (locus LO C_Os10g33420) derived from phytozome v7.0 (chr-ID Chr10; p os 17519513 to 17520232 reverse strand)
tgagacttccccggtcatggagaaccagttttcagtaatgctttcttcttctttctgctgttgctggttaatcaacttggtttatggtgatgcataattgaatttttggaccattagctagcttatctgaaggattttcttctgactgctgaaaatgctcctagcccctcactagtcactagtattatttttggggaaagtcttatgacatctacccttcactggtgtctcacatactcatattatggcaattcactaaatatgcgtcaaaaagaatcttttaagtgctatctttgttgttgcggctgtgctcaagtgtgaaatcaactgttgagtggagtgtttttggggacttttgttgagataaaaaggcacgactgtttccactgtttaatgtttgtggatggacgagttccatctgctgcttgtgacactttttgatgagtgttgtaatcagttagcaagttcttgtcaattcgccagctattacacacttatttttcctatcgatgtatataaacttccatggatgtgggccacccaatcaagcccatcaggggctccatacaagatttatgacagcaactgtttataaaatcttgaatcttttgacttagtactcccgagtcactatgcttgtttattttttttctcacaactaaggtgagagtcttgaactgacacatagtaccctgctgttctagatatttgtatctcgcg

SEQ ID NO: 10751 - DNA, 865 bp, Oryza sativa
  Intron number 1 from transcript LOC_Os12g01680.1 (locus LO C_Os12g01680) derived from phytozome v7.0 (chr-ID Chr12; p os 410425 to 411289)
agaccgtcgccaccatcatcggcaagcccgaggccgtacgctcctccccttttcctcttcttctctacccatacccaccctaggttttggcgtgcttcgttcttcatgctccattcctagcttgcagctatcttttggtggattggcaccttatagtggatttatcactcttccgtctactcgaggaggattagagtttaagtgcccccatcgatctttggcgtgtaactgttgaaattgggaattcgattctagtttaggtaggaactaagaacatctccaagtgcataaatgctcacctctcaactagtgtcaaatatggtgattttcacatgggaatacagccataggtccaccgacgaaactgggagagggcagaccaaagttcttattcttcttggaatttaggacttcctttacaaatttgctagttattttgagtagcgagcgcccccccccccctccccccccaaaaaaaaaaatcaaatactcaattttttgagtttttccatttgattcagcaaatagaaaattatcttttatgcataatctcaatgtatacatcagaaactaaaatgcttgtaagctgtgacatcttcaaccacttactccagattttactttttcaaagaacatgttgattcgatgtttgatgtatcagaaatagctagattttttgctagtgggctggaaaaatggcaaatatttgttgttacttcaatgtcagacttgtcttatgtaaaattgaaaattaacttcagtttatgttttggtcttctgttgacagcacaaaatgaagctattttgcatcacctttgttgttgacatactaatcagagtgcttaatgctttttctttccacagt

SEQ ID NO: 10752 - DNA, 945 bp, Oryza sativa
  Intron number 4 from transcript LOC_Os09g31478.1 (locus LO C_Os09g31478) derived from phytozome v7.0 (chr-ID Chr9; po s 18979379 to 18980323 reverse strand)
gctaagaggcctcattttgggttgctgttctgctggtaactaggagttcctctgctcttgtaaatcgacagcacatatcttttaaaattcatgcccttatagtagataaacatagtacaaatccttcacatacatatttattgtgtggatgtttgggcccatgtatgttagtgtggaaaactctttgctttatgaagtgctagcttctcatgcttatgcaaagctccacttatagttataaaactcttatatttattttctgttggttattcctctggagtttatagtactactacaaatcaatgtcaatctgagtatgcaacgcatcatgcaagtgtcattgtcaaaaacattacctcttcatggataaccaaatggaaaagctgagaatcaattgtatgtatacagtaagtcattaccagtaccagtccaatgatccaatcttaaggtgtcccagcatcccactaggccattattgacacaattcaaatcagccaatatgagtacaacagacaaggctgtctttatatttcagatggtatagatcaggtagtcctgttggaccattgtactagccataatactgataaccaaccacctctgctggacttgaaccgtacatgtaacaaaaaggagatcttaggacaagatcatgattgaacatgtcgaggatttataacattatttgtacaatattttctgccaacattgaatgggacactttagaggactaactgaacttggacagttacaccttactaagagtctgtagtcaattgatacttgataacattgaatgggacaatttagaggactaactgaacttgaataatcacaccttagaatactacaaccctcgttttgtttcttccggtgcctaacgttgatcatttcccttggttggatgcaggcaattggggcaatatttttctcatcatcattcct

SEQ ID NO: 10753 - DNA, 627 bp, Oryza sativa
  Intron number 2 from transcript LOC_Os08g45240.3 (locus LO C_Os08g45240) derived from phytozome v7.0 (chr-ID Chr8; po s 28404952 to 28405578 reverse strand)
gcaagggtatggaaaagtttcgacatactctctacttccactccaagatcaaggacattaagctagctgggggttttgaaaatttacctgaggtagccttaactgtagcgcaggtccttttgggtttttttcatttatttttactccaagtattgtgcgtggttagtgtcctatgtccagatttattggcatactggttctaccctttatgatgtcatacttaaataatggctttgcattggttgtcacttttaatgtttgatccatgtatgctgtataatgtattcccttcccaacaaattcataggatattgcaagggtttaggaggagcatttgacatatatctactttagataggatgtccagaaaaaaaaaagcctgataattttgccaaacagatatatgataaaatgcaattgtgaatattggagcatgtttaacaccctccaactataataactagctcaacccttcgcccaaaatccctcttccctccctccctgtgtttgttatgttttcttatgtacacagtagtacttattggtatttcttgaggctggccataatttgtacttttaccctttctttcaggttgttcgagataagagaactggcaaaacaaaagg

SEQ ID NO: 10754 - DNA, 798 bp, Oryza sativa
  Intron number 1 from transcript LOC_Os11g29210.1 (locus LO C_Os11g29210) derived from phytozome v7.0 (chr-ID Chr11; p os 16473339 to 16474136 reverse strand)
gcggtacgtttaatttctccaatcacttttgtttccctttgattttcatgtgctagatggagaactgatagtggtatgactgaatttgatgcttcagaaggcatgcctttattggatttatggatcaaagccaacttcgtatagttcagatttctagcttttctgcatgaaaattatatttgcagcagctcatttctactaccaatatataccaccgtaaaatttgcgttttgtgaaagtgtgttcttgcataattgtaaggggaaatggggtgcgttagattagaactagctattttgcatcaacttagtgaatctaatggaaggagatattcagagtatcaagaataaaactgttgaatagaacatggagagagggaacaccccttttgattagctgattattaatcctatgaatttcctagcttagctgatcccatgatatttatcccctttcttttttcgtcacaaggatgttatgttggacaggaggagctagctgttttacagtcttacaaatattgtagatttgcattacgaaagttatattctgcacctgtttttttaaatacttttatatcaaaatcttggatatggcaatgacacaattgccatctgcagttttatacatgtctgtatcagaagttaagatctcaaagtattaattttttttctaggcatatgctccatgtttcttctgaattagatgccaaattctcaccattcatgccaaaatactcaaatttaaacttatcatgtgacagggcaaaggaggagggcacatcccaaggtttggaga

SEQ ID NO: 10755 - DNA, 1063 bp, Oryza sativa
  Intron number 1 from transcript LOC_Os10g33330.1 (locus LO C_Os10g33330) derived from phytozome v7.0 (chr-ID Chr10; p os 17449106 to 17450168 reverse strand)
tggcaaaagttgggcaaccacaagatagacaactagtgagtgatcgtaaaacaagttccagctcagtacatgcccttgcacgtgtagactgtagattctcgtagcattggattccacctatacgtattccgccttggaaacagcgttattccagacctgcatgccgactagtgttaatcgggaattaattggccagtaattaactatatttaaaattgagtgattccccacgttttactccggaaaattactaagcaatttttaatatatattttcgacaatcgagttaagagtaaaaaaaagaacaaaataatgaaaagtgagggtttattagtacttatcataaaacaaataaaacaaacaaatcaaatgatactcgcgatttaatgtggaatattttgataagcatatgttaaatattataaaaatgatagatatatttgttaaaatattatgaaaatgatatgaggggtgatgattatgttgatttgtagaattaaataaattataaatgatattgtatgcttgtatgaggttaaatatatagttattgctagtggatgatgatataacatggttgcatattgagatttagaagttagtggacatcaactttatagtaatataggatcagagtaatagtactccttccgttcgtcccgttttaaaaaagttattttttactaataatcatactatccatatttatactaaatattatacctattatgttactaaatttatattctgaagtactttcatgctatgctaattttatattgaaaaaggtacgaattacccccctgaactattgtggtcgaccgaattacaccaccgaacctgaaccagacattgttcaccctgaacttttaataccggacgaattacccctctcgatccaatccagagcggttttgtcctacgtggcgtacacatggcaatccagtcagcattttctattttttttaaaaaatgtgggacccacatgtcatacagagtccctcttcctccctccctctctctctcagggcggtggcaggaggtgggcggcggcgcgaaaggc

SEQ ID NO: 10756 - DNA, 760 bp, Oryza sativa
  Intron number 2 from transcript LOC_Os11g46150.1 (locus LO C_Os11g46150) derived from phytozome v7.0 (chr-ID Chr11; p os 27474496 to 27475255 reverse strand)
attttttgcagggcaccccgcttccggagctcgtaagcggtgattgcggcggcggctgccaaaattggattgtgctgcctagccaccgccgctctaggcaaggtgaaaaaggaggccgggggagagagagataagagagagagggaggaaggaggaagaagggaaggagagggaggatgacatgtggggcctacatgtcggtgggtcctttttctttgtgtgtgtgaatgacatgtcggtcctacaaacttttgtttttttgtttttactctaattccccataagcgacacgtcgacaacacgtgggacgaagagtagatcaacaccgtcacgtcagccaaaaccgcttgcaaatagggatggcaatttccccgtcgggtgcggggcctggcggatccccgcccatacggggccgaggtcggggccaaatatctacctgtgggtcctgcggggcggggccccgacttcatacgggggcgggggcggggcgacatcttcacccgcgggctccgaagtattgagcaaaggcagtcagtccactagctattaaatatcgaaagcccattaaaaacagcccaagcactagcagccatcaaaagcccatgaaatcatcacgtagcagccatatgacaggcccattaagaaaggacttttgtagcccggttagaagatatatataagcacaccgcaaagcaaaccctaacatcaatgcacgccattctcagctgcggcggcggcacaatcgtgcgactgtgcgaga

SEQ ID NO: 10757 - DNA, 888 bp, Oryza sativa
  Intron number 1 from transcript LOC_Os12g32870.1 (locus LO C_Os12g32870) derived from phytozome v7.0 (chr-ID Chr12; p os 19838382 to 19839269 reverse strand)
cctctttccacgtaagttttggagaaaatttaacaagaggtagaacctcatggaaagaatcctttgagtctttatctcttttcaaatttctgtgtttttcttgcggcccgatcaaacaatcattcatatgttttttctatgtgttctaatcatttgttttatacttgtatttctatcggaatcccatattttttctattctttttttttcattcctgtgatttaaaatagccacaagtcttgggccaagaacatgtcgccatcaaggtactacgtacctgactcatcacatactcaggccctgtttatttcgcgaaaagaaaatttttgggtgacgtttcaccggatgtcggaaggagttttcggacacgaatgaaaaaactaattaaggctaattaatctgtcattaacatatatgggatactatattacttatggctaatcatggactaattaggctcaaaaaatttgtctcgagatttccatgcaaactatgcaattagttttttcttttgatctatatttaatgcttaatgcatgtgtcaaagattcgatgtgatgtttttgggaaaaaaattgggaaccgggcagtgttccgtgcactggaagcatggtcccacacacagtaatctaacgacgtggtgtgaggcggacctcattgcgttaactgacgtgagaagtggccgttgcgagacaccttttccgtctggaggcagcgcatccaatgcgctttccctttcttcctcctctcgctgctgctctcccagtgcttcggcggtcgtcgatgcgacccaggcctgtggcggagaatcgattcccctcgcctgcagcccccatgctcccccatcgattctcgctcgcgtgtcatcttgcggcaacggtcaggtaa

SEQ ID NO: 10758 - DNA, 960 bp, Oryza sativa
  Intron number 3 from transcript LOC_Os10g30550.1 (locus LO C_Os10g30550) derived from phytozome v7.0 (chr-ID Chr10; p os 15820697 to 15821656 reverse strand)
cgcaatctgctagtgtggttcatcttgagggagaggtatgctagaattctctgggttctacataatgtggcatgtaatccccaatgacaatcaatttttgcttatagaggtggcattacatgtcctttgttttgtggaacactgaatgctaaggatgagtgaactgtttataattgatggagaaaaaaaaactgcacccctttgatttttagaaaatgggataaacccgacccctttgatggaagaggtcttttatggcacttgaaaatgtaccaagaggtaataatgaatatactgtcagatgtactcaaaagtcaaaagagattaagagactaaatgcttccatgttaatgagatggtgagaatggaagtcaatagtatttgatctttaaggcaggtgtttaacattatttagcgaggtattcttaatttcttcacctttttgtttttaagaataaaatatacaaagccaaaactttttctctttagactagtgtttgtcaccttaataccttattacaattgttcttttggtctgcgcattgttgttgtagccatgatcatttgcctacctcctagtttgatacggaagttagataacttgtttctagcctgttggacatgattaaatgcttgacatccttttttttaccttctcaagtaacaaatccttttcctgttgtttcctgattcctttgataaattttagcaacttaacatgtaaatccagttcttgtgaacaggctgatggcctggtggtgatgaggctgtttaacctcagtacccacccaggttcaaatgctaggcttgacttgggtgcacatctctttcgaaacagcccttctcgattttcaaaagaaaaggaaaaagaaaactcattcctgacatggactgttaacttcttgtttttccatcactgtttcaggacaaatattcttgtattgatcattcaacatcata

SEQ ID NO: 10759 - DNA, 429 bp, Oryza sativa
  Intron number 1 from transcript LOC_Os10g24010.1 (locus LO C_Os10g24010) derived from phytozome v7.0 (chr-ID Chr10; p os 12234996 to 12235424)
ttataaggtattagcttcctccgttttatattatagatcatcgctttgacttttcttttcaagttaaacttattcaggtttgatcgaatttcttaacaagagagcaagcactcactcaagctcattaattatttgctcatcgtttttaaactcaaggaataaaaataaattaaataaaaacatacaatcagtttgagaaaacaaagagcaaattgatttatcttttgctttaagtaattattaattcttttcctatcatttgatttattgttaaatatattttatgtaggcatataattttacatatttcacaaaagtttttgaataagatgaacggtcaaacatgtactaaaaagtcaacggtgtcaaacatttcgaaacgggggaagtatttgctaatttgttggttttgcagaataaccttgttag

SEQ ID NO: 10760 - DNA, 911 bp, Oryza sativa
  Intron number 1 from transcript LOC_Os11g47120.1 (locus LO C_Os11g47120) derived from phytozome v7.0 (chr-ID Chr11; p os 27814383 to 27815293 reverse strand)
tcgccggtatcgacctccagatcctctccgcccaggttcgattctctcttcttcttcttcttcttgatctcaaagttttagctgttgtttccggtgatccctggttggttggcgctttttcatttttttttttggcctgatttgggcccgcgtgatttggcctggttgcgtgtaaactgtaaagatctggtttgtctttcttttttgggttcgatattgattactcaatgaggcattggcatttgttaattcgtgagaagatagttctctgtttaggataaaatacaatggtgatagtatgaaatgggggatctgggtacaagtcgtaggacgatgcaatttttgtgctggtaggcattgtggatgggctcactgacaggattttgattttagaatggaaatgttcttggttctgtatgtgaagggtaacttgcaaaggtgcgattttgattggaactagtacggcttattgcttgcagtttggtactggcagtagtgcaaaagaatcggtttctttgttagatctggagactggagttttgtcttgcagtattgtttttgttttttttttgtatgtctaaattgttaattaattcattactggtgtccgtatggtggtgaactggtcatgatgttgacacttgaatgttgtcctgatgcagagtgatttcctctgaaatactacatacaagcagatagttccttttgttacattcacacatttggggtcactagggagtttaaactgactgattttgaattatacaaattgcactatgcgcgaaattaatcttaattacggttctcgtttgacatagcatatttttgtttgaagttaaaaatatcggtttggctgattctgggatttgtaaaaaggttacacaatcgacggacttcacagagctggtaaa

SEQ ID NO: 10761 - DNA, 770 bp, Oryza sativa
  Intron number 1 from transcript LOC_Os12g37720.1 (locus LO C_Os12g37720) derived from phytozome v7.0 (chr-ID Chr12; p os 23130211 to 23130980 reverse strand)
tgcgcctctccaacgtctacggcatcacccccaaggtccgtctccctctcccgatcgacgccgtgtttggaaccctaggtcctcgaatagctacaaggcttcgccagctagcctcccgccggcaaccgcgtagatgctctctgcgcggcgatcaggatcgatgcgatgcctcccaaaaactgggggttgatttggctgctgcggcggcggctcggcgcgttatgctcgcggcttgccattccggttggggctcgtatgggatgagtagcttagcttgccgcgaactctggtatctgttggcactgggctgaatttagaagaacatagggtatataatgctagggtatcaacattattgggcaaagatcttgcctggtgttaaaaaaaaagaaaaaaaatcaaatgatttggtggtctgttcagttggactaatgcttgatgccgtgggtttatctcccgcctcgcttgattgccaccttgtcagggctgtattatgctcgactcctgtaagaaccaagtaatttagtgagatatgactgttgtcatgtactagtgttctgagatgtcaggtgacactttggacaactgaacttaatgaaaaagggctcagatacctgttaattgagctggataatattattccagtgtactaattctttaagtgtgtttctgttgctgagcaaccgcaaaaggttctactgcattctacaaagctgtttttctaactatcatttgtatatgcacttgcacagacatatcttttcaagctg

SEQ ID NO: 10762 - DNA, 510 bp, Oryza sativa
  Intron number 1 from transcript LOC_Os10g05720.2 (locus LO C_Os10g05720) derived from phytozome v7.0 (chr-ID Chr10; p os 2884773 to 2885282)
gcagtgtggcatcgccatccccgggaactgcggaggtgagcaggcttcacttgattggccacactgatcacctgggtaagaactgacaataacacgccggctcctctggattgcgacttccagtggggcccaggtgtcggtgtcagctgggtaagttggtgtcatctggtatgggaaactttgatgttttgtacatgtggtggtgctcttgtcaacattatatagataaggagagaataggacaaacatgacgcttgaatagcagaagagaagttctatccagcaatatcaaaagtacagctgtcattttcaaaaaatgtaaaacaaaaataaaacgaaaaacccactatactagtgccaataaaagaagaaacaaaagagaactacattattgtcaatgccatttgttgatgttattattacttttgtttataagaataacaattgtacttataaggcctacgatttattacaggatccaaggtctaaaacaagaactgattgacttgg

SEQ ID NO: 10763 - DNA, 873 bp, Oryza sativa
  Intron number 1 from transcript LOC_Os10g24810.1 (locus LO C_Os10g24810) derived from phytozome v7.0 (chr-ID Chr10; p os 12687424 to 12688296 reverse strand)
ctggcgggcagagcaggggacgggaggggatcctggtgagcctcttcctgattcatctctctctctctcccttcgggactagttttgtctggaattcgcttgcgttcgttcgttaaccctagcttctcctctagatctggaagaagctcttctcttaatttcagagccttaaccttaatacaagtaaccgtttgtttgttccccgaaatgtttgtgaaccccccatgtcccaagttggatccgcccctgtagtgttggtggatcatggttccgtttgtcgctagattttctttacttggcttaacataatgcatgttccagtggctattctgtttgatttctgatgcctggtgatatagaacaacattttcacattgtgctctgtattgtatattgaagttgttgttatgagatgagctgatggggaaagatagaacacggttcatgcaatcagcgtgcattgtttggctagcattgtttgtcgttatatggcttcctgcaaacgcaacataagtctgttgtgtattcctaacaattttcttctcgcgcagtagctttatgaaatatctggtggttacagcatgacttggtagctatttcttgtgcttatgcgtctaacatctgtcaaacctttcgcaataaattattttttttaaaaaagacactttccttctatgcagtcactttcttttgtttataaaataataaagaaattagaatgaatctccattggttggacaacgacacgatttccatctctgtgtatatcactatcctttcatgtcacaattctgtcaactctgggatcttattttggttgcttattctttattttcagatataataccaagataatacacctgcttgtcaaat

SEQ ID NO: 10764 - DNA, 640 bp, Oryza sativa
  Intron number 2 from transcript LOC_Os08g42720.1 (locus LO C_Os08g42720) derived from phytozome v7.0 (chr-ID Chr8; po s 27027785 to 27028424 reverse strand)
gaggtatactcatctaccggagacagcccctcacggtacgttccacatcctctgtcctcaatctccagcaaaattttgtactctggtttagctctcaactttttcttcaaacttccaacttttccatcacatcaaaactttcctacacacaaactttcaacttttccatcacatcgtttcaaattttggcatgaactaaatacaccctcgatctccagcaaaattttgtatatagttgtcatagtgaaatgttggatgagcatttttcagacatgaaattgttcagaaacgtacagaatctggagtcctggactgttgctcttagctataaatgtagagttcagcacatgggcagcctttagtttattcttttttactagttgatagcagtttggtttgcattgttttccttctgcaccgttgatgattgtaggctgcaagattggcatatcttatctttatagacaggacctgtgattgctgcctttatctacatgttcgatgagactgatgcttattctgattctgctctttagagtttgtactttgtagactagtattttggtttttggctggcacagccatgtgaaattatctaggataatgattggaagttttccatttcttccgtgcagataaa

SEQ ID NO: 10765 - DNA, 969 bp, Oryza sativa
  Intron number 1 from transcript LOC_Os09g14450.1 (locus LO C_Os09g14450) derived from phytozome v7.0 (chr-ID Chr9; po s 8536370 to 8537338)
ccggcgctgccggatctactgggggcctgcttctggttcgtttctctgcccacaccaattcatttgcaacagttgcatcccaacagagattgaatcgaaatgcggcctccattttcgtccccgatttctgtggcaaccacaaactaaaattggaactaaagagcagatttaattcagtttggatttgaattggaggctcatttcaattattctagtccaattccgtaaaaccaactggagccaataaatctgttcgccttttttctctagccaataaatctgttcccaagtattccacgaaattcatcagtgtggaatatttatgcaatgcatgcatgaaaacttcaaatatccatgtcatcaataaccaaagagataagtagataaaatttcaagagtaaattaaccatcatatctatctaaatttttttactatttccccagcaagttcacgtattgacaaactgccatttacagtcaaattgtgcaagatgtaaaatagtagaccatggaacatggtaattatcactattcattattattcggtaattaaccctaaacatggtaattatcactattcatggttaatttgcccaggggcggagctagaacgaaatggagggggtgccatttgcttaatttactctactttatattgagtttaagctgatgcgggtgcctaaatttgtatcgagggtagtgtatacatggtgaaaataggtgagttctagctacgaaattttcttaaccgggtttctggcaccccccccccctcctcaataccctagctccgcccctgatttgcccttaatgagccatcctgaatctaagtactacgatttttgggacaatactgtcatcaacataaggggaatattccctaagtagaatgaatgaagacaagtacccaaaacacctttatatgccattgctgtctaccctccatattagcctcactgttgagtgtag

SEQ ID NO: 10766 - DNA, 560 bp, Oryza sativa
  Intron number 2 from transcript LOC_Os12g41500.1 (locus LO C_Os12g41500) derived from phytozome v7.0 (chr-ID Chr12; p os 25672255 to 25672814 reverse strand)
tgaaggtagtgtgcgcagtgatgggactgtagcgatctgcggttgacctgtgaaattgttgcatatactgtgctacaactaataaactggaagataatttttgtgaattgttgcatataccgtgctacagctaataaactgatagtgaattgctagttgctggcgttctaccatgctggcagtttgattgatgatggaagagagatataaatcgtaggaggatggctagtgacttattattgctgagtttgtcgcgttagctgtgcggattgatggttgaggaaaagcatgaggtctttgtactacagactacagcacattcaggatggcactggctttccattggctactttcgcttttacaacagaagctgcatttgtattaaagttctttttcatatgcattatgatatactctcagtaggataaatgagtctagtataataataacactataacagtagtcactggatagttttcttttccctgttaaaaatgtttgtcttccttgaatccactatatctcattgaatcatcctcttgtttctgtcaaggtacttg

SEQ ID NO: 10767 - DNA, 749 bp, Oryza sativa
  Intron number 1 from transcript LOC_Os09g25420.1 (locus LO C_Os09g25420) derived from phytozome v7.0 (chr-ID Chr9; po s 15236070 to 15236818 reverse strand)
gtttcccaccgccggtggtagccgcttcgccgacggtacgcatcgaagctctctttctctctgccctctctacctagccttcctaggacaggatctgtggtcgaaagggtgatccgtttcgtatctctttggttcagataatcagatcgtgttttgatgtcaagaactctccatcctgcattcattacagttagattgcaaactagatgcatcatacatgtcaaatagcacaaatctgataataggacttctcaaagactgttgtctgttcatctggaagtggatttttgtctcttaagaagacatccccttattttatgcatggcattcaaaaagtattaaaaaatttgttaagatagattaatatatgatatatcttttcgcaaatatgcgagttaaaatttaacttatacaattcgaaacaaaaataataatttgagcatgaattgctattcatagtcaaatttgttatttttgtttctatttgtataagttgaatttgaatttgcatgtttgtgaagtgatatatcacatattgatctatcctactaaattttttcaaattttttgatggcttttccccttaggggatgatttgagttttcctgttcatcttttcgttaagataaaaacaaatgaaacttgttcatcttagataggaacctgacctgacagcgattaggccttgctagttctagtttaggtgtggaataattccaatgttgcgtgtgcttgaccaccaaggacac

SEQ ID NO: 10768 - DNA, 663 bp, Oryza sativa
  Intron number 1 from transcript LOC_Os09g07160.1 (locus LO C_Os09g07160) derived from phytozome v7.0 (chr-ID Chr9; po s 3503044 to 3503706 reverse strand)
gcggcatctacaacgggcttcccggtgagttcttccgtttccctacttctgtagctcgttctgctgattttttttcttttgaatctggattgggcgaactatgaatctagagtgtttaaaatcaaattcggacaaagttttcttaattccacattaaatctaaccggaagaaaaattgaaattgatatatattcgaagaaattaagttctcaatctgatacatcagcttatttaggtttacaattatttatttagcaggcttcatttgtagagtagaaagagattactgctgcgaaggttgtagcggtgctcgacggggaggcctcgccctccccggagccgtggtgtaagaaaggaaggaagtttgtagattaattttttcttgatttattccatcacgaactggccttctataggtgattacaatctgctaatgaataggaactaactgaaacaaacctcaaacattaaggataattcttatctaatgcgagcaacacatgatggcgagaacaccgctgtggcgcaccatgcgcacttactggtctctcgcattcctgcgacgttccaagggaattccccacatagcagatgatgatatatggtagtatcttatttgacccatacactagtcatttgtgctccttggtactaggttttcgt

SEQ ID NO: 10769 - DNA, 979 bp, Oryza sativa
  Intron number 1 from transcript LOC_Os12g36950.1 (locus LO C_Os12g36950) derived from phytozome v7.0 (chr-ID Chr12; p os 22627816 to 22628794 reverse strand)
ggcctgcggcctccgcgtcacctgcatcaagatcggtccgtgtgtttcttcccccattctttcaactctttgctcatctgaatgcgatggctaaaaccctaggaaatcgagtgtggtttgggggagtgcggagatggcgattgtatgtgattgctggttgaattcgaatttatggcatttgttgtgcttattcttgatgaaggggtaaaatattgccgccttgtgatgaatttggtaggggttagggcttttttcatatctttcttgatttgggggtgtgtcaaaagcgtcggcttgttggtttatgtttggagggaggtgaaaggtggccgctttcttgtttatggtaatggagtattgaaaaggttgcctattattgattcagccttcatggggggccatgattgtgggtgcattcttgtcttggttatgttttggtggtgaaaatgctatcatttttctgtagaaaaataatctatcaatgaagccgtgaggagtacttattgtctaattgatgtagaaaaacaatccatcaatgaagccgtgaggagtacttattgtctaattgatgtgaattcttgaaggttctgttgctttataggcttttagatgtataaaggtggtgtcacctacctttttgatttttaaggttgtgatggatcatcaagtatcacaatgtggccttggaaagctctatgccattttggatattgaaattgttttcctgcaccgtggtcaatcttttctaggtgacttttcttgattgacatgtgggaacatgggtccttttcagcattttctttgttagggtaagtgtcaaaccagaaagtttttttttgtgtgacttttgcaacatatgtggtaccccatgtgcagagtttaacttgcttggaggtttctcagtttattgatgtatcattagtcttacactcttactattgtccatcacctggtgttgcagatccatatttaaacacag

SEQ ID NO: 10770 - DNA, 773 bp, Oryza sativa
  Intron number 1 from transcript LOC_Os11g10430.1 (locus LO C_Os11g10430) derived from phytozome v7.0 (chr-ID Chr11; p os 5670756 to 5671528 reverse strand)
cacggcgccttcgcctgcttcgacttcgccgccaggtacacgtggcacatgcacacagacacagctaataatcacactgcccgatgcattacttaattaaataaatactccatatgtttcatattataagtcgtttgtttttttttcctagtcaagtttgactaaatttttataaaaacatattagtattttaaaaaaacatatgttagattttatgaaattagtttggtattttagatgttgctaaacttttatataaacttagtcaaacttgactaggaaaaaagtcaaatgatttataatataaaatggatggagtatttaactaatggattaattggattaattgttgattattgccatttgatgaaatgtgtatggatcacattttcatttttttcatgattttataatgggtttttgatgaagtatgaatacaatgatctacaagtatcggaagtccatgaattggaagctagggtttccaagtggtgcaaggaactctcattttcttcgataatgatcctatgctatccaccagtttgacagttgacgcatttcttaattagtacggactgtacatacaatccaatctgctgatgaaatcaatatacatgtggtgttttttcttggtcaaattgatggttaattttagcagcatatttattcaaaaacttaacctaactagagaggggagttagatagcgcgtttcttgattacttagatttcctcttcagaaacaggtaatttttcctgatttgttccactgtat

SEQ ID NO: 10771 - DNA, 759 bp, Oryza sativa
  Intron number 1 from transcript LOC_Os10g41980.1 (locus LO C_Os10g41980) derived from phytozome v7.0 (chr-ID Chr10; p os 22503817 to 22504575)
catctgcaccctggaaactgtctcagtagaaggaggtaaatacttcctctgtctcacaaaaaataactacaatacacgaatctgaacaaacattcatccaatccaagtttaccctcagaaattggcttttatgggacagaagatgcacatatttaaactcataatcattgagagttaatcaattactctctctggttatgttttggataagattgtagtcaaacttttataactttaattatcaaaattttaaaagtatttagtttaaaagaactagaccaacatatatgtatttgtcgttcaaagttctataataaaaataaacatgtatttatttattctatatattataatagaaaaacaagatcaaagatatattttgaagactgtgttattgtctaaaacgtcaagaattataaaaccgaaggaagtactaaggctgtgttggaggaggagatagagaagattgagaagatacgtaaaacgaggtgagccatttagcacatgattaattaaatattagctattttaaactttaaaaatggattaatatgattttctaaagcaacttttctgtaaaaactttttgcaaaaaatacaccgtttagtagtttgggaagcgtgcgtacggaaaacgaaacaaacaatctccctatcaccccagaacgaacgcagcctaagttacttggttggttaactaaatttggtatctggatggatgcagggagagtggcagcagcagcattagttggtgggggc

SEQ ID NO: 10772 - DNA, 742 bp, Oryza sativa
  Intron number 3 from transcript LOC_Os11g22960.1 (locus LO C_Os11g22960) derived from phytozome v7.0 (chr-ID Chr11; p os 12737071 to 12737812 reverse strand)
ctctgcaacaagccaagggtaacgcacctagtactccgtatctcttgatctctctctcgatggtggttagtagtactccgtaggggtcgcgttgcaccagcaccactccatttgcgagcctgcactgacatttgtgcttgtctcaaaccacaacctcgctgactcgtgtgataccattacatgaatcttttctactagtagtctatccatttcacagtgctgattttgttattcctaatttttttgggcctatttagttcgcgaaaaaaaaatttttatgtgtcacattggatgtttgatcggatgtcggaagggctttttgaacacgaataaaaaaaaataatttcataacttacatgggaaccgtgagacgaatcttttgaatctaattaatccgtcattggtacacgtgggttactgtagtacttatagctaattatggactaattaggctcaatagattcatctctcattttcctccttaactgtgtaattagtttttttatttatctatatttaatatttcatatctgtatttaaagatttgatgtgatgtttttgggaaaaaaaattagtactatcattatgctgaaaaaaaaatcatgttcagtaaaaaaagtttttttatggacaacccaacacggatgcttgtgcaattatacttaatgaagagtagttcactgatgcttgtgcttttcttcgtttcatgtggtttcagaagagggtgaccaggagcctgtgg

SEQ ID NO: 10773 - DNA, 780 bp, Oryza sativa
  Intron number 3 from transcript LOC_Os11g34440.1 (locus LO C_Os11g34440) derived from phytozome v7.0 (chr-ID Chr11; p os 19708896 to 19709675 reverse strand)
tgtccaggccaccgacagtacgtatccacaccaggtttaatgtttggtgtgctcgtttgtatcggggtggccgaaatactgaaattttgaaaattttggttcgaaattttatgaatttttgaataaaatttgacaaattttgaacataatattatcaaattcaaaaataaaaataaaaatttcggccgaaataatatcgtatcaggggttccgatagaaccgaaattttgaaccctgaattccacaccaatctttttcacttatcattttgatcattttgaacatctacacattgggacaaattcaaatccaatataagattagagagagggagcttgtctcctcctttctccctcagcttcctattgtttctccctccctcttttcttctatcaacggtgatccaatagaatagagccggaaaactcgatcgagttctcctgcactcatgttggatccgcacctatcgacatacggtgtaggggtgaaaacggtcacggaaattcccgatcgaccgggcgccgtttccgtttaaggggtaccgtttctaaccgtatcgtttttgactattttttaattttgttttttctaatttcttttcgcatcgtattaatatcgatactaagtagtttaaatgataaatatggtcaattaccggctgatcgagcatcgtttcagaagagatgctaccgattccgaccgtttccgatcgttttcacaccctaatacggtgtacactgataacgggatgtgtctgtcgaaattaatgcatgtgtgcag

SEQ ID NO: 10774 - DNA, 919 bp, Oryza sativa
  Intron number 1 from transcript LOC_Os08g42610.1 (locus LO C_Os08g42610) derived from phytozome v7.0 (chr-ID Chr8; po s 26931454 to 26932372 reverse strand)
gacgcggccggtcgacctcctcctccgtctgcaaggtattcattattgttttctcttctctcgtagccacctccctcctccgcgcgcgcttgatgactgatgaggcggcgtgacatagattggaaatccgtccgaacttggactggttcccttaatctcgttccctccagcgcacacatctagtttctgttggatttcattggtgcgtggtgatgctgttagtacaaatagcatgtgtgtttccaaactaaataaataatactccctccatcccaaaatgtttgacgctgttgactttttaaaaaatatttgaccgttcgtcttattcaaaaaatttaggtaattattaattcttttcctatcatttgatttattgttaaatatacttttatgtatacatatagttttacacatttcacaaaagtttttgaataagacgaacggtcaaacatattttaaaaagtcaacggcgttaaacatttagggaaggagggagtatataaaataattaggcttctgctgaatcctcattaccttgatagttttgttttatttaactttcttcaaatataatggaagaccaaggattcaaggatgcaaacagaatacccgctgactcccttgagctggccggcatatgcatattgggggtctttgtattgctagaatgttacttcaccaatacaaattacaatatttgtttatcaaagatcattccaagctgcataatttcttcttcattcttgtacataagtgacaagcccatacacaagaaattatctcttatggcaggttccttttccatgtaggttttgatgtcggacaacagtttacgatattccaataatatcttagctgcagtataacaccactgcccccattctgttgccctcaaatcagctccatttagagtgtttaa

SEQ ID NO: 10775 - DNA, 1047 bp, Oryza sativa
  Intron number 1 from transcript LOC_Os10g40820.1 (locus LO C_Os10g40820) derived from phytozome v7.0 (chr-ID Chr10; p os 21879783 to 21880829 reverse strand)
tttacggcccaggtgagcaatagtttatttccattttctaagctagtagatccttgtcatctgtgtcatgctgtgcgttgactttggttgattaagttcgatctaaagttttatgtcattaggggaggatgtataatgcagtttctgaagctatatacatttggggaggatgtatttgatcttttattaggttagtgattctattatcttttttgtgctttcctgatttgtatgtgtacaagtacaatccagatcatctgctcactgacatgtgggcccgagggttggcaacagagttgggggaggattagtgcattttcatgtactggcaatgggggcatatttgttttttgtctgatattctcgagatttttttatcaacaagacctgcttgaatatatgcattaacaatacatggattttgtggagtactggagttagagcaaggggaggccccttgatgactactttatgattttaggttttatcaccaacaatttgatttctatcatagtatccacaattcactatttttgttcttggcctgaagaaatttcaggagggttttcactataattatttcagagttctgtttaggtcattttaattcactgaaagtatgtgcaaatgtcagataatcaatgcttagttttgtgtgcctctaacaatgttaggcaccaacatatcagaatagttttgttagcacccagaataattagttctgacagtacatttcagtcaacataggctagttctgtaatcaaattccagtcaaaaagattagctttgttagcaaatgttagtcagtaaagatgagttcaattttttagcagtgagaaggagtagttctattagtacattttagcaagtatatgttagttttgtcatctactaataataaatacttagtttagtcagcatctaacattacttgtattatataaaaatgctaattgagttttttcatatttcaaatgcatgatctgtttttataactctatgcatatactagttttcttagcaaatttcagcaactataaggttagt

SEQ ID NO: 10776 - DNA, 600 bp, Oryza sativa
  Intron number 1 from transcript LOC_Os09g12240.1 (locus LO C_Os09g12240) derived from phytozome v7.0 (chr-ID Chr9; po s 6957912 to 6958511 reverse strand)
ttttgggttcttgggcacttcttgttctagccaaggtgagaggttaaggttaattcttctttagatggagctttttgaaaatgtttggttgttttgttggtggtttgtttgggtttcttgatggttttgtggcttcttttgttcttggagaaatatgtaaggggttgggttcttttggattttatttggggtacgaataattgaagttcgtttctgtgctaatttggttcgtgggttgtatctatcaattgtcttgattttgagggattaatgtgtagtttgtgcgaggaattttgattttggttcaaactgttgttgttgggcgctttcccttgcaaagattccttgtgtttcttccttttgggtgttttgagtcgattcatgccgcgaatttgggttgaatttgtttgccacaatgacgcggaagtgaaattttgaattgatttttgcagagaaattgcgatttgaatacgctccatcgatatgtgaagccatccaagaactcggtggaaatcaagaattcagaggccatctcgaacgagctcaccatctgcttgcaagaatcagcgagtgcgaagttgacgtagacgacgagaagcc

SEQ ID NO: 10777 - DNA, 776 bp, Oryza sativa
  Intron number 2 from transcript LOC_Os08g33120.5 (locus LO C_Os08g33120) derived from phytozome v7.0 (chr-ID Chr8; po s 20578166 to 20578941 reverse strand)
ggcgcccaaatgtttgtacttcttatcatatttacaaatagagcatattttgatttcaattaggtattatatgtaaactcaaagtgatgtttttcttcggtgaaccaatttgcattgtttcaagggaaaccatacacaccttgtcatcttcccactcagtactttcagtttgctctagatgatcacatatgaagtataattataccttgtcttatggatgaaaacttccagtgcacagatttatgccttgcattagatttaccaagaacaataaaacaacaataggataatatgtatcttagtgattatcttgcgtttgagataacagcaagaagacaaacataggaaatgtttgtttttagtaatatatatgtagggattatgtctttcttattctttcacacattgaactttgctgagcttttctggttgaaactccataaaatggtgatctgcttagagtacatttgcaaaatacatgtatttgttgtaataattatgtactatatatagcgtggggacctccctctctgttttctggtcaaaaaaatttatatatacacaatcttatgtactaattagctggcctagcaaattaacagcatgtaaacagtgtccatttgcggtgcttattctgcaaaaagaaaatgataaatgaacttttgtgatcactgaaacttttgctaactgcctcttgcctcgattattgtgctaatatctttttttgttaaatttctgcagggcacagcagaagtggtgtttactaggagaagtga

SEQ ID NO: 10778 - DNA, 1006 bp, Oryza sativa
  Intron number 2 from transcript 13113.m00237 (locus 13113. t00110) derived from phytozome v7.0 (chr-ID ChrUn; pos 861 035 to 862040 reverse strand)
ggtaagatctatcttatacatttattcaaaatcaatttgtactattttcattgtaaatgttacggtgaatttaaaatagagtggactaaccacctagtggagccagaggtttctcaaatctgtagttgcactacacccatcctatatatatagaagaaaataaggcttagttgaatttatcataacatcgctgagactagattaaagttgtgtttcaagtataaatgtattgcctatccaaatttttattttatttttagatatacagatgtgctctaatcaatctacattgttgtaacatgtaatatattccgaccatgcttgatgatatatatttctctatttttatttagttaacatagaaatttctggctcttcaaagtgaatttgttgtttgacattctttaattaatataatagagaaatgttgggtccttgtaagttgtggtcttcctttctcaatatggattgagtggtgttggcttcttgtgatctttcaactgctcaacagtatagcaattatgctttgccttttttgtgtttggcttttaataatgcaataatattataatagtacaagatagatggagtaatggcatatatctggactgattaggattcagtgactactggaggacattgcaataatattataatagtacaagatagatggagtaatggcatatatctggactgattaggattcagtgactactggaggacatttgtttgcacttttctatttcaaacctccacatggagtttgatttgaagttgaaaaacacagaagcagtcactctgccccccaatacctaattgaaatttagttatgttacttgtatatatttgttccactcattgcttactttgattactgaagattgggatgagcatcaatttcagaacgtttttattgtgaaatgataattctaagtttctaactaatggacatctcctgttaatgttgctagaggaacggcccatctcaagcacagataaacccata

SEQ ID NO: 10779 - DNA, 936 bp, Oryza sativa
  Intron number 3 from transcript LOC_Os11g47830.2 (locus LO C_Os11g47830) derived from phytozome v7.0 (chr-ID Chr11; p os 28328186 to 28329121 reverse strand)
tttatctgccaaaagactacaacactgggtaagaaattggtttatccttctcatttgatactatggagtatatggttagatgttaacacatgttgagccagccacggctcaaagactctgagaagctttaaatcttctctcgctggtgtgcctttaatagcgaagaatctacaactgtaatcttcttttgagatgtctaacttctgtcatgtctggacaaacccccacaaagaccccactttcctttcactctactttttttgtaaaaaatatagcaccctgtagtctgtactactgtactctgtacagcatacattggtgttaatattgtacgtactagttatgtggcttcttctggcaaaattattgttctggcatgattacccgggttgtgttgtgttgaagtaactacaagcactagacttgttgaagatctctttcacagtcctaactgttcacttgtttggtgtcttggtgaggtagagtattgtgcaaataaagttgttctttggagaggaggtttggtttgttcacaaatttatttcccgaagaggattggattttactggtgtcttccatgagaagatttattgaagagaagttgatttcaagtactttcatgattttctgaaacatttgaggaatttcaagtgaccattttatgaagatgctactagaagaacttggtctcctagctgcttttttttgaagcatgctacatgttttgatgaaaatgttagttattggctatgcttcatgaggaatcatggaacgttcactgaatcatggaactttggtggtaactagttgagcacataccatgaatatgcaccctcttctctgttgaacgtaaatatatatagtattacttatccaacattttataacaccatatatgtagggagccaagaggatttgcatttgtggagtttgctc

SEQ ID NO: 10780 - DNA, 653 bp, Oryza sativa
  Intron number 2 from transcript LOC_Os11g31530.1 (locus LO C_Os11g31530) derived from phytozome v7.0 (chr-ID Chr11; p os 17961122 to 17961774 reverse strand)
gtcacctgcgacaatagcaactctgtcatccgtgtgtatgccaatttgctctttcctcttgttcttccttgttctgaagatgaaaaagaaattctcagtaggtctaaacttcaaaccatcaggagctgcgatttgcttttctctacgataattttcatctaggaaagagtagaatagctcctcaggtactagtacttcacatggatggaagctaaaaattcagaattgttcattccattcaagattcagaacttaattagaatccaaaatataagcatttttagcagagtgacaagtcaaatatttttaactttgaccattaataataaaaaataaaacaaatcaatctgcaaaattgatgttactaaatttatcattaaataaactatcataatatataactctttttatttaaaacatcttacttttatagatattgttggtcaaagtagcatatcgtaaaccgtgtcaagatccaaaactgcttatattttgggacggaggaagtttttttttttttatagctgcgtcttgctgtaaactagactccttgtgtttttatacactactgaatgatagtacttctataaatcttgtgaatatctgtttcttatgcagggatttgggatcggcaggtctatcaggctctctga

SEQ ID NO: 10781 - DNA, 779 bp, Oryza sativa
  Intron number 6 from transcript LOC_Os08g42740.7 (locus LO C_Os08g42740) derived from phytozome v7.0 (chr-ID Chr8; po s 27047991 to 27048769)
aactggtatggttcaggctcaaaactttattaagccatagtgtacggatagtgtatagataaggaattcattaatttttgtggagataaatctatgttcaaacatttgtgttgtatatttacttctttttttaacctatccttgatgccaatattgcagctatcttctaactttcctcatggttatgagtaaaaactgaggtggtgaaaaaaattgtgcatttaatttacgtacgtatattcagatgttatgtattcagaaacatcaaactttgtggacatcctcatgtgtgactggtggtctggaagcagaagatttgaggatgcaaggaactgtgaacactattaactctttgctgagtcagggctgcaagggctgatgcattgttttttaacaatatattatgacggaaaacatgtattatatgtggcactgtggcttaaacctcataataaacacctcttaatttatgttaaatacttggcattgactccatttttatcaattgatgacttctttttatggaaaaacttgtggaggctctagtgagaacattatgctgctcaagcgtttttgccatgtttacattacaggaatgtttgcctattatacaatgctgttagaattgtataccaatcttcagttcatggctagtccatgaatgctcaaatgtatttaaggtctttatgttgcttgaaatcatctaatcatgtcagatggtttatcatgttgttgatgatccttttcaggatactggctaattctaagccgtgcccaaa

SEQ ID NO: 10782 - DNA, 688 bp, Oryza sativa
  Intron number 1 from transcript LOC_Os09g28019.1 (locus LO C_Os09g28019) derived from phytozome v7.0 (chr-ID Chr9; po s 17012349 to 17013036 reverse strand)
cacgccgagtcgcagaaggcgctgctccagatcgagtatggtttccctccccggtttcccctattttgtggcaaatgagagtgcttgttcgtgattgaacttagtgtttaagcgtctttgcactgcaatttttttcttgatctgtagtcaactaaaattgctccatctgacttggtaaacgcaatccttgttggtatgctattattatttttttgttatatgggtatactagtcagcttaggccctagtggaatttgctgctgctgggttggtgataaggtggaaaagtagtttcttttttctgtctgtggtttagatttaacgctttatgcgataagcttgtgcctttacagtctctcagagatcagtttgctttaaacaaatatgttcttctagcaatatatactatggagggctactgtttctgatggtttagcagatcattgtttacttgggtttcaggggaaggggaaacacgttttgtgctctatgatctatgccatttgctacggattacttaagctactgcctcattttgcattgatgtggtcaatacatgggttttagggttagagagttcagtttctctgtttttgttacctgtttgggacttggcatgctattggtgtaatttttcactttgaattttgtagggataaaataagggagtacagggacgagagcgaga

SEQ ID NO: 10783 - DNA, 292 bp, Oryza sativa
  Intron number 1 from transcript LOC_Os12g01980.1 (locus LO C_Os12g01980) derived from phytozome v7.0 (chr-ID Chr12; p os 579142 to 579433)
catctccaacaaagtcgagaacacctcgccgtgcggtgtgtcgacaagcatcgcatcgcatcgcatcgcatgtccagaagattggataggattgcaatatgcaagtaaatcataaatcctgctcgttcgtcaccgggcatattaattttttaggctaaatccttcaatatcaatatgcgagcaaaggacaaatcaaattagaaaatcagagatcctgctcaaactgcagcgagcaaatcatgaaaagaaaaaaaaacaaaaagcacaaatccatgctcaaactacagcgaac

SEQ ID NO: 10784 - DNA, 952 bp, Oryza sativa
  Intron number 1 from transcript LOC_Os08g40790.2 (locus LO C_Os08g40790) derived from phytozome v7.0 (chr-ID Chr8; po s 25800027 to 25800978 reverse strand)
gctgcagcagctgagggataagatctccggcctaggtaagtgccgtggcgtgccgtgctggtgtatctcatcgggttgagtcggaggtgggggtggctcgttggggtttccggtggggggatttgggtgggttggattggatttggtgctcgtgaggtagggtaatttgatcttctttcgctggatttggtggctccgcgatgagcgaagcgaggggtttagggggccaattcgacgtgaatcgcgagatgatgttagatttgtcgagctttgcgggatccatgttataaggggtttagtatttgcgtgatcaattgatgggcggtgttggattgcttggtgacaagcgcctaatttgatcaagtggcttgttgtttgtgagattttcctagttgtttcattttttttctttttatccgccatatgatatatactctacttgctattcatttgaactttttctttatcgatatgatagatactccacttgcgagcattttgatccttttgtttttttctaaaaaaaattgcgtactcgtttgaaactgtgttttcctttttgaaactgcgttttactcttttttactttgcttaaagttaccttttcgtggttcagcattcaatggttgtaattatttataccacaacaactttaagcctatcatgaattttcatgctttagttggaataatttgtgtaataatagggttataaatggccttaaaaagcttgtactgtctagagttaaagctgtgcccgaattgggaataatatctttttgtggtagactggtagtactgtttctgaatcaagcaaaacaaacttcataacttttgcatagtgggttagtatttgatttaaccaaaatgcatgctgcacataatgtttcttccaataacccaaggatcatcttatagaatcaggaatctcagaacgatccaaggaactgaag

SEQ ID NO: 10785 - DNA, 779 bp, Oryza sativa
  Intron number 1 from transcript LOC_Os10g34820.2 (locus LO C_Os10g34820) derived from phytozome v7.0 (chr-ID Chr10; p os 18519870 to 18520648)
gaggggcacaggcgcttccggagctctactcgccggtaagctcccgagatctgacccctcccgttgtttttttttttgtacgccattttgggtgacccgtttgcagcccagttcgtcggtagtctgtttttcttttcgctctcagtccagagggttagctacttagatccaaacccaatgctctgaacttccaatcgtctggtgattcgtctagtcaggttgtgtatgcctgccgccgtggagaaatatttagggtttggggtaatagggaattgtgaattattagaatttcagtcgatgtgacaattcttactctagtttttgaattcagtcgatgttaaattttctggtcggttctatattttattttatttttaactagtgatatttttcgactaagtttctctgtagatattcttcctagttcgttttgaactattagggtatatcagattttcatctgctacactttttttctattctattggatgcaatacccatgagtttcgtagccatagaacatgccggccataattcccattgatttagaaatttcggtgatattatacatatttaatttttttattagttatcctgattagatggctatcccgcctttatcacgtatgaggcaagagagtctgctaaaatgtggggcagtatttgctgttgttggattattttgtgctgtattatgtatgattgatccagcgagctttatttgaagtataatttgctgatacattatcatcccataactctagggcttgtagctaaag

SEQ ID NO: 10786 - DNA, 876 bp, Oryza sativa
  Intron number 4 from transcript LOC_Os11g28270.2 (locus LO C_Os11g28270) derived from phytozome v7.0 (chr-ID Chr11; p os 15788434 to 15789309 reverse strand)
tcaagtgagattttccattctaacagtttcctcaattttgatacttttgatcatgtaacagtaacggattggtggtgtttcatatcttttaatgctctgatatttgaaagtttatactcgtgacgttaacttttaacatacttgatagtttcacattgcgcccttatttttgagctattttaaacaatatttttttgctggtaatatttgaaacaatattgcctaaaattgttttatcgctgttcttcagttatcctgtgccctgtcaagccgcaggtgtcttagaggttcttccttagctgttcttcagtaagaagttgagggcattaaagataaatagtttcataagtgtatgatctaagtggttactttgatgaaggcagccacatgggttgaaatcatcctttaattgcagcgctaattctcttgaacttggtgaataccaacaccagagttgcctcatgcacattatcacagacaactccttactattttactttctgatgcttttacctgatgttttttggcgcttgaagttgtagtatcttaaacaagatcaaagagcatgatcttgagtgtaatgttggcatctttttctattgcaagccatagcttggatttttccaaataaactggagtagaatgacttgcatccaacccaactcttagcaagtgtgatttagtttagttcgttgaatttcttgttcattgcatgatgatatggactgttttggtattttggacgacatatattcataatgtagctgcttaaagctgtctattagtatatcttatctttgacgacttagcagcattgttttctgtattatttattgtgcttcaccttttttttcagtattatttgaagactggaac

SEQ ID NO: 10787 - DNA, 1015 bp, Oryza sativa
  Intron number 1 from transcript LOC_Os09g22440.1 (locus LO C_Os09g22440) derived from phytozome v7.0 (chr-ID Chr9; po s 13553150 to 13554164)
ggaccgagctgagcggcgccgtgctccgactcaaggttttgcccccaactcaggattggaatcgtgtcgcggggggcggtttccgccggatgtcgtggaattaggtggaatcggttgggcgtgtggttgtaaattagctcagtgtaggcgtggggagtgattggaactattgatgaatgggctatatgggctatcacggatgcttcagcctaaattaggcagaattgccttaatgtgtagttgtagcttggttgtacattaggcagaattagctcagttttgccgggtgtcgtggaattgggcagaattgattgggtgtgtgattgcaacttagctcagtgtaggcctggggagtgattggaactattgaagcattcagtctaaattaggcaggatcactttcgtctatcattgtagcttggttttatatgagaattgggagtggtagagggtatgaattgatgatgcagaattgattgctagctggttatgtaagtagccaaagctacttttgtagatacagttgcattagtgctctttgtggtgaggattcagggttactgggttagagacctttctatcgaagtcgcactctaattaggcgattaaattttgtattgtctttagtggaacgtgcaattttgtttagaaatttctctttgcttgtatttattttgttgggacaagaaaaaagatctgagcttttgaatgatattctcagtgtagttctgttgatgtaaattatgaaatttgctttatacaactgtaatgtcaactttggtagaacgtgtaacaatgattacacatgttaggtgattcatagacaaaggtagagttgcaacatcatggttacttctgatgacttttcaaaagttttaatcttttcttgttcatgcaaagtgcatatcaaattatcagcattggcagttaagatgattgttgttattatgagtttgttcttaacatattttattttttgttgttatatgcagactgcttcagctaagagttggac

SEQ ID NO: 10788 - DNA, 649 bp, Oryza sativa
  Intron number 2 from transcript LOC_Os10g36810.1 (locus LO C_Os10g36810) derived from phytozome v7.0 (chr-ID Chr10; p os 19633062 to 19633710)
tggtaagctctcctgttggacttctgcttctttgtacttaacatctagtgattactgctgtgcacaccgagggcgcgttctaaaatgcgttttgaaactgatgattaaccgcacgcaaaatgacaaatgtgattagcatatgattaattgagtactgttaattattaataactagaaaaatgggtttatttgattttttaaagcaacttctgtatagaatctttacgcatgaaacacaccgtttaacagtttgaaaagcatactaacggaaatcgaggaattaataaaaccgaaatggagtttagaatgtgccgagtaggactaggattagtgtcatatcttatttgacgtacaattatagttgacgtaatggtggccataactgctgttaaaaaaggcatcttttgtggatactagatatataagtgcatttggtatgattgccttcccttctttgcaatgctatgaattttatgtacttgaatttaatgagcagattaggtcattctttttgccattttaccatctggaaagtacatccgtggtaaaatttattgggtatttgcatgtcctgactggtccgctaacaaaccaatagttcaatacgacttatcctgttcttgatgtcatgtttttcaggttggcacct

SEQ ID NO: 10789 - DNA, 1012 bp, Oryza sativa
  Intron number 1 from transcript LOC_Os12g18650.1 (locus LO C_Os12g18650) derived from phytozome v7.0 (chr-ID Chr12; p os 10768602 to 10769613)
ccgatcgattgattgactggccgacccgcccgttggtgcgtgttcgttgatcctttttttgcctctggtgaggaggagggggtttgattcttttgtgttcttggtccaagaaccaaggggggaattagcgggtgaggatttcttggtttcttgtgggtggtgtgccgatcaattagatgtcaggttggatgattggagccgatcatggcgatgatcgcggtcctgatgatcgtctgttcggattggtgttctctgcttaaagatgatgttctcggttttggtgatcctttcatcagaatcggggcgattagcgtggatccttcgttgtttactcgaattggggtctttctttactggtaggatgttagtgggtgtgatcttttgccgccgatgatgcagttggaatcttgcttgtttgtgtgtgtactggttaactgtggatattgttgataattgttggataggataagaaaggtagacttttgtggggggtggagttgggaggaatatgctttgttttgtgagggggtggaagtggctctttgtcctttaccattttacatgttcctgttctgcatcaatcatttcttggtgcaagcctcacaaccgtctaatggtgttcttgactgggtttgggggcactgttttgagatttcagttgttttcttcctttgtttccttgatttttggaggttgttttgcatctgatttagtgtctgtttgccatccagaagaatatggcatctctatatgtttggtcagggtgatatgctctgtttgattgcattgactttgggaatgctttcaattattgatatgctctgattgtttgtttacaagtgttggatggattctttctcatccacttttctgattcggatgaataatataacatattattgtttaattgtgttaaactaaggtgtgctgatgagcttgttagagaagttacttaacaattaatgattgtagttacatgtcttgattacattaatgcattgcacattacaga

SEQ ID NO: 10790 - DNA, 779 bp, Oryza sativa
  Intron number 1 from transcript LOC_Os08g41850.2 (locus LO C_Os08g41850) derived from phytozome v7.0 (chr-ID Chr8; po s 26429071 to 26429849 reverse strand)
gcactaataagtgagtattccctatttctctgtagcatttaggtagactctggactctaatctatttatcttttgaatgagaaacagagccttctatttaatagttttttatttactgataaacttgcaagagagaagaaaacaacattgtttaactactttacaaacccaattgatgagagcacaaaccaaccaacaagattcgaatagattttgatcctaatgaaattcttttcagcacgatgaatgacaatggaggatatgttggtggatgcagttacatttgtttctttggtttaagatttgtttccgttgatttgtcactaatttgctactttgcatatatagctggctgctcacttgacttttggctaaggcctaaaagaatgcactttgtgctggcaaagtactccttttttttttcttttctatcatgtgaacatttaatttgacttgtaagaggaaggggaaaagaagggagtaagaggcagtttggtctcagaagaatgcacttttttctttaccctgcctcttacggtttgtggctgcaatggctagcagtgtatctggttcaagaagtcttatcgacgttgttccattcttctgatgaccacactggatctggtcatttgttgcatgatagaggatccatcatggtgtattcatgtagtcattatctccatgctttccttcatgctcagtgaatggagactgaagactgaaaactggttggtgctcttgcaggtgagattgaagatataaaattggtcagggctctg

SEQ ID NO: 10791 - DNA, 768 bp, Oryza sativa
  Intron number 2 from transcript LOC_Os11g03510.1 (locus LO C_Os11g03510) derived from phytozome v7.0 (chr-ID Chr11; p os 1357029 to 1357796)
tctactaaggtgactccacgtggtaaattttaagttatcccctaaacgtagggttaataaatcacttttgtcgataatttaatgtggttacacttttcagacatttctaaggttctaagaaatctatgagtaataccacaaaggcatgtaactgaagtagaaaagaaccatgctcttcaaaggacagaagaatttaaaacctaataatcctttttgcagtgtaaataacgatggaaccacatatatatctatgttggatttttcatggtaatggtactttcatgtgttcatcctcatcccgtattgaactttttttttctacgtgcatcccgtattgaacttttttttttctacgtgcatgaggcattatctaaaaaaatgtggatgacaggattgatcttaacttgcataacggtactgcatctatagtttgagagttttggatgaggtctgatttgaatatcccatctgatgtttgatttttgtgtatgtttattttgaatgtgactgtacccattgaaaaatcctacaactatataaatcaccaatttgtgatagcacattatttttaatttgtggcccaattaccctgcatctttcaggtgatactaccaacaaattatgcaactaattactccattgataaccagatgttcattataaatttttaagcatacatatgtccatttattaactggaagtatctgaatattaggcattctattgatgcatactcatcagcgacagaacatattggactcagctttg

SEQ ID NO: 10792 - DNA, 591 bp, Oryza sativa
  Intron number 1 from transcript LOC_Os10g25690.1 (locus LO C_Os10g25690) derived from phytozome v7.0 (chr-ID Chr10; p os 13234183 to 13234773)
ctctcagcccattgcaacccaaaagtccaacaaatgtgagcctccattgaaagagtagagagtagcggctattgaggaggagaagaaactagaaaaacacaagagaaatgagaggagagtggagaagaagatttgcagtttgttaagcttggtggctcttacccgatcttcattaaattagcgattggaggttcatatgtggttggattggttcctcactttgagcacttcaatctagttagtttatgtgaggattggttgagaagagcaccagatttgaatagtagtttatcaggtcgagttactgcagttacagtttgtacaacatttagtagaatgtcagttcgaggggtcaaacggtgtccaaatgggctgtttttggacagcttggaagggactcatagaccatcgtttctgcctcatacaatttgcatacatggtttgggatatctcgtctgagaaccaaagaggacaaaaatatactatttctctaattgtttattgatatacctcttgttagttttgatggttgatgttgtgataccaagtgtgtaacttgatgttatagctgatgttgtgatgtgcctctag

SEQ ID NO: 10793 - DNA, 864 bp, Oryza sativa
  Intron number 2 from transcript LOC_Os10g25690.1 (locus LO C_Os10g25690) derived from phytozome v7.0 (chr-ID Chr10; p os 13234973 to 13235836)
ccggagcaggcatcggcccctcatcaagtaatcaagtaagtccctcaaatcctgtctctttccctaatccctaatcttctccatacgtgtggaaattttaatcttcttccttgagcattggcctgtagcatttggtagttgaaaacattgaaaacacgatctgaaaacaagtgaccatgattttccttttttgttgaatttagtgaacaatcaaataattacattacattgaggtgatcttcttttgtgaacttttgaataaaatttctaacaacggttgctgtaaattatttatttactatggaagcaaatgtatgatgctgctgttgcaaatgaaatcttcaaaatgtgactactatggaagtaaattatttatttactctcccagggagcttcaatttcagcccacggagaccctaatcgagatcctgaagatactacgtgcaggtgatgatgccttcttcagagaccatcttagagcttgagtaaggcaaggtttttgttgtttcacatcaccattaatgtctttgtttcataagactgaatttctttatgtcccttagttcataatgcattgtttcatgtctgcatgatttaattgcatgatcatatggttggatgacctgaattacatgctgacgagcgaaacacatgagctactcgagaggaaatactggcaagcgctgccatagaaggatcatgtgccaaattaaattaaatctgaagcaacaatcgatctctcatcagtagtttccttgcacaatttcagagatgccgtgttggtgaggacgtgaggtgctcccattctgttcttttgttcgcaaaatagggatttccgaggtggagagcaggacgaggcagctc

SEQ ID NO: 10794 - DNA, 526 bp, Oryza sativa
  Intron number 2 from transcript LOC_Os09g36770.1 (locus LO C_Os09g36770) derived from phytozome v7.0 (chr-ID Chr9; po s 21216230 to 21216755 reverse strand)
tcaaggtgcacatctatatttcaatgattctcttcctttcatactgtataaaattttatcatattgtcatataatgaatacttgtgttgtggaatgtgtggtgctgcttattaacagatgtctacaccttacaaccaaaatggcctgggaacagtttggctcttgctgttacagaaaataatttgacgacggaggcattgatgaactcatttagttttttgtgaagtcctaattcagttagtctcaaccacatactgttaatatgccatatataagcatctattattttatttgggtgtttaaacgatatctttcatgattttcaaataaaggcaacctttcagttggtgtatgatgacctattacactatatatatgcatgtacatgtccattgataccatatgtactggaacggcacacatttgagtttttcttggtgtaatgcaccatattgttgtgctgcatgggggtaatttcttcctctgattgcctttcaggacgtcaaagttcgcccacttgtcgaat

SEQ ID NO: 10795 - DNA, 602 bp, Oryza sativa
  Intron number 1 from transcript LOC_Os11g12560.1 (locus LO C_Os11g12560) derived from phytozome v7.0 (chr-ID Chr11; p os 7056387 to 7056988 reverse strand)
ggcagaggctgcggccctaggggcggcggcaggatgtgagtccgagaggcggaagaggatcccgatgacggcggtagccctatggatgggggaggcctaggatccggcgaagcaaaaacggatcctatcggttcgcgtctggtcggctagttatgactagatgacgactgatgaatggcgtgaactcacctgaagcagatgaagatggcaacatcggaggtacacaacgacggtgcactagggactgcaacaactagacaacttccactcgtgaaccatgggtgtgccaaggtagtaggtttgttctttctttggttatgtgttctcctctcgtggagatatgagtctcagtatccttatattattttcgctatgtatatttttcgtggatataaaggcctgattaacgaatccattataaaaaaatccgtggtacaattccatggctcgtttcctcaaataaaattcaaaaacttgtggaagtcagtggatgggcccgaacataaacttcggttgcctcttgctccaaaaaaaaaaaaaaacacacgctaatggctgaaattttgctctgtagacactggcgtgaatatactggatttgct

SEQ ID NO: 10796 - DNA, 867 bp, Oryza sativa
  Intron number 1 from transcript LOC_Os10g02260.1 (locus LO C_Os10g02260) derived from phytozome v7.0 (chr-ID Chr10; p os 807859 to 808725 reverse strand)
aagaggagaggcctctgcttcctctccaatctcaggtattctcttctcttatcttcttctatcaagatatacaatgcttcggtttgatagttgcctcagctgagaacttgggacagaagagaatttctccatcagttgtatcatttctcctttggaatttaccttcagttataacatctgacgacctgcaggtcttaaatcaatttcaaaagagaaattcagcaatttggctatcttatatgtttttattggacaataattgggatatttctgaatatccagaaggataaaaagaattaatagtgcgcagtacacatataggaccccatgtttgattacacacagaaaatgagagatataccaggtatccatatttcctaaaggagtgcatcaacaatattatgagttctgagtgaaaaataagaagcaagaatatggtctcctattctcaagttgtctgaaaagattttgcagctttctttttttcctgagccagctttgctggttttatattaaacggggaggaaactgtacagcatcaccgaaaacggtgagaaacagagaaggagcaaaagaaaaaaaaacagaggagacgacggacagacaagagggagcagagaaaaaagcagacctacaagtatcgcaggaaggctacagcattaatctcgctaaatcttttgccccagatcctatccatgtgttggatttcatccatatcttcgtcacctagtgtggcattgcgagttttttgaaaactcgccggtttcgttcacaccaaatctcccaaacttatcagcatgtaaagggagcactttgattttgcagctttcaattgaaaactcaaggatttctgtattctaatgcagg

SEQ ID NO: 10797 - DNA, 913 bp, Oryza sativa
  Intron number 1 from transcript LOC_Os08g43850.1 (locus LO C_Os08g43850) derived from phytozome v7.0 (chr-ID Chr8; po s 27662262 to 27663174)
cgaggacgccggcgccgctggtcgcgagattggaggtcggcgcaggcggcgggccgaggagtcgaggccgagggagcagcgagtcggaggccaatacaacgtcttgtttgggctttcatggtttgagtccaggacggtgaaaggctcaaacacaaattttgcaggagtttgctctgcgtgtatctgtatttcaattcaagttatgtatatccctttcactaaacaaatataactaacaagtttctgtctttcttattcgcaacatgttttgctgataaattcattcaacgaatgctggtatgtcgtatcaacatgctgattgttcgcctgacaactcgagcctttattttccaagcaccgggaggaggcatgaaattaatgataaaaaaatagctatacaaatttttggtctcttctcttgataacaaacaatatcagcaattcagcacatagttgcgtttagcaatcttgtcaagcccccttgcattccaaattaaaatgaacgtaggattcattggggacattgacagggaggatcacactacaggatacacattcaaattaacacaggcaggtcaggtcagaagatagtccagaatccacaagataagagttgcctgcgacaaggaattgtaggtgttagaactgaacattgttaatctagacaatggaattaagaacctgttcaggaaattgattcaaagtagagtttcactttccgactcctacttcagcttgaaggtagatttgcgagctctaatcccctgtgcttggcacccgcgttttagagaattcgccgatcgttgaaatagtctcccaatgtttatataaacatgagaaaaatgtgtagaaatatactcactgaaaaataaaaacaggattcagtccatcttctattgttgattacactgtc

SEQ ID NO: 10798 - DNA, 621 bp, Oryza sativa
  Intron number 1 from transcript LOC_Os10g35980.1 (locus LO C_Os10g35980) derived from phytozome v7.0 (chr-ID Chr10; p os 19160938 to 19161558 reverse strand)
ccttcgtcatcaggtggatcaacttcttcaccgtcagtcgccttccactcctcgcttgctgctcagttgccttcggctcgctgcccctcctccgcttgctgtgttgagcttgagccgcctcacggtttctttcctctctgggctggcggctgatttgctgaaaatgagttcatattgctgccgcggcatttgtaggattcgttgtttggttgggttcctcggctgtttctgtttgtgaagcttagctttcctgcaccgaattcagcctgtttgattcaatgcaacacatggattttgagttttcggttctcctaaatgccaaattacaatattcttttattgcattttttgccttcacatttgctctgagtttcttgtcttcctaatttcttcttctttcatttagtggctactctcaattaatcaatttcacttcttttggatactagtagcactcagtttccagtttaatgttggcacatatccaggctccacaaaatactccacgaccatacggaaagaaacattgcatctttcagcatcaatgcattttatgacactcttaaattctcttcttggttggcagatactggcactactggtggtggggttcgggttctg

SEQ ID NO: 10799 - DNA, 575 bp, Oryza sativa
  Intron number 1 from transcript LOC_Os09g21340.1 (locus LO C_Os09g21340) derived from phytozome v7.0 (chr-ID Chr9; po s 12883971 to 12884545)
gcgtacgtgcgctctgcttctctacttcacttcagggtttcttaatttttctgatctcgagttctcgattgctgcttaaagtgttctttgtgatttgtcctttcgtgttgttttttgtccatgcttttgtttggttgatgcttgagtttttcatcggtggatacgtgtggtgatcatctgtttatgtgaaagtggaatgttttagtactgaacttttggcctacttttggtttgatgctgatgcttttgcgtataaaattgtgtattagtttgtacgacatgcttttgttcttcttttctctcgttagttctagtattttcttactttgctcagctgaggaaaaggagacttttgattaactagtctataaagattaagttcaccttttaaagttttaatccatcataaaaagggttttgaattgcaaattctttatgcagttgcctagcagtaaactgtgtgtatgttcagttcagagatgtgttcaagtatatatgctattttttttctctgaacttgttatcttatcttatatgcagccgaggccattatattaggattccagcatttcatt

SEQ ID NO: 10800 - DNA, 867 bp, Oryza sativa
  Intron number 4 from transcript LOC_Os11g40540.1 (locus LO C_Os11g40540) derived from phytozome v7.0 (chr-ID Chr11; p os 23722142 to 23723008)
tatcaggtaagaatgctgctattagcttcaaaaactgtttcagtggatgatgtatcattgatagatctgagtaactatatgtacttactcatttttacttgagtaatatctagttataatttataactgacatttgacaccatgacaatactaactgattgataggtctgtgaattaggaatcattggatttagttgtggacagacactgaacatgcattatagtgaccagtcaaattagtcttcaatatgcgaggctgtttgtttgccgtgtatccagctggcccaagacaagtaggagatttaattagttgggacgtttcattattttcttcttaccttcaaaatctatgatataatgtcttatataatgaaaaccttccagattgaaaagtaccaagtatataactaattagtaattaggcatgcttggttgacagggatttctttgggatttaattctatttcaaacttaaatttaatcctgacaatctgaactctaattgccctacctaaataggctcttgataaataacttgagagctaagacaagaaagggaagtaaattctacgctgtttcaggtactaaagcatttctagctaaaaaaactgatcctaaagaagtttgtgagttgtgacaattatggacatgacataagagataaaacaagtgagtgatgaaaaatttatgatcatgatatgtcatgcaaccaaatgctgttttgaaggataaaaataatcaaatgttgataggcaagactaaagttgtgagaatctaatcagtgtttgttgtttatgtataaattttcattgtaaatgtgtcttgacatcagatagatctgcaggagaaatagctcttattgcggat

SEQ ID NO: 10801 - DNA, 571 bp, Oryza sativa
  Intron number 3 from transcript LOC_Os11g10530.2 (locus LO C_Os11g10530) derived from phytozome v7.0 (chr-ID Chr11; p os 5766654 to 5767224 reverse strand)
tcgtccagctgggtttctctccctcgtgagcacaggtatgatttcctccatgaaccctgtcttgttcatctgtcttgctcggttttggtttgatttgtatgtacagagacaaagtaaaagaccatctatttaacacaaggcagtaggaaactttaaattagcagtaattgaaactttctgctagataaatgaagaaaattagtaaaatctgcaaatttgtgtagcacctgttagatgattcttgtattccttaatctctgattgtgaatactattgggtgactgcagattacttctgtttttcaagcatgttttatatgtcaaatactcaaatgcttagaacacctactgccttgattcctctgtctgtctgcatatgctcatgtcttgattcagttgttgcccataaaacataaatgcaccatttctttttctgagagatattgcaggttattacctttttaaaacaattattgtatattttcttcctgtcattataccatgatcattcgatctctccatcatgttaacctgcagaatctggacctgggtgattcaacgaacagtgcaag
